United States Patent Application Publication US 2006/0134663 A1 - sequence listing, part 29

SEQ ID NO: 47385 - DNA, 821 bp, Homo Sapiens
agaggtaatccagatcatgcctaaaagtaatatattcaaaaccacccagcagtaggttttgttaacaacaaactggattttaaaagttctgccatgttaagtggccagcatttcatgaaggataacatttttatacagaaggcagtcaagctcaactcagagccatggaggcaagtaccttaattagttttatatagtcacaacggaaatatattttctagtgaattcttattggaagccaggtctctcctctcattagatcaaaagggacttatgtacatacaacaattgaaagtgtttgctcatgaaatcagttataaatatggtgaattttttctggaccataggaatattatttcaaagaaatattacaacttaaccattaaattagtacttgaagttgagcctttgtggtgggactttttaaaaaaatgcctttttaaagcattaatggctaattgaagtattttatgactcctcattcctggcccagagggttgtctttgaaaccctgtttctaacccttgtgttgtgtgtttctgtctgaggacagtgggtgtgtactggcctcccgggagccactgtgaccaggcctttgagctcttgtcatctgtggagagaatcatgcaaattttaaaagttcttccaagagacttccatgtcctggttattaacaaaaaaggaaaaatgtaatactcgatatgattctgtaaaagtatttttttctgaatagtctaagtttaaacattatattaaacaaaagttgtgtgctgggatgtgaagcagagaatacttgtaatggatattttgtctctgtacac

SEQ ID NO: 47386 - DNA, 585 bp, Homo Sapiens
ttttgtgcaaaaataaatgaatggcaatagattttaaaaaatcttattatgtacttctgtgtgaaaaagtctgtataatatttcccttaaatatgcattattttacttgtgagttttttactgaattaatctgaaatgtacaagccctggatttgctacagagtgagaagttattttatttttttttatttttaattttggaaattctgcagaaatcagaactcttaccatggtttgaacaaaaaaaggggaaatggggaggggaaaagggtgggattgtccagcatgcttgtatgtatatttcagaaccttttttaaatgtaaaagctgtacatttctgggaagttctgaatttcttttgtttccttttttccttcaagcattttgcagtgagcttcttttatatatagcaaacaatttgaaagaatacaaaaatatgtgaagttcatttaaaaaaaataactacagtatagcgctggtacagtacactaaaagactttgataaaaagaaacaataataaaaggcctccattttaaatgtcattcatatataccttgtggatgagagctatatacttttacaca

SEQ ID NO: 47387 - DNA, 696 bp, Homo Sapiens
tagcacctatccctgatggggctgggggacccatatttaatggccctcatgctgcagacccttcttggaactcactgataaagatggtttccagctccacagaaaataatggccctcaaacggtgtggactggaccctgggcacctcacatgaacagtgtgcatatgaaccagcttggggggtgaggatcagcttgttagcctgcagattccttttcatttggaggaaatcacaagtggccgaaaaaaaaaattatgctcccaaatcattctactgatgtgcttgactgaagtgtgtaggctttttgcagaagatcttactaactgacctattttctgtgaacatttgtgactgcccattccccatcatcatccgttttaccttagttagcatttttcttatcatttttctttttttctttccctcttcccctttggacataactttctgttgaagctgttctttggctggttggttttagtactgtaaactgcttctgagcaaacacggaaatttagcaaaattatgtaaacttgatcctgaagttttagaatggcaaataaatgtacaattgtttacataacagaaaaggctaagcagaaggtaaatttcaatatgtcagtatagaggctctactttatgtagacttaaattaatgtgagatatgtaccttcatattcagaaatctggatgttt

SEQ ID NO: 47388 - DNA, 565 bp, Homo Sapiens
gtccggctggaggttctgagtgacatagacgagatgtcccggcggagacccgagatcctgagcttcttctcgaccaacctgcagcggctgatgagctcggccgaggagtgttgccgcaacctcgccttcagcctggccctgcgctccatgcagaacagccccagcattgcagccgctttcctgcccacgttcatgtactgcctgggcagccaggactttgaggtggtgcagacggccctccggaacctgcctgagtacgctctcctgtgccaagagcacgcggctgtgctgctccaccgggccttcctggtgggcatgtacggccagatggaccccagcgcgcagatctccgaggccctgaggatcctgcatatggaggccgtgatgtgagcctgtggcagccgacccccctccaagccccggcccgtcccgtccccggggatcctcgaggcaaagcccaggaagcgtgggcgttgctggtctgtccgaggaggtgagggcgccgagccctgaggccaggcaggcccaggagcaatactccgagccctggggtggctccgggccg

SEQ ID NO: 47389 - DNA, 745 bp, Homo Sapiens
  misc_feature (717)..(717): n is a, c, g, or t
cacgagggaagaaaagtaggtccagccttaagcagcacagatgcgctggtagatgcatagtcaggaactttttttatttcttttaggtctagggacaggagtgaatagaaagggaggagagctctattatgttctatacacagattaggagatgaccttactgggtacacccctctaaccagtgcttacaggttaatgcatgttaatgaatatttttgcagttgtaaagcataacaattacaactacacatctatttctaaagaataaaacaggaccatatttatttacttctgtcaactatagaaagaaagaccttcagctgtatttccacagatttctcccaaggaaaaggctaatattagtcactactgttatcacatccctttgtataagttttaaaaagagatggagggagatcttcatttctttgaggagatcagtattgtaacgtatgtgaatagatgataacaattaatattactaaaagtcccacatgagagtcctgacgccctctccatgccccacagtaatgtggcttctttcatgggtttttttttcttctttttagctgatctcatcctaagcatgctttatttttccttgaaagctaggtatttatcaactgcagatgttattgaaagaaaataaattcagtctcaagagtaaacctgtgtcttgtgtctgtagttcaaaagtcggaaatgattctaatttanacaaaaagatattaaatatacagaagtt

SEQ ID NO: 47390 - DNA, 549 bp, Homo Sapiens
ataagagctgttgccaaatcagtgataatgttcatttaattgtattcttgccagccatgtttactggggtgatagttgttattgtggttgttattgttctttaggggtaggttcccaatatgtggtctttaaataattatctaatggtgtttaaaaagatgtttattctgtttgtcaggtacaaagatatttatgatacatgtatgacttgtctaagttattaacattttctctagccttaggtaatgcatgaaagcacatgtttcagtgccactcacataagaagtgcccggtaagtgttagctattattgtctacttgagttactactttctaaaagtatgttgaagtctttttctgtaattgcagatttgttgattttgcatttgagtattttctatattttgaagctgttagatgcgtagtcatgatttttggtggaatgttttatcaatttttgaaaattgcctttgtctcatataatgcttttcatattgaactatattttgtctgctattaaatacttccaagcctgaaaaaaaaaaaaaaa

SEQ ID NO: 47391 - DNA, 857 bp, Homo Sapiens
  misc_feature (687)..(687): n is a, c, g, or t
  misc_feature (702)..(702): n is a, c, g, or t
aaacgatgaacgggtacctctgaaaggaattgtaagttatactgagaaactcaaggaagccatcgcggagcatgctaaggacacaggtgaaggctatcagacccctaatattattctagatattcagcctggaggcaatcatgtaattgaggattctcacaaaaagattacagcccaaattaaattcctgtacgaggaacttggacttgacagcaccagtgttttcgaggatcttaagaaatacctgaaattctgaaacactgcattcaactgggaattggaaacacactgaaatatttcatagtcttacttccaattgagttagcaaaaaaaaattaataacttgagacttttaagttattaattttttaaaatgtgcttctccatctaaattttgcttagtctacatctcacttgcttatactattctctccattgatgcacatgcccattaacctaggaaagtagttttcaaatcatgctccttagaaggatgtggagtagagggaagggaaggattggtgatagcagagctccaggcctcccttccagtcagaacagttgagcagtttacaaattagtgtcctgcctctttgctagcaaatgcttttagacactgtggcagtgagtcatcctctaatttctatgactgcattttaagggaaaagataaaattcttccccctanaaattcgttaaagtntttgaataatctgggggtcctaatggtgttctggtcatcccctggattgatgctattcctgaataaaaggtataaagctccctattaggccataattttaactttttaaaacatttttattttttttttccaaaaccattttgaaaaaccttttt

SEQ ID NO: 47392 - DNA, 628 bp, Homo Sapiens
  misc_feature (595)..(595): n is a, c, g, or t
agggtcctgccggtgggaccctgtccggcccagtgcctctgccccccgaggctgctagacgtaggtgttaggcatgtcccacccacccgccgcctcccacggcacctcggggacaccagagctgccgacttggagactcctggtctgtgaagagccggtggtgcccgtgcccgcaggaactgggctgggcctcgtgcgcccgtggggtctgcgcttggtctttctgtgcttggatttgcatatttattgcattgctggtagagacccccaggcctgtccaccctgccaagactcctcaggcagcgtgtgggtcccgcactctgcccccatttccccgatgtcccctgcgggcgcgggcagccacccaagcctgctggctgcggccccctctcggccaggcattggctcagcccgctgagtggggggtcgtgggccagtccccgaggagctgggcccctgcacaggcacacagggcccggccacacccagcggccccccgcacagccacccgtggggtgctgcccttatgcccggcgccgggcaccaactccatgtttggtgtttgtctgtgtttgtttttcaagaaatgattcanattgcaaaaaaaaaaaaaaaaaaaaaaacgcgg

SEQ ID NO: 47393 - DNA, 862 bp, Homo Sapiens
  misc_feature (79)..(79): n is a, c, g, or t
  misc_feature (831)..(831): n is a, c, g, or t
  misc_feature (858)..(858): n is a, c, g, or t
atctcacaagcatgaatttgactcccgatggaaaagcttcaacttagtaaagaaatcaatggaaaatcggctccatggngaaaaaacaacatatcagagcactgttgattgatagagtaatgttacagcatgagctacggacactaactgttgagggttgtgaatacaaaaagatacatcaagatatgatcagagatcttcttcgtttatctacaagttcatacagtcaggtgagaaataaggctcagcaaacattttttgctgccttgggagcatataacttctgttgcagagatatcattcccttggttttggagttcttaaggcctgatagacaaggtgttacacagcaacaattcaagggtgccttgtactgtctccttggaaatcacagtggtgtgtgcttggcaaaccttcatgattgggactgtattgtacagacgtggccagcgattgtttcttcagggcttagccaagcaatgtccctggaaaagccatcaatagtgagattgtttgatgatcttgcagaaaagattcataggcagtatgaaacaattggcttggacttcacaattccaaagtcatgtgttgaaatagcggaattacttcaacagtcaaaaaacccctctatcaaccagatattgcttagcccagaaaaaattaaggaaggaattaaacgccaacaagaaaagaatgccgatgccctaaggaactatgaaaatttgggtagacaccttgctagatggtgtggagcaaagaaacctgcccctggaaatttgaacatataggcattggggcttctgtctctactgctgagaagatgacccgaantgttgccctctttcgtgccataccggntttt

SEQ ID NO: 47394 - DNA, 750 bp, Homo Sapiens
aagaaggggcggggtggcgccggtgcagtactcgggaggataaaatgtttttatgtatttcagattattcccttaggatagtctctcagtgccaagttgtcaaaaacatctctattttgcttatcttcctgctctcttgctgccttagggggtagtaaactgaaacataaagtaaacatgcatacaaataaaaaacataaaacaaaaataagcaacctgatggtaataggtgaaagtggtaacctgttttaactttgaattcttgccgggcgcggtggctcacgcctgtaatcccagcactttgggaggctgaggcgggtggatcacgaggtcaggagttcaaaaccagcctggccaagatggtgaaatcccgtctctactaaaaatacaaaaattagccgggcgtggtggcgggcgcctgtaatcccagctacttgggaggctgaggcagagaattgcttgaacccaggaggcggaggttgcagtgagccaagatcgcgccactgcactccagcctgggtgacagagcgagactccgtctcaaataaaaaacaacaaaaaacaaaaaaaacttaaaattctttgcttgttagtgaccttgatcatggttctctttgtacgatagttgggcatctgtatttccacttgtgtgaatttgcctttaaattttggttatgggtttcaccttttaaaataatcaaacatatttatcttttcctgtgtgataggtttttttctgtatcttttcct

SEQ ID NO: 47395 - DNA, 978 bp, Homo Sapiens
aaactgtagagatagcattggcaagacattgtacagatgcaaccttttacatttatatactcttttacatttatataacatattaaagagtgtataaactgtagagatagcatggcaagacattgtacagatgcaaccttttacacaacatcattgtgtaatttgtaaagattcacgtgtagttctttattatagtgattttgggcttgtacccactgaatgccattttttgtgtttttaaattattttctttatcttgttacaaaaactgagatgtggggtttttttttttcagttcacttatcattagaatgtctgaacttttatgtaacattttggtgtgcatctctcaatgctaacaccacatgtttgcctatgacaagtttatagagtgaaaggtatcttctgggttgaaataattcacaaatgggtgaatgtcatctttgcaacacacccttgtacagtcttccttaaaggaacactacagtatatttttagtatctacatgctgaatgactgaatacagacctaagcacagcagtggtcctggtacagtatttaagtgtcggcatacacaggcgtaatccctgtataaagtagtgccaaactgattccagttgtgtaattagtttaaaacccaataaatggatccttttaacaaaaaaaaaaaagactgtctacggagacaacaaccgaaaactaacccacaatcaaacacagtcgataaacaacaaaccacagcatacaaacagaaacaacaagggggtgcggctgaatacatacgccacgacaacaaacagtaccccaccattacgaaagcagctcactactatatacaagcgggcgggtgcaacacagagcgagatagtcagttcgacagacctcggtgggcgcgacccgatgtccgacaatctgttgcaccgcgcgttagtatacctgacaacgttatcagactattacaatccttacagtcacact

SEQ ID NO: 47396 - DNA, 610 bp, Homo Sapiens
ggaggcccgtgggggaataaaggctactttgtccagcccacagtgttctctaatgttacagatgagatgcgcattgccaaagaggagatttttggaccagtgcagcaaatcatgaagtttaaatctttagatgacgtgatcaaaagagcaaacaatactttctatggcttatcagcaggagtgtttaccaaagacattgataaagccataacaatctcctctgctctgcaggcaggaacagtgtgggtgaattgctatggcgtggtaagtgcccagtgcccctttggtggattcaagatgtctggaaatggaagagaactgggagagtacggtttccatgaatatacagaggtcaaaacagtcacagtgaaaatctctcagaagaactcataaagaaaatacaagagtggagagaagctcttcaatagctaagcatctccttacagtcactaatatagtagattttaaagacaaaatttttcttttcttgatttttttaaacataagctaaatcatattagtattaatactacccatagaaaacttgacatgtagcttcttctgaaagaattatttgccttctgaaatgtgacccccaagtcctatccta

SEQ ID NO: 47397 - DNA, 735 bp, Homo Sapiens
gagccgccgccgaggattcagcagcctcccccttgagccccctcgcttcccgacgttccgttcccccctgcccgccttctcccgccaccgccgccgccgccttccgcaggccgtttccaccgaggaaaaggaatcgtatcgtatgtccgctatccagaacctccactctttcgacccctttgctgatgcaagtaagggtgatgacctgcttcctgctggcactgaggattatatccatataagaattcaacagagaaacggcaggaagacccttactactgtccaagggatcgctgatgattacgataaaaagaaactagtgaaggcgtttaagaaagtaggtcttcagtgagattttgggaaagtcataatggatttgtccacaagggggtgccagctgtgttgtatgtattgttagcggaaggggtgataaatgcgttcatgctcttgctaggcctaattcgttttcctttgtgcttgcagaagtttgcctgcaatggtactgtaattgagcatccggaatatggagaagtaattcagctacagggtgaccaacgcaagaacatatgccagttcctcgtagagattggactggctaaggacgatcagctgaaggttcatgggttttaagtgcttgtggctcactgaagcttaagtgaggatttccttgcaatgagtagaatttcccttctctcccttgtcacaggtttaaaaacctcacagcttgtataatgt

SEQ ID NO: 47398 - DNA, 424 bp, Homo Sapiens
  misc_feature (47)..(47): n is a, c, g, or t
ctgtatttggtgctatatctgcaggcccgcttcacttggcgaggagnccgcctgctccggcccctcctgcagttcaccttgatcatgatggccttctacacgggactgtctcgcgtatcagaccacaagcaccatcccagtgatgttctggcaggatttgctcaaggagccctggtggcctgctgcatagttttcttcgtgtctgacctcttcaagactaagacgacgctctccctgcctgcccctgctatccggaaggaaatcctttcacctgtggacattattgacaggaacaatcaccacaacatgatgtaggtgccacccacctcctgagctgtttttgtaaaatgactgctgacagcaagttcttgctgctctccaatctcatcagacagtagaatgtagggaaaaacttttgcccgac

SEQ ID NO: 47399 - DNA, 582 bp, Homo Sapiens
gatgcaataaactgaaagaagccatgctgtctagtcttgaagtccctcatttaaacagaggtcaagcaataggcgcctggcagtgtcaagcctgaaaccaagcaataccgtcatgtttcagccaagcccagagccctaagattacaaacaactatggccggaacctcctcagctctccctctgcagagttccctaccctaagagaatgttaccacctgaacagtcctcggtgaatctgagaggagaggatggggtaaggcagaagcaccagctgtactactagaagggagcttttggtggtagatcccctggtgtctccaacctgactaggtggacagagctcaaagaggccctcttaccgctagcgaggtgataggacatctggcttgccacaaaggtctgttcgaccagacatatcctagctaagggatgtccaaacatcagaatgtgaggccaaccttctatcagagttaaacttttgacaagggaacaaatctcaaactgatccatcagtcatgtagctagctgtagagcttgcaacttaatagcagcagctgcccaatgccatgtgaagtaacaaac

SEQ ID NO: 47400 - DNA, 626 bp, Homo Sapiens
gttttcctcatcctctatccgtaagtgtccttccatgcaaggtcccactctaggtgatagacagggaccccttctactgaacctttgaggaaaggaggaaggaagaaatgcgtttagatcttggatgcagacctttcaaagggttaaatgtaaccatatggatcaaccacatgcacatccttactacagaatccgtcctttcatttcaacttatagcaagctatgatttttatatataaatattatataaataatgtataaaacattaaaagttaactatgtaagatattatttctgaaacaatttagctatatccactatgattataaactgtgtctcgacctgtgttatttacattagctgcttaaaaaagcattgagttaatttttttaaatatcaactaaaatatcatagttctgtggtagacattgttttataatgaaataactgcaactagagaaaactgtataaaaacattaaattgtcagtatttttgtaaggttccattttgtaaagagaataatattcaaagacttttgtagcatacaaagtgaaaacttgtatctgcgaaactatacttgtattaaatgtgctttttaaataaaagctcgtaacacaactaaaaa

SEQ ID NO: 47401 - DNA, 660 bp, Homo Sapiens
ggccacctgagaccacttcatagcaagggaaggctttaagcagttactagaaagagatggggatttggcccctggctcctccagcctgaatgagctatttaatccactgtccatgttcctcatcagtcaaatccaaagtcaaaggatttgaacctgcatctggaaacgtaaccactcacagcacctggcccgccaaggttgggaggattgtacactactttcatttaaaggggaaagtttgataatacggaattaattaatatgaatgagatgcattaataagaacctgagcatgctgagagttgcaattgttggttttctggtttgattgatttccttttttcttagacacatcaaagtcaagaaagatggttttacctttactgacccagctgtacatatgtatctagactgtttttaaatgtctttcttcatgaatgcttcatggggctccaggaagcctgtatcacctgtgtaagttggtatttgggcactttatatttttctaaaaacgtgttttggatcctgtactctaataaatcataagtttctttttaaaaattttccaaacttttctccattttaaaaagcctgttataaacgtgactttcacatgtaaaatgtaaatatttgattagcaactctttctctcaatgatgc

SEQ ID NO: 47402 - DNA, 796 bp, Homo Sapiens
gttcaaagtcttaaccagttttattgtcaaataaactataaatgttatgggggagatcttataaatttcctgggcaagagtgtatgcatacaaagttttcacttttgtgaaatgtaatttttctgtttttgcaaagggatgaggtgattggaattgctttgaccatgctgcctttattctcaaactggcaaacttagcatgttaggtgtattaacctcatcagtcttgaagaacatgtggctcatgagtataacacttctgtagaggactccctgacaaaagtgaagaattaacttctcctccagaacaagtgcaattcagaaggcagctctgcattctaccttgcttgactggaattgtctgaagctttttctggcctcttttctctagtcggccacccctgaagtgctgaggtctaagtggtttacctcgtgctgatagatggccacactctttagagtagttctcataagttctagaactggtagctcggtcgtttcgcacactaggtggcatacaggcagcagcaggtgttcatatccttgattttgagaatttcccctcaagtatgtggcagtaaatacaacaagacactctatgtattaatgtctccattgtcttaaccctgttccaaaacaaaattcacctcctttctttatgtgaatgtattctccataaaattccagtatttaaaaagcagtttactgttctggactttctggtgtatcacaatcaggtaaaagtcactttaaactgaggaaacggcaaattgtgttttaaagctctttgtatttct

SEQ ID NO: 47403 - DNA, 672 bp, Homo Sapiens
  misc_feature (586)..(586): n is a, c, g, or t
  misc_feature (606)..(606): n is a, c, g, or t
  misc_feature (627)..(627): n is a, c, g, or t
cttttttttttttgtgcttcagatttagaagaaaagatcctgtttccatttgaaaggaactgtaagcttttatcttttaaccaactgaacaatacaccaaaagcagcctagggatgagcatttctttgaaagcaattaggttattcacctggtattaaaactatttactgttaaaaaatctgtgacttcatgaagttgatttttaaaggcagcatcaaaaactgaaaaggaagggaaaaaataggcagcttctctgcacttgtttggagctccccaaaacaggagccatggagaagtggcatcaagaccgggctgccctttcgagaacaccctgtggcagttcagagacacgcttttcctacactgcatgcagcccctctttccagcactggaaagaagtggtcttgagcccagctgagaagcacttcacactcctctctcttgttctgaatggtgtttgtgtcagtctgcagctgtgtatggtattatgtcttataatcctgcatcacttctatcctatccagtcatatctaatgtagaaaattagtttccagtgaaagtaatatgtagtgcttttatgatattngtgtgcaatatcccctcttncattgaggatatttgatgtanaggaaaaaaaaaactcagtttcacataaaatccaaagtggcagtt

SEQ ID NO: 47404 - DNA, 756 bp, Homo Sapiens
gcgtccgaacgcatcttgcttttcacatctctcctcctacagccttaatggctgcttgctgccatatgtgacaaatcaccaccaccagtgttaagtgcttctggattcatgggtgagttccctgggcagcccccaggaaggccttccagatctggctccagggtcaccacctgtcacagcaatacctgggaccatgctctcctgggactgtgaggctccttttgacgtacttttgacatcaggcaggtttgggaagaaacaaagccatgcctgctcctgcctctctcccaacatgtttccagcaagtagatgcccctgtgtgtgttttcccttgccttgtttcctgccttatatcttgtatttcgacttattacagagttgagggttcttgcttaatttagatcaagtataaaatttgtatgacttcaagtctcattttatctgaaaggtttttttctcatttaatctgatgtggcattttcgtcatctgaagcatgagtgacaagttgggaatgatgtggtgatttagaatgcagtattggccaagtccaagttgtcaacttaagcgtctgtttaccaaagaccgggaacaggggcccaaacatgtccagtcctcttcttccctctgctggaacctttggggacactcaagggtacagtttgacactgatctggtccatgaggctgcccagagaaagcactgcttctgtatgtctcttgtggaattggaacaataaacccgtacaacctgcaaaa

SEQ ID NO: 47405 - DNA, 820 bp, Homo Sapiens
ccacttgctccacaacgtccagttggtcctgctgccaagagccccgtgcatccaggcggccaagcacaaactgggggagaggaggccgccagcccggaggctgcagcccagaaactctacctcatccacactggtgcagggagccctccttgaactgacctttgattggtttctgcttcaactaccaaaatgttatctccacttccccctcacccgtagaggatcctggccacagacagtttcaagtagtgtcagatttttgttgcttgggcggctgttggtagagtgggcagtgcccgcgccatggggtgctctgtgggcttctccaggagcagggagggtggaggggagggatggggggcacaggagctgggagccccgtctccaggaaaaggagaggggttaagatgcaccgaggctgtagctgggctacttgatcttgctgaaagtgtttctaaagatagcaccacttttttttttaaagcttttatatattaaaaaacgtatcatgcaccaactgtgaatagctgccgcttgcgcagaggacccggggaggggtcccgagaggctccccatgcaacactggaaatgactgttccagagagcgggcagacctggcagagcgcccctggcgcctgagactaccacccactccgttcctgccagaaacgaccctctgtggccgatgggccatgcgggcccctcgcagccaactcagccagtgttgggactggctcagagcccatgggggctggaggggggcagctgggactctggaatcttctttataataaagccttacggacaaaaaaaaaaaaaa

SEQ ID NO: 47406 - DNA, 583 bp, Homo Sapiens
aagaggcagagaagaaccgcaggatgccgaggattggttcttcagcaagacagaggaactgaaccgcgaggtggccaccaacagtgagctggtgcagagtggcaagagtgagatctcggagctccggcgcaccatgcaggccttggagatagagctgcagtcccagctcagcatgaaagcatccctggagggcaacctggcggagacagagaaccgctactgcgtgcagctgtcccagatccaggggctgattggcagcgtggaggagcagctggcccagcttcgctgcgagatggagcagcagaaccaggaatacaaaatcctgctggatgtgaagacgcggctggagcaggagattgccacctaccgccgcctgctggagggagaggatgcccacctgactcagtacaagaaagaaccggtgaccacccgtcaggtgcgtaccattgtggaagaggtccaggatggcaaggtcatctcctcccgcgagcaggtccaccagaccacccgctgaggactcagctaccccggccggccacccaggaggcagggaggcagccgccccatctgccccacagtctcc

SEQ ID NO: 47407 - DNA, 717 bp, Homo Sapiens
cgtccggcccaccagggggctggtgcacctgctgacctcagggtcacagttgagtcatttgccagttgacggagcaagtttgaccttggttctgttgctgaagcaaatttggaacttttctgtctcagtgtgatccactaacccacaggatcatttggaaccttgaatagctctgcttggacaatggggttggggaatagggttgtctttcctatgaaaatgccatctgtagaccttgtgagtcagccgtccagatgtttgcaggtgaattcctctgcttgacatcctccctgtcactttggaccctatgggagtgggcatctccacgcacctgtgtatgtgaaagtcattttacatttcaaagcagtgtgtgtttcttatttttatatttttaactctttattcttggatgtataaagtgaactttttggcttctgtaagtatgctctatgcacctctaatgttttatcatgtatttatatgttgtacacagtactggctgattctgtaaatggatgtattgtacagagaacatgaacgtctcttcctaattttacatcttcagcatcattgcattaaagtggtgtaatctccttctctacatctgttgtcagagccactgagtgctgtgctgctcgacgtgagggtgaaatgattgacttgtgacctgccaggttgcccgatgccctgttgggtcaccggctggacctgctgcag

SEQ ID NO: 47408 - DNA, 883 bp, Homo Sapiens
tttggtccagagcagacaggtcgggccctgggtgatcagagcaatgttacaggccaagggaagaagctttttggctctgggaatgtggctgcaacccttcagcgccccaggcctgcggacccgatgcctcttcctgctgagatccctccagtttttcccagtgggaagttgggaccaagcacaaactccatgtctggtggggtacagactccaagggaagactgggctccaaagccacatgcctttgttggcagcgtcaagaatgagaagacttttgtggggggtcctcttaaggcaaatgccgagaacaggaaagctactgggcatagtcccctggaactggtgggtcacttggaagggatgccctttgtcatggacttgcccttctggaaattaccccgagagccagggaaggggctcagtgagcctctggagccttcttctctcccctcccaactcagcatcaagcaggcattttatgggaagctttctaaactccaactgagttccaccagctttaattattcctctagctctcccacctttcccaaaggccttgctggaagtgtggtgcagctgagccacaaagcaaactttggtgcgagccacagtgcatcactttccttgcaaatgttcactgacagcagcacggtggaaagcatctcgctccagtgtgcgtgcagcctgaaagccatgatcatgtgccaaggctgcggtgcgttctgtcacgatgactgtattggaccctcaaagctctgtgtattgtggccttgtggtgagataataaattatggccatgggaaacattggataattaagggggggggattttggaaaatggattgatcttaaatctggataccgaatatcattggatataata

SEQ ID NO: 47409 - DNA, 562 bp, Homo Sapiens
aatgcgagccaaaaacccagtgccccagctgcgtaaatttaaaaccaatgtgttaccttttcgacaaaatgattcatctagtcattgccagaagagtgggtctcctatttcctcagaagagcggcggcgcagggataagcagcatcttgatgacatcacagcagctcggcttctaccacttcaccatatgcccacgcagctgctctccatagaagaatccttggcacttcagaaacagcagaaacagaattatgaggagatgcaagcaaagctcgcagcgcaaaaattagctgaaagactgaatattaaaatgcggagttataatccagaaggggagtcttcagggagataccgagaagtaagggatgaagatgacgattggtcctctgatgaattctgaagataatctcctaaatcactgacgttgagatgtcatcatcttacatcagactttctaactagtatcaagatcagtgtcagatattgttgagggaagtaattttataaagttacacaaaggtagttataaaaaaagcccagtttgtctttcagaaggtgactt

SEQ ID NO: 47410 - DNA, 610 bp, Homo Sapiens
cttctctgcgctttgacggggccctcaatgtggacctgacagagttccagaccaacctggtgccctaccctcgcatccacttccccctggccacctatgcaccagtcatctctgcagaaaaggcataccacgagcagctgtcggtggcagagatcaccaatgcctgctttgagcctgccaaccagatggtaaagtgtgatccccggcacggcaagtacatggcctgctgcctgctgtaccgtggagatgtggtgcccaaggatgtcaacgctgccattgccgccatcaagaccaagcgcagcattcagtttgtggactggtgccccacaggcttcaaggttggtatcaactaccagcctcccactgtggtgcctgggggtgacctggccaaggtgcagcgtgccgtgtgcatgctgagcaacacgaccgccatcgccgaggcctgggcccgcctggaccacaagttcgacctgatgtatgccaagagggcgtttgtgcactggtatgtgggtgagggcatggaggagggtgagttctccgaggcccgtgaggatatggctgccctggagaaggattatgaggaggtgggcatcgactcctatgaggacga

SEQ ID NO: 47411 - DNA, 786 bp, Homo Sapiens
  misc_feature (570)..(570): n is a, c, g, or t
ctcggctcactgcaatctaggtggaggtctttttaaataacctcatgttacttcaggcaaatctggtacaggagaagcccaagctaactgagctgggtgaaggcttgtgcatcacctggcttgagttccttgctgtcacagatgataggttcatgtacacaacattaatgtttgataaggaaagcattttttttttgttaaaattgaattgtcagtactttacttttttccccccaaataggtatatatagactgcagaagcttcagtcccatatataaacgttcatgtcattttagaggattatatggttgtctccagagaaattaacttacattatcaaaaaattctttgtctaatatattggagtctttaaaagtgttgaagaataaaatattaattagaacaacttcaaatgctaaggtgatgttttaccgggacttaattaaatacaactttttcctttcgaaaaagactgttcacatttgcttccaggtgtaattattgctttcattccttacccccctcaagcaaatgtgaaaagtatactgacctaagattctcattagttntagttcttaaaacgaatagtaaatgatttcacagcgtaaaatttgatgttatttctggaagctggatgatatggaagagttcatgtgcctggacacacagttccctgtaatcctgccatctagggagataaactctgttaacattttgatgttgtgtttttgcttatttttctatgcatagttatgcatttatattctcaaaaatgaaatcataat

SEQ ID NO: 47412 - DNA, 654 bp, Homo Sapiens
tgtccttattttcttctagtattttcttatttcacttttacacctatctttaaaaggaatttaaattttgtttatatacattaactaaatcagtacaagtttggggtgaaaaggaaatttttaatccatctcaaatgtatttggttatattatataaggtagggatttgattttatttcgaagaatttaccaattggttcagtatgtgaaaccaccatttcccctctgattagtaatgctatttttatagaatattaaattcttatgtgtcttttgtgtcttaggccaatttctgggccttctgggttttttctacactgtcaataattatcgctttaattggtgttaatatttggtagtacacaggttctcccttgttcttttaaattttgtgaaatataacttacaaataagtacttaaaacagagcttaatgggtaaagcaacagctgtgtaatcacaaactagatgcagaggaggtcttgccagcactccaaaatctctgtgtgtcccctcttgacactcactgtttcccccagagctaactatcctgacgtatggtaattctccctctgtccttttaagaattattttaccagttatgtgtataacaatatggtttacattttgctcacttttgacttatataaaaata

SEQ ID NO: 47413 - DNA, 648 bp, Homo Sapiens
  misc_feature (617)..(632): n is a, c, g, or t
  misc_feature (634)..(642): n is a, c, g, or t
ggtaatcaatagtggtttagctttcttttctatttcactcgtttctagggttttttatttgcagtttaggaactattaggaatgtcaggactttatcagcaggggtaaaactaccacctggcctagcctaagtaggaagtgaaaagataattcaccaaacaatgattaatcagatagaagttctagtcaagagggatattgttgaagttacctcttttagcctagatacatggattcttttcaaatcaggaaagattagaaaaggaacccaaaaaaccctttaacagtgtgaatctttatagtatttgaaaatgagaagaagcagcagattgtaatttggtttattggatgtgatggacgttctgtaatagaaaacctgaaacgatgattgaatgggaaaaagagactacaaaatttgtcgtaggatgtatacagacttattttctttattacagtattataagaaaacatatgtatttgtaaaaatggtttcctgtgtcaagtatttgtgcagtcagagctgacttgtaaactattcttgtaatagctcattattttgaaagatttatatatgatgaattctggatatatgaccaataaaactgatgaagtataannnnnnnnnnnnnnnnannnnnnnnnccctgt

SEQ ID NO: 47414 - DNA, 796 bp, Homo Sapiens
  misc_feature (722)..(722): n is a, c, g, or t
ggctggtgaggctcacgttggagggcttcgcgtctgcttcggagaccgtaaggatattgatgaccatgagatccctgctcagaacccccttcctgtgtggcctgctctgggccttttgtgccccaggcgccagggctgaggagcctgcagccagcttctcccaacccggcagcatgggcctggataagaacacagtgcacgaccaagagcatatcatggagcatctagaaggtgtcatcaacaaaccagaggcggagatgtcgccacaagaattgcagctccattacttcaaaatgcatgattatgatggcaataatttgcttgatggcttagaactctccacagccatcactcatgtccataaggaggaagggagtgaacaggcaccactaatgagtgaagatgaactgattaacataatagatggtgttttgagagatgatgacaagaacaatgatggatacattgactatgctgaatttgcaaaatcactgcagtagatgttatttggccatctcctggttatatacaaatgtgacccgtgataatgtgattgaacactttagtaatgcaaaataactcatttccaactactgctgcagcattttggtaaaaacctgtagcgattcgttacactggggtgagaagagataagagaaatgaaagagaagagaaatgggacatctaatagtccctaagtgctattaataccttatggacanggcttgcttcagcatctgtatagtctgtattatgctgctgataagactaccgagatggaagaaaagagttactg

SEQ ID NO: 47415 - DNA, 928 bp, Homo Sapiens
  misc_feature (767)..(767): n is a, c, g, or t
  misc_feature (806)..(806): n is a, c, g, or t
  misc_feature (843)..(843): n is a, c, g, or t
ttcccctaccttccagcatgctgtgtgtctcttcactcctagcctttcagaaacagttaatagagatggaccgcggcaagatacccaagctccagtggttccatactggcgcctgcctggtttaggcattatcatctacctgctgaaacagagtgctaatgatttcttcagctattatgacagtcatcgacagagtgtcagcaagctacaaaatgtagagcagcttcccccagatgagataaaagagttgtgtcagtctgtgatgcctgctggtgttgataaaatctccactgctcagaaatatgttctagcaagacggcgcttggtgaaggtgatcaacaatcgagctaaactgctttccctttgttcttttatcatagagacctgcctatttattctttggcgccatctggagtactacttgttacattgcatgcccacggattctcaagattccttatttgcctcgagaaccttgtttaaaagcagaagactgcaagattccttcgcctcagaaaccaatctagattttagaagtgggctggctatagtgagccaacatgatttagaccagcttcaggctgatgcaatcaacgcttttggagaatcactacaaaagaaacttctggacattgaaggattatattcaaaagttcgatctcgatatagtttcatacaggctcttgtcagacgtatccgtggcctcttgaggatatcaaggaactgagagcccgtgcttatgctcttctatgagagagatgaattgnggagaattgtctccattttatagattagtttctttctanattatgaccaaaaatattttgctatttctttctttgnatatggacatcttttctgtaaacttcttcccctagttccatcctccactagtaaaaaataaatactttttaaaaaaaaaaaaaaa

SEQ ID NO: 47416 - DNA, 686 bp, Homo Sapiens
caagtgttcttccagctgagcagaaatttggaaggctattcagtgctgcttagtgtagcagctaataatgttccaacttctatatgatagtttgctttttgttttttgtttttttctagagacagagtctcgttgcccaggctggtctccaattcctgggttcaagcaatcctcctgactcagcctcctaaatgctgggattacaggcatgaaccactgtgcccagtctatatataatagattttagaagaaatttctgccactcagtgactgctttaaattctagagacagaggctgagagaaacttagtagcctgcctgcgcatactgcaagtacagactatataacaagttgaaagagaatcaccctggtatataatattttaaaacatgaaaaaggcattactattgttctggtctaagtactctaacaggacgatgatttctaaccctagcatcatgacatgtatatagtgtgttgtaagacatttgccagctaatagttacagtactgaagcttgtgaatacgttaattgagaaaactttaagcaggttcaaagttatcccatgatagtggcattcttatttgtatatatgtgctttccttttttatttgtatcaaggcatttaaaatgaatattgttacatgtatctaagtttaaaagcatataaaatgaaccctctga

SEQ ID NO: 47417 - DNA, 811 bp, Homo Sapiens
  misc_feature (670)..(670): n is a, c, g, or t
  misc_feature (720)..(720): n is a, c, g, or t
  misc_feature (764)..(776): n is a, c, g, or t
  misc_feature (778)..(780): n is a, c, g, or t
  misc_feature (782)..(790): n is a, c, g, or t
ggggtatatgatggagaatgaaaaactagagtcagacagctttaattgacattgtcaacacctccagttatcaggaatacatttttttactgccttaacctgtagtgcgtagaatatgcatcaatttcttgaaggagattcatgtttttataagaattttcatgtaattattgcaattgtggtcaaataaggaacgtttcctgcttgaaattatattgatttaaatgatgtgtgagatgtttcaccattttcaggcactgtgtaattctattgtaataaactggcaggtatctttgtaactataaatagtgcatgctcagccatgtacactgtaaatagcctttaccaaacgtgtttgacaaggaccataattaacatcacttagtgaattgtgataaagaaaaaaaaagccatgatttattcgatgtgattggcttgtttttatgtggcgccaagaacgaacctgtttaacagctgtaaccaatggtactgatctatccatccaatgttgtcattatatttgactgtggttcaacagtattgcgttgtcagactaggaaagctaaacgaacaaaatggttttagttttgctgaagactggccttattaatggacagctttcctaacaagagattattaacttttatcaggtgttaacatctgttttcangaacatggcagtatgtttacatgtcagaaaagtttgtttaattctatggnattttctaaattgacctgttttaaataaattcagcaaaacgaannnnnnnnnnnnncnnnannnnnnnnnaaaaatggcccgcccgccctc

SEQ ID NO: 47418 - DNA, 809 bp, Homo Sapiens
caagttagcaactttaaatctggaaaaggagattctacacttcaggtttcttcaggattgaatgaaaacctcactgtcaatggaggaggctggaatgaaaagtctgtaaaactctcctcacagatcagtgcaggtgaggagaagtggaactccgtttcacctgcttctgcaggaaagaggaaaactgagccatctgcctggagtcaagacactggagatgctaatacaaatggaaaagactggggaaggagttggagtgaccgttcaatattttctggcattgggtctactgctgagccagtttctcagtctaccacttctgattatcagtgggatgttagccgtaatcaaccctatatcgatgatgaatggtctgggttaaatggtctgtcttctgctgatcccaactctgattggaatgcaccagcagaagagtggggcaattgggtagacgaagaaagagcttcacttctaaagtcccaggaaccaattcctgatgatcaaaaggtctcagatgatgataaagaaaagggagagggagctcttccaactgggaaatccaaaaagaaaaaaaagaaaaagaagaagcaaggtgaagataactctactgcacaggacacagaagaattagaaaaagagattagagaagaccttccagtgaatacctctaaaacccgtccaaaacaggaaaaagctttttccttgaagaccataagcactagtgatccagccgaagtactcgtcaaaaatagccagcctatcaagactcttccacctgctacttctaccgagccatctgtaatcttatc

SEQ ID NO: 47419 - DNA, 702 bp, Homo Sapiens
gacgcccataatttcttccattgctagctcatctgtgggaccaatttggtgtaagcaacctgtggcctgcacttgtggcctcgaaggaagcacaaaccctccatccacttcccatttcctctgcccttttccacctcccccttccatcccaccagctgccagtggctcccagaaagccttattgagccccttgttgacacttggggctgcggaggcctctccctactggtctggcctttcctgagaggcaggtcttccgtcctcagagcctttctggaacaaggagaatgcctgtgcaggtggacacacaggcctggcctgtcgctctcacttgtcttccagcggggagcttcacgttgccgagtggaagaaccatgacctccacttgcttccaaggtgctagggaagtttcagggtacgctggttcccctctccagctggaggccgagtttctggggactgcagatttttctactctgtgatcgattcaatgcccgatgcttctgtttcattcccgaccctttctactatgcattttccttttatcaggtgtataaagttaaatactgtgtatttatcactaaaaagtacatgaacttaagagacaactaagcctttcgtgtttttccacaggtgtttaagcttctctgtacagttgaaataaacagacagcaaaatgggtgccaaaaaaaaaaaaaaaaa

SEQ ID NO: 47420 - DNA, 580 bp, Homo Sapiens
tttaacacgcaattatggtaaaccatggttgacaaacagcaaaatgtcaactccttgtaaagcagcagagtgctcagactttcccgtgccatctgcagagggaacgccaatacaaggaagcaagcttcgacttccaggatatttatcagggaaaggcttccactctggggaggacagtggcttgataacaactgcagctgccagagtccgaacacagtttgctgattccaagaagactcccagccgaccaggaagtcgagctggaagcaaagctggcagcagggccagcagccgccgaggcagtgatgcatcagactttgacatttcagaaatccagtccgtgtgctcagatgtggaaactgtcccccagacacacagacctacaccccgagcaggttctcggccatccacagcgaagccttcaaaaatccccacgccccagaggaaatcacctgccagcaaattggacaagtcctcaaagagatagtgcaattggttctaccaaggcccttccttgagcatttattatttaagtttgaacgatgtaaaatatggtgtagaaattcttgtgaaatattgc

SEQ ID NO: 47421 - DNA, 764 bp, Homo Sapiens
gggatgtaaaatatggtgtagaaattcttgtgaaatattgcaagaggcgagtttaaaattctgcagatggccttatttgtgtatttgtctttttattttatctgtataattttttttgtcagatattctggggttaaagtcacatcatatgtgaggaggaaaagtttaacatgaactaacatttctgcactgtaacgtgccgggcacacactaaactcagttactgtacctacaggtaagtctacatcctctctgacagccacagcactacatcaatccctgacgttagggatacctcatgacattttcctgtttttatggaaactctgagaagctgaatgatacatgcaggggatattttttgagatgatttaaatgtaaaccaaaagatggaagacaaaaagacaaacacacccacacgcagtctttgcagtatctgacagagaactcacaggaagttacttcaagcacttgccagtactatgatattcaagtaccttgcagcatttctctgccattgctttcaatgaggccagaggcatcctggatattagacctattatactgtaagaatataagtataaagtgcgttcatatacatgtgaggttttcttttgcttgagtggacagtagcacctgtatcattgaactcattttgtatcagaagcaatttttgcttgcagaaagctatgaaaaataaaacacgtccctttaaactgcaattgcctatgggaaattaatttttttttttcccccagggaaaa

SEQ ID NO: 47422 - DNA, 617 bp, Homo Sapiens
atgtctctctgtgcatctccattttcctagtctctggagtctcaaaaagagtggcaaagcactttacagtagtaactgaggaatcagagtctctgcttcagcgatatctagtttgtacagttgggtgatcttttgtaattcctaggaggtaatgcatttttaatgttttctgaagctttgtaagtgtgagagagggacaagaagtgcagttctgttctggaattccttattgctttcaacggacactctttgtgaaaaatccaagtaatattttagttcaaacttgatcttgagccaaggcccactgccacctctgggatgggagtcggacctacataccaagtgacaagttcaccttaacatctgcttccagaatggctttgattcagccgtgccaggcaacagaacagggtcagactcctgctctgttattggcttgaagactaggatcccaaaggggttggaggcagggaatatttgaaaattcagactggaattccaggccaaaagctcaagaccaccagcctctcctcctgcctggaaaaataagcctttgtgaaagactgatttaccatgtacaattgtgattgtgaacgttgttgagtaaacctccagac

SEQ ID NO: 47423 - DNA, 640 bp, Homo Sapiens
  misc_feature (565)..(565): n is a, c, g, or t
ccatttttactaaggagactgaagaaagaagttgaatcccagcttcccgaaaaagtggaatatgtgatcaagtgtgacatgtcagctctgcagaagattctgtatcgccatatgcaagccaaggggatccttctcacagatggttctgagaaagataagaaggggaaaggaggtgctaagacacttatgaacactattatgcagttgagaaaaatctgcaaccacccatatatgtttcagcacattgaggaatcctttgctgaacacctaggctattcaaatggggtcatcaatggggctgaactgtatcgggcctcagggaagtttgagctgcttgatcgtattctgccaaaattgagagcgactaatcaccgagtgctgcttttctgccagatgacatctctcatgaccatcatggaggattattttgcttttcggaacttcctttacctacgccttgatggcaccaccaagtctgaagatcgtgctgctttgctgaagaaattcaatgaacctggatcccagtatttcattttcttgctgagcacaagagctggtggcctgngcttaaatcttcaggcagctgatacagtggtcatctttgacagcgactggaatcctcaccaggatctgcaggccc

SEQ ID NO: 47424 - DNA, 783 bp, Homo Sapiens
aaggcccgggtaccggtccggattcccgggatcttctttggagacaaagcactgaagaagaggtcagggaagaaggacaagcactcacagagcccaagagctgcggggcccagggaggggcacagccatagccaccaccaccaccaccggggctgacaccctgccccacagggaatggccttggcctggcccagcccaagatcccagcgttatctaactcctggagggtggactctgtcctggcttgtttggtgtcctcagatatctttcacacagtagagcaaaatcaccagccctgcactgatgtcactttatgtagaaaaaggccttagctggacctgtgttgccgtctatgcaaatgcatgcaaatactccaggccctgggatgtgggcttgtgttttgtcactgtgaagggggagatgggagaggagcctgttttggggtggggtctggggaaggcaatctgattctgaagctaaagagctttcatcctcttgagtgtatgtccccatagtgggccccttgacccacatgctgaccggtgccttgggatttgactagagttgctggctcgaggcccagcacgaggacttaccctggggttttgttaggtttggaagcagctgtccctagggggtgaagtccccccccttttttttttttacccctgcttctcccacggcttcacctccctatgtgaactgtagactcagatcccaataaagtgctgttgcagctatgatgctaggtggtttctaagcacaggggacacctcacacccc

SEQ ID NO: 47425 - DNA, 539 bp, Homo Sapiens
tggtcatggcctcctaaaaccttaaacttcaagtagaaatgtactcaagccctatttataaacaaatacttttcctgcctccaccaaacccctacagaacatcacctggaattgccactcacactgggttggagtcattgggcagctgtgcctgtgcgagaggtgctgtggtctgggcagcccctggaaaagcacctttgctgcctgtcattgttgcctgaagaaggctggagttgctctgagagcagtttgggtttggagtattatatttggcttctatcgccctcattttggatcaccattctccctatcccttcttgcctccctcccttctaaacatgtgtaataactatacagagactgctacaaaattgtatatagtttttggatcaaatagcatgaggggagaggaaaccattaaaaattggggctcctactctcctttgctttgtacattcaaaagttgggggtgggtaagagggatagttaaaatgtttacaaaactttaggctccctcggaacttttgccagtgtggagc

SEQ ID NO: 47426 - DNA, 643 bp, Homo Sapiens
ggtcttccacaccttcccagcatcacagtcagaggtcagcaggaagctgagtcattaccttcttggtgacctcccccaccatcttgtctcacttggaaaccgttgtcagtttatttactatgcaatagacattcattgttttgtatccagctagctttggtttaatatgccactgctttgtctttctgttacacatacagttttgatttatttacaatatatgctgtgccattttgatttttatattgtttggttggttgaataaatttgcgacactcaaacacttgaggtgatagttgttaaaaacaataccagtatttgatccagtttcatctcaactatgttatacctggacattttagatgtttatcaaaggtcttttatggggaagaaagtaaatgtatgaaataataaatgtgtgacatttatagggaatgttggctctgaacaaacttttgaaaacttggttgacaaaattttggatcaactgaaaaaagcatgacttttgaaatctctgaatgccttggttctcagtattatcattctttattgaatttatttcttattaaaatatgtagtttttaagactttttttctgacagtattatgtaattttttagcgtgggtagatgggagtgtcgct

SEQ ID NO: 47427 - DNA, 550 bp, Homo Sapiens
atttggaacattgctagctgctttacctttgcttcaggtgctcggtaatgctggagctatccttagacaaagaaaagtcaagtcatgaaagaagtccttgaagatataccaagaacattcatcagtatcattcgtgtttggatttttaaggccacctgatttcttcgtcatgcattcggcatttgctaaatgacagttactacatcaatctgcaactatcaaaaatgaggggaaaaggttcaggctgttaacaattccatgcagtatttaaatacatttactttggcagagtttataccctccccttgttttcttgctttattctgggcaagtttgaaggggaaaatttgtgctgctgttagtgcaactgctgtgtatgttgagccactgttgtcatgccagccaggtgcaaaggcagcttagctactgaggtagcgaatgttctgaggacattctagacaacagcttagttcctttttcaggctcatttgcttttgcttttttgttgaatgattccaatcgtaaataaagcttttaataattttgtgaa

SEQ ID NO: 47428 - DNA, 505 bp, Homo Sapiens
  misc_feature (127)..(127): n is a, c, g, or t
  misc_feature (176)..(176): n is a, c, g, or t
ttttttctgacagtattatgtaattttttagcgtgggtagatgggagtgtcgcttgtatgttatcgtacagctgacatgtatttttgtctattctttattatcttagtttcatgctatgtatgtacncataaccaacctattgcctatgagaaacatgtaagataatgtatttacnagccattgttacaagtttataatgtatttttctatcttgttttatatgtatgttatataacattcaaaaagaatttttttcttgattgagaaaaggatacaaaatgcaaaatccacaattttgataactgaaaattgccaattgttttgcagtactttattatattgggtgtcttgtcttttttgggcttttagttagctaatgaatgaatacattagacacttttgggttttagttgggattttacatagcttgcattttaattctttggttctttgctgtttctattaacccacagcattattttaataaatgttataataccaacc

SEQ ID NO: 47429 - DNA, 776 bp, Homo Sapiens
aggatctcaaagatttcatgagacaagctggggaagtaacgtttgcggatgcacaccgacctaaattaaatgaaggggtggttgagtttgcctcttatggtgacttaaagaatgctattgaaaaactttctggaaaggaaataaatgggagaaaaataaaattaattgaaggcagcaaaaggcacagtaggtcaagaagcaggtctcgatcccggaccagaagttcctctaggtctcgtagccgatcccgttcccgtagtcgcaaatcttacagccggtcaagaagcaggagcaggagccggagccggagcaagtcccgttctgttagtaggtctcccgtgcctgagaagagccagaaacgtggttcttcaagtagatctaagtctccagcatctgtggatcgccagaggtcccggtcccgatcaaggtccagatcagttgacagtggcaattaaactgtaaataacttgccctgggggcctttttttaaaaaacaaaaaccacaaaaattcccaaaccatacttgctaaaaattctggtaagtatgtgcttttctgtgggggtgggatttggaaggggggttgggttgggctggatatctttgtagatgtggaccaccaaggggttgttgaaaactaattgtattaaatgtcttttgataagccttctgctcacatttttgtgaatgtctgaagtatatagtttgtgtatattgacagagctckkkkakaackaaagcaaakgkaakkkkkgggtgcgaraaaaaaaggggaaca

SEQ ID NO: 47430 - DNA, 1059 bp, Homo Sapiens
  misc_feature (643)..(654): n is a, c, g, or t
  misc_feature (656)..(657): n is a, c, g, or t
  misc_feature (659)..(660): n is a, c, g, or t
  misc_feature (662)..(665): n is a, c, g, or t
  misc_feature (667)..(667): n is a, c, g, or t
  misc_feature (669)..(669): n is a, c, g, or t
  misc_feature (673)..(674): n is a, c, g, or t
tacccataaaattaaattagttatattttattttaaaatgcaaaatacattgatatttattaatcattggatttagggaaagggacagatttttggtgaacctgacttgtggcagatggtaaggaatattataaaacatttggatgagaacaatcagggcgaactgcatttttctgttacactggtaatcatttgaaaattgatttacctcagtgtttaacagttttttgttttgttttgttttttaaataataactaattgtcgagcactgatagagatgcagattttggtggggggaggtggtgggggagataatcacttcaccaactgcagtgcatttgtgtgtttttaaccctcagagaactctgcattttagggtacttgaggctgacttaactaaaagttttaaagtaaccttttttccattgtaaatatttctgtaaatactaccaattggaaattagaacagtagagtacttttctgaatccaatcctatttttattttatacagtatttctcagctgtgatctttggagcaaaagccaacggcaggaaaaaatagtttgtaccagtttcatgaagtatgtctttgggtttttgtaaataattttaactcaaataaaattgctactttcaatacnnnnnnnnnnnnannannannnnananaaanncaccaacaaaaaaaaaaggggcgccccgctctaaaaaatccccccaagggggcccaagcttttcggctaccccgcctttctttgcccaaaagggcgcccctaaaccggatcccctattccacctttgcgcactggcccctcctttctttcaaatccctgccaccggggagaccggccttccctagggacccctgtggggaggacccctttattttctgtgcggggccacttattctcgcccccccccgcctcctccagatctgacactcttttaacctgtactctcgagcccttcctcagggccaacaggtcgggaacatcaccgctcccccatgcccctccccttcttccaaaccttaccccttcctccccactctctttcttt

SEQ ID NO: 47431 - DNA, 816 bp, Homo Sapiens
gcttagacagttcggtccggattcccgggattgaggatttagcagagaggaacactgcgtctttaaatgagaaagtatacaattctttttccttctacagcatgtcagcatctcaagttcatttttcaacctacagtataacaatttgtaataaagcctccaggagctcatgacgtgaagcactgttctgtcctcaagtactcaaatatttctgatactgctgagtcagactgtcagaaaaagctagcactaactcgtgtttggagctctatccatattttactgatctctttaagtatttgttcctgccactgtgtactgtggagttgactcggtgttctgtcccagtgcggtgcctcctcttgacttccccactgctctctgtggtgagaaatttgccttgttcaataattactgtaccctcgcatgactgttacagctttctgtgcagagatgactgtccaagtgccacatgcctacgattgaaatgaaaactctattgttacctctgagttgtgttccacggaaaatgctatccagcagatcatttaggaaaaataattctatttttagcttttcatttctcagctgtccttttttcttgtttgatttttgacagcaatggagaatgggttatataaagactgcctgctaatatgaacagaaatgcatttgtaattcatgaaaaataatgtacatcttctatcttcacattcatgttaagattcagtgttgctttcctcttgatcagcgtgtctgaatgacagtcaggttcaggtgtgctgacacagaatgctcacaggctcacttgccgcc

SEQ ID NO: 47432 - DNA, 611 bp, Homo Sapiens
taaaaagatgtatgtgttagactatcgaaagggccttattctctctttctcatagactgaccttcttttggaatttctgagtcatttattttccttagctttttccactcaaattaagggcaagcgaaaaagtaataatttggcattctttaagcctacagaatgtgattctttcacttgtttattacactggctcgtggacagaacaatttgaaaagtgaaagaattattttggtaaaagattttgctttacttttcgaagcattatttttttaaagagtgttttactccaacgattgaaacattttcctatttaaatttcattgttagaatcacaggaggcaaaaaatggaacggttgaatgaaattttactctttctgtgaaagaaaatccacagagttgttgcctccgttgtagttggtgggccccgttagcattggatgcctttgccaaatggttcatgtggacacacaaaggcaaacagatctgccatcgatcgcagatttctgtagaaacacggatgtgcatgtgcagattcccttttgcaggtattaaaaataattaaaaatagtcctgcctgaggttgcagtgagccgagcttgcactactg

SEQ ID NO: 47433 - DNA, 568 bp, Homo Sapiens
gtaccttaaacttccacatcactgcaccctgaaacagagcatgctttccagaaagtcacactctcagatctgtgtcaagttcaatgtgagccctggcaaggctggcatattaacacctgccttctggcttctgaaagtgagatttgtatatgggctgcactcacgcatatacgagttggtttatctttgtgtacatgactataacccagtgatgctgaggtcatgtgctggaatgctgtatttggaccacacatttcaaagttgccctatggaaatgaatcctacttagtgacaagtcatcaaatgtttgtcacatgtgatgaagacaaatatgtatacctggcatagagaaaaatatatacctggtacattggagaaaaataattacactttcaaagagaattccctttgcaattttatgtttggatcaccactgtaagcacactttatttgcatttgatctgtatttgtatatgctgatgcaatgataaaaatcactgtaatacttcattgtgttgtactggatgcaaagctagaaaatattgcaataaatgagaccgatgaaaga

SEQ ID NO: 47434 - DNA, 518 bp, Homo Sapiens
ctttcttactgctactttcatgttgctttctagaaaacagcatttcattccaaaataactaggatctgcatttagaacaagaatcattatttgtcctgaccttttcagtcctacagagacgcatctgtggttcttttgtacttgccatagatgtaacctaaaaagttttggcatatttaggtcagcctagcggaactttttttttcatttaaatggagctgaataatggagattttgtgtctgcaaaattcctgagatcattgaaaaagtaacaagctgttccttgtttctgatacataaaattattttaagcattttatcaatcattaaaatttactgccagttgtgagtggctttttaattaacttgtctttcattgcacttcactctgcctgttttcaaggggagtaagattggtaacatttggggagactgtatctgtctacttagcgtggctgttttgagggactgtcccatcagtgaacaaactgcatggccttggagagagactctgggct

SEQ ID NO: 47435 - DNA, 792 bp, Homo Sapiens
cgggaccggcccaaccgacagactatgggggctccggcaaccaggcgctgcgtggagtggctgctgggcctctacttcctcagccacatccccatcaccctgttcatggacctgcaggcggtgctgccgcgcgagctctacccagtcgagtttagaaacctgctgaagtggtatgctaaggagttcaaagacccactgctacaggagcccccagcctggtttaagtcctttctgttttgcgagcttgtgtttcagctgcctttctttcccattgcaacgtatgccttcctcaaaggaagctgcaagtggattcgaactcctgcaatcatctactctgttcacaccatgacaaccttaattccgatactctccacatttctgtttgaggatttctccaaagccagtggtttcaagggacaaagacctgagactttgcatgaacggttaacccttgtgtctgtctatgccccctacttactcatcccattcatacttttaattttcatgttgcggagcccctactacaagtatgaagagaaaagaaaaaaaaaatgaaggaaacaaccactggcccagggtagagatgcctacagggtggttgcttgttggatacaatacaaggaacactgctcagaacccacgtcttcagcagcatttgaaacactggcagcaatgcacaagagcaagatggtgtcaggaaccatgtcaaaccctcaccttcttccattttttttttttttttaagacagtctcactctgttgcccaggctggagtaaagggcagtggcatga

SEQ ID NO: 47436 - DNA, 711 bp, Homo Sapiens
atcacctgtcagcaaaatgaatagtgggatattttgggccattttaaatgtgaaattttgcctctttaatgttaattcaaaactatatcaatgttttcttgttcccacctctaacccaaggaaaaaaagagaaaacatactatgcaaaggaagtttaaacttaagttttccttaagggtcagcccaacaatgactttcagtcaaatggattaaactggaaaatgtttttgtttctgttgtaaacagatcatcctaggcgaaagtttttttttgtttgtttgcttttaaattagtttatttctaaatcttagtcttccacatttctagaggccacctgacacaagtccctgtatctgaagtctagcatctcaaggctgatctggaagtgtgctagtatgctccctagtggataacttaatcttttaatacagttccgtcattcccatcttgttttcagaagagaaggtggctacagccaggcataacatatccactgtgtgcatagagggtctcttcacgttgatgcttggcattccatcagctttctctaagtctttgctcaagttcaaccttaaaatgatgttagacaacaggtcccagtcagttccctctattttcacccattttgctcacaagccatattggcccgattagtggtactgtctgactcacgtgtgtgatccaaataaaggtagctgctgccaaaaaaaa

SEQ ID NO: 47437 - DNA, 927 bp, Homo Sapiens
ctttgtaatgtgtttcatgaatagaatatccaatagagataagctgacttgaatcattttgagcaattttgccctgtgttatatgtgtttcacgcacatatttgcagttggattttctccaacagaaagtggattcactactggcacattaacaagcaccaataggtttttattccaactccgagcactgtggttgagtaacatcacctcaattttttattatccttaaagatattgcattttcatattctttatttataaaggatcaatgctgctgtaaatacaggtatttttaattttaaaatttcattccaccaccatcagatgcagttccctattttgtttaatgaagggatatataagctttctaatggtgtcttcagaaatttataaaatgtaaatactgatttgactggtctttaagatgtgtttaactgtgaggctatttaacgaatagtgtggatgtgatttgtcatccagtattaagttcttagtcattgatttttgtgtttaaaaaaaaataggaaagagggaaactgcagctttcattacagattccttgattggtaagctctccaaatgatgagttctagtaaactctgatttttgcctctggatagtagatctcgagcgtttatctcgggctttaatttgctaaagctgtgcacatatgtaaaaaaaaaaaaaaagattattttaggggagatgtagggggagaattattgcttatgtcatttcttaaacagttatggctcttaaggcttaaaaaaaaggtaagcattggtttgcacaaaaaagttgggggattcccccccccaaataggaaatacaaattaccttctggttaagtaaaaccttttttattggcctcccgaaaaaaccctggaaaaaaatcccccctttgggtttccaattttattaaaaaat

SEQ ID NO: 47438 - DNA, 545 bp, Homo Sapiens
ggaaagtataaaaaggcacagaaggttgtcatgggctgttccttgggggtttttatcctgctcaccgtggagataagcctgcggcttgtctaaccagcgcagcgcaaaggtctcgatgccttttggtaacatccgtcattgcagaagaaagtttacacgacgtcaaaaagtgacgttcatgctaagtgtttttccagaaatattggtttcatgtttcttattggctctgcctcctgtgcttatatcatccaaaaactttttaaaaaggtccagaattctattttaacctgatgttgagcacctttaaaatgttcgtatgtgtgttgcactaattctaaactttggaggcattttgctgtgtgaggccgatcgccactgtaaaggtcctagagttgcctgtttgtctctggagatggaattaaaccaaataaagagcttccactggaggcttgtattgaccttgtaactatatgttaatctcgtgttaaaataaaatataacttgtgaaaaaaaaaaaaaaaaaaaaaaaaaaaaaaaatgtcgag

SEQ ID NO: 47439 - DNA, 496 bp, Homo Sapiens
  misc_feature (450)..(450): n is a, c, g, or t
ctttctggctgagatttccgtgcaagacagcacccaatagactatttagagttgacatttgacattttaatgggcgccatggctcattttgtagattgagaaggtgcgtctcccctgctccaagtctcatcatgacagcgtgctgacagctgggagtctgtggccttcctcacgcagaggccttaaagctggacacagaagcacgcctaggctgggcagggatgggacccatgccccctccttagaggacgggcttcctggttaggaaaggacacgtgggggtgccttgcataatagttcactggtcaccgtgcttttatgagtagtgtttttgtgcacttgccaggggttttctctctgtgtgcgaggggagtgatttaagcaatggtgtctggagtaagccttacaattttaatagactttttcttatcatatccctcatttctttcnctgaaataaaaatacacacaagcaaaaaaaaaaaaaaaaaacgcgg

SEQ ID NO: 47440 - DNA, 645 bp, Homo Sapiens
tcggcttcggaccccacgcctctgcaagtgggagagacccgagcatcctccccacccccatagctccagtgcacgccacccccgtcttgcctgggtcggggcctgcggccagcaccatttcacacacactccttgtagatgggagccagaggaaacctgaacgtgggtggagcgttccactgagtctacttcaggagacagaaggcccatgctgatgggggaggaggagggacgtgggcattttggacaccaggggaaatggaaatgctgctttcaaaacttagtttcctttccatttcttcctagtctggcctttgacacaaatctggtagaaagaagcctgataaattgagggcacttgtaccctccctgtgcccccagaaggttcttggagagaagtgcaagaatttgtgaacacggcggtggagggcgggtggatggccatgggctgggcctccgtatcaggcctgctcaccttgctgggagctttattctgatctcattttgaatgttccagagggagcatcataagagcccagagctccgatttccaaagagtgatattgacatttatggagattggtgttgtaacatattttgataaatactaacttattttgttggggttttggttgtctcttgtct

SEQ ID NO: 47441 - DNA, 837 bp, Homo Sapiens
  misc_feature (762)..(831): n is a, c, g, or t
tttgtgattgctcatccattgtcctccactagaggggctaagcttgactgcccttagccaggcaagcacagtaatgtgtgttttgttcagcattattatgcaaaaattcactagttgagatggtttgttttaggataggaaatgaaattgcctctcagtgacaggagtggcccgagcctgcttcctattttgatttttttttttttaactgatagatggtgcagcatgtctacatggttgtttgttgctaaactttatataatgtgtggtttcaattcagcttgaaaaataatctcactacatgtagcagtacattatatgtacattatatgtaatgttagtatttctgctttgaatccttgatattgcaatggaattcctactttattaaatgtatttgatatgctagttattgtgtgcgatttaaactttttttgctttctccctttttttggttgtgcgctttcttttacaacaagcctctagaaacagatagtttctgagaattactgagctatgtttgtaatgcagatgtacttagggagtatgtaaaataatcattttaacaaaagaaatagatatttaaaatttaatactaactatgggaaaagggtccattgtgtaaaacatagtttatctttggattcaatgtttgtctttggttttacaaagtagcttgtattttcagtattttctacataatatggtaaaatgtagagcaattgcaatgcatcaataaaatgggtaaattttctgacttannnnnnnnnnnnnnnnnnnnnnnnnnnnnnnnnnnnnnnnnnnnnnnnnnnnnnnnnnnnnnnnnnnnnngggggc

SEQ ID NO: 47442 - DNA, 496 bp, Homo Sapiens
tttaagatgataagtttcctgcttaagttgtgcctttcagcttcaatgagtttaaggagcactaagggtaatgataccaatgagggttggtttattatcaaacctgaatagctgtggtttctccagtaaatattttcttctactgaacatggagccattattaagagttgtgtgttttttattatgtacatttgtatatttttttgcttgtttgatgttctatttttctaatagttttcttttagtttcttaaagttgtgatactagatttagattctgatgctaactgcaaatcaggttggtctctgctgggtctctcctgcttttattttactttaaggacaagtgtagttgtcgtccaccacctttcaaaaaatgtgaaactgccctgcctcccctttttgctgacaacactgtgtacattgaccacttcctaccatactttatgttgtaaaatcaaactcttttgtggtacattatctcatgcttctgcaaa

SEQ ID NO: 47443 - DNA, 729 bp, Homo Sapiens
ccctgaggcagcgggagaaacgccccaacacggcgcagcgggggagcccaggaggccccgagttcctgaagacgcccctggggggcagcttcctggtgtacgagtccttcctctaccggcgggagaaggcggccggggagaaggtgtattggacctgccgggaccaggcccgcatgggctgccgcagccgcgccatcacccagggccggcgggtcatggtcatgcgcaggcactgccacccaccggacctgggcggcctggaggccctgcggcagcgggagcacttccccaacctggcgcagtgggacagcccagatcctctccggcccctggagttcctgaggacttccctggggggcaggttcctggtgcacgagtccttcctctacaggaaggagaaggcggctggggagaaggtgtactggatgtgccgggaccaggctcggctgggctgccgcagccgcgccataacccagggccaccgcatcatggtcatgcgcagccactgccatcagcctgacctggcaggcctggaggccttgaggcaacgggagcggctccccaccacggcccagcaggaggacccagaaaagattcaagttcagctgtgcttcaagacgtgttctcctgaaagccagcagatttatggggaattggatttgttatctaatggtgcatgaccaattaccacaaaacgtagtggggctttaaaaccaaaaaaaaaaaaag

SEQ ID NO: 47444 - DNA, 724 bp, Homo Sapiens
aatcactacagctgctctgcttctgctttccaaagtagcccaggtcctgggccagatgcaggggaggtgcctatccatgagtgaaggccagtgtcttcctcacctgggtgggtcccacacttgtgacctcagttttaggaccaagatctgtgttggtttcttagattgctagcttttcctccagggaccacagcaggtgaagctcaagagcgcatggctctgctaatagtaaattgttttcagggccttgtccagctgagagcttcatgtccaccagattctgagaggtgtcagcagcactttttttttttatttgttgtttgttttccatgaggttatcggaccatgggctgagctcaggcactttctgtaggagactgttatttctgtaaagatggttatttaaccctcctccaccccatcacggtggccctgagggctgacccggaggccagtggagctgcctggtgtccacgggggagggccaaggcctgctgagctgattctccagctgctgccccagcctttccgccttgcacagcacagaggtggtcaccccagggacagccaggcacctgctcctcttgcccttcctgggggcaagggagctgccttctgtccctgtaactgctttccttatggcccagcccggcactcagacttgtttgaagctgcactggcagcttttttgtctcctttgggtattcacaacagccagggactt

SEQ ID NO: 47445 - DNA, 681 bp, Homo Sapiens
  misc_feature (361)..(361): n is a, c, g, or t
  misc_feature (414)..(414): n is a, c, g, or t
gcagctgttgaactgggaagagactctaaactgccagtcatctgtaatataaaccatttgctgtatagacctcctttgtctgcacaccatctcccaccagcctcccctcccccaggccccacccagtgtgggcctgggctctcttgggctttatccatgtctttagatttgtgtttgccttttgtttttttaaccgcgcagttcattggccactctgcacgcattcagtattaccatggagctgggaatcttgctggagcccctggggcaatagcagcagcaccaggcggtctcctctacagactgccttggcccacccattgaacattcggcacgtgaccttgtggggggagcggggatngggcacctgcgatcctctttcctctcttcatctttctcttctgcccttctttntggaagaaggggtttcaaaaccagtttagtttccaaaaagtgtacatttgtgggggggggggtctaattggagagcgagagtgtgtatgtgtgtgtgtgtaagtgtggggatttttttatcatttttttaaaatgcgagtactcttgtgatcagtctgtcaggggtctatagctgtttcagattttttcagcggtacttgagcatctgaaactgcagaaagaaatcattaacgtgtgattcttcttactaaaaacacacaaaaaaaa

SEQ ID NO: 47446 - DNA, 752 bp, Homo Sapiens
attcagaatttgccatccaaagccctgtgagacacaagactaaggcccagtgcctggtgcagttctgcctttgacattgtgaggggcgcaccttgggaacttggagcacagggatcttccctggaaatagtctcaggtgtcacttgtcaccctgcattgggacttcatgagactgtgaataactacagtaaaccagatgtgcaagaagccagagtctaggttatagttacttcagactctgtatttaaagattctctcttttttttctttttttttttggaaacagagtctggctctgtggcccaggctggagtgcaggggtgcgatctcggctcactttaagctccacctccggggttcacgccattctcctcaacgggaggattctacgcctcccaagtagctgggaatgcaggcgcccaccaccacgccaggctaacttttggtcattttagtagagatggggttctcaccgtgttagccaggagggtcttaatctccgtgacctcatgataccccggcctcagcctcccaaagtgctgggattacaggcgtgagccaccgggccgtagcccaaaaagttctcttaaggcaaaaaaaacacaaacaaactaaaaacacaaatgttgttgggcggcccgtgaggccctgagaaaaagtttttaaaacccctgtgtgtgggcgcgcggggcccccacatggtgatacgggaacacgggggccaatcaggggggtccccaaaagaaacccgg

SEQ ID NO: 47447 - DNA, 633 bp, Homo Sapiens
cgtcgtgctgcgccgggagccaccgccctccggagacagggcagctcccctacgaccctagcgcctccgccctccgcggcccctctcctctcttcctgctctgtccctccttctccatcagggagcagcgtgacttcagcgagtcccgcgagcacctggctagacagttaacaagcacgtccttccagcctgagccagcgcaggtttgggagggggcttcctggccccccccacggtgttccagcccctcctctcttccgccccctagtctcccacccttccctccccgtagtgaccaattcctatctcttccctctccgcaggctcaatgaatcgaatgaatgtgaacttcttcatctgtgaaaaatcttttttttttccattttgttctgtttgggggcttctgttttgtttggcgagagagcgatggctgccgtggggagtactggggagccctcgcggcaagcagggtgggggggacttgggggcatgccgggccctcactctctcgcctgttctgtgtctcacatgctttttctttcaaaattgggatccttccatgttgagccagccagagaagatagcgagatctaaatctctgccaaaaaaaaaaaaaaacttaaaaattaaaaa

SEQ ID NO: 47448 - DNA, 962 bp, Homo Sapiens
attcccgggatcagaggactatcctcagtctgcatgtaacttttatgatagttattccaaattcaagaagaagcagtattaacatcaattgatcgacacaaagtaatttttaatttaattcatcatttcacatgtttgtactttgtcttcccattaacctttgccagtgttatgattgtataaatttttttaaatgctggttaaacaggaatgcttaaagctttaaaagtttaacagtctaaaacatttttgcttttattcaactgcagaataatatttttattgctactttgagttttgtttcgtatcatgtcctatgctagaaatatttaaatgatgtgaaacaaagcaggactaatttgaactacagctggactccgtttgtgtgatggtgatacatgtcattagttgcaacttctttggggtgatctatagtttgaaaactaaaacctcaaagacagatgttacagaatcagccagttctgtaaaactgatattgtctattggttattgatcttgccatctttatttaaaaccatgtcccttctatgatcccttaagaaagctgcaccaaatcatctgcctgttttttcttgatacttactgaaatagaaggttttattgcaggttttatttttttttttttatatctttttttttaattattcttttttttatttattaatatcaaattcacttattaataaactttataatttaaacttacaaaaaaaatcaatttctttttttttctttaccttcttctttttctcacgtaataaacaaattatctttacattttttttaccatcaccttttctttaaattttttaacttttttccttttaccattaaattttcttactttaaaaaatttatcctttttttttttaatatttttccaattctttctttttaaaattttcccaaaaccctacccccccatttcaaaaacccttaac

SEQ ID NO: 47449 - DNA, 823 bp, Homo Sapiens
cgcgtccgtataatttctctgtttttcaatcgatgctccttcctttgcatatttgaagatgggagacctttactactatggccaccaaaaccagtcacaagacctggagttgtctgtgcagatgtacgcccaagccgccctggatggagactcccagggattttttaacctggccctgctaatcgaggaaggtacgataatcccacaccatatcttggatttcttggaaattgactcaactctccattctaataacatctccattctccaggaactgtacgaaaggtgctggagccacagtaacgaggagtccttcagcccctgctccttggcctggctttacctgcacttgcggcttctctggggtgctatcctgcactcagccctgatctactttctgggaacctttctgctatccatattgatcgcctggactgtgcagtatttccagtctgtctcagcaagcgatccccctccaagaccatcccaggcctccccagacactgccacgtccactgcaagtccagctgtgactccagctgcagatgcctctgaccaagaccagcccacagtaactaataacccggagccacgtgggtgaactgtgcactccagttctctccagatgagagagaatcttttcaacagctggtattgggaagctggggccagggcatgatcctgataaacaccttaaatgtcttgtcaactggatgcaaattttgcaattggtgtcattttttttaaagtcaaattacaaggaagtacccagatcaggcagtggtaataccaaaggtcatcaaacacatacaagggaacatct

SEQ ID NO: 47450 - DNA, 578 bp, Homo Sapiens
ggagctatcaggaacagctatgggagccccaggtcttccctacctcaggcaggaagggcaggaaggagagcctgctgcatggggtggggtagggctgactagaagggccagtcctgcctggccaggcagatctgtgccccatgcctgtccagcctgggcagccaggctgccaaggccagagtggcctggccaggagctcttcaggcctccctctctcttctgctccacccttggcctgtctcatccccaggggtcccagccaccccgggctctctgctgtacatatttgagactagtttttattccttgtgaagatgatatactatttttgttaagcgtgtctgtatttatgtgtgaggagctgctggcttgcagtgcgcgtgcacgtggagagctggtgcccggagattggacggcctgatgctccctcccctgccctggtccagggaagctggccgagggtcctggctcctgaggggcatctgcccctcccccaaacccccaccccacacttggtccagctctttgaaatagtctgtgtgaaggtgaaagtgcagttcagtaataaactgtgttta

SEQ ID NO: 47451 - DNA, 653 bp, Homo Sapiens
gccctacggcagatctggattcttatacactaagatgtgtcttaagaatcacagtgcgtgcttcatccctttattgaagaacagaaaattatgactactctacaaggtggataatattttggtacctgtgcttgccacagccctgttcctcaaagctgaattgatagatttctctttgacttccaagacctagcagttataaggcaccttgaaataaattgtttgtgcctggaaatgcagggagggcaatagctttgtaaattggtttacatttttctccttgaatttttctagggtcctagtgcttccgaatcatttaatggcattgtcggatatcttttacatttcaattgcaatccatgaaattacatttagaagattcttagtacttaactgtagtcttctccatgaattacacgttagaatagactggcagcaactgaatatgcagcaagtaagcctctagcttatagtttcatccctacccctcatgcctgcgtgagtctgtacagggatatgtgtgtgtgtgtgtgtgtgtgtgtgttaaaaaggaagaggaagagcagaatgtctgtatactacatgctgctaaggtagtgaataaatcagtaatgcaatattgtgggtccaaactactctttgcactactttat

SEQ ID NO: 47452 - DNA, 696 bp, Homo Sapiens
gcgagggccgccctttttttttttcataagccgttgagacatctgatggacttggcttaggccctgctgggacatcccacgtgtgatccctttcactccatcaggacaccaggactgtccttaggaaaatgtccttgagatggcagcaggagtcatattttctgtgtgtgtgtttcggaaagccgctgtgtcctgcctcagcacaaagacccagtgtcatttgctcctcctgttcctgtgccactccagaacctcagcagatctgagccaccgcctgccagtgtgagaggcggccactttcatggcagcttatcaggcgcagggccccagacagcttcccagccggccctagagcccggcctgggccaatgatggagggcggccaccagcccagggcctgcccatccagaagggactccccagggcctgggggaggagacccttggaaaagtcctctcttcccagctcctgattctggatctgagattctcagatcacaggcccctgtgctccaggccgaggctgggccaccctcagggagatccagagactcatgcccatggccatccatgcgtggacgctgtgtggagagtccaggatgacgggatcccgcacaagctcccttcagtccttcagggctgggccatgtggttgatttttctaaagctggagaaaggaagaattgtgccttgcata

SEQ ID NO: 47453 - DNA, 639 bp, Homo Sapiens
ggaaaggattgtccagttactttagggggtttttggtggggtttttccccctgtgaaaacttactttgcccctagtctggctgctgctaggacttctgaggagcaatgggacatgagtgtccctgtatctgcgccactgccgcaagggaagcctcaggaaccagcacctggaggccaggatagccaagccctgggtgagcgagaggctggagaacacaggagctcacccagggctgctgcccaaccatgggccactgtgaacagacttcagtcctctgtttttgtttcataagccgttgagacatctgatggacttggcttaggccctgctgggacatcccacgtgtgatccctttcactccatcaggacaccaggactgtccttaggaaaatgtccttgagatggcagcaggagtcatattttctgtgtgtgtgtttcggaaagccgctgtgtcctgcctcagcacaaagacccagtgtcatttgctcctcctgttcctgtgccactccagaacctcagcagatctgagccaccgcctgccagtgtgagaggcggccactttcatggcagctcatcaggcgcagggccccagacagcttcccagcaggccctagagcccggcctgggccaatgatgga

SEQ ID NO: 47454 - DNA, 863 bp, Homo Sapiens
  misc_feature (859)..(859): n is a, c, g, or t
gcaaatgagtagaaatttcttctaccttccccagctgtttcttcccacctttagagttgtttagacaaggaggagtaagcaaggaacttgttctgctttctatcgtggtcacattggtgatgctcaggacctgccagggtcagaatttatggatatctgaaccctgaccccgttcattctctcagtccacttccaatccacatcagtttgttgtctgccttggagagaagagccaaaactggggtgggcgggtgggtggggagtgcaggatataaatgtgtaagtttttgttttttaaggtttttttcttagtgaattattcacccacagacatgagagaaaaaaagagggagggtgtgtggagaaaaaatgtttacagggctaacaagggatgatgtgtcatttagtatgttactaaaaagtgtggaaatgacttgattttaaggggagggtgaggccgaagagggaagcccaaagcagatcttaatgtttcaaaggagtgcagcccttcacagccatcagatatgagggcactgttctgtctggtgttgtagacatctccagaaacaatccaacagccacaaaagcagaaagcatccattctcacaatctacaaaaacaagaaaacaatcgagggggggccggtccccaatagcccataggggcgcataaactccaggccgccgtaacacgccggcgggaaccggcgtcaccccggagaccacccccgccggaactgaacaagacagacacccacccaaccccccgacagagacaccaccagataaccacagcataacattacaggcgcacaacaaagagtatcggagagacagaacatatcagggaggcgaggagncggc

SEQ ID NO: 47455 - DNA, 619 bp, Homo Sapiens
gggtagtgtgtgtatgtgtgtgtgtcagagggagacctggcaggcacctctttgagagtagctgtggtcagagctgtttggtcagtgcattatgttgaatgaggtccaggaacccagagccacccagcagacaccactgtggcttgccagctgccaagatggagaagcatgtgcccctgtagagcgtctccccagaaccagaccccgagccactcgcttcctctgtgctgtgacaacattggtgccaggggagatggtgtttttcaaagggacctactgtagccactttaatttacaattaagagccttagtttgacttaacacttttgtaggcttttcattgtgtatttttgtgtatgtgtgcatatagcagctactctgtagcagaggtgggtagagacacttaatagtatcatgtcgcatgcagatgtcacatcggcctctgcaaaaactgtactgtcttgtttctgcattagacttaagtagtcatgtgaatatactgctatgtcacttttaatattacgagttttatacttggaaaatggtacttgcttcttttaaatctctgtcttctctaacctcccccttcccatttcaatgctcccttcctaatttcagc

SEQ ID NO: 47456 - DNA, 580 bp, Homo Sapiens
  misc_feature (245)..(245): n is a, c, g, or t
  misc_feature (502)..(502): n is a, c, g, or t
  misc_feature (509)..(509): n is a, c, g, or t
  misc_feature (527)..(527): n is a, c, g, or t
  misc_feature (575)..(575): n is a, c, g, or t
caaacttagggggaaacctgtgctccattaccacatgggtgcaagtcagcattgtaagttttctcaggttattattattagagaggttggaaacattggtaaactctgttgattgagaaggaaaaaaaaagtcccattgaactgttgcaacaaatcagaaatccacataaaagtgctctcctgcctgggcagcaacaaccaagaacaaagccccgggactgttttctttttaataaagccacagnaggcatcgtagctccacagcccgaggggacacaggatggaaaccccaggatgagaagggagcagggagagttccagaaagggggatgaaataggagtattaaaaagctgcgttggtaagtttttcatggaaccaagatttgacaaaggcaaatcttatccttggttttaaattcctgctgggagcaaggcctggtatgagcgccctgggtcttgtttttggtgtttcgcttttctgtaaggattaagcagatagggngatgganaaggggcctcactttagnatgaatgagtcacctggtgatttttaaattttaatttaataaagctantcaat

SEQ ID NO: 47457 - DNA, 674 bp, Homo Sapiens
caaggccagaaggtttcaggggcatttgacatcccctcctggttctcaccaggaaaacatccaaagctttggaggaaacaggccctgcccctggctccttaaatgccccgtctctttgtaaactgatattcagccagcaatgcctaagactttgttaagatcatttctactgcttttctttctgcttcaaacacacagttcgtctctgaggaaagtaaaataaatggaataagagtaaattgggtaaggagatatccaaagctacccagtcccttgacccagcacagttggccgacccgtgtcactccctggctgtcgctgcttctctgtgctcactgaagggtgagccaggccagtgcttccccagcccctgggcctggtcactacacagtggaaaacagacaagcggccccttccccaaatcccaagagtgtcttgctgcttggtgggtgctcatcgcaatgttctgaaggctccagggccactttgtttgtaagtatgatctgggcctcaaaataccatagtagctgcttgataaaattctaaaaatatctggttctctattatgtaaacactattacagtcaccagtgtgtgaagactcttgagtctggttctcatatcagagtcatcatttttcttcctgtggaataaaatgccttgtggacttcccaa

SEQ ID NO: 47458 - DNA, 926 bp, Homo Sapiens
cttctctcgaggcactagattaggagtcttcaataagagacttaacatgaggtatatggaagatgaggcaccgagataagttcatcattaggtgtgagcactgctcacaccttgctggcaagttctccttaagggcctgaagcacaggtgtccaaagaaaagcgttaagtccatcttaatagaatctatgtggtatatgatgtggtcagcccctggtctgtgatcagcaagaacctacagcacagattatgccctgcccacttcaatgaatacctactctcctccattctccatcactttttttgctatcaagaactccggaccttgcccatggagaagtttagagaggaactcttgtggagagctggtttattttctgccctgtgcgacgagtttcagctggccaagaaaggagtcaagttattaaaaagcatcacaatgtagatctccaggctggttttttgttttttgttgttaagactggggaargggggactatttattctgccttaaatcaatggcaaataagtcaagatgacattttgtgaatgtagactatggatacactcctaatagattgatgtagtcataaaagggggtcaagtagatgtttttctgttatgtaagcaataatttttccgtgtcttattgagtatggctagcgattatttattacatgctagatgggttctttgcatgtgggttccatataggtgcagaaatttcctcagccactggagggatttcgaccatatttgtcatttggatgagctgttattagattgaaatctacacatcatttcattaaaaattgtgccttagaaaacgcaaagctgttgcacatggcgataaattatggatgcagtacattgaagagagatgaagtcacttccaagtttccaagacttctcatggaggtgtttgct

SEQ ID NO: 47459 - DNA, 654 bp, Homo Sapiens
ttttttttttttttttttaaacatccaatattttctttaatgcttttatatttttttaaaatgttaaaacccctatagccaccttttgggaatgttttaaattctccagttttttgttatatagggatcaaccagctaagaaaagattttaatcaagttgaattgaggggattaatatgaaaacttatgacctcttcctttaggagggagttatctaaaagaaatgtctattaaggtgatatatttaaaaatatttttgggtgttcctggcagtttaaaaaaattggttggagaatttaggtttttattagtaccatagtaccatttatacaaattagaaaatgttatttaacagctgaattatctatacatatctttattaatcactattgttccagcagttttcaagtcaaattaataatcttattagggagaaaattcaattgtaaattgaatcagtataaacaaagttactaggtaacttcatattgctgagagaaatatggaacttacattgttcaattagaatagtgttctgcaaaaatatttataaaacttctcaagatactgctactgtaattttatatgaagataagtgtatttttcaataaagcatttataaattagcctttgtttggttatattgagaaaagg

SEQ ID NO: 47460 - DNA, 639 bp, Homo Sapiens
cacgaggaccgtcacagccaacaatgggcaaacggtaaccattcctgtgcaaggtattgccaatgaaaatggagggataacattcttccctgtccaagtcaatgttggggggcaggcacaagctgtgacaggctccatccagcccctcagtgctcaggccctggctggaagtctgagctctcaacaggtgacaggaacaactttgcaagtccctggtcaagtggccattcaacagatttccccaggtggccaacagcagaagcaaggccagtctgtaaccagcagtagtaatagacccaggaagaccagctctttatcgcttttctttagaaaggtataccatttagcagctgtccgccttcgggatctctgtgccaaactagatatttcagatgaactgaggaaaaaaatctggacctgctttgaattctccataattcagtgtcctgaacttatgatggacagacatctggaccagttattaatgtgtgccatttatgtgatggcaaaggtcacaaaagaagataagtccttccagaacattatgcgttgttataggactcagccgcaggcccggagccaggtgtatagaagtgttttgataaaaggaaaaaaaaaaaaaaaaaaaggctctctcag

SEQ ID NO: 47461 - DNA, 728 bp, Homo Sapiens
ggcacgcccagctaattttttgtatttttagtagagacagagtttcaccatgttggccaggctggtcttgaactcctgaccttgtgatccacccacctcggcctcccagagtgctgggattacaggcatgagccaccacgcttggctaagaacacctaaatttttatgtttcttggctcaaaaaccagttccatttctaatgttgtcctcacaagaaggctaattggtggtgagacagcaggggaggaggaagagctgtggtttgtaacttgttcaactcaggcaataagcgattttagctttatttaaagtcttctgtccagctttaagcactttgtaagacatggctgaaagtagcttttctatcagaattgcagatagtcatgttgggctaacagtcaattggatatattcctttacctcacatgaccccagcaactgtggtggtatctagaggtgaaacaggcaagtgaaatggacacctctgctgtgaatgttttagagaaggaaattcaaaaaatgttgtaactgaaagcactgttgaatatgggtatcggctttctttttcactttgactcttaacattatcagtcaacttccacattaatgaaagttgaccctagttaatttccaaagtaaaaagaaacccaattcttaaagaagataccccggaaaaaacaccagcgccaacaagaacgcatataagaattaattcctctccgcgtatc

SEQ ID NO: 47462 - DNA, 571 bp, Homo Sapiens
acactcatagttttgccaattaccagtagacactagtggaaccatctaactggaacttcctctctccttccacttatttcctcaaacttgttgctttacactagacacatgcaaatgtatgttttaaacacaccaaaacagatcatgccaaatgagttgcctgtcaaaggctggagggcaggaggagggcctgggtttgggttctttcctcccagcctttggatggtgccttgggccccttagccccagcgccagggcctcccagctgaggccacaggacaagcacttttttatgatgtactaaaagccacagtatgtggcaactgcaaaaggatcaggaatttagggtatgatctcggtcacgtgtcccgggcgctgaggggaaaggaagcgggcatgattgtagacaatgagggggttctcttgatgtaatgaaatgcaattttatggtttggtgcaaaaactcctattttccagtaaattaactttatttctaaagcatattttgatttgccatcaagagcaataaagcattaaatcttatttttaaaaaaaaaaaaaaaaaaacact

SEQ ID NO: 47463 - DNA, 777 bp, Homo Sapiens
  misc_feature (431)..(431): n is a, c, g, or t
  misc_feature (604)..(604): n is a, c, g, or t
  misc_feature (753)..(753): n is a, c, g, or t
  misc_feature (762)..(762): n is a, c, g, or t
  misc_feature (767)..(767): n is a, c, g, or t
atgcaaatattagaacgtgacaaataatggtcagcagaccaggtaagagacaggatttaattttctagctcaaattactggtttttaattataaccttgacatctgtaatcattaatattttgggaagcagtcccttttcatgcttatgttacttggatatatacttgttttaattaaaattgggggccaggcgtggtggctcctgactgtaatcccagcactttgggaggccaaggcaggtgatcacttgaggtcaagagttcgagaccagcctggccaacatagtgaaaccccgtctctgctgaaaatacaaaaattagccaggcatggtggcaggcacctgtaatcccggctacttgggaggctgaggcaggagaatcacttcaatgcagagggtagaggttacagtgagccgagatcttgccactgncctccagcctgggcaacagagcaagaccttgtctcagaaaaacaaaaacaaacaaaagctgtatatatttgcaaaaacactatagtagacataccagaccatcagctccctagggctttttatgaaaaacagcagtccttccccactcccctttccagccccttagaagcagncattttcaactctccagttccttttggtatatctctctaaataataagcctcttttgctttacagtgtttggtattatttattaacttcactcctttaaataggggtcgtttttggtaggcttaccttgaccaccttacatgcccaccnttaattgtnacttntggggccagg

SEQ ID NO: 47464 - DNA, 793 bp, Homo Sapiens
tcctatgtcgaccggccgccgagttagatgtgggtttgggttggggaatagcaatttaggttattgatttagactttagtcaagctaattagctccccctttagataagtacatgttgcacatgtgcacctacttgtaatctcagatatttatgcacacaagtgtgaaggtttttcagggagcagagcatctgggacaggctgattctgagctaaacagggctcctttaaggcaatatgaactgttgccttctataaattgcacattgaggaactctaatagacaaagattaggtgtcaggcagaaaacactcattgtaaatatactattagttgataaacataggactttcttattccccagtttttctttatcatataatttaaatatttattcatttgtatttaaagactacctacacatagatatatgattccaaagttatactttctccatccccacattagccaagtgaatacagggccaaatgggttcttggaatgataataacaaagcattacaaagtgggtccccttggttccagccttgtccagagtttttggttatatatttctatttattacaatttaccttttaaattgtacaaataaacctttgtgtggacagagccaatgtttcaatcttgactgagtacacgaaaacatactttggaactgatcctcattttcgaaatggttctaacttattatccattccgatgtctgaaattctcttacttctgctcacaactctctttctggcaaagttgttccgtactactgcctcaagaact

SEQ ID NO: 47465 - DNA, 499 bp, Homo Sapiens
  misc_feature (499)..(499): n is a, c, g, or t
ggatttgataactgagtaggtgaggagattaaaagggagccatatagcactgtcaccccttatttgaggaactgatgtttgaaaggctgttcttttctctcttaatgtcatttctttaaaaatacatgtgcatactacacacagtatataatgcctccttaaggcatgatggagtcaccgtggtccatttgggtgacaaccagtgacttgggaagcacatagatacatcttacaagttgaatagagttgataactattttcagttttgagaataccagttcaggtgcagctcttaaacacattgccttatgactattagaatatgcctctcttttcataaataaaaatacatggtctatatccattttcttttatttctctctcttaagcttaaaaaggcaatgagagaggttaggagtgggttcatacacggagaatgagaaaacatgcattaaccaatattcagattttgatcaggggaaattctacacttgttgcn

SEQ ID NO: 47466 - DNA, 618 bp, Homo Sapiens
tttagaaataactcagtttttatcttttttcacattgaaaatcagttagatttgcttaagcctcaaagagaatgtttatgtaaattagcgctggcaatttttttttttctaaacaggaaaagggttaaatgaaggttgataaaatggatgttcaattgtctttctgaaagtgagtggcttgaagggatgaataaatattttcttaatatattcaaaaaagtgcattgctttctgtgatggaagttaagacctaaatgtctggaagttgtaaccctcaacacagcttttcctgatttgctgcaaaggcacatagctgattatagaagtgaagacggcaaggacggggactccaacaaaggaaaccctgttgcaggatttgggaactttcatgcttcagatgaaattcaggcatgtgagcatcactgcagaatgtggtgcatcattgccatcatgagtaatcacttgctgctcctacttctgagaccaagactcttttgtcatattctttagcaataggacgggtaaagactggatttaattgctgttcagagtataaaaactcaattgattccaacatatctgaatgtgcagtaaagtcttaaaagtcaaccgttaatc

SEQ ID NO: 47467 - DNA, 718 bp, Homo Sapiens
aagactcaaactgctcaaagtgacgggttcttggttgtctctgctgagcacgctgtgtcaatggagatggcctctgctgactcagatgaagacccaaggcataaggttgggaaaacacctcatttgaccttgccagctgaccttcaaaccctgcatttgaaccgaccaacattaagtccagagagtaaacttgaatggaataacgacattccagaagttaatcatttgaattctgaacactggagaaaaaccgaaaaatggacggggcatgaagagactaatcatctggaaaccgatttcagtggcgatggcatgacagagctagagctcgggcccagccccaggctgcagcccattcgcaggcacccgaaagaacttccccagtatggtggtcctggaaaggacatttttgaagatcaactatatcttcctgtgcattccgatggaatttcagttcatcagatgttcaccatggccaccgcagaacaccgaagtaattccagcatagcggggaagatgttgaccaaggtggagaagaatcacgaaaaggagaagtcacagcacctagaaggcagcgcctcctcttcactctcctctgattagatgaaactgttaccttaccctaaacacagtatttctttttaacttttttatttgtaaactaataaaggtaatcacagccaccaacattccaagctaccctgggtacctttgtgca

SEQ ID NO: 47468 - DNA, 711 bp, Homo Sapiens
aataatatttcttgagcatttactagggtgttgcgtgctgtgctaagtaaattttaagtctttcagttttatagatacggaaaacaagggtgactctttaccacaggatgaataaagaactaagtaatatgggaatgcagcaatttctggactagctgagccgattccttcctgtgagcacactgtaagctttcaagttctctgggcaggaattacagcacctgtcccctgcaatggccctgctgtgtgatgctcatcgcttcccttcgtgctggagcagtcccccaggtgtccatctcctatctttttgttccaatcttctgtgagttccagctagcaggctttacatctggggaaaggaaaaccaggggttttagctctgttctctgctcccatccttcgctcaccagctgagtgagaacatgaactttttgcaccatgtacccatggcttacactacttagaaaatcaccttttcagataaaacagtttatgagttcatagagaacaccagcactctttgacaaaactgtgagtgaccctttttaaacaatgctgagcaggccctgagctataatcaacggtgagctttaatgtctatgctgacagttaggttttgctctcttttgtaacaggttacgtagaccagcagtgtttaaatctaaatacgttgtgagtctgttatctgtcctatcgcgttttttaaatgac

SEQ ID NO: 47469 - DNA, 678 bp, Homo Sapiens
atcactggaggctgcagggaccaagaggccatcaccgtgtctatagagagcagacagaagcagaacagagcccggggctcctgagcctctgcgtgtgccctcccagcccacaccagtgctctcggccactgagcacccagactcaggcttgggttccccagccttattggaaggcagctcccgcataccaggataacccccgcaaaccacatagcagacccccgccatcctcgcagagtgggagaggctgcagcaaggctttgcctctgcagaccccatcttagtggcacggtgcttgggcctgtgtccccgggtggtggaaccctgtaccggtctgtggccctagggtccctgctctgtctgccccggccgtgctgtccgctgggtgaggcaggctcccccgtgccctgcctccctctgtcagggaacctgggaccccctccccactgcctgcacagaggaccctgaccctcggccagcagggtggccccaggtccatgttgggcactagggcaggttccgtgccagagtcgggggccacacgagggcctggtgccggtgaggggggcgtgcgctagagggggaaaggggccccggcacctgtccaccgtgtgggccgtgctgtgtccttatgtcattgtaatataatacagattttatatctcaaacaaaaacaaa

SEQ ID NO: 47470 - DNA, 636 bp, Homo Sapiens
atttttggtagcagtgcagtacctcagcccaaagaaactgtggtgtctcgttggcgtgctgatccctgggctcggggctcttattcctatgttgctgcaggatcatctggaaatgactatgatttaatggctcagccaatcactcctggcccctcgattccaggtgccccacagccgattccacgactcttctttgcgggagaacatacgatccgtaactacccagccacagtgcatggtgctctgctgagtgggctgcgagaagcgggaagaattgcagaccagtttttgggggccatgtatacgctgcctcgccaggccacaccaggtgttcctgcacagcagtccccaagcatgtgagacagatgcattctaagggaagaggcccatgtgcctgtttctgccatgtaaggaaggctcttctagcaatactagatcccactgagaaaatccaccctggcatctgggctcctgatcagctgatggagctcctgatttgacaaaggagcttgcctcctttgaatgacctagagcacagggaggaacttgtccattagtttggaattgtgttcttcgtaaagactgaggcaagcaagtgctgtgaaataacatcatcttagtcccttggtgtgtggg

SEQ ID NO: 47471 - DNA, 733 bp, Homo Sapiens
  misc_feature (560)..(560): n is a, c, g, or t
gggagcaaaaagagggagtggatctattttagatgagcccaggtaagacctctctgaagagctgtcatgaaggagggagggagcacattcctggcagagaaaacagcacgtgcaaaggccccgagactggagtgtgttcctgaagagcagccaggaggccagcatggctggagaggcaggcataggcagggaaccgagcagcaggtcagagcaggcgagctgacattctgcagcctggacggccatggcaggaagcttttagttggagagatacaggaagcctcctagggttctgagcagaagaggggcatgagctgattcacattctgaaggacctctctagctggccagtgctgaggaggttggagagagaaagggtgaaagcagagagaccagtgcagggctgttaacagggttgcaggcgagagactggggtgctgggctcccctagactaggactccagtgccctcctctcccaagagacaaaggccattgcattgaaggaggtgggaaatgattagattctgaacatatgtaattatttttcagtctttttcanagatacaaatatttacatagttttaatcatgtaatatatacaatttaatgtcctagtgttttacttaatagtgtatcatgttttccctgttggtatgtagcctggataaatgctcttaattataaaaaattctgtcgaggagtgttccatagtttattgttttcctattatga

SEQ ID NO: 47472 - DNA, 611 bp, Homo Sapiens
cacagtgttatgtggactgggccacgatagggtggagtgagctagtgaagaaggcagagggagacttggcttctggtctcagctatgcctgttttgtgaccttgattgagttgcttgggctttacttctgcctacaaatcaggggtaaaaatacctgttgggaggagaaatgagaacatagaggaaagcctcttggaggaaaggtgcttggaccaagtctcaggtgtgtctgcctgtggctgcacaggctctctaaccgaaacctcactttcagagagatgtgggtcctttgtctccaggatccacaccctagattttaacactgcattctcactataacatgccctataatggctgcatcccttttgagcaacctccaaaatctacatttacacagtaggtaaattagggatgactgcattatcaaaatactctcagggttcctataaatggcagctctcctgttgtattcaggtgttgtttacagactaacaaatgtgttggcaaatccctggttagatgcacttcctggtgttgagatgaacacgtcgatttttcaccaatcgatgaaccatgctctgcaatgacaatattaatgtgatccgacccta

SEQ ID NO: 47473 - DNA, 779 bp, Homo Sapiens
gctggctctgtaacagaagtgagcagtatggctgtctttaagacctcacaccttctcatctgcaggttggctagaagtggtggcatcctctcactctgtaattgtaatctcagctctcctaatcccatcacttccccagcccagagaagacattccaaccctgtctgatacccaggcccgtttctcacctgagcgcaccaccacctggcgtgtagaatctccaggaagcctggctgcagcttcccatttggttacgaggtcggagaaaaagtcaaagtcccctcctgggctgtcttcatcatactccgcagtcagactgggctggtagtaagctgccggtggaacacaatcatttgccctgggtgtccttggtcctgcctggctctctgtagtggaggctccccttggcatcaccttctctggcccttaggatctccccatttggagacagagccatttggatattttccccttgaacttctccatgacctgaagcgttccttccctggaggaactctttggttgcagggctaaacttagaggctgctagagtgtagtggttaagaacaggaacttgggtaccaggcgcctgaattttaatcagctccctcatttattaactctctgacttgatgcaagttacttaacctctctgtatagaattttcacatctttacacatgggaataatagtacctacctcatagggtcgtgtaacggacatcccctgataatacagcataaaaacaccttcaacaacacgacaacacaaaacaccct

SEQ ID NO: 47474 - DNA, 708 bp, Homo Sapiens
gccacatggatagtccctggatatccttgctgtggtagaggtcctctacccattccagccactgatagcagggggattttccttcctaaggagaacagatgtaacagctttgcaaagtaccggcccataggaatcaaatgggtgagatcagctttgggcctgatcccagcaagaccagcatctccagaccccagcctttctcctcaggcctaagagagtcagggaaagagaggagactgtcccagagaccttctcctcgggtcagccagatagtctggatctatggtgtgactcaagctcctccttacccagggggggtaaggccaggcctctagctacttggagttgtctgtaataatcttgaaaggcccaagggcctgtccccatcctgacttaaaggcatctgcttccctgtttcatatcacatgacagagaaacctgttctcatggcatgtaacatccctgtgaagagagccgtgtatatgatttgtcatttcgctaattcaattttaatctacaggttgggcatctaattttcaaattcctattgggaactcacattttacaccacgacctaccaatttacatataataataataataatactagtactaataaaccttttgaccagtgtcttccaagtagttccgatcacacgcacttatacggtgtttcacaacacagtccggagtgttacagacggaaag

SEQ ID NO: 47475 - DNA, 500 bp, Homo Sapiens
gcagcgctgccagcaggcatacatgcagtacatccaccaccgcttgattcacctgactcctgcggactacgacgactttgtgaatgcgatccggagtgcccgcagcgccttctgcctgacgcccatgggcatgatgcagttcaacgacatcctacagaacctcaagcgcagcaaacagaccaaggagctgtggcagcgggtctcactcgagatggccaccttctccccctgagtctttcacccttagggtcctatacagggacccaggcctgtggctatgggggcccctcacacagggggagtgaaacttggctggacagatcatcctcactcagttccctggtagcacagactgacagctgctcttgggctatagcttggggccaagatgtctcacaccctagaagcctagggctgggggagacagccctgtctgggagggggcgttgggtggcctctggtatttatttggcatttataaatatataaactcctttttt

SEQ ID NO: 47476 - DNA, 675 bp, Homo Sapiens
agcctgatggcccaggtattgagggcctcccctgctggtggccctgtcctgggatcctcagaagcctgactgtcctatgggcttctccagtgtccacaggggcttgggatggttgtggggggctggcccctctagcctttccggtccttcctgggcaaatctaagccttggccagggccgaagtttaggcccctgtcttgttcatgtagccgaggggcaggcgggggacctctacacctctgctgtgggcacggggctgctgagggtctgtggaactccagcagctctgcactgggtagagctgggcctagagctcagtcacaggcctgggcttcctggcctgagtgggtagacgcaggcggcagaggtgctggaccacatctccgccaagtcactgcccagcagccttctccgtcctgtccccagcccacgtgctccttgggtgtcagcttcctgtgcctctgtgggagagggcagctgccttgtgttatgtctggggccacagttgctgcaaagtcctggatctgccactcaaccccgggagtggtgttcccagtgtggctcccagagctttgaccagattgtgatcccagctggcccctatgttgtgttctggactgaggcctttgctgtgaactgcagtgtttcatacgaaccatctttcctagtgcatga

SEQ ID NO: 47477 - DNA, 753 bp, Homo Sapiens
cgcgtccgtggtcttaaaagatactgcattcattcatcagatatttattccatgcctactctatgctaggcactgtgctagatggtatgaaaacttattaggaacctttttgtttttgagaccattgcattctggctggtttgtgctggtttaacgacatctaagaaggtttagaaatggtgagaccaaaacaataactgttaatgatggacagcattattaggaaccctgtagtatgatatttaacaatataggcttcaagaagggctggtcctaagagggggcagaaatgaatgaccaggttaaatccctctacatgtggtttctgtttgaaaaaaagaaaactgacatttgaacaggacttttaatttgtttaaaactctggtaattacttgtaacagtagaaaatagaagtcattcttattttagaaaaagtgacagaagcagtccagtaagattatatgtttctgtttctggtaaataccatatatgatcctcgaaatgataatatctccagaatattgttttcacccaaatttgagtagatattttaaacacctaacaaagtaaagggctaaaagccattcagatagcagtaaaacattctgtatgatgtgcaataaaacatccaagatcttttttgaaagttttatttataatatacatttttgtatgagaaaggtgattggtacagggtgcctattttagtcatggatcaaaatttgtgtaacttgcagggctttctttcttttt

SEQ ID NO: 47478 - DNA, 672 bp, Homo Sapiens
  misc_feature (529)..(530): n is a, c, g, or t
  misc_feature (532)..(533): n is a, c, g, or t
  misc_feature (535)..(535): n is a, c, g, or t
  misc_feature (537)..(538): n is a, c, g, or t
  misc_feature (559)..(559): n is a, c, g, or t
  misc_feature (563)..(563): n is a, c, g, or t
  misc_feature (594)..(594): n is a, c, g, or t
  misc_feature (597)..(598): n is a, c, g, or t
  misc_feature (672)..(672): n is a, c, g, or t
gggaaggaagttggatgttttgattttactgtttatagatgttagattgtacagatttgtctgtatttctcaccatatctaatgatacttttttcattagattggtcttcaagaacagtattagttataattattttggttattcagtatatagttagctcttacagtttagctttattcaccatatttatactgtggattcacagcgagaggtagaggttattccaggagagttgatgaccttcatttaaagtccaactaaaatcagtagtagaaacataagaaaacatctttgcaatatttacttttgtttctgtttgccgtaaatagtaacattgtttttttttattttgtgtttgttataaaacagttgcattcacaatattattggcctgagatattgatgatattgtgatggtatgaaaatgtgtacattccctgtgcaacatcagatttgcaggaaaaatgaagcacttactgaaatcgctggtactctgaataataagcatggtcaaggagtgaaaaaaannannanannaaaaaaaaaaaaaaaaaaaanaaanaaaaaaaaaaaaaaaaaaaaaaaaaaaaaanaannaaaaaaaaaaaaaaaaaatttttaaaaaaaaataaaaatataaaatttttttccatcttttaattttaaaatan

SEQ ID NO: 47479 - DNA, 549 bp, Homo Sapiens
agcctccagaacagatgccatcttcctgaatgttgacatgccagtgggtgtgactccttcatttttccttctcccttccctttggacagtgttacagtgaacacttagcatcctgtttttggttggtagttaagcaaactgacattacggaaagtgccttagacactacagtactaagacaatgttgaatatatcattcgcctctataacaatttaatgtattcagttttgactgtgcttcatatcatgtacctctctagtcaaagtggtattacagacattcagtgacaatgaatcagtgttaattctaaatccttgatcctctgcaatgtgcttgaaaacacaaaccttttgggttaaaagctttaacatctattaggaagaatttgtcctgtgggtttggaatcttggattttccccctttatgaactgtactggctgttgaccaccagacacctgaccgcaaatatcttttcttgtattcccatatttctagacaatgatttttgtaagacaataaatttattcattataaaaaaaaaaaaaaag

SEQ ID NO: 47480 - DNA, 641 bp, Homo Sapiens
cacgcgtccgatttatttgagtgagccctaatttgaaaattaccagacttgatcctcctggtatgaatcaaggaaatactgtaccttgctcttagcaactctcagtggcctgaaagagaaaatgcacttcttcaaggtgagtgaatcatgctttttccacagttcagatcagaccctttatttttcaaactacaaggcctgcttattggacagtctaaggaatagctttgatacttggtattcagttggttccattattaatgtatattatttttatttaaacatcaaaacttaaaatatcagataatgttgcatgttttaaaaacacatttcatccctttggctacccaggaccagcactatttaagacactgcttatttataaaatgagaataatgattatatgtacatattcagacatcaaaatttaatgacattctattttgagaagggaagacaatgctgaagaaagtaaaactgttgattgaaatgctgacagggtggagaacgaatttgaagacagtggaataaactatgaactatgctaatggtaattagattttttgtttgtttagtatagtggtaaattgtgtagtatcttgctgagaatctaattctatcttgtaaaatcaatccaaatg

SEQ ID NO: 47481 - DNA, 907 bp, Homo Sapiens
tggaattgctaaagcttgtggaaaagctggatgtgctctccttggaggtgaaacagcagaaatgcctgacatgtatccccctggagagtatgacctagctgggtttgccgttggtgccatggagcgagatcagaaactccctcacctggaaagaatcactgagggtgatgttgttgttggaatagcttcatctggtcttcatagcaatggatttagccttgtgaggaaaatcgtggcaaaatcttccctccagtactcctctccagcacctgatggttgtggtgaccagactttaggggacttacttctcacgcctaccagaatctacagccattcactgttacctgtcctacgttcaggacatgtcaaagcctttgcccatattactggtggaggattactagagaacatccccagagtcctccctgagaaacttggggtagatttagatgcccagacctggaggatccccagggtcttctcatggttgcagcaggaaggacacctctctgaggaagagatggccagaacatttaactgtggggttggcgctgtccttgtggtatcaaaggagcagacagagcagattctgagggatatccagcagcacaaggaagaagcctgggtgattggcagtgtggttgcacgagctgaaggttccccacgtgtgaaagtcaagaatctgattgaaagcatgcaaataaatgggtcagtgtttgaagaatggcttccctgacaaatcattttctcttttgaaaaaaaaaaaagcccagagttggctggtctttaatatcctggaaaccaggatcgaaaccctgcaaaggcactttaataagacaggttacttcggggaaaacaaaaataggccttctggcacccaaatttggaataattggggttatccctt

SEQ ID NO: 47482 - DNA, 609 bp, Homo Sapiens
  misc_feature (316)..(316): n is a, c, g, or t
ggcagcgctagatggcaggaagcagccttgaagacccgtctttcccccacagcagcaggggccccagcagtaacaaagggtacctccaggggtttgggtagcgctgccctctggcagtcatgcaccgctgtctgccatagccgctctagggtcttggcagaattctgagcttgaagtgcagctcccttactaccctttcccttcctttttcttccctaataggaggtacaatctgcttttgtttgtcgttaagtggtcactcccatttcctttatcttggccgacaacacagagaggagggggagctgggcagtancttggggtgggggtgggcacctgtggttgtttttaatgggaaatacctctcagagatgttcatgcaggctccctagggccccatcccagtgccaggctggtttccatggagatagggcactgaggctcccgtgaggttggaatcgacttcaccatgggggtccttcagccagcatccagctccccacccccaggctggcagtagcactgctgagatgctgtatttccacccaattctgggtatatcagtgtgtcttgcagaatcttggatcattaaagataaacatattttta

SEQ ID NO: 47483 - DNA, 449 bp, Homo Sapiens
aatacttctgcaagttgatgaatcacaaagtatcaagaatgagctcactattcaggtgacttcacttcatgctgcattagaacaagaaagatctaaagtgaaagtattacaagcagagttagccaaataccagggtggcagaaaagggaaaagaaactctgaatccgaccagtgtaggtgattacattagcctttgaagtcaacacaaagtttaaaacttccaggattttgcaaagttgtatatatttaatgctgtgcaactgctaaactatgcagtttttgttgaaggaactaaaagcaactagctccctaatggtctataattttatttcttttggcttaaagtgaaaaagaagaaatagagaattccagcagaattcagtggttgtctactatccatacttcttatcactttagtttttcatcagtcaataaaattaatttactct

SEQ ID NO: 47484 - DNA, 581 bp, Homo Sapiens
gtgggactggggtcctcttggttctgcctgcagcctgcctggctccgcccctagtgccccctcctcaccacactggccccaggtctcaggaggggtgtcctgggcagggaaggtcagtgtcactgatggtttgctgtttggaagccattggcagggctgccgtgcatgtggctgtgagggctgcacagtcctgccaaggggcttcctccttgtcaccccgaaccttgtaatcgtgtgctggcgtggcagccctggctaagttaatccccaccgctttcagtggtagaaagaattccctgagtgggccaggctggtgccctcctcctaccctggcttttctgagtgagctgcctggagccctcatcccctctcccaggctgggctggccctgggcggggccactgtgtgctggcccactgtgacctgacccgaccttgtgcagcccccctgccctggtgtcctgggttttcgtgatgatctttgctctgtttccagtggggtttgaagcagagttcagggaaccctgcccaaggtcctcctgttcagacattcctatgttgaataaagtatgtttgacttcc

SEQ ID NO: 47485 - DNA, 805 bp, Homo Sapiens
  misc_feature (687)..(687): n is a, c, g, or t
  misc_feature (756)..(756): n is a, c, g, or t
  misc_feature (782)..(782): n is a, c, g, or t
  misc_feature (795)..(795): n is a, c, g, or t
gtaaattttatgcaacaaatggcaaacgtatcattattttgaaattgtgtatgtaaaagttatatttttacatgtagactcttgttattatgtgttttaatacattgtatcagtttttgtttttttttaaaaactgtggtttaaaaagaagtctcatttaaatgaaatagctacaagaatcagaattttatgttcatttctgaaaatgtaagaacaaataagatagttaccacgtggtcatcttttacaaacccataaacattttgattagctgtgtgtgtgttgaaaaactgtaaatatgttcagtagcgataaaactaaaataactttgatttgttgataagttcctaaaatgtggaggtggattaaaaccttaggagaatagcagaaatcaaacttcatgaaaagttattttggggctttcctgtgaaatgtatgaacaaagaggctcagagaaggacatggaagacaataatgtatactctctcctcctccctgaataatgaaaaccatgtgtatttgttccctccgtatgttaaagatttccttttagtggtacattctgcactcattttgtatagtctaccaaggcgggtatccctaggaacaatattatataggaagcaggtatactctgatcacattcaggataagtgtacagaagaaaatacggggtttactctttanggaactggaaacactccctgcattgatgacattttaagaatggcacttttggatcctggtatcataaangggcttaatagagcttgaattaaagnttttcaaatctgnaaaccaagcc

SEQ ID NO: 47486 - DNA, 541 bp, Homo Sapiens
aacttgagtcaggaatgaatcaatttcagcataaacaagcacaaaaatttagtctgctggctgactggaagcaaaaaagtcaagatggaatatgatgaattccaacacaatggggcaccaaggcctttaggcctctctttttattttgctttggttttgtttgtttttctttagagacatgctctttctcatgggacttgaagtggactcatctttgtgcagtgctggttttgccatactcatttcaagtattatagacatatgtaatggtgaaaatatatgaactgtggcctttttcattcttgttacttgtgatgcaattaagtgaagataagaaaaaaaaaaaaaaagcagagatttaccatgtatcagtgcctggctttttgttataaagctttgtttgtctagtgctcttttgctataaaatagactgtagtacaccctagtaggaaaaaaaaaaaactaaatttaaaaataaaaaatatatttggcttatttttcgcaggagcaatccttttataccatgaatattacaaaaaaa

SEQ ID NO: 47487 - DNA, 1003 bp, Homo Sapiens
ttaaaagcaacttggagcagttgatccacctccacattcaagtaatttatgaatatgcagaatagggatctgttcatctagaaatttttaccatttgtcttctgtgtagctgcaaggaacactaatgtttatacaactgtcagtccacccagtggtgcaactggttctgattcagtcttccgattcctttttatttttcactttttcctatttctgaattttttttttatttgtgatcttgattttgatgaggggttggggagtggggagggagtcgaaccaagacttggagttaagaggattttcatcttttgcatccaacaggcagaatatgatctgtgtccaaaagtgaacttgagtcaggaatgaatcaatttcagcataaacaagcacaaaaatttagtctgctggctgactggaagcaaaaaagtcaagatggaatatgatgaattccaacacaatggggcaccaaggcctttaggcctctctttttattttgctttggttttgtttgtttttctttagagacatgctctttctcatgggacttgaagtggactcatctttgtgcagtgctggttttgccatactcatttcaagtattatagacatatgtaatggtgaaaatatatgaactgtggcctttttcattcttgttacttgtgatgcaattaagtgaagataagaaaaaaaaaaaagcagagatttaccatgtatcagtgcctggctttttgttataaagctttgtttgtctagtgctcttttgctataaaatagactgtagtacaccctagttaggaaaaaaaaaaaactaattttaaaaataaaaaatatattttggctaattttttcccaaggaccaatccttttttatccgtgaaatatttccaaaaaaattggtccaaattctggaaaatttttttttggaattaaaattccggggcctcccctggaaaaataaaaaccctttttttacaccactccctaaaaaaaaaaaaaaaaa

SEQ ID NO: 47488 - DNA, 633 bp, Homo Sapiens
  misc_feature (611)..(611): n is a, c, g, or t
gctggagctcctctggcaggttctaaaagcacactactgagcagcggtgccctgccggacactgctggcgggggctcagtgagcactactcacagatccacacctgaccctgttgggtcgagtcaggctgggccttggtctgcactgtagcacctgtgttctttgagttcacatcatgaatgtggtgacttcccagataccatctcaggcttaacctagcacatcctatttcttttcttctatgatatccaaattggactgacctcacttcaaagttgctgtcccattttgtcaccctatcttatctcggggaaattgcagactgatggccagaccaactctgttgaaattcttgcatagagcaaacctttgctcatttttaagtggcatgggagaggccccaagcctagtaaagcctagtctgtgtcttcacagtgctggtagaatgtgtttgtgtgtataaatatatgatatagatttatatatgttgctaacgccatatattgaaggccaacataactggtggacagggtgggtgacagaaaatgaaagcctttttggtgattgttaaagcaagatgtgtatacagaaataaatagtttttctttcanaaaaaaaaaaaaaaaaaaaaca

SEQ ID NO: 47489 - DNA, 682 bp, Homo Sapiens
gaagggggccttcatgaagccttggaaggcccgctggttcgtgctggacaagaccaagcaccagctgcgctactacgaccaccgtgtggacacagagtgcaagggtgtcatcgacttggcggaggtggaggctgtggcacctggcacgcccactatgggtgcccctaagactgtggacgagaaggccttctttgacgtgaagacaacgcgtcgcgtttacaacttctgtgcccaggacgtgccctcggcccagcagtgggtggaccggatccagagctgcctgtcggacgcctgagcctcccagccctgcccggctgctctgcttccggtcgttaccgaccactaggggtgggcagggccgccccggccatgtttacagccccggccctcgacagtattgaggccccgagcccccagcacttgtgtgtacagcccccgtccccgccccgccccgcccggccggccctaacttattttggcgtcacagctgagcaccgtgccgggaggtggccaaggtacagcccgcaatgggcctgtaaatagtccggccccgtcagcgtgtgctggtccagccagcggctgcaggcgagtttctagaaccagagtctatataaagagagaactaacgccacgctcctgtgcctgccttccccactccccggctgcctgctctcggcctacc

SEQ ID NO: 47490 - DNA, 685 bp, Homo Sapiens
gcctgggtggcgattcggacgagggatacacgcagagcgattcatcaactataaccagacagtttctcgaatgcgaggtatctacacagctccctcgggtctggagtccacttgtttggttgtggcctatggtttggacatttaccaaactcgagtctacccatccaagcagtttgacgttctgaaggatgactatgactacgtgttaatcagcagcgtcctctttggcctggtttttgccaccatgatcactaagagactggcacaggtgaagctcctgaatcgggcctggcgataaagaacaaagactgtgcctaaaagtggagagccaggggagtgtgggtcagataagcagctacagctgcagtttggtggattggtggagtatgtgtgtgtgtcagtgctcagctaagaactgtagggaagatggatgaccttcacgcagaactccttttgggatatacatgatgcagaaaggatcctacatggagagagacagaactctctcagctgacactctcagagattcctgatgggctttctcttgaagtccaaaggcgtctgcattgtttcctttctttgcccatccatgaatgttctgttttgttttttttaataagaattccggctgatttttgtgaggcctgtttaaattgactttactttgcaaaaaaaaaaaaaaaaa

SEQ ID NO: 47491 - DNA, 658 bp, Homo Sapiens
  misc_feature (658)..(658): n is a, c, g, or t
gggattaatctgggcagacattatgtaaaagaaaggttgcgtttaatatattttttgaactttgtaggacaaaacatagctggttaaccttgaagtgactgttgtaccatggttgtgcacatgcttcagaatcctatggaagagaatattcctacttgcagtacatcaaaggaatggatggtggaccctactattcatgttttgagacataaatgttcactttaaagcaattgcataatagataaaaacctgaactttcattggatttttgttaattttcctcattttgaattatgtgcactaccatagctacatcagtttgatacagtattgaaaaattatcagttatattttgctgtttatgatctatttgtagattaggattaaaatggatttaatccatttttaaggctgtgtgaatttttctaaacaagaaccatttgcaatatggatttcttagagattaaaccaattataacttattagcagtcgcgagcacatgttcatatagtcaatgtaaaaatacactaatgagtatttggtaaatcccagtaggcttttaccattagcataattttgtgttgtacaattaagttacaattacatctctaattttggataatattcattggttaacaataaagtgacaaaagctcan

SEQ ID NO: 47492 - DNA, 845 bp, Homo Sapiens
ttttttctttttcttttttttttctgttgaagattaacactaattatcacgtctgacaaatgtgtatgtgtggtttcagttctgtgtacattttaaaggataatggtgaacattttaatgggtttcccttgccctttccatatttaacctatttccacattctctctcactcacattttctcagtgtgcccttctcttatctgccatgtccatagccataattccaccatcatacagatcaggcagtgtttaaaatgatggtaggtagcacagtggacagtctttgatcatcatgtagaatatggctatgaatcaggaaagagattagaacatttaataatgtatgtacagctggtgcttagtttttttttaatctaaatttaattaccttattggatatttgatatttggttatttaatcacagtcatctttaacagcttacactgattggtgttttatctcctgtgatcctttgatggctttttttgcctaccatttcacagaggtttagacagcagtagtagctccctaggagagtttactgatgaaacagcctctgcaagattttaaaagttttgttcttttatagactgatttagaaaaacaaatgattagttaaaaaaagaaaatatacatttgttggtaactaatgttattttttaaaacctggacctttctggaagggcagcatataaaaacatcagtcccgaggaggggacaacaatactacctcactactacatctgtgatgactggttgttcaaacacaatggagtgtgtaaggtatatgttttataattcataaccatagcctcgatcatcaagaaatactttcgaaatttca

SEQ ID NO: 47493 - DNA, 687 bp, Homo Sapiens
ttagaaggtgcctgccgaggcgggacagagtgtttgctcgcgctggagaaggctctgctcagccctgagagtcccttcctgccccaccgatactggcactttaaaaaggaagctgaccgcacagtgtccagacgaattggcccccagaagatggggagttctgtcctgcccttctgtgtctgcgtgacctcacccagcctaggagggaggtgcattcagggtagatttgcctctcattcaaagttctggggctttgggcggaaaacagccagctttggcgctgttggggagactcctccagaccaggaaccccagaaggagacagagcctgccacatcctcccacgccaggccctgggccagggtgattggactgagaatttggccacaaccaaattgatgctggctggaaccagaggccagaaagcctggccttgtccccatgtgggagccctgtcctcagccctcttgtccccttgagctcagtgaattcccaccaggtgcccacagctcctggacttcaaattctatatattgagagagttggagagtatatcagagatatttttggaaaggagttggtctatgcaatgtcagtttggaatcttcttgaaagtttaatgtttttattaggagatttaaagaaaataaaggtctacaatatcaaaaaaaaaaaaaaaaaaaaaaa

SEQ ID NO: 47494 - DNA, 608 bp, Homo Sapiens
ctggggcacccctagtgagaaaatctggcccggctacagcgaggctcccagcagtcaagaagatgaccttcagcgagcacccctacaacaacctccgcaagcgcttcggggctctgctctcagaccagggcttcgacctcatgaacaagttcctgacctacttccccgggaggaggatcagcgctgaggacggcctcaagcatgagtatttccgcgagacccccctccccatcgacccctccatgttccccacgtggcccgccaagagcgagcagcagcgtgtgaagcggggcaccagcccgaggccccctgagggaggcctgggctacagccagctgggtgacgacgacctgaaggagacgggcttccaccttaccaccacgaaccagggggcctctgccgcgggccccggcttcagcctcaagttctgaaggtcagagtggaccccgtcatggggagaactcagccgggaccacaggcgtggctactgcggctggagctgcgatgagactcggaactcctcgtcttactttgtgctccatgttttgtttttgtattttggtttgtaaatttgtagaattaaatcattttccttgttgtggaggaaa

SEQ ID NO: 47495 - DNA, 897 bp, Homo Sapiens
  misc_feature (877)..(877): n is a, c, g, or t
aaaagcatcttgactcctgaaggtgtttttattctcaaccttgtgtgccgagacttggggctaaaagactcagtgctggctgggctcaaggcagtgttccccctcctatatgtccggcgaattgagggtgaagtgaatgagatcctgttctgtcagctgcaccctgagcaaaaacttgccacaccagagctcctagaaacagcccaggctttggagcggaccctgaggaagcctgggaggggttgggatgacacgtatgtcttgtcagatatgctcaagacggtgaaaattgtgtgactgcttaggccaagcagccctcctgcctagactgaccttggactcccagcctgccagagaatgaagaaatacaacgcacagtacttttgaagcttcgtatttttcttggtttcacactcagctacatgtgacctccagcttggtgaggttgcctgaagattagggaaaataaaaatgtccttcccatcttgtcctcttcagtaccacttgggttggtttgtctttgcttcctacaccacgtccttgagtggagttccctgctgaagcccctagcacacactgcatgccttaacaagtgtgtgcaagcccctcagaactcaagacatccaaattttattgcgtctctacttatactggtttgcttttgatttattcctctattagttctataggagtgatctcaagtgagatagcagagcaagatgccaaaagaccataaatagagtaaggtttctatagatgtgagacagatttgagagagcatttactctgtctccctgtggatgaaactgctgctgaaatggttccaattttttaggaatctgcttacccacttcattatttgacagctttccctggntgaccccaaccttgtagcct

SEQ ID NO: 47496 - DNA, 846 bp, Homo Sapiens
gcttattgccctccagtctgggcaacaaaaatgaaactccgtctcaaaaaaaaaaagtaggtcaattcgtaacagtttattttggacacaccctgaagcttttgttttgaattaagaaatgagtttcaggaattgacaaaccatttgttaaccagctgtcctgggctattgaagaagatttcattttccgcgcatccacttgttgcagtccaagtcctctagtgcaacgccatagcaaatataaagatttactatgcacgtgatacattttatggagtgcctcaagccaagatagtgaatttatatgaagggtgtgaaatgtatttctttactactatagtagtttagttataactttgcatctataattgagctttctcatctgtcaaatgctatggttttcttaaaatgttacaattctagatctatccaccttgtttttttattgtctacaaaccattaaatgtaaatattgtttttagagtcagtcattggctttgtcatttaccctttgagagttccacaagtggtagtagagtggtttaacgtctttcctctagtactaccagtattcataaatgtataccccttactgtaatttgttcctcttagaagtcagatcatctgatttatagaggattatgaaaaccagagtttttgaaaaggcttattttatacatacgtattatatagagaaacaaatggttttattaaatgtttcattgaccccagtaatttaaaagtaatatgttacctatgtctttcaggaaaaataatatagcagctgatctgtaaatgactttaaaaggctatttagtaattttaaataaatttacttttcttggt

SEQ ID NO: 47497 - DNA, 1032 bp, Homo Sapiens
  misc_feature (563)..(563): n is a, c, g, or t
  misc_feature (716)..(716): n is a, c, g, or t
  misc_feature (775)..(775): n is a, c, g, or t
  misc_feature (823)..(824): n is a, c, g, or t
  misc_feature (851)..(851): n is a, c, g, or t
  misc_feature (853)..(853): n is a, c, g, or t
cccacgcgtccgggccagaatgcagctgtggtacaccgctttgagtcatttcccgcaggctctactttgatcttctacaaatattgtgaccatgaaaacgcagccttcaaagatgtagccttagtcctgactgtcttattggaggaagagacacttggaacaagtctaggcctaaaggaagttgaagaaaaagtaagagattttcttaaagtcaagttcaccaattctaacacacccaactcctacaatcatatggacccagacaaactgaatggcctctggagccgtatttctcacttagttctgcctgtgcaacctgaaaatgccctgaaaaggggcatctgcttataagaagtgagagagaagaaaaatcatgtcccaagttctgagaattgttcacactttctaaccagagacagaattcagagctctttttgaaagaactagtttctttttaaagaagttaagtgcttacataaacatggaacatataaatcattcattcaacctaattatctgtgatatgagagaatcatttcagtttccattgagagctctgttanaggtatcttaggagtgcagattatatgcagttccttagagaatctgttttgattctgggctgagttattacagttatggtatgaccagtgagagcgatttgtgtcctttcttatgaaccttcctgattttttaacttagatttctcactaagnttcctgagttattagtaagattgctcccctaatgtaaccaggggatttttccattatgntcccttttataccatttaggtgtgagtttctttagcttctgcctatanngacataagtaatgaaagggtcatctangntgtggggtttgaaatttttttcttttggtttttggggaaatggaaagaaacaggcaagggaaggaaaaataatggggaaaacctgaaagggaggaaatggttaccgtaattccacctggagatgtaagtttaatcccaaccttaggggtatattgaacctgggtaaatccttgggggga

SEQ ID NO: 47498 - DNA, 732 bp, Homo Sapiens
ttctgtttcgaggcagaagccagactaattttcatgcctcctgactcccaatcagtttcacaaagggattcaatctgtttatatacgttacattcctggatacgaggtcttttgatgttcagagtaactgactagttagtattagaagaccctcgaggtttttttccacagaaaaacatctgaagatggattgggtgagggctggcaaaacgaaggcatgccgggccagctccttaacccaatgacccagtgatgctgcaaggctggaacggggtccaggagactgtgtgtaacaggtgccctaggtgacccttataatcagggaagtttggtgaacaaaaatcgaacccatgagtgaacataaattaaaaagttgatcaacctattaaaatgtgtatttcattgggtagcttttctcactgtagacagattttttccttcttcaatgaaaaggcttttaaattagtacaactgttactatttaaaaaaaaaataccctaagtactctgtttacttctggtgaaacaaaaccagtcattagaaatggtctgtgcttttattttcccagactggagtggcttttctggaaacaacacaagacaacagaaaacaggtgtacacatatctctcattctcttaagccaagaagtgtgcttccctagctgaagtgtagatggtcgtgtaggggtgggtggaaaatcatgtggcatacaggtgtgggtgtaatatgtg

SEQ ID NO: 47499 - DNA, 316 bp, Homo Sapiens
tgttactatttaaaaaaaaaataccctaagtactctgtttacttctggtgaaacaaaaccagtcattagaaatggtctgtgcttttattttcccagactggagtggcttttctgaaacacacacacacacacacacacacacacacacacacacgtacacacatccctcacttctcttaagccaaaaagtttgctttccctacctgcagtgtagatggctcttgtttttgtttttttgttttaatcatttggcattcacatgtggctgttaatatgtgcttgtttttaattaaaacaagaagctttaaaaaaaaaa

SEQ ID NO: 47500 - DNA, 615 bp, Homo Sapiens
attagaaccacatatctttttttgtgtggatggggaaaatgttttaaaatccagttatttaatatgagtttgagagagaaaattgttttttaaaaatatatgtgcattgaaatgatggcaatgcttatagtatgatcaagtatgaaaggaactttaaattcttatatttacttttctctcagtaaattgttaaattttcactcagcaaaagattggcatttgttaagtgttctatatttagtactaaaatcacagtcatgaaatcatagtcataaaatggtcttcacacagcagtcatccgtgtcatttatcattttgtaatattaaattatggcaattttatttcaaactaaagtttgaacaccggaaagtcattactcagtgatttgtaatttgggacttggattatttatctagagatgtttgtatattttgtcagtaactaatactgcgctgccatcatggtgactgtcatggttctacagaaatgccctccatgtgtccctctaatgttgcatgtttcagtgggttggaagttttgtatatttattgtattaacacagagtgtcataaaataaaatgctgtttactggaaaaaaaaaaaaaaaaaatggc

SEQ ID NO: 47501 - DNA, 727 bp, Homo Sapiens
  misc_feature (571)..(571): n is a, c, g, or t
  misc_feature (727)..(727): n is a, c, g, or t
ggaagaagtttatataatatgcagtacattatccaaaagagaaggtagttaatgcagtagaaagtagtggtaataattcctttttaaaaaaatttcggtagtcatatagtaacattttgctatatgaaaactttggtatattctgtggttacaactaagattgtgtctggcagctcttttttggggatgtgtgtgtgtgatttttaacagaggtattaaaggctagcctaactgttgtctaaaaagattgtacagtatttaagggattttccttttagcttttcatctccagtggcattaaacataaaaagaccctggcattttttcacatacttgaatccctaaatgcacctgtctttcactttttgagacagactgaatatatctaaaatttccagcaataaaaaaaaaaagcatttaacttgcaccaagcaagaaaatataaatacagttaactgcattaagataatcacgttaaaattgttactatgcagcacagaacttcattcttatagtattcttgggttcaacctttgaatcaattttaccactgattaaataaatgactcanagacatctgtaagtcatgctgctgtgttttgaaagtctttaactaaatttagattgcagaatgaagtgatatcatagattagtagatgtgaataagtgaacctattttaaatcaaagcaaaagtacctcttcagtatagctcacgtacgtttcccn

SEQ ID NO: 47502 - DNA, 670 bp, Homo Sapiens
  misc_feature (561)..(561): n is a, c, g, or t
  misc_feature (594)..(594): n is a, c, g, or t
  misc_feature (620)..(620): n is a, c, g, or t
  misc_feature (622)..(622): n is a, c, g, or t
  misc_feature (624)..(629): n is a, c, g, or t
  misc_feature (631)..(633): n is a, c, g, or t
  misc_feature (637)..(645): n is a, c, g, or t
  misc_feature (647)..(650): n is a, c, g, or t
  misc_feature (652)..(653): n is a, c, g, or t
  misc_feature (658)..(664): n is a, c, g, or t
ggtaagaatagctaaaatgttgcagagaaataagtgacccaacaaaatttattcatctattatgggtaagatctgccataaattcttcctaaataatttgtttactaactctttaggccactgtgctttgcggtccattagtaaacttgtgttgctaagtgctaaacagaatactgctattttgagagagtcaagactctttcttaagggccaagaaagcaacttgagccttgggctaatctggctgagtagtcagttataaaagcataattgctttatattttggatcattttttactgggggcggacttggggggggttgcatacaaagataacatatatatccaactttctgaaatgaaatgtttttagattactttttcaactgtaaataatgtacatttaatgtcacaagaaaaaaatgtcttctgcaaattttctagtataacagaaatttttgtagatgaaaaaaatcattatgtttagaggtctaatgctatgttttcatattacagagtgaatttgtatttaaacaaaaatttaaattttggaatcctctanacatttttgtatctttaattggtttattattanataaatcatataaaaattcaaaaaananannnnnnannnattnnnnnnnnnannnnannaaaannnnnnnccttgt

SEQ ID NO: 47503 - DNA, 698 bp, Homo Sapiens
cacgaggcggcacgaggactgaagcaccttccctaaagaaaacttgggtatacaattactccacagacagagctgagggttttttacccaaatcagtcactggattttgctgcctgatacgtgaatcttcttggaatttttctcatgtggatctaaggggaatgctttattatggctgctgttgtccaacagaacgacctagtatttgaatttgctagtaacgtcatggaggatgaacgacagcttggtgatccagctatttttcctgccgtaattgtggaacatgttcctggtgctgatattctcaatagttatgccggtctagcctgtgtggaagagcccagtgacatgattactgagagttcactggatgttgctgaagaagaaatcatagacgatgatgatgatgacatcacccttacagttgaagcttcttgtcatgacggggatgaaacaattgaaactattgaggctgctgaggcactcctcaatatggattcccctggccctatgctggatgaaaaacgaataaataataatatatttagttcacctgaagatgacatggttgttgccccagtcacccatgtgtccgtcacattagatgggattcctgaagtgatggaaacacagcaggtgcaagaaaaatatgcagactcaccgggagcctcatcaccagaacagcctaagaggaaaaa

SEQ ID NO: 47504 - DNA, 985 bp, Homo Sapiens
  misc_feature (666)..(666): n is a, c, g, or t
  misc_feature (765)..(765): n is a, c, g, or t
  misc_feature (783)..(783): n is a, c, g, or t
  misc_feature (801)..(801): n is a, c, g, or t
  misc_feature (823)..(823): n is a, c, g, or t
  misc_feature (834)..(834): n is a, c, g, or t
ccacgcgtccgcttccttctgcggaggagccaggctgcagccagtcaccgcgtgctgcagcgagccctggagtgcctgcctagcaaggagcatgtggatgtcattgccaagtttgcccagcttgagtttcagctgggggatgcagagcgggccaaagccatttttgagaacacgctgagcacctacccaaagcgcacagatgtctggtcggtctatatcgacatgaccatcaagcacggcagccagaaggacgtccgggacatctttgagcgggtcattcatctgagcttggcccccaagagaatgaagttcttcttcaagcgctacctggactacgagaagcagcatggcactgagaaggatgtgcaggcagtcaaggccaaggccctggagtatgtggaggccaagagctcagtgctagaggcctagtggcaggctggctctgtgggacactgtcaacaatgggccagcccggccccgcctcgagtgcctgggcactcggaaaactgttacctcaggactctatttaaatgctgctttttctgcagcacgcttggggaaatcctgtcaggatgaaaaggaagttgagattttttaaatccctcttcgcttgctttattttcagtaccaacttgttatctttttccttatctgaggctacctggnggattgtgggcagcaggcccctggactcccagaaatgctgagggtccctctttcaggggagttccctggggagcaagagtagaggggctattcccgagnggtcctggtggtcagggnccctgctttgtccctggncaggctgtcagtcccacctggnaagggaatcantaaggttcccaggggaatggggccctccccctcccgatccttgggagtctttggggggggtcctttcaccctcagccttcctgtgtaactttctggcccctttagggggaaggctaagtaaatccggggaaagggagggaccaatttccaa

SEQ ID NO: 47505 - DNA, 587 bp, Homo Sapiens
tgcaaaggtggggggccgacaccctaaaactaacccaggccccagaccactggaggccagggcttccctgcacgggctaaggggagttgggatatcaccccaaagtgaccttgccagtgagctgttcagcaggtagccactgccctgccatctgtgcagagccagccaccttgggggctggggttcccgctttgaggcccaccttccatactccccttgactcggctctggctgaactggggaactctcttgtggtcagcaaagcccctgccatgcaggccaggtgccattgagaattaagtgctcagagggccaggagcccaggggatgggaaagtgtgtggttttagtacgttcaaaagggacaatcgcttgcagttggtagatctagcgatctagttgggagataatggtgtttaccccatatgaagtattcaatagttctacttgtgaatttgtatttattttgagttatacttgacacagaattccttttttaaaaaaatatgtgtgtattttggaaaaaaaattcatagatgttaaaatttctgcatggttaccagtttttctcacaacactgaatttggt

SEQ ID NO: 47506 - DNA, 525 bp, Homo Sapiens
gaacgaggttttttttttatttttcagttcatatctttctgggcttgacatggctgatggtgtagctgaaaccctcctaacactaaaagccatttaatcttttctgtaataggagcagaaaatagttaatcatccacctagtaatataagattactgtgaatattatcttctatacattaaaacagttctagtttgtagaataataccatacaagttttatttttaaattctagttattttcagtgcttacttaaatgtaattctagaattcctccacaacttttaatattttgtatgccagtgattctcaagataaatcatgattgtagtagttgttactgttggcagtttgtagtagtattcaggtattttggggatgggggaaaacaccaaaaatcagtgtcttttatctggtgatcactgtggtatctacagtattctagtctcctgcacaaaaactgaacccactgggcctatgcatccctcacactttttttctagtataaaagcaatacataatgtgt

SEQ ID NO: 47507 - DNA, 728 bp, Homo Sapiens
agccagaagctaaacattgtcttgtcatgtgtttaggtgggttgatttggagaaaatgattgtttagcatctttacagatggagaggacagagtcagtctccttcggataattccaatcgtcttccttttacaggtggataaagtagattaggacaagatcacacattctatctgtgtctgtggctgcatattttgcaaaaccagaaacaaaatcgcagactgccgtggtttagaccatttataatgtcaaaactgtaatgacaaatttctgttcacttttatgctaccagtatgactttataggggagaaggaaagccttttaattagccacctgggaattactcttttaaaaaatgccttttctcaaaagaacatgataccactccaagtaaatcattgccactaggggttttcctccttccttctgttgcccatgcccctgcctgaaagtgtagggtaagaggaaaaacaagtaaaaccttagtgttgatggtaaactgagaactctgtagcttaccttggattccagagcagaagactggtttacattcagtactcatccttattgacgttaacaccaggaatctccatgtttattatttttcgtggaaactccatgtttattatttttggtggtctctattgaccaatgtatttcaaacttttttgactgcaagtcataataaaaataactttttacatcacgacccaaaaaaaaaaaaaaaa

SEQ ID NO: 47508 - DNA, 610 bp, Homo Sapiens
gtctgctgccgcctgccggggtggcagagtgagttgtctcaggaccccgtcactgcgacgttgacactcctctcccttcccttcctccccaactccccaaacactgtggaaggggagaaggaagtgatccacagcattcaggccacttggggtctagaccatggtggtgccagcctggggggggcagtggccctcagctctgcccgctggagcggttgagtgcagaagggtgcgcctcttccctctacccccgcaccacctgctgtgtgccagcctgagacggttcctgcctgtcttgggggttggtggagggtggaggcagttctgccagccgtggcagggctgctatggggcatccagggctgtgggggtctggaggaggggacatgaggtgagaggtatcctggccgagggcggggggcagcggggggtctccctccggacctacctcagggagctgagcgtgcaggcgctccagggcaggcctgggacagagtcaaggctcagagaataaaggtagctaatctcatcataatatttttattagaatgttctgatgataaaaataaaacttgttttctttaaagaaaaaaaagaagaaaaaaaaaca

SEQ ID NO: 47509 - DNA, 976 bp, Homo Sapiens
tgggtcagggtggaggtcctgggtgggctaaggcgtgagccccagcactaggtgggaaggctgctgaggtctctcccacccctgaggagccctggtttcagccccctcagtctgatgaattgcttagcctgttgcctttgactaggggcctgggtggcctcattaactctaggggtccctttgggctcttgattctccctgaaggagggatgcatttctctcttgctcttcctgtacccacatttgggggaagctgaggagggaggaacagtcagccacagctctcttccagcactgtcctctccaccccaagctttgaggaagagcatccccttcctcctttccctggccactgctgctgcagccaatatcctctctgggcctgggaccctctccacagaggggatgtggtccctggtcatgacataacctagcagcagtaggaaaaactcccttctatgaaggggaagcagactgggccataaggaaacagcaggactggctcaagtgcccaaggtttgtttagggcctgggaattggccatgtgtcaatttattgaccggaccacccgccctccttctccctccctcttccgccaagagagttaagttaattaggcgaaaagaagacggaagtgggcgccaccctgcccgccgccgccgcagccagccttgtgaactgggtcggtgcggcggccgcgggccgcatgacaaaattttgctaggagcagacacgccccgacatgggcgaggcggcgggacggcgcggatcggcccgaccgcggcggacaggagacgaccagagcgggccgcaccgcgcgcgccgccgcctctcgagtgatccctgcaaatgccgctcgacgcgtgcgggcggcacgagagggaacgaagaacaccgaaataagaccagagcggatttcttccatctcagcacgctctcggccgccgtcgctgagagcatacactactccccgcca

SEQ ID NO: 47510 - DNA, 624 bp, Homo Sapiens
gcacgaggttcacaaagcatggcttgctcaagttgaaccctgtcggagccaagttcgacccttatgaacatgaggccttgttccacacaccggttgaggggaaggagccaggcacagtggccctagttagcaaagtggggtacaagctgcatgggcgcactctgagacccgccctggtgggggtggtgaaggaagcttagctgctgttgatggggtgggtgtttttaaactcacttgatgtaactctcaaggctggttcattgtttctcatctatgagtacgtgtgaccttttcccaaaccttattggaaaccttaagtaaccagtggctaaacagaaaagccggttgcccaactgcattaatgaactctaattcgggagtctgttcccttttagtgccacgcgttgaatagttccacatactttcagaagagctcagcagggccctgcctggtctcccgagcatcatgagtaacgtgtctgctcagactctgctgacaccaaagtattttaaacaaataaaaggtcttggggaattctgtttggctacctgggcacgccagtctgcaccatgtgtccctgcggcgcatgagtgactggcgtatttagcccgtcacatttcatt

SEQ ID NO: 47511 - DNA, 559 bp, Homo Sapiens
ggatggaatgcatgtctgctccttgttctgaaaaatgtaggcatctactacattttaaaacacagtgaaacatatacataagcctataaaaaaagatttgtgcaatttgaaagcctgttaattttttatgtagacatacctacacacgaaagggttaaattcacagccttactagttccttgcttccagtatttcaattggtctcctcccctcattattattattactactagtactattatttttgcacatagttaactgcccttcaatatgattcttaaaaagtgctgtttctgtggtatcgtattctctaaataatcatatttaattttttaaaacaaggttgcagtttctaattgtttcgttcctgtgtttttgctggtgtgtaataaaagcaagttttttcttttcatggttatttaatacattagctgcctgtaaataattcttgttataatgctctggaatgtgttgtagaagttgtattagattagttttaaacccttgtttgaaagccacattgtttggttatttctattaaattagaaaattgacaaag

SEQ ID NO: 47512 - DNA, 632 bp, Homo Sapiens
tggatttgtaatatatgctgtctatttctaatgttcacattcatattttgaggttctatcttattttaatagagaacagacttctcaaaaaatcttcagaagcagcttattattgaaatatcgaaatattgaaataaacccggtggggttagattactcatctgtccaccaagtgggacatttgcatggactgggggcttaaaggacttagaagagacctgtaagtaaatcctgaaaatgagccaatccccacttgaatggttactggagtaaacccacctttaccaccccaattacagcacccgaggccgataaaccaacttggctctggttcatttttcttttcttcatttgtgatgctcagattcaaaatgtgtgttctacactgttacaggcttctcttttgtttgattaaagattttagtcctacttttgtatggacacattagaatattcagagaccaaaatagaagaatttgctgttagatatttttcagaagtcagcagatttgtggcaaatcatttatttgcctttttacaaattcatttaagcagttcagagagtagactactcagaaaattatttcacgtaattgtctaagaggtcaatattttttaatgcatattgaatc

SEQ ID NO: 47513 - DNA, 587 bp, Homo Sapiens
cccatttggccctgggctcaggggaccaggtggggcgggtggggagctgtccggtgctaccacaccgtgccctcagtggactaaccacagcagcagccagggatgggccctggaggttcccggccggagagtgcctctcccctctgccatccacgtcaggtctttggtggggggaccccaaagccattctgggaagggctccagaagaaggtccagcctaggccccctgcaaggctggcagcccccacccccaccccccaggccgccttgagaagcacagtttaactcactgcgggctcctgagcctgcttctgcctgctttccacctccccagtccctttctctggccctgtccatgtgactttggcccttggttttctttccagattggaggtttccacgaggccccccaccgtggaagtaaccaagggcgcttccttgtgggcagctgcaggccccatgcctctcctccctctctggcagggccccatcctgggcagaggggcctggggctgggcccagagtccagccgtccagctgctcctttcccagtttgatttcaataaatctgtccactccccttttgt

SEQ ID NO: 47514 - DNA, 881 bp, Homo Sapiens
tcgcagtcgcagccgctctccacggagggaacgtaggcgttcccggtccacatcccgggagagagaacgcaggcgccgagaaaggtccaggtctcgggagagagatcggagaaggagccgctcgcgatccccgcaccgaagacgctcccgatctccaagacgacatagatccacatctccttccccttctcgactgaaagaaagaagagatgaggaaaagaaagaaacaaaagaaacaaagagcaaagaacggcagattactgaggaagacttagagggcaaaacagaggaagaaatagaaatgatgaagttaatgggatttgcctcctttgactccacaaaaggtaagaaggtggatggctctgtaaatgcctatgccataaatgtctctcagaagaggaagtacaggcagtacatgaatcgaaaaggtggattcaacagacctttggatttcattgcatgagaattgaagtgttgaaggatgattttttttcccctcatcttggtcagagagtggattttgtattttgtatttaacttgcattcaaaaaacaggatctcagttctcctttcttgtaaagtaagaaaatcttatttatgatatatgcagttaacttaccttgcctcaacagaagaaaggttaaatattacatttttttcttttaggaaatatcatttgtggcaggcgtcaaccccattttatttgtccttattcctgtggaagcagtatatgttttcttcctgaatgctcattaggacttcttaaaaaacatgaaagtaatttggaagtaagtttatccaataaagcagtatttctacccttttagatttgataaatatttttattactaaagaatctccccagacattttctttttttt

SEQ ID NO: 47515 - DNA, 939 bp, Homo Sapiens
  misc_feature (570)..(642): n is a, c, g, or t
  misc_feature (644)..(649): n is a, c, g, or t
  misc_feature (651)..(653): n is a, c, g, or t
  misc_feature (655)..(655): n is a, c, g, or t
gacaccagcccctgagggtggggtgggacgggtggtgcttaaaagaggaaggggaccagtgtagcaacttgccagggaccccacccctccctctctgggcctgtgcagtgagcatggggattcccatcaaggggcctggcacctgtgctagttacgtagccgctgctcacgcgctcactcctgaccacatgcacgttccctagatgcagactgctttgaactttaaagctgtacaatttggttatgtttgtgctgacttaaaatatattttaatgaggaaaaaataatggagaaccctgggaaggacctggttcttttgcttctcggggaactgtaagccctcgcgttctgggaatcgctctctgctgctctttcctggaagctaagcctgtctccaccgcccgaggcctgcgccggtggctcccgccgcagttgcgtttgctttggaccttgcgtgcgggggagggggtgctcggtccgagcccgctcctttctgtacacctagcgctgcccgccccgcttgtgtctgaggtcgtgtatgtcaaaaataaagccgctagaaacggaaannnnnnnnnnnnnnnnnnnnnnnnnnnnnnnnnnnnnnnnnnnnnnnnnnnnnnnnnnnnnnnnnnnnnnnnnannnnnnannnanaaaaaaaaaccgggggcccttcccccttggaccccctcccttttccaaaagttccgtttcccccctgggccggtttttcccccaccaacggcggcggggggttttttcggaagggcgttttcccccggagggaaaaaggaaccccatttcgtgggccccgcataccaaaaaaccctcccctttttttaacccccttttttgttggtagcaaaaaaaagggggggaatgaaacccttttttccctggggtgggaaacttgggaagaatattaatttcccccctaa

SEQ ID NO: 47516 - DNA, 730 bp, Homo Sapiens
cgaatatttttaataggatccgcagacacccaaaggagaagcttggtcttttccaggtatttccaacttgagttcaacccaaagcctttgaaaggaatgcattaccacatgaccacatgctgagaccccatggggtctaacacgggacctaagaaagtctctgcagccagatagtacatggtgtctccacaaaactaggcattctggagattgcccagaaagggatgtgaggggaccgttaagatctgtcttgcttatctcatgcactcacattccttcagcctcctggagttcctgataaaaggaagccagggtgttgacattttttagctattgatttcccaatagcttgtggatcagttgtacacccacacttccttctctgcctaattccgtttttctggaaaaagtagtatgcccatgtatgtgtgtttttcttaacacaggtccatgaaagtttggcttcctggtttgatgtctgttgcgtggcctggaaaccagggagcagcaactattgagatggtttctgtgttcagtgaaaaattctatttcattgagacaattttttctttatccacagtaattttttgacactgtcatcatgaaactacccttaggaaaataagattacctgcaaaaaaaaaaaaaagaaatgagttatggaataggaacagttatgtgatgattctgaaactttaacttagagcttcattactttaagaatggaaaa

SEQ ID NO: 47517 - DNA, 634 bp, Homo Sapiens
gtcctgtatgggcatggggctgcagtgagctgtgtggccatcagcactgaacttgacatggctgtgtctggatctgaggatggaactgtgatcatacacactgtacgccgcggacagtttgtagcggcactacggcctctgggtgccacattccctggacctattttccacctggcattggggtccgaaggccagattgtggtacagagctcagcgtgggaacgtcctggggcccaggtcacctactccttgcacctgtattcagtcaatgggaagttgcgggcttcactgcccctggcagagcagcctacagccctgacggtgacagaggactttgtgttgctgggcaccgcccagtgcgccctgcacatcctccaactaaacacactgctcccggccgcgcctcccttgcccatgaaggtggccatccgcagcgtggccgtgaccaaggagcgcagccacgtgctggtgggcctggaggatggcaagctcatcgtggtggtcgcggggcagccctctgaggtgcgcagcagccagttcgcgcggaagctgtggcggtcctcgcggcgcatctcccaggtgtcctcgggagagacggaatacaaccctactgaggcgcgctgaacctggccag

SEQ ID NO: 47518 - DNA, 669 bp, Homo Sapiens
atttacaagaacggctactgcccaaaccaccccgtcattcagtggttctggaaggctgtgctactcatggacgccgaaaagcgtatccggttactgcagtttgtcacagggacatcgcgagtacctatgaatggatttgccgaactttatggttccaatggtcctcagctgtttacaatagagcaatggggcagtcctgagaaactgcccagagctcacacatgctttaatcgccttgacttacctccatatgaaacctttgaagatttacgagagaaacttctcatggccgtggaaaatgctcaaggatttgaaggggtggattaagcaccctgtgcctcgggggtggttgttcttcaagcaagttctgcttgcacttttgcatttgcctaacagacttttgcagaggcgatggcagagagcagctgcaggcatggtccctggagccgagccttcaccacgcactcgtccaagttcggatgcgggaacctggtcccagcttgagttcctgcctttcccaccacaaattatcaactggttgatgtgtacactaattacatttcaggaggacttaatgctatttatgttgtgcctctgcaggcaaagcccttaataaatattttacatccttaaaaaaaaaaaaaaaaaaatgcggcattgcggccgcaa

SEQ ID NO: 47519 - DNA, 479 bp, Homo Sapiens
aatgagttatggaataggaacagttatgtgatgattctgaaactttaacttagagcttcattactttaagaatggaaaacaacctctgagtttgatttcccaaagtttcataaagcccctaagctcatgattttcatcaactctttgcccacatagtcatttacctccacagccgtttgttgtcatagaaggggtggtggtgtttggatttgatttttttcaacttgcagtgagaaataggataggtgacaaaaccttacttgttttcttaagacaattcagtgcttgagcatctctgtcagaaatggaatgaaatactgttagccaattagaattattttatgtattgttattgtgttttgctgatttttatatgaaaatataattattcattcttgatctctggaagcaatcattattatgaggatcattttactttggaaacactttcataataaagataagtattaagaaaaaaa

SEQ ID NO: 47520 - DNA, 671 bp, Homo Sapiens
gtctaaatcctatactctagttgaggaagatcttccataattttatggtattacacagggaaagctatgactgcaggatcagtctaactatactattaggtgcatgtattctcttttcactaacttatacttgtctatctagaatacaggtcttccagtcagctggtcatttaccaggtgtggacttaagttgctgggcttgcagtaagaattgccagccactcattgtgcgggtctgcgtggagctttaatcagaaaaagcctccactttctgtattatgttaacattggctcatgcatataactatctgctgctgatgtagttctccatcttcaagatttagagtcggttaaccaggtcattacatcttaatttaataacaagcattactgtagagtgattgtgtatagatctgttagctgtcagggtgtgttttttttaacctgttgtgtgcgtgtgggggttaggattagtaaggtgaactgttcaggaattctctgcactagctgtgcagaagagcagataactagcgctgctctggcattaatcccaggaaccactagcagtagtggggcgccgccaatctaacatgagcacaggtgcttcatgacaaacattactagcatgttcaactgcaccatgttctggcactgtattttgaatgacctta

SEQ ID NO: 47521 - DNA, 944 bp, Homo Sapiens
gatctktttagtctcctgtttgtatgcgtttgctaatggtagctaaataaccagtttttgttgtaaatgcaccaattctgaaggcactttatgtactacatggaggtcatatctggttttgtttttatttttttatcatgaacattaaatgtgatgatgatttcttttccctgcacacatctttccggtgcaatatctatcaattgtgaatctggctgctggtgtataaaaacctggatgtaaagctgagcctacagacctgtcctcaccaactgttttgtgatttctactcaactacaaagatttatttaatgtactcttaatctaactgagttttgttaccaatgacctgttgcatgcttcaataccgtgtactgcctgagttgtgcctcttgtgtgctagattaaaagtgagacagagacttgacttgatcctctgagctcaagctattgagctggtagtggcagaggactgagggtacctgcacagtttgattcttttccacgtgtaagtctccattgcagaattgtcgtgctttgagaaaacacctgaggcagtgtgggagttgaacgaccctgctgtcctttttaactctgtgttgtcctagaccctgtcggggcagtcaggggacactagagatttgatctcatgcgagtcatcaataggacaaaaaagttgtggtttggggaggtctgtttgttacataaaaaggacctttcggtgtaagaaattgccgtttttaccctgccctggctggcatgtgagaagccatggaaggttgtggttgtaaatgagttgtctaaaggggtgcagaggcctgaggtttctaaaagaaggtagatttctacagagctgagtgttggttcytttttcttattggttgaaawtacctggtagtgatcagaaaacttagatgytatktahytaaaaaaaaaaaaaaaaa

SEQ ID NO: 47522 - DNA, 622 bp, Homo Sapiens
catgtggaatcatctatgtgtgcaggtggtgtaaattggtccaatgtaacttgccaggcaactcagaaaaaaccttggatggaaaaaaatcagacattttctagaggtggaaggcaaactgaacaaagaaataattcacaggatgaagatgggtttcaagaactaaatgagaatggaaatgctaaggatgagaatattcaacaaaaactttcttctaaagtattggatgatttacctgaaaactcaccaatcaatatagttcagactccaattcctattaccacctcagttcccaaacgtgcaaaaagtcagaagaagaaagctttagcagcagcccttgccacagctcaagagtattcagaaataagtatggagcaaaaaaaaattacaggaagctttatcaaaagcagctggaaaaaagaataaaacacctgtgcagctagatttaggggacatgttagctgctctggaaaaacaacagcaagcaatgaaagcacggcaaattactaacaccagacctctgtcatatacagtggttactgcagcttcttttcacactaaagactctactaatagaaaacctttaaccaaaagtcagccctgtttgacatcctttaattct

SEQ ID NO: 47523 - DNA, 566 bp, Homo Sapiens
aacccagattgccagcaagggccacatctccatgagaaccaagtcagcgtctctgtcaccagccgctgccacccatcagtcacaaatctatgggcgctcccagactgtagccatgcagggtcctgcacggactttaacgatgcaaagaggcatgaacatgagtgtgaacctgatgccagcgccagcctacaatgtcaactctgtgaacatgaacatgaacactctcaacgccatgaatgggtacagcatgtcccagccaatgatgaacagtggctaccacagcaatcatggctatatgaatcaaacgccccaataccctatgcagatgcagatgggcatgatgggcacccagccatatgcccagcagccaatgcagaccccaccccacggtaacatgatgtacacggcccccggacatcacggctacatgaacacaggcatgtccaaacagtctctcaatggctcctacatgagaaggtagacaacgtgggcagtccacaaaacctacggggcatcactattggattgatctgcacaaatacctttgaagagtacgatttcaaaac

SEQ ID NO: 47524 - DNA, 729 bp, Homo Sapiens
ggaagatgttcttcgccctgccatgttagctaagtttcgagttgcccgtctctatggcaaaatcattactgcagatcccaagaaagagctggaaaatttggcaacatcattggaacattacaaatttattgttgattactgtgaaaagcatcctgaggccgcccaggaaatagaagttgagctagaacttagtaaagagatggttagtcttctcccaacaaaaatggagagattcagaaccaagatggccctgacttaatccttgtttttaaagaaaggaaatgtgcaatattgaagtgatctttttccctagtcagacaggcccaattccattgtgatgtttacctttatagccaggtgagtgcagtttgaacttgagatacagtcaactgagtgtttgctaggatcctaaggaacataaagttaattaaaaacttacacctaattatgtaaattgccttgttaaagacatgtgatttgtattttagatgcttgtttcctattaaaatacagacatttctaccctcagtttctaaatgtagactatttgttggctagtacttgatagattccttgtaagaaaaaatgctgggtaatgtacctggtaacaagcctgttaatatattaagattgaaaaagtaacttctatagttactccttctaaaatatttgattttcctaaattcccccccacccaaaatcttttccctttttgaaaaatactaaaaa

SEQ ID NO: 47525 - DNA, 566 bp, Homo Sapiens
ggaacagtccaagaatgtagatactgattctttctccataaatgttcttatagtgtgttcatcctagagttatttttttgtttgtttttttcctttttggatcttgattgataactgccatgatattttgctttgatgtgtttctacatgtagttgcacacggttcagtaaaaataatgctgctatcgagtatgcaaatattgaagtatgatggtttgactgtatggcagtgttgtagcagcctcttgtttttttccccattgcctctttttttaaaaaacttataaagtcactttttatttttcctcagtcttcaatgacgagagcaatattaagaagacattgctatctaatttttaatctttttaaatgaaaaattcctatgttcagtagcgtggttgatgctattgtttagccttcccctccaaattgtatacattggcttggaatgttcacaacttgcgtgcgtggcagcggaagacgattcccatattctacattgctactgttttgtataaaataaattggtaaagattgacggttaaaaaaaaaaaaaaaaaacgcgg

SEQ ID NO: 47526 - DNA, 623 bp, Homo Sapiens
ggctgctgctcccgaacggaggggtcggggttggcttgctgggccctcagagcccagtgggtggctctgactcggctccctactccctgcacccagctgggcgcagccttggggcctgcggtctgaatgtatccctcccctcagttttaacctgagctgccgaacgcacagtgggccgggggcgaggctgggggaagcggggcccaattacggatcccgggagttacaggtgccgacgtgatgtcgcttctctggtgcccagctcccttcctggtctgagactagctctgggggtggcgggggcccccacacgctgctcccgctccaccctgcccgtgctgctgctctgtgcctgctgtcagagccctggtgggggaggatgtggccaccctgagacccggaggagacgggcgtctgcctgggtttgcggagagccgcttatgggtgtggtccgtccagacaccttgtttcaagggggatgggcgtgagcgggcaagcagagcatccccaccgctgagcaagaactttttcttgtttttaaaccatcacgtcctcatttcacattggaataaagtgagtttttgaaacctgcggaacacaaggaaacgccagagagaaaaaaa

SEQ ID NO: 47527 - DNA, 303 bp, Homo Sapiens
ttattgctccgcatactgagaatctaggccaccccaacctctgttccccacccagttcttcatttggaggaatcaccccatttacagagttatcaagagacactcccccctccattcccacccctcatacctacacccaaggttgtcagctttggattgctggggccaggccccatggagggtatactgaggggtctataggtttgtgattaaaataataaaagctaggcgtgtttgatgcgcttttaactttgaaaaaacaaaaaaaaagtaccgcggccgctcgagcatgcatctagaggg

SEQ ID NO: 47528 - DNA, 529 bp, Homo Sapiens
ttcaataagaacgcacatatcccagctgttttttgtttgtcacctctatttagttgttacctgtttctctcttctttcaccccttgtccttttccacccttttaagagttacgctagcagatcttactccacgtatactttttggtttgtgaaggcatcggttaagggcacaaagacagccatggggacatttatgtaaatacgtctctaattgccacactgcagctgaacagtgtgtagtattttcccagtcagctttgccatactgacgtcaatcatttgagagaaattattcagattttatttttgtatctgtggtaacaaaacattaaccaaaagattttctgtccagaagcctccccgaccccccaagctatttgctcacattaacaaattaaagtgcctgaagcataattcattctttacctgtatactaaaaaccctgttgtattgatttttttataataagcctttttacctctgtgtaaaaaatatatatacaagtgtatgatgtacattttagttctta

SEQ ID NO: 47529 - DNA, 937 bp, Homo Sapiens
  misc_feature (635)..(635): n is a, c, g, or t
  misc_feature (937)..(937): n is a, c, g, or t
ttgattagggtgccctaatttgagggttttaaaaaaaactatatttttgttaattataaaactgtaaagagctataaaagctattcccatttggttagtcaaaagggttttattgctaaatgtttggtgtaaagttgagacccttttccatttggtgacagatttctttggggaaaaaaggcagctttctgttttataaatgcagacttctgtttattgaatgaagcatatctcagtgtttatctgtcaggttttgaaacatttcatatatgtccaaatacttggcaggatttaaaaaaaaatagtgaatttggtgtaaagttgctattttatggaaatgcctctaactttacattttcattccatctgtagatttttctatctttataaaatattggagttattttttaaggaaaaatagaaaagtagcttgtgaatagctcaaactaagcttacaaatcgcatgtaaaaaagcaaaaaagttatttgtgtctgtttatatgcttcctttttgtagcctttgtacctgtacagggtgacagtaagggccaagcaggagaggcgtaatccttgtatcaaataggatcagcgacactctgtatttatctgtctctttttagtcagtcacttcaaanaaacaaaaaaaacaaaaaaagctgtcctttacctcaaataatatgatgagcatctttaacaacaacacctccacacaacacactacaacaaagcaaaaacaaaaaaatgggggcgcaaaaatcccgggggccaaatctggctccctttttgtaagggccataggggataacagggcgcgggtaacagcgggaaacctcgcgttgcgagccctgcgcgaagcgaccagatgcggaaattggtgtacgctcggattcttacatctcaaaacgctacgagtcatacttacttagattcaactccn

SEQ ID NO: 47530 - DNA, 642 bp, Homo Sapiens
agctggctataggtttacagatacattaattaggcaacctaaaatattgatgctggtgttggtgtgacataatgctatggccagaactgaaacttagagttataattcatgtattagggttctccagagggacagaattagtaggatatatgtatatatgaaagggaggttattagggagaactggctcccacagttagaaggcgaagtcgcacaataggccgtctgcaagctgggttagagagaagccagtagtggctcagcctgagttcaaaaacctcaaaactggggaagctgacagtgcagccagccttcagtctgtggccaaaggcccaagagcccctggcaaccaacccactggtgcaagtcctagattccaaaggctgaagaacctggagtctgatgtccaagagcaggaagagtggaagaaagccagaagactcagcaaacaaggtagacagtgtctaccaccacagtggccataccaaagaggctaccgattccttcctgctacctggatccctgaagttgccctggtctctgcaccttctaaacctagttcttaagagctttccattacatgagctgtctcaaagccctccaataaattctcagtgtaagcttcaaaaaaaaaaaaaaaaaa

SEQ ID NO: 47531 - DNA, 516 bp, Homo Sapiens
  misc_feature (425)..(425): n is a, c, g, or t
tcgctttctttcttaagccctttgctctggaggaagttctccagcttcagctcaactcacagcttctccaagcatcaccctgggagtttcctgagggttttctcataaatgagggctgcacattgcctgttctgcttcgaagtattcaataccgctcagtattttaaatgaagtgattctaagatttggtttgggatcaataggaaagcatatgcagccaaccaagatgcaaatgttttgaaatgatatgaccaaaattttaagtaggaaagtcacccaaacacttctgctttcacttaagtgtctggcccgcaatactgtaggaacaagcatgatcttgttactgtgatattttaaatatccacagtactcactttttccaaatgatcctagtaattgcctagaaatatctttctcttacctgntatttatcaatttttcccagtatttttatacggaaaaaattgtattgaaaacacttagtatgcagttgataagaggaatttggtataatta

SEQ ID NO: 47532 - DNA, 574 bp, Homo Sapiens
agaggtgcctgtgggagattttgcagacctattgtgggtataggtattttcttcctggggaagaattcagttcccgtctcagctgtacttttgtgggcctgtcatcttgatgaccagaatgaaagcttgctctgcctcctgccagccagaattggtggcgggacttggggatacagcgtgagaggtggggaagttgcacagcagaaaacagaattgaagttgggaaactctagagtctgggcaaaatgtttggttttttctcttaaaaaaaataacaccccattaccaaaagaaaaggtaaggtggcaaccttatttttaatagtttgaaatgatgataatcctaattatataaaaatatatatataaacacacatatatatagtgatttctaaagatttgtttacttttgtgttttgttttactgtactaagaacttgtcctttctccttgaatcaaagtaggacatgcatcatcctcctaattttaaatgttggctctgattttaaagtggtgcatttgattccagccttggtaatggagagtttgcaaacacacagcggcccacagcttca

SEQ ID NO: 47533 - DNA, 661 bp, Homo Sapiens
gtgttattcctttttctataaatatatttttaggaaaaaaagtcagtgatcctaatgtatcacattataagaaagcactctgtggatcaacataagtgggtacacaagaattttttttttcttggtgtatgtaagcacattgttcctttatatctgtttacaaaactgtgaatcaaaaagacaaaactttcttcctagtttttgtaatttttttttggaactagcatgactgtagggttgagctacagtcaacaaaaatggggctaagtcacttttccccaggaaagaatatttccctctcctgcatcaagtctgcgtggccatcctccccccaccatccaagactattaggtttggtccctgcacccttcactggcatcctcaatcattaaccttctgaaagctcacagtacacattagtatgtataactggctttaccaaatgtgaatgaaaaggagctttgtgcaaaaaaatttaacaaatggatgtcaagatgttatgtaaaagatgagtgtaatggtgaaatgttctatacactatcaaatatataaagctttctatatggaatgtactttatacagatcattcatatgtgtccataaaattttaaaccataaggggaatggactgttgtgttcatgagaaacaaacaacaaaaac

SEQ ID NO: 47534 - DNA, 643 bp, Homo Sapiens
tttcatcagatttgggggggttttatattaaagaaattaagactacactatttaaataaacgtttcctgtttctgacttattagagctctaaagtttatgaggcctacttctctgaatattctgatgggttttttttgagaccagtctcattttcatactgacatgtctgaaagatttattatttataaagcttaggacatactctgggaagcttagaagatacttcagcactgggaggattttttaaaggaaatgtgttctgtatttcttgtaccagagaatggtgatgttgattgagttttttccatgtaaaaaatgtacttgtttgccaaatgttcctagattgctcttaacctgttaatacaagtaaaactgtagtggggatggagtctggcctaagtacagaatgagggatttaattagaaaagttattttcttttgttctgtatcaaactgcagaacagctatatacttggtattttgtacgtgaataacgttttagcttttgtgcccttttgagcttgaagggttatcctcaaaggggaaaactatgaccggggaacgaagacaaacctaagataccataacagtaaaggttgacattacatattttcattcacaaatgcccattaacccacccta

SEQ ID NO: 47535 - DNA, 788 bp, Homo Sapiens
ttgacgtcatggatgtcatcgctatttgctgtccaaagtacaaagatcgaccacaaattgcaagagtagtgcagaaaaccagcagtggcttcagtgttcagtggatggcaggctcctacagtggctcctggactgaggctaagcgccgtgatggccgcaaactggtgccttgggtagacactattaaagagtcagacattatttacaaaaaaattgctctaacgagtgctaataagctgactaataaagttgttcagactttacgatccctgtatgccgccaaggatgggacttccagctaatgaatttgtacatgcagccaaatttacaggaatttttttaaaaggcagaaaaacttgaaataccaacattctggcaaaaaaaaatcagttttatgaagagtaagtggaacctgggatgcaggaacaaaagaaggaaatgttgggcaaacatttttgtgggagctcccttcgctgttgtgcagcagaaacagattctcagttcatttttactcccactgtattatagtttaacaaaaattgtttatatcttggaaaaaaaactttctgtttaaaaaaaataaacaagtgaatgttggaaattagtctgttaatgttcttaataaagtgttcttggagtttaacctagcagcggatggctttctttagcttagcccagtttccagggaagcattgttttttccaggctgtaaaatggcagaatctcctggatatataatttattctgttgaaaaaaaaaaaagcatgcagtatctatgacctatctgc

SEQ ID NO: 47536 - DNA, 796 bp, Homo Sapiens
  misc_feature (687)..(687): n is a, c, g, or t
  misc_feature (755)..(755): n is a, c, g, or t
  misc_feature (757)..(759): n is a, c, g, or t
  misc_feature (778)..(779): n is a, c, g, or t
ggggagaatcagaacttcttggagaggatcttccacttgaaccttctgtcaccaaagcagaaaggagtcacttgatagtgtggcaagtgatgtatggcaatgagtgagcccatgggaaacaggtggagatggggaagccgtctcttctgcatggtttattttccctctatccttttatttaatgctcttttgtgagataagtttcaccacataatgtgtgagcattttttcctgttaactttatattacaaaatccgttctaccataacaatacagaggaactagctgtgttactgcaccagtgttataggtaacttcagtatattatgaacaaatcaaagaatgtttacttcctgcaaactggtgaattatagaaagcaatccagatgtggtttactctgccacagtctaatgtcattcacttcatttgatggggtcacttgttagctgtcactaataatggaattaatgggaaacacttgataaatgaaactgtaccgttaaatacaatagctgagttttccccagtgtattgtaaaattgacacacactaatacaagatggattatcaggatgtatctaaatgtcccgagagggttaaaagctaactggaaattactttaactttcactttcaaatctgacaaatcttggttatatgggaaataaaacttgttttcatcaaatntggggggggttttatattaaagaaattaaaactaccctatttaaaataacggtttccctggttccttngnnnacacctgaataaggtaaannaacctggtcgggccccc

SEQ ID NO: 47537 - DNA, 557 bp, Homo Sapiens
ctcggtatattgaagaaataagtcacaaatattctagccagatgcatagccttggattgcagactgacctgtaaacccaagggttttgctgtggtcttcttatctcccttggctcataaagcccctgatgatgccagagcttcaattagagccatcatcatcccaggcagggatatctttgagaaatgactcagttcagccccaggcccctgtgactctgcttaaagcacacatttctgctgactcttgtacctggggcagcaggataatcaccaacacactcttaacgagaaacaacacaccaagcacagtggagctgtcctaggcaacactcgcggtctcaggctgcggtgggcgtctgtcctgcatgtggcccagaccaccctgacccccgggcctgcctgcctggccctgcatgctgcacgctcactgtatttgtgcagatcctggccagtacaaagtcgttgctcttgtcttatcttctcttacagagtctccctccctttatagaatgtcaaccaatgagtgccctcctcccctctcggtctcctctttag

SEQ ID NO: 47538 - DNA, 496 bp, Homo Sapiens
gagctgtcctaggcaacactcgcggtctcaggctgcggtgggcgtctgtcctgcatgtggcccagaccaccctgacccccgggcctgcctgcctggccctgcatgctgcacgctcactgtatttgtgcagatcctggccagtacaaagtcgttgctcttgtcttatcttctcttacagagtctccctccctttatagaatgtcaaccaaagagtgccctcctcccctctcagcctcctctttagctagcctccccatctcatcacaacgcatgtctgtgacctttggtaatcatttacagtgccacacggaaccctgtattttgcacacagcaaaacaaacaatgtttagctttatttatggtatttgatgctgtaaatggaaataaatattgttctttataaaaaaaaaaaaaaaaaactcgagggggggcccggtacccaatttgccctttagtgagtcgtattacaattaactggccgccgttttacaacgtt

SEQ ID NO: 47539 - DNA, 580 bp, Homo Sapiens
  misc_feature (548)..(565): n is a, c, g, or t
  misc_feature (576)..(576): n is a, c, g, or t
tatgctgctcaaattttttcgtgtgtgcaaatgtgaacatttgaacatttcagttaggtactgagccagaaaaggtaattgaagttttcagaaagcttctgtgcttagaaaatattttgttgttttcttaaaatattagtattttgtagctggaagaataagatcaaggcttacatgtttcaggccacttggtcactggttcctgaatttagaaaacattggattaatgagttggtgaaggcatttagtggttacaaaaacagtttaaatatttatgattaaaggcttttcacaaacctttttaaagaaaatttagctgagaaaacttaaaaagttttctaaggtagtttaactgtggcacatgttttgatcagaaaggtagttctctttgctctggtagttttaaagtttgtactagttctttatttctgttgtttttttaaattgttaaaattataaatcacgtctaatcatactgaattgtaaaacttgaattgtatctttattttaagcataaatgagaataaaatgatcctgttcaccctgcnnnnnnnnnnnnnnnnnnaaaaaaaaaanaaaa

SEQ ID NO: 47540 - DNA, 580 bp, Homo Sapiens
tagaaacataatctaaatgtctctaaattttccactttgtgttttctaaacacaaattgtattactcatttgagcataactcaagaattcagcgatgataaattgaagggctgaatgtgagaactccattaattccacttcttccaagaaagttaacctcaggaaatactgtttgaagagaagaaagtagtaccaaacaaaaaccttaaacagtacttgaatcttttttgcgctgagactataaagaattcattctaacatcttgtttcataagggccacatcattcgttggagcatgatagtgtgatttgtgtacaattgttacctctcagctgctgaagttcacacttcaaggatctaggagctctgtgaggggtcgtccagcaagatgctgatttgtctttcagttggtatggtttctgtgatcggggtaaactcccgtctcccactattcaaaagcagcccaactcatgctttggaatccactgaaataaaaatagttacatgaagtttaactttgctttaatatcacttgttcctcattgaatatacactttgatcagactttctattaacattt

SEQ ID NO: 47541 - DNA, 614 bp, Homo Sapiens
catctacagatatggtttgtggacatctttttctgtttacataaatttatccacttaaaatgtgataatgtggagacaaagcaagatttgattacataaacttttctctgcattggtcttttcactatcttatttgctaacttttcttatttttcttcaacctccccaccctccattttttggatattaaacagggaaagcttgctacattataaagattgttggcaccatttattttacacaaaggctaaaggttaactttggaaatgatgagctacttttatatatgtgtttactcatgctttgtgatatttctggatcattccagtcataaagacttattacatgtactatttcttgctacctgtgaaaaggtatattttaaagaatgtataaccaacagtccatttactttttattagtatgtagaggatttgtatctaattcatgaatgtagttttacagtagtttgtcattgtaaatggagcaaagtacattatcttctaaaatgtacattatgtaagaattgtaaatatacttaagtaattcgtatgccaaaaaattacaataagtcaataaagatctcacctctggaaaaaaaaaaaaaaaaaaaa

SEQ ID NO: 47542 - DNA, 699 bp, Homo Sapiens
cgcgtccgataactttagtttgcaatttgtaagtgaaactgaatcgtgggtgcatttcagaagagaacgttccatataatgcagctaaccaaggactcctgtgtttctataagctaatgctccagaaactttgccaacctgttagtgtacacacactgaggggagtgctcccggtgaatattatcatagggctttattatattcttggtcttcatttctgatcaagtaaatacaccagcagttgtcattcaatgcaggtttttgtacttaattatatggtgatttttttactttttaagagcagaaacggaaattgacctccccgccatgtgtttaatattcctcctgcttttacttttgtcattttcttgataatcgtaagccttgagagtgtttgtgaaaaagttttatttcctgttatgtatacataattaaatgaaaattcttcagaaaaagtttgataaattgaattgtggttatgaaactaatttgcatttttatttgcttaagaaagaaagctgtgatagattccagatatgctttttgatgttttcctctgctccagctccaagaagtcagcacacctgcattttagctctgcatgcagccccagcaggctgcgtgtttaagaatttcattgtttaactggctggtgtgagaagtcttccgttagcatagagtggaaggagtactattgtt

SEQ ID NO: 47543 - DNA, 911 bp, Homo Sapiens
ttttgtccttcaggggctgttttgccctaagaatgagggggcttcccctggtctgcagttcccaactttatcccttgctggccatgcgagcccagccctggtgcctcatgggatgggggggtaggggtccccaggatcttctggaggaaggtggccatggatggatgggctgtatctgtgttttccctctgggagtctcatgggtccagcatcaggcctgaggtcagcaacagggaaagagggtgggcacggggagggcttggccccgcctatctagaggcttgcctcgggcccctccttggggaaggtttgcgtgcagagctgcaagggagagggttccagaagcattgccttttgcctcgtctaataggatccttaggacactgtgggctttaggaatgactatagatgctcacacgtgtttaaagtgacatttggagatgctctcagtcctgtggcatctggcacgaagtctccaagaagccactttgcctcttctcccttcaagcacaagctttactgcaaaagggccagtcgcgtttctatttctctcgatcccaggcttctgcggaccgacgatacgtttaaatgttgttctagtaaatattcttgaatgtattaaaatggctgaaacaacaagcttgggcttttctagcttgccctccactccctgccgtccctctgacgtcgcataaaccagaacccagctcccttcctgggactggctgtgggagagaagggcacctctgagcccagcctgtggcccctaccccaagggggcactttcctcatgtggggcaaatccctgaccaagaagtccaggggggggcctccccctggggccacaggcacatcacccgcggtggccctggggggctggtggggaccagtggaacccccgtgtaaaccac

SEQ ID NO: 47544 - DNA, 692 bp, Homo Sapiens
  misc_feature (563)..(563): n is a, c, g, or t
  misc_feature (591)..(591): n is a, c, g, or t
  misc_feature (596)..(596): n is a, c, g, or t
ggcaagacatttccactgcagtttcaagctgtagtgggcatatgcttcatttacttccaaagaggcaaaagcagctggaattggcttacagcacatgctttgtttcatgttatgggtgaggacctacatacactcttactttagcagtcacttaaccttctccagcaaggcagttgtggggttcactaggatttagtgcctgatcttttttttgggaaggggcgggaatgaatgtgttggggctgggagggaagcagaagaaaatgggagtgtgagtgagtgtgcatgtgtctgaagttcaccattgcccccacctgcacctagcaaggaacaggtgtttgatgtattttgctcatgactgcagtatgcatgtatttttttccttctctgtgttttctaaacttacactaaaggattcatcaaatcatcttgttcagatggctcaggattgtatttattttgcttaccccgtgctcttgggttctatagtatttctataattatgtaacgagaatagtgttgcactgtaatctatcatatagagctatatgtatggaaaattntgatcattttttaagaatgtatctgttngcaangcacagtaagtgcatctatagacatagcataagctacataacctattacacaacactcattctcgtcatgatttgaatactacatagtcaggatct

SEQ ID NO: 47545 - DNA, 558 bp, Homo Sapiens
ccactgtgcctggccgacaatttacttgtcttagtattatatgtagatatgtgattttttgagactgtatttttagagctgaatttttgactaaagacttaactttataataatgaagatacattagagaattttagttagatattgactttatctttaggcttttgtatgtttcagatgcaaacatattaaagtttcatatatttacttgactgggtatctttttttttgaagacatacattattcacttccatttttacaataaacacttacttaacatctactctgtgccaagcactctgctataatatgggaccataaagatgagtaagacaaggatttttgcctccaaggacttgttatcactgtaaacattttgatgtatacaatatggctatattatattttgttttataaaatcaagtcattgtatatattatgatgtatgctttcttttcatttattataaatatttttcctgatcagcttttaatatctgtcaaataaaaattgaaattgaagatggtatataagatttcaggaaataaactactctg

SEQ ID NO: 47546 - DNA, 577 bp, Homo Sapiens
ccaaaggtgcttgtgttgcaggtcccatctcctttgatgaggttaacaattcccactttggcattttcctaactattcgtgtggctagaattggttggttggtcacttgacaagaaaaaccatacttacctgggccaaggctctgttcctgccttcgcaaattctcaaaagagtaaagtttatgaaaagaaagtggcaggcaaacacaactcttgactgccctcccaccctcctacctgttcagtactcatctgattcagaagcatcacttcttggataactagcactggaaaaatgaaatcatctgtgtaagtgaagggactcatttttctttgctttcagcccatgtaaataaataatacagtattaacattttcgtgctgcttcccattagcttgtagattgagccatactctggctgcctctttgccttcctaggggcattttctttaacttccagaatagtgattttaaaagtaaaaaataaaataaaccttacttacaagcataaaaaaaaaaaaaaaaaaaaaactcgagggggggcccgggtacccaattccgcctattgtgagtcgga

SEQ ID NO: 47547 - DNA, 516 bp, Homo Sapiens
gcaaatgtatgcacaacttggttaacctctcagtgccagatggggcgtcgaatgtagagctctgtcccctggaagaagtttggggctattttgaagatgctctgagccacattagccgcactaaagactacccagaaatggagattctctggctgatggtcaagtcctggaataccggagtacttatgtttagcaggagcaagtatgcatctgctgaaaagtggtgtggcctggccttgcgtttccttaaccaccttacctccttcaaggaaagctatgaaactcagatgaatatgctgtatagtcagcttgtggaagcattgagtaacaacaagggcccagtttttcatgaacatggctactggagcaagtcagattaggcaagctcatggccacatgaagaagatacattgtcccgagatgctgactgtttaaatttttgccagagtttctcttgagcttttgtttctgtttgctcagaccctgttttcatgttgttgaataaactttctaaaa

SEQ ID NO: 47548 - DNA, 821 bp, Homo Sapiens
  misc_feature (709)..(709): n is a, c, g, or t
  misc_feature (715)..(715): n is a, c, g, or t
  misc_feature (780)..(780): n is a, c, g, or t
  misc_feature (785)..(785): n is a, c, g, or t
ttttttttttttttttgtaaatatgaatatatataatatatatgtccctgtacatatacaatgtgggtgctaatgtggagactgtggccggcctgagccaccaagctgcgggacccagagggaggattttactgcaagtcagcatcaaagcaccggtgttattctgaaaacaccagtggcctcatttttggcttttgcaaagcatgaattgtttcatttggattgcactttcctggttcatgactgtacctgtaggtggttgttactttgactcttttcaggaaccaccccccaagctgaatttacaagttctgttagcactatttgcttcaacttactgcgatttgttctcaaaacttaaaaataagcaagcaaatggctgatactaccaagagaactggaagatggataccacacaaacttcttgtataaaaatatgaatgctgaaatgtttcagacatttttaatttaataaacctgtaaccacatttaagtgatctaaaacccatagcattgtagtcatggcaacccgctaaactttctcatgcaactaaaatttctgggggaaatgagggtgggggttgtacatttcccattgtaaaataagtgttttaaatgtcctgtactgctaacgaatgactttctatatgtccaggagttctccagtggaataactatgcactactttacatttcatggggatgcacanaaacanaaaagtattacatttttagttgctgtttgtaccaaccttaaattacatatgtttaacaacaacanatcanaaatcctatttctattgagtttttaatactgactag

SEQ ID NO: 47549 - DNA, 516 bp, Homo Sapiens
  misc_feature (437)..(437): n is a, c, g, or t
  misc_feature (455)..(455): n is a, c, g, or t
  misc_feature (516)..(516): n is a, c, g, or t
aaacatcctactggtcccttcttcccagttttgagcaaagatgaaagcactgccctccagtggccatcagaactattaattttcaccaatgcagaaccctccatttcatacagttgtaaccctttatattttgactttaaactttcaaggaacaaagatgccagaactaaaggaacagaaaaaccaaaggatataggaagctcctcaaaggaccatctccaaggcctagatcctggtgagccaaataaaagcaaggaagtgggcggagagaaaatagtacgttcctcaggaggcagaatggacgcacctgcttcagggtctgcctgtagcggcctgaacaagcaggagcctgggggtagccatgggtctgagacagaagacacagggagaagccttcccagcaagaaagaacgatctgggaagtcccaccggcacanaaagaaaaagaagcacanaaaatccagcaaacacaaacgtaaacacaaggctgacacagaagagaaaagctctaaggcn

SEQ ID NO: 47550 - DNA, 563 bp, Homo Sapiens
gtccgattgaaaagcaggtaccagtgccccttttcagacagtttttgattcgctctagactttttttttttttaatagggagggaaaaaatttgataattttcttttttctacatgcacttaagactaaaacacaggtttggattaattttatttgcttcctttttccgcttttcttcccgcagagcctgatgggagaatgtccagggcagggaaaccacattttttgtaggtgataactcaatgaaaattggtgcttattttttacacttctctcttgtggctctcttgtggtgctatctgttttaaggtctccttgaaggcgcactggggtccctggccatgcctcgttctccctgctttctttatcctgttattgcctccacagtctgttgccaaggactctaagatcaatgcacgtcactttcctttccactgggcaggatagccaagcacactccctcctgcgctctcccgccccggtgcgtccactcccgagggctgttatgaggactgggttgtgcctacttgatttgaaaacacacacaagcaataaaaagcctc

SEQ ID NO: 47551 - DNA, 727 bp, Homo Sapiens
gctcttytttcgccgccattatccagtgaacagcatcaccttctccagcactgaccctcaagaccggagatggaccaacccagacgggaccacctccaagatytttggtttcgtggccaagaagccgggaagcccctgggagaatgtgtgtcacctctttgcagagcttgacccagatcagcctgctggtgccattgtcaccttcatcaccaaagttctactgggccagagaaaatgaaggaaggccacaagctcagagcccacatcaacactgcacccctcccagcaccccacagccctcacatcccctggcctggacccaggagacccaggagaaagcaccctcccttaggaatgaggagtgggcatcaggcctgggacactgctctccttccccgcccccagcctgctaagttaagtggacaggcccacaagatgaccttgcatgtgagcagatggcagaggtgggtgtgtgaggggtgaggaggcatcagcagttgagccccgaagagatcaggcagccccacctgcaggagaacgtcagccctccaggggatcagcccctgccagttccacccagctgcaggtgccagcacggcagggatgggagaggggtggggagcgagtyactgcctcctctgagcagagattcagagtaggatcacatgaataggggaaaaaagagagthtatttttgtctaataataaagaatttctataaacttta

SEQ ID NO: 47552 - DNA, 527 bp, Homo Sapiens
cccccctcgtgccggtaaagtattattaaaagcctcatttgtggagattcgctgacttccttggttaagctgtcttgtatttacttaatttgtcccctcaaccaggtgttttcttttcagcctgttactgtcctgtgccatttttaaaaatagccatcatgagtaagggcttctttaaaataatccctgacaatatctttggcattaatacgacataaagacaagacagtatatgtatgttttcattcctgttttgtacgagtgcctcattttgtagtcatgaaagtaacatagtaccttaaataaaaatgtaatgactaatctaaggtctaggaataactattgtagaagctaagtagaacacttagtttggggtgtcaattttctatcaacgcaaacaccttagggtacccagaccaattttatgtatatatattctgaaatgctccctttttaatgtggtcatttgttgccttctaagttgagaggacaaaactgaataaagtgaatgttaatctcgtgccgaa

SEQ ID NO: 47553 - DNA, 574 bp, Homo Sapiens
tccgcggagcgcccgcgcccgcgccctcgcccccgcccccggcggcgccggcaaaactttggcactggggcacttggcagcgcggggagcccgtcggtaattttaatattttattatatatatatatctatatttttgtccaaaccaaccgcacatgcagatggggctcccgcccgtggtgttatttaaagaagaaacgtctatgtgtacagatgaatgataaactctctgcttctccctctgcccctctccaggcgccggcgggcgggccggtttcgaagttgatgcaatcggtttaaacatggctgaacgcgtgtgtacacgggactgacgcaacccacgtgtaactgtcagccgggccctgagtaatcgcttaaagatgttcctacgggcttgttgctgttgatgttttgttttgttttgttttttggtctttttttgtattataaaaaataatctatttctatgagaaaagaggcgtctgtatattttgggaatcttttccgtttcaagcattaagaacacttttaataaacttttttttgagaatggtaaaaaaaaaaaaaaaaaaaag

SEQ ID NO: 47554 - DNA, 1014 bp, Homo Sapiens
tgatgatactgaggggcttaggttggcaaatagcactgttttcttagctgcaagaattcattgcacaatgtttttcatcatttttgttaatgtcatctttttttggtccttgctacgaaaaggaatgcgattctgtggtcattcgcactgggttgcattgattccccctctgatggccaatgtggagtggacaaagtgtccggaactcacatcggtgatcgtcccctcgtcttaagacccagcccgctctgtgtgagcctctggggctccctcgctcagtgagcacagttccccgggggttcatgccagagctccggctgaagcaagaagtcctccagctgcgtcgtttgccgcctgtggacgagtgcgccccagtttctgccctggcagctcctggccacaccttctcagagctcacctgtgcacttctaaattgaattggcccacggtgtccaaccaagaaggagcatctgcactccgagaaagatgtgttctgtaactgccccagtgtgaccccgcagtggctctcggtgctagatatgcatgactaagattgatgctgggcaaaatgtagatgatctttcattatgttgtgggcagcgtctttctctgcctttgctatatgcagtcagcagtaagccttttgctaaaagagttccgtttgagcttcctggagactcccaagggctgcatcgtggtttcacataactcaaacacctatacacagtggcccaccttttacacaacactggtcccggccaaattgtgggggacacacctttcacgttcccaaaaacccttttggtacacgtctcggaacacttactgcgttgaaccccccatatagcggggtggctgggaacaattcctcgccaaattgcttcacgcaatcacacatttccctagaacctagcgacctcccaaaagagggagcggcaaccccgcccacaatcttgggggggcaaacaaagacacgtgttcgccttaccacacacccctctgtgtacaacgcgg

SEQ ID NO: 47555 - DNA, 818 bp, Homo Sapiens
  misc_feature (685)..(685): n is a, c, g, or t
ccgagttggggcgggtggtcgggtcaagatagcagcagcaggtgtcagggctcaagacaccaccccctccagcttctggggcccaggagcctctccctgctacagggggtgggggtcctgctcagcagggtaggtggtggttttaggtcttgtcaccctcactcagtggaactgcctctgggagctttggcgtctgtgactaaagggacgctggattgctcaggtcagctgctcggggctcccaggctgggtgtgccttagccacaggcagggctgtcaataacccccttcctcactggccaccacctgacatcagcaccagtgacaggctggtcagagggcggggctggtgagggtttgtcctaagaggaccaccgccatctctgggtctccagggggagagcctggccctgtcctttgctacccagggctgcccccaggcccatgaagccaataggagagcgtgtggcactggcccacaaactgtccctgtcctgtcttcctcccgagccatggcctctgctagctccaccttgaaggagccccccacatcctcccctacatcccagagatgccaccacttgtgtctccacaatgtgctcctgcccacccgggttccgcactgtccgacccctgcacaccactcatgtcaccacggcgtgcatcatgttcatccccatctatntatttaagcctttctttgcttgtagggcattttgtatgtagagcagttgaaaacagaacctcagaacttaacatctgtcctgatgttaaagtgcttttcatgaccaccctgttatctatgtatatgtaaagtt

SEQ ID NO: 47556 - DNA, 708 bp, Homo Sapiens
cttttctcagctgacatacagagcactaaatattttaaggcaagtccataggtctgaatctcttaagaattctcggcctctgtgggatttagggaagcattataaatgcattaatccttatagtcaattctgtgcctaggattttgccagggaacagttcactgactaggaaaagcactacattttaaattcagcattagtgcattgggaaggatctttactgctttgtgcttggcatgtcattattttccatttgacattagggcctttccaaaatgaatgtgaggaattgctttcacttcaagactttccttcttttcactaaaactctagaaggtgttacaagggggagggaaggggggcaaagtccttgaacattttctttggctcgtgccatgttatgatcatataccttttaaataaggggaaatagtatctttaaagttaatgtctagccaagagtttagtaaacgaagaattaaactgcactgttgatcggtgctttgtgtaaatacatctttaacatttgggtggagaggggccttaagaaggacagttcattgtaggaaagcaattctgtacatgagtttaagcattcttgttgcattgtctctgcagattctatttttgtttacaatattaaaatgtatgttagcaaaatgggtggattttcaaataaaatgcagcttccacaaaaaaaaaaaaaaa

SEQ ID NO: 47557 - DNA, 584 bp, Homo Sapiens
  misc_feature (555)..(555): n is a, c, g, or t
ttatcagtgaccggggtttcaccatgttggccaggctagtttcgaactcctgacctcaagtgatccacctgcttcggcctctgaaagtgctgggattacaggcgtgagacactgcgcccagcctcatccctgtgaatttcttattgtacacaagttctttcactatctgtgtgcagtgctctgaggggacagacaaggcttgggtgtatatgccaaccagatctcattgaagtatcagcttgtttggtactaggtgcaagtgtagcatgtcacatgtgaccatgttggatcattgacaatttttaggtatgtactgacctacatttatgatgaagatcctgagcggaggttaagatattaagttattttccatatgaatcagaattatattgattctgtgcaatcaaaacaaaaggcagaatagaatgctgagattggttaagtttgcaatgaccatcttgaaccacagatttctgctatgtgtcatcaaaacatctagttctgagtaacattttcacgattgttataaaattataggtgtgaacttctaaaatnaaggaatgctaataaaaaaaaaaaaaagg

SEQ ID NO: 47558 - DNA, 644 bp, Homo Sapiens
  misc_feature (578)..(578): n is a, c, g, or t
ttttttttttttttttttgctaaatgctgggtgtgtatgtgtgcattttccacactttttaatttttaaaaaatacacatatacacaaacaacatgtacagaaatagaagaaagcaagccagacttaagcttggtagagtaacggagtcctctggtctaggcggtaattgctttcagagaattacgtttatagaaatcagcgagttttgtaagaaaggagaagatgttacttcaagaaagaggcagtagagttgctggttcttaatgcacagaacacacagatatatgcacacgtgtgctgctgaggtgaggcaggtctggtgagcacggagaggctgggaaggggctaagtgactaattggttcaggtacttttttctgggggaggtagactttgcttcttttttgtaaaaatgacaaacgtagaagtggcaatgctgtaacctggtgcctgctgctgtgcagccacatacacacaattgtagcctgatttttagaagtgtgggtaattttttaatgaatttcctccttgagtagcagctgaggtcattgacaactgaagtgatggtgtggacatanagagaggggaagggttggaaaggagtaagtgatacactgctggaatttgtttcctgcctatgaaat

SEQ ID NO: 47559 - DNA, 569 bp, Homo Sapiens
ctttttttgtttacaatattaaaatgtatgttagcaaaatgggtggattttcaaataaaatgcagcatccacaaaagttttgttatggtattctggtctgagatgcattttcatttttcctttctctttttattatcaatattgtcatttttccctaataaaatatacccaggggattatatttgttgatctaataacatggaaggtttgatttatatgaattttcaaaaagatgtctctttacactttttgttaccttgtagactcttattgataaatgcaactacttattaaaattgttcactttttgtcttttgatcagatgcctttagtcaggtaagtttaagggaaaatacgcagtttaatgttttggtacatataattatgtctgccaaagaaacctttgattgtatcatattgcctatttagtagtgcatagggttcagagtacatgataaaggatcaaaagctttgcattgataagtgtctcataatatttgatgtgattggagaaaaaatgtagtcgtagccaataaattttatcagcttttaagtttcagcctcgtgcc

SEQ ID NO: 47560 - DNA, 640 bp, Homo Sapiens
  misc_feature (523)..(523): n is a, c, g, or t
ttttaattttatttttttatgaaaagaaccagtgtcaatccgcagaccctctgtgaagccaggccggccgggccgagccagcagcccctctccctagactcagaggcgccgcggggaggggtggccccgccgaggcttcaggggccccctccccaccaaagggttcacctcacacttgaatgtacaacccaccccactgtcgggaaggcctccgtcctcggcccctgcctcttgctgctgtcctgtccccgagcccctgcaggtccccccccgcccccccactcaagagttagagcaggtggctgcaggccttgggcccggagggaaggccactgccggccacttggggcagacacagacacctcaaggatctgtcacggaaggcgtcctttttccttgtagctaacgttaggcctgagtagctcccctccatccttgtagacgctccagtccctactactgtgacggcatttccatccctcccctgcccgggaagggaccttgcagggacctctccctccanaaaaagaaaaaaagaaaaagaaagaaaaaataaatgaggaaacgtgttgcagcacaggcagttttcttctccttctgctccctgtttctcataccccaaactcagatgctggagctc

SEQ ID NO: 47561 - DNA, 727 bp, Homo Sapiens
  misc_feature (42)..(42): n is a, c, g, or t
  misc_feature (612)..(612): n is a, c, g, or t
  misc_feature (637)..(637): n is a, c, g, or t
  misc_feature (674)..(674): n is a, c, g, or t
  misc_feature (677)..(677): n is a, c, g, or t
  misc_feature (714)..(714): n is a, c, g, or t
tgtaaatacttttgctttgaaaactttttcttgtcctaaatnaccctgactctgaccagtctttcagttctccaaaagcccaatttaattgtatagttttgtcatggcttcatataataaagagcctattttaagttgaaagtagtagtcagaaaattgttaatttcctaaagctcaggaaactagggtgtcactttttttgcactgcagcatatacactaactagcttattaaaatttacaaaatgtctttttgaatgtatcaaggatatatttagtttgagtggaatttgtcagcagatatcagtaacttattgccgcttatattgtacaatgctaaacttcaattcctgtaacctggttagtattaatgtcagtgactaaaaaacttagagttagttttagggcactttttattttgagagcatgaagtgtggaatgtgtcactacgattgttgataaagctgaggccacttgcaacttgattttttaaatgaaatagataaagtctttttgaataatatagtatgcactgctatttgcttgattatgtaatgtcaaaagtttaactatattccaagtacaaaaacatactggattacattgaggatgntgaatagcattcatgatggctttgntttggtttggggcagctgtcaccagctaaagcaatgntgntaaaattagctcaataaaaatgtcctttaaaatgtanaaaaaaaaaaaaa

SEQ ID NO: 47562 - DNA, 674 bp, Homo Sapiens
cgccggagtgtggctgccttcaccgtcggaccctctgtctcttctgcgcaacgtctgagcacaggagcccatccttggctctaggattccgccgctggaagccttctgttcagacaccccttatgctccaaggcctgatgtgagccagcggggggtgcatgggaaactgcaccccacaacccacatcctccatcctgactgcagcatggggttccccggcaggggtgggaggcagcaggggtcagcctgggcaggaacctctcccaactctgtccaggtgttcagacctcttggcccaacctgctcaccccaccgggttcactgtccttgtggggctggagagatgggcataagtcaggaacttgggaggaccaccaccctttcagaggcgtgaggccctggggccctgccggaagggagccccctgctcctcccaacaaactccagaacagcagaaagcgggtgctgtagaggagcactcagctcacggggagggagctcttggctgagcttctacagggctgagagctgcgctttggggacttcagccttccttccagtctgggctgagtggggggtccagactacctgatgccccttccccaatttggggactttttgatacatataaaatatattctgtatattttaccccttaagaaggacaaacaacg

SEQ ID NO: 47563 - DNA, 931 bp, Homo Sapiens
tatcattgtaatattaacagtcaaggtgttatttgcttggacatattgaaagataattggagtccagcactaaccatttctaaagtcctcctttctatctgctcacttcttacagactgtaatcctgccgaccccttggtgggaagtattgccactcagtatatgaccaacagagcagaacatgacagaatggccagacagtggaccaagagatacgctacataaattggggtttcacaattcttacattatttgtctgtcacagaagagagctgcttatgattttgaaggggtcagggagggtgggagttggtaaagagtagggtatttctataacagatattattcagtcttatttcctaagattttgttgtaacttaaggtatcttgctacagtagacagaattggtaatagcaacttttaaaattgtcattagttctgcaatattagctgaaatgtagtacagaaaagaatgtacatttagacatttgggttcagttgcttgtagtctgtaaatttaaaacagcttaatttggtacaggttacacatatggccatttatgtaaagtccctctaagactacatactttttgtttaaaacaaaattggaatttgttttcccttcttggaagggaacattgatatttaacagagtttttagagattgtcatctcatatatataaaatggacacgtggctataaaacaccatataagagatgagtagtgcgttttattttatatgccaatctactttgtttaaaaaaggtctgaatcaggacttgtgaaaacctgtagtgaaataccttaagctgttaactaactgtaaggcgtggaataggagttgctcagtggattggttctatgttgtggactacttaagtctgcatttgttactgtgctaataacmatattaaaamcmcctaaaaaa

SEQ ID NO: 47564 - DNA, 713 bp, Homo Sapiens
atgaattcaaaaatacttcagagccaaagccaacttcaaataccgtgaccaaatttacatgattcatattcattatgcattacttggtatacagacttattttcataatgcaaattaataaaatgacacttttactgcactatagaaatattcatgtatgttaaacttttctgattgaggctaactggaaaaagctggggtcgtattctaagtgctaaagaaggctgcttctactgtatagaacccagggctctgaaacagctctagccgcctaatgcacttcacaggtaactccccaaggtaaaactagactctcttgttggttcgcaaagaaaagttaggacttaacacttttttctaaaattttataattcaatttccaaaagtctactctattttatactgtttctacaaaatattccttataaaaacaaagaacaaaaattgaatatttaatgaattgacattttataaccaacctgtttttatctacggtgggaatctttgatgccagaaatttataaagaggttctgtatcttcacaccttgaatagcataataccataaaaaatgacacttgacatgtcaatgtatttgtcatttcattttaaactcgtatttgtggttttttttcccagataaacaatgaacattaaccatttcttttctaagaaaacacacaccacacacaacaacacccaaaaaaaaaaacg

SEQ ID NO: 47565 - DNA, 611 bp, Homo Sapiens
aagatgggagctacgaagtgaagagtgtcctcggaaaggaagtggggttgttaaattgttttgtccagtccgtaaccgcccacccgaccagctgcattggattggaggaaatcgagcttctgagtgcaggaggggcctctgcagaacactagcggttgccgcaggatctgtgaactttgcaatgtggctgcaagggtggtggtggtggtggtgatttggggtagttatttgttaactatggacacagtgaacgtagtttacgatcttgaaatgaaacttagatttttctggggaaatgttcagatacagttttgtgaactgtaaatcaaaatacctttttctacagtttatcttttattttctgcaaatttaggaacatatttactcgttttcacattgaatcttaagtttaagctcttcatttggtatttaggcaatatatgagaaaaaaattttttttgttcatttgtaattttaacaagttgaacattttaccatgattgaacatgtttttattacagtatttaacattcccccaaagaataccctgcaaagtgtaaacctttgtcccatactgtgatattactgttctgctacaataaatgcaaacc

SEQ ID NO: 47566 - DNA, 636 bp, Homo Sapiens
ttttttttttttttttgcttaagatggtgtttaatacagcagggagccaagatacagtagtaggacacagtaaagaatgtggagtgtgtagatacaataaagaattcattttatgatctgccacctgttacttgaaagaggagtaagttagggaaataaatgactcagttcttcatacatgcaaaggtaagttagttattacaaaagtttttgctgttgtttgtgctgaaagaaaagcatatgcatttaaacattttttaaaaaataaatcactcaataggcttaagaaaaatactttagtttatagttcattgatctgacgttttgatttaagatcaggggatgaatccaggatgaaaaccaaagaaaaaaaaagaaaaagaaagaaaaatatagaagtgaatcatttaccatgaaaaaggcatttccagcctcagctaacctcaactagtttttattgcattatttttgaaatgccaagaaactggctttggccataatacttgctgtccaacaaaatcacagctgttaatatgcaattgcttgcaacaattagctaaacagcattatttgacaaattcccttgaaagagacatagatgctatttaagtgtctagcacactgaatcaaagtact

SEQ ID NO: 47567 - DNA, 636 bp, Homo Sapiens
ccgaaatgatgaagtgctgggaatcacttataccaaagccttatgaaatggatgaaattttgttaaataggcaaatgtggaattcctcacagattaaccagtattttttaaatgtattcattcctacaaattaactttcataaattttatggcatgtcttctatttaaaaggaaaagaataagtattcttgcatctggccttagaaatgtgaagttatattctcaagtttatttttttccaagtgtagctaaaatatttttgcaggtaaaataaagctgatagtacatgtgttgttcaaaccttgttaaacctaatattgaactatttttatatctgctgtctttcagaaggcaaataggaaactatatatttgcttaaaaattggcatttagtaaccttaattctttttatagaaggaatgacttaaagtattgtcccctctttttgcactaattgtggatttttttagatgcttctcaaaattttcagtgtgtaagctaaacaaaaactaaaactaagaattctcaaaaaaacttgttcaaaacagggaaagactgatgaaaagtaaaatggactacttttgtaacttacctgtttgttaggaaatggaatggtctctttgatttaaaatgaat

SEQ ID NO: 47568 - DNA, 896 bp, Homo Sapiens
cgggatgggggcgcgacagcsagggcggcctcycccccacccctcagcccgggcccgggctcggtccccccctctccctccgcttcgcactcccgtcgggtacgggaaggtccaagccgctgccgggtgcccgagggccgtcgtggccgccgtcgccacgggtcccaatggagccgccgaatctctatccggtgaagctctacgtgtacgacctgtccaaaggcctggcccggcggctcagccccatcatgctggggaaacaactggaaggcatctggcacacatccatagttgtgcacaaggatgagttcttcttcggcagtggtggtatctccagctgccccccgggagggacattgcttgggcctccagactctgtggttgatgtggggagtacagaagtcacagaagaaatctttctggagtacctctcctccctgggggagtccctgttccgaggtgaggcctacaacctctttgaacacaattgtaacaccttcagcaacgaagtggcacagttcctgactgggcggaagattccttcttacatcacagacctgccctctgaagttctctccacgccctttggacaggcacttcggcccctcctggactccattcagatccagcctccaggagggagctccgtgggcagacccaacggccagagctaacaggactgcctgggaccgccctgcctcaccagggcttttcctttttaaacaaaacaaaccctaccagatttctattttataattttacatcagagctaacaaccaggggacggctttttaaatttcccagggaaggagaccgtcaggccgcatgtagacaatgctgctaagaaacagaacaaaatgccaccccttctaatagtattatactaatttwttaag

SEQ ID NO: 47569 - DNA, 689 bp, Homo Sapiens
cgcgtccggcactttgtaggcattgcatgaaccatgggatgatgattctgtggaggtattgccttgtgaatttgctgctattttagttttgtctttgctgtaaacttgtagcattaaacaatcattgttgttaataggtcttctttttgaaacaattatgtgaaatgtatagctgcttttgatgaaaagcagctatttgcctttttttttttttcctttgaactttgaagctagtgcattggaaaaatgcaccctttccctcctttggaatgctgtattaatgtagtataataattactggttttgtaacttgttctggtaatgtccttcccggactctttttaaatgtctccccctaagttttatacttgattgtattattagtctgtttttaaatgttttgcccggtttttctcttcaatatttgtgtatataaaccgatcttcgtgatactgtacatagctgtttgaaatgccaaaatgacttctgacattccaagtttttcacaaaatatattttatctgtgattagccatttgactaataatactggctaacagatgttgaaaaaaattgtctgtttgttttctcattaattttggtctaaaacatgtttgcacttgtctttgacttgtgttttattaacattgattggcatattaaaaagtcactctgagcttaaaaaaaaaa

SEQ ID NO: 47570 - DNA, 758 bp, Homo Sapiens
gggccaagtaaacatcctattcagatgtctttgtgcatgtgtgtgaatatttctttagtctggagtccagtaaggtggatttttggatcaaagggtttgttctctgtccaccttcagtcttcccaaaggccttcataactgtattttcaccaagtgtatggagaatgttcatttccccatataaccatacctacacttgatagtttttatctgttgggcgaaaaagaaccttttcttattttgcatttccctgattataaaaaaaaatggtgagattggggttattttcatgtttattggccatttatagtttactgtggattgtttgtatcccttacctgctttctattgggttatgtgtggatatattgtttttatttgttcagcatctccttccccatcttctggtaacacaacctttatttatttgtggggaacctattccctgtggcttaggtgagcatgtgaccaggcctggcctcctgagtcccacagcttcctagccacagtgataaaagaatgggtatataacttaagccaggctaaggaaagcccttaacagaacttctgctggaactactggaaagaaggctttatggagatcccaggaaccaaggaccatgtaagcctgaatttgtgccatgtggagagagtctgtctgaggagaaactcggatgctagcagaaatggaaagagaactaagttctgatgtcatttttctggaggccctagatccagctgtgcctaaagcctgccct

SEQ ID NO: 47571 - DNA, 800 bp, Homo Sapiens
caaaggcttccagacctgagccacacccaggccctatcctgaacaggagactaaacagaggcaaatcaaccctaggaaatacttgcattctgccctacggttagtaccaggactgaggtcatttctactggaaaagattgtgagattgaacttatctgatcgcttgagactcctaataggcaggagtcaaggccactagaaaattgacagttaagagccaaaagtttttaaaatatgctactctgaaaaatctcgtgaaggctgtaggaaaagggagaatcttccatgttggtgtttttcctgtaaagatcagtttggggtatgatataagcaggtattaataaaaataacacaccaaagagttacgtaaaacatgttttattaattttggtccccacgtacagacattttatttctattttgaaatgagttatctattttcataaaagtaaaacactattaaagtgctgttttatgtgaaataacttgaatgttgttcctataaaaaatagatcataactcatgatatgtttgtaatcatggtaatttagatttttatgaggaatgagtatctggaaatattgtagcaatacttggtttaaaattttggacctgagacactgtggctgtctaatgtaatcctttaaaaattctctgcattgtcagtaaatgtagtatattattgtacagctactcataattcttctaaagtttatgaagttatatttatcaaataaaactttcctatttcattcaaacgaacccaaaaatacaacacaaaaaaggacccccacacaaca

SEQ ID NO: 47572 - DNA, 624 bp, Homo Sapiens
tgtccttttatttcctgttgatgataaagaatcaagaaacaaagggcaagatttgttggccttgattgtggctcagcatcgtgatcgttccaatgtcctgtctggcattaagatggcagccctagaagagggcctgaagaagatatttttagcagcaaaaaagaagaaagcaagtgttcatcttccacgtattggacatgccacgaaaggttttaactggtatggtactgagcgacttattcggaaacatctggctgcaagaggcatcccaacttacatatattattttcctagaagcaagtctgctgtccttcattcacagtcttcatcttcctcctcaagacagctggtgccttaagaattggcccagcctcagatcctgtctttagcaaccagctaatatttacccagaggtactgcaatagagtatttcaaaatggaatcaggatctggtgggcctcagaaattgtctcttttctgagtttcagtttggttctcctggatgttttgctctgttttgatacctgtaatatagggaaacacaactttttttgggaaagccctttgaccccagcttgctagttgcataataataaattttctgttcctaaaaaaaaaaaaaaa

SEQ ID NO: 47573 - DNA, 627 bp, Homo Sapiens
tcttctacgacgactactacgaggacggcgaggtggaggaggaggccgacagctgcttcggggacgatgaggatgactctggcacggaggagtcctgacaccaccagaataaacttgccgagtttacctcactagggccggacccgtggctccttagacgacagactacctcacggaggttttgtgctggtccccgtctcctctggttgtttcgttttggctttttctccttccccatgtctgttctgggttttcacgtgcttcagagaagaggggctgccccaccgccactcacgtcactcggggctcggtggacgggcccagggtgggagcggccggcccacctgtcccctcgggaggggagctgagcccgacttctaccggggtcccccagcttccggactggccgcaccccggaggagccacgggggcgctgctgggaacgtgggcggggggccgtttcctgacactaccagcctgggaggcccaggtgtagcggtccgaggggcccggtcctgcctgtcagctccaggtcctggagccacgtccagcacagagtggacggattcaccgtggccgactcttttccctgctttggtttgtttgaaatctaaataaaactacttt

SEQ ID NO: 47574 - DNA, 589 bp, Homo Sapiens
cgagaggaaattacctgatgttccaaaccccctccagatcctgtatatccgcagcatctcccctttccctgagctggaacagtttctacaggacactatcaagaggtataatctgcagatgttggaagctgagggcagcatgaagcaggccctgggtgaactgcaggcacggcacccccagctggaggctgtccttatgggcacccgccggactgacccctactcctgtagcctctgccctttcagccccactgacccaggctggcccgcattcatgcgcatcaacccactgctggactggacctacagagacatctgggattttctgcgtcagctgtttgtcccatactgtatcctgtatgaccgaggatacacatcactggggagtcgggagaataccgtgcggaacccggccctgaagtgcctgagcccaggaggacaccccacataccgtccagcctatctactggagaacgaagaagaggagcggaactcccgcacatgacctcccaccctatgagggagggaaggacaccgtcctatggtataacctggcaataaaccgtgcctctcactgtgaaaaaaaaaa

SEQ ID NO: 47575 - DNA, 525 bp, Homo Sapiens
aaaggctcaaagtcttgatttgaccggagtcaaatcaatcttcaaagcaatcttggaatcctcaactgcagtaagcatttcaaaatgcaaacaaactgcttaacaactgacaagacaccagcccatacgctgctcttccaacagtgggttctagctttgaacaaaagtgctaaacatttccttgaatatattcttcctctttttgtcctcatcactcaatactggtgctcttgtcacaggtagaacagcttgtttcttttccatctattcaagtgtgtttctaattctaaaatgctgatcttctctggagtctatggtaggcaattatggtcactggaatagtttgtcttgttttaaaatattattggtgcatgtacaacagcatccaacatatctgtcttgttcctagatatatagctctgattttaggccttttgtgcataccattacaatatggtggggtaagacattctacagtagcctgtgctgaactgatctcttaaataaacttgcttctggttaact

SEQ ID NO: 47576 - DNA, 713 bp, Homo Sapiens
  misc_feature (571)..(571): n is a, c, g, or t
  misc_feature (639)..(639): n is a, c, g, or t
  misc_feature (655)..(655): n is a, c, g, or t
  misc_feature (704)..(704): n is a, c, g, or t
cctccgggctgcaggaattcggttcgagctgtagtttaacatgaactggagtctctatccttttctaaaatcgcattttgtaagaaaagaaagaaaaaaaaaaaaaaagaatgtagtcccacaactcctgatttgaaagaaacaccttgtattttttatatacatctcttatccactgtgacttttcttttaaactgggctctgtgattccagagtttagaatgtagaaatgaaatgcttagctttaccttttcttggggggtgtggaccctgccagaaatgtaattacgtatgctcaagtgcattaattgaaggcactgtgcacaccattggactgctgaccacagttaaacatttccagtaaaatttcgtaactggtcacagctcattcataatcactgtattttttgaccctgataaagacaattattttgatggtgttctggtactgtaattggtatcctttaaattatttaaaacttttgggtgtggggcaggcagagagggatggtgtccagagatacatcacactttacatcctatcttactgtcctctgtttttcttaccctncttacatccttttttgtaaaaataaaaagcattgtagcttgtaaaaaaaaaaaaaaaaaactcgagtngggccccgtacccatntcgcctatagtgagtcgattacaattcactggccgtcgtttacaacgtngtgactgga

SEQ ID NO: 47577 - DNA, 528 bp, Homo Sapiens
gcacgaggattataattgacaactgtaagaaactcggcctggtgtttgacaatgtggtgggcattgtggaagtgatcaactcccaggacattcaaatccaggtaatggggagagtgccaacaatttccattaataagacagaaggttgccacatatacctcagtgaagatgcattagactgtgagatcgtgagcgccaagtcatctgaaatgaacatacttatccctcaggatggtgattatagagaatttcccattcctgaacagttcaagacagcatgggatggatccaagttaatcactgaacctgcagaaattatggcctaacttcctgagagaccgaaccccctcacctgaatccccctctatcaaacaaacaaaaaagcagcagtaaagagctagaagttgcagtagcccctactgctttagctttggcctccaacgattctgtgctatagatacagcactgtttctggcacgcctcgtgggcattttgaaatatttaacgtttcctcatgatttgcctttg

SEQ ID NO: 47578 - DNA, 668 bp, Homo Sapiens
catttgaaaacttgcttttcttctgcataagagattcttatgccaaaaacattaaacagaagaaatcattttttttgctatgtaatacctcgcaactttgctctaaaatcaagctcagttattattttccaagtttgaacatgttaaatatcagatgccttgtaaattatgtctttaacgttttcttatagactaatttcctcttttccacctgccagacttgctaaccaagctcgaaaatgaacatgaaaaagccatacatgtattatttctcctaaaacctaaggcattatctgttggtttggcttgctgctcctattttgtagtcttgatagtagatgcttcttcagcgtaagagtagctatgatattcctttttatcttttcagtacatagtgctgaaaaatctgcaacttcttggatcatatttaatgaattatagtataatgcttgcaggcccagtacaagcatatatattgtgcctcttacagcctttggaatacattgtttccattttttaaatatcttctatatccatatagtattcaaattattaatgctcatgtaccaaggttttgctataaaagttttgtctgtatgaataatgtggctttagtaaataatcatttttcaactgtaaacttattctgaaataaagtaaaattctaa

SEQ ID NO: 47579 - DNA, 643 bp, Homo Sapiens
agcgggccgggtggggctgggtcccggcagcgtgaggactgccccttccccggactcactttttggaataaatgatcaccttgtgcatttccaaatcaaaggacaagcggacaaaatgcatcccaagatcaaggaagggacaggccagcttcctccccacacgcctccccggctgcctctgtgggcttctcctggggggcccaccccacccctgccagtctcctggagatgcttgaggatcggtcctccccagaaccaggccaggacgttgcccctggggcctggtgaccctgtgaggtcaggtcccccagattgacgtctgagtgtgggcaagtgtgtcaaaaggggctgccccccaggggagatgaggctgagagcagggagttgaggccgaagaagtcaaggcccctcccgcaaatgtgtacccctgcccgcgccactgcaccccgcgcaccccactcccccgggggccctgcgcggatgccggagtgggagagtctctgagctgtgagattgatcttgcccctaattggagaggaagccgggcgccaagacacacggggctcctgccttgggagccagggcgcggccgcaggtaagaccccagtagggggggccgggctcgaagttccctttgggagga

SEQ ID NO: 47580 - DNA, 569 bp, Homo Sapiens
  misc_feature (11)..(11): n is a, c, g, or t
  misc_feature (30)..(30): n is a, c, g, or t
caggtcccagnaggccggggcacgcggggngcccctggggcgactggccgaggccccttcccctgcgcccaccccgtcgcccacccctgtggaagacctcggcccccagaccagcacctccccgggacgcctgtcaccggactttgctgaggagttgaggtccctggaaccatctcccagccctggcccgcaggaggaggatggagaagtggctctggtgcttctgggcaggccctcacccggcgctgtgggccctgaagatgtggcactgtgcagcagccgccgccccgtaaggcctgggcgccgtggcctgggccctgtgccctcctagaggagcaggcacctcccccagacttggggtgggggccctgccagctccagcaccacccttgccccaagtcttttaacctgggtgttagcattttaaagagaccccacaggagttctggcctgtgactaactaactgccccaccccagccgagacctcggcgagactgtaactagtgatgtttgtacaaccaaagactctattttgtggtttaaggagaataaagttgactacatttta

SEQ ID NO: 47581 - DNA, 800 bp, Homo Sapiens
  misc_feature (659)..(659): n is a, c, g, or t
  misc_feature (686)..(686): n is a, c, g, or t
cccacatccagactacagtgatttagagttgttttgattgggtaccgtgggagcagggaaattggttttttaaaaagcaactgtttaattgcttaaataagctatgtattaaatctgtctccagttagggctatcttcctagcataggccccttaagtagcatgggggatatattttttgctataacgtaaaaattttcctttaaccactgccctctcctttctccttcaaggttctttccccctcagttttgttgttgtcttactctggagatgccaagtgtattttttctttctatgtaattttagattcgccttacaatgtaaatcttcacattggagataatattggttggaccttgcccatcttcactctagccttcgtatttgtgaaggactcagccaccttccttcttcaccccatgcttctcaccaaatttttgttgtcattgagggcacttggataactcaagttgatatttatagctgatcaatctatatgtgtcacagaactatgctgcctaaagtgatcttggctccttaatggtccttttggccccttggatagttaacagctgagtaattctaatctcttctgtgttttccttgccttaaccacaaattgtggtgctttttgtatattttatgtataaatcacanagttgaattctgactatttttaagacnaagtctgttaaacttttttattgtaaagatatttattatgcgaatctctattattttatggtatttattgcaaagactgttgaatgtactcatgtttgatatacaaatatcata

SEQ ID NO: 47582 - DNA, 462 bp, Homo Sapiens
gcacgagggaagccgggcgccaagacacacggggctcctgccttgggagccagggccgcggccgcaggtagaccccagtagggggggccgggctcgaagttcctttgggaggggctggcgggactccagcaggccgtcctcacctttcttagaaagtccacccagggcaagttgatgttgggggaaagcagaagtcaagccagccgcgggccccacacgccccgacccgctcaaccgacttgtcccttaaatgtgtcttggatcccgcagtgatgacgtgagccagccaggcccgaaagggtgaggccagtgcagagaagcttcccaggggattcctgggttcccccgaaagacaagcgaggtcattgcagttcacctgatgttgctcctgtcccgtgcgtcccggggaggctgtccttggtccgaggctgctcgttgcagcccctcccctgctggcggtac

SEQ ID NO: 47583 - DNA, 858 bp, Homo Sapiens
gtgaaagagtgatagggagagggagcgaggctggtgccgcttattttgaagctggtgccctccctcgccgtggccacatgctggaagcctgaggcctccctggactgagcctgtggcactgcgtgcgggacagttatgtttccttgccccgtcgcattaatgaggcccttccacatcatttttaaactaatgtttttctatattaacattattatggatatttggctttcataggccacacacaggtgtgctgtgcgggaagccccatgctccaatcaaagggatttttagtagtgcctctaagcaagcaccgatgagtcagtcccacgtattttcttttttgtcagtattgtttgggaaggagacatgccgggatgtgtcatcgtgccaaataccacatttcctgttggcacagtttcacagaagtaaacataagcatgttttaacaggtttttcttttcttttttcttttttaaacatgttttatttatttaacccgccattgtgtgtttttaagtattttctttttttaaggaaaggaaaagcttgtcacaatctaactggctatgttattattattaaatttatgtttgtgcaacttagaaaacccaggctgacaggtaatgggccccaagtttaataaaaaagcaacgcggaaaagccaagaaagaagagccgaacaggacagccagaccgcagcacacggacgaaagagacaaggagagagagaaggcaggagagagagaagaaagacagagcagacacagagagacaacgagcgaggcgcgacgggacgagacagggagggccggcgggcgcgcggcgaagagagggagggcgtgatgaagagaagggagc

SEQ ID NO: 47584 - DNA, 708 bp, Homo Sapiens
caggtgacctggcacgggcgtggggactacctggccgtggtgctggccacccaaggccacacccaggtgctgattcaccagctgagccgtcgccgcagccagagtccgttccgccgcagccacggacaggtgcagcgagtggccttccaccctgcccggcccttcctgttggtggcgtcccagcgcagcgtccgcctctaccacctgctgcgccaggagctcaccaagaagctgatgcccaactgcaagtgggtgtccagcctggcggtgcaccctgcaggtgacaacgtcatctgtgggagctacgatagcaagctggtgtggtttgacctggatctttccaccaagccatacaggatgctgagacaccacaagaaggctctgcgggctgtggccttccacccgcggtacccactctttgcgtcaggctcggacgacggcagtgtcatcgtctgccatggcatggtgtacaatgaccttctgcagaaccccttgctggtgcccgtcaaggtgctgaagggacacgtgctgacccgagatctgggagtgctggacgtcatcttccaccccacccagccgtgggtcttctcctcgggggcagacgggactgtccgcctcttcacctagctgttctgcctgcctggggctggggtggtcgtgctgaagtcaacagagcctttaccctgtgctgcaaaaaaaaaaaaaaaa

SEQ ID NO: 47585 - DNA, 659 bp, Homo Sapiens
cacgaggttttttttttttttttgagtctgtccagataagttatttataatgggcattactgaatttttaaaatgccgattacacccaaatattgtgcacatttaataatcagacaccagatttttagctctgtactcctaattaagggacatgtatgtggccttgcctagccctttggtgataagtacttcctctaggaaatgtacgataggtagaattgtggttccctaaagacaagtacataaaggtgaccctgatgaaaccttgaagttctgaaatttaactgcctaaaatgttctccttagatgtgagagaaagagaaatcagaaaaattaattctcttgggggaagggcttgaattgaagctttactttagaatttagccctggtttgaaattttccattacatgatcttggtttatcatcgatgggaagggtagaaaacttcaaggaaaataagtgaaattttaaaagtcagcattttcttagacctcttcagctgattgtttatttttctatgaattcctacacatggttattcccccctacttgagataatctaaatataaaccagctacttgatgtaactgagaatttgtgtggatatttatttaaacaaatgtgtaattttgagtacagaattcaacagttacctcca

SEQ ID NO: 47586 - DNA, 801 bp, Homo Sapiens
aagaaacaatcttatttattaatggcctgcatatttagaaagggtttaaaaacacatacatttcctgggacacaaacttacttaccaaatgtatgtccttacaaaataacttcacagatcaatagtcttgaacttacacaaagacatatatatgacatacattaggttaatatacatttcaaatgtttttgcagcaactttctaccagaaagtacactaatgtgagaatgtatgttctctttaaccccttaaaaatagtaataaaaaattacaaaataatgtaaatgtaaaattaaggctgagactacatattctagtattaataaagtcaaacaaacaatagttataaaacttggtgctgctgaatattttatatatatatatttatatatatatatatatatatacacacacacacacacacacaggataagtcttttgaaatttgaaatgctaccactgtcacaagttcactcattgatttaatgttgttctgggtatcttaacatttcaattcccaaatacctgtgcttttaaaatttttatcctgaattctgcattgagtttcctcacatatttacaattaaacatctagcctctagaaccttccttacacaaaagacaaaacatctttgttaaataaattcacgcaaaagtaataaaaaggtttttaagaaatagttctgacatgttcattatatttatactgaaaaatagtacatgtacttttcttcaagattaataaatgccatgttgcagttttacagtcactggcacattagcacatttttctcttacaca

SEQ ID NO: 47587 - DNA, 571 bp, Homo Sapiens
taatgaataggtaagagatgagataattgcaacattgtctagttctagtatggtaactattcttgaaatggtattgaaaaataccgttaattcaaattgacagagattgataaaaagaaactgatttacctaagtttactttttaattgcataatagagcattttttgttttgagttccctcattcttattaccagaaagagcttgcaaatagttttactttcttggcactggaagggtagttctggaaagctactttgttgagagtctcattcttccctggagttaatagagtgattcacaatctttggggttttctcctcatcaaaagcatttcttaagtgcctatctaaaagcaattaaagactgtgtctgccctttagaagctaagaatttgattcatgatgcaaattaactagataatttgcaaagtacccttgagattgaattttctctattatatatctcccatatttcaggtgaataatttaatttaaatgacaaaaccctatctagtcaactgggcataatgacattttctttaaattagactctattttgaattaaaagag

SEQ ID NO: 47588 - DNA, 615 bp, Homo Sapiens
gggtttatcgatgccacctgcgtgctgtgggtctctagaaccatctgcatggacgtgaagccacagcaggtggctggactgctggctgttcctaatgagctacgctgggctttgaggtagaggttggggtttatgaaccccaactctggcttaaagatcttgctgtggctctgttatgttctgaggccttgggattagcctcttcctcattatggagctgattttctagtctgtggatcagctatgcctttggacacttctcttttccattgtgccttttgaatgttgtcttctcactcagcatcagcacttcgatctaaatgcagactagggagttgggaggaggaaccaaagtgaaccatccttcatttattcagtcattcgttcatctgtcaaacatgtatttggacatcaaggttgcagagacgaacaatgcatggatttcatctttgaggagttcaaaacctagtggagagaacacatggtacaatcgtaacacatgaaggacaagtaagtgctgcagtaaaggtactaataacatgttccttggaacagaggaagaaaaaccacgaaaccatggacattagggaagcctttacagagggtgtggcatcg

SEQ ID NO: 47589 - DNA, 888 bp, Homo Sapiens
gcttccttcgcctgtcgcaggccacccgccagcgcctgagcatccccgtcatggtggtcaccctggaccccacgcgggaccagtgcttcggggaccgcttcagccgcctgctgctggatgagttcctgggctacgatgacatcctcatgtccagcgtgaagggcctggccgagaacgaggagaacaagggcttcctgcggaatgtggtgtcgggcgagcactaccgctttgtgagcatgtggatggcgcggacgtcctacctggccgccttcgccatcatggtcatcttcacgctgagcgtgtccatgctgctgcggtactcacaccaccagatcttcgtcttcatcgtggacctgctgcagatgctggagatgaacatggccatcgccttccccgcagcgcccctgctgaccgtcatcctggccctcgtcgggatggaggccatcatgtcggagttcttcaacgacaccaccaccgccttctacatcatcctcatcgtgtggctcgcggaccagtatgacgccatctgctgccacaccagcaccagcaagcggcattggctgcggttcttctatctctaccacttcgccttctatgcctatcactaccgcttcaatgggcagtatagcagcctggccctggtcacctcctggctcttcatccagcattccatgatctacttcttccaccactacgagctgcctgccatcctgcagcaggtccgcatccaggagatgctgcttcaggcgccgccactgggccccgggacccccacggcgctgcccgatgacatgaacaacaactcgggcgccccggctacagcccctgactctgccggccagcccccccgccctgggccccgtctcgcctggggccagcgggagtccc

SEQ ID NO: 47590 - DNA, 736 bp, Homo Sapiens
gggattaacctcctgggccgcagatggcaaagggagtgcctgggcctggtgacccagggctggatccacccctgcggagccctgggccaggcaggtgtctgctgctcacctggctctggagggctgccctgcagctgggcctggggacaggtcggctgtggggcagctcagtaccctccctgaggctcacggtggctccgagcatgagctctgcctcctgggcgagacccagcagtggacagcacggtcctcacacccagctccctgcacacccaggccagccacccctcccgctcgtgcacaggcacgcagatgcgctcacacgtacacacacacaaatgcacgcccacttgcacatgctcacgcacacgttcacacatgcacactcacgctcacacatgctgtcacgcatacacacacgcacatactcctgcacatgttcccatgcatgtgtgtgcactcggaccgagcatctcccacgcacctctaccccaccccaagcacctctctccccccatgcacctctccccaacaacacacacagccccctgcaccgcccgccccccgcccccaccaaggccccagcctctggccatcagtcctggtgccagagctttgcgtgaagttcgggccgcagagtggcccgctgggactcccatgtgctgccgtctgatgtgctcagatgggctcatcgttggttcgtttttactgtatatttatagtaataaaatcatgc

SEQ ID NO: 47591 - DNA, 597 bp, Homo Sapiens
ggaagaaaaagcaagaacttgatgaacatgagaaaaatctcaaactaatagaggaaaaactaggtatgactcccatacgtaagtgtaatgactcattgcgtcattcaccaaaggttgagacgacagattgtccagttcctcctaaaagaatgagacgagaagctacaagacaaaataggattataaccaaaacagatgtatgagaggtgacagagagaagaggccattggtctcagtaagaatgccctgctttctgcatctctgtttcagaagaccaagagggtgacttaccagactgagtatttctggggacaatacaagtacctgggcatgaatttccatttcgattcagatgggactggaaacaaccattcaattttatgaatcttactggacattatggatttactggaattattccagacattatgccctttggttgtcactaccttgcaaatgtgtaagaggaaaatgtgctaatgtggcagtgactgtaaaactggcacatggcatttattaatcctgaagaaaagtacatgtactatttatcagtcataaatataatgaacatgtcagaactaaaaacaaaaaaaaaaa

SEQ ID NO: 47592 - DNA, 798 bp, Homo Sapiens
  misc_feature (601)..(603): n is a, c, g, or t
  misc_feature (605)..(605): n is a, c, g, or t
  misc_feature (607)..(607): n is a, c, g, or t
  misc_feature (624)..(624): n is a, c, g, or t
  misc_feature (713)..(713): n is a, c, g, or t
  misc_feature (724)..(724): n is a, c, g, or t
gggagagaccatctcatgaagtacaaataataaaaaatatgccccagatggcaaactttgtatacaacatgtacatgcatttgatacagactacacatcattatcatcagactttattacaactaccacctgctatggtagaagagggtgaggaagttcaaaatcaagaaacagaattggaaacagaagaagaggccatgactgttcaagctgacatcatacccagtccaacagacaccagctgccgtcaagaaactccagcctttcaaactgacaccacccccagtgagacaggagccacttccactccagaagccatccctgctttatctgagaccacccctactgtggtaggagctgtatctgcaccggcagaagctaacacacctcaggatgccacatctgccccagaagagaccaagtagccaaactgtagtccttctaaaggaggacatggcagtcaaaaagtctgagtaaagctggtttttgtattttatatttgcttctgccattttactgtcactaattaatgtttagttcttatatttgttaactgatttcggtgtcttgaatatattttttttaaattatgtgcatgcannngngngacttcattgaaaaacnttaacatgtcggcccgacctcgggccctacgagaagcctttcgtagaccaattcgtgttgggcgccgcggggcccccagtaggataagntgaaacatggntcattagcctggttttccttagggaagaatccctggggccatggacctaggtggctttgggaatttctacccca

SEQ ID NO: 47593 - DNA, 700 bp, Homo Sapiens
  misc_feature (643)..(643): n is a, c, g, or t
ataacctgccattatgtaatttggtttcattttattctacctgttgtgtgagtttagtatatttaatttactttttgttactctttacatactgtttatttttgttagtttttaattgaagatggactgttgaaattgtataggaccagtgtcttattaatatgattaatatatttagaagagccacgtgaaacccatgacaaaatgaatgtgaatattctttctaaaaatttagaaaatgttatctttttgcatttattatgtaaaactgttttacagtatcaaaatttttcacttaaagaaaaaaaatgccatgaaacatttgaactgatgagccacagaacttcagttgaaatttttttcactttttagcatgctaaatatacatctgagtttaaatgttctgtttaatggccattcataaattcaagcactaccactggtcagttttgtgtgatagaataaaaatatgttacctgcagtgtaagtacagcacactgtcaaattcttttccttaaggtgcacagtaaatgtacagatagttataggccactgttttgtaatgtagtacatttctaatctattattcctaacctattataactgtttgcagaaagaaaagaatttttctaataatctgtanaattatgctaacttctacaagtaggcttctaaataaaatttttaaaaaaaaaaaaag

SEQ ID NO: 47594 - DNA, 618 bp, Homo Sapiens
gttctctacaaaatctatgatctacataagaraagatcctgcaattttsagatgaacagcaggagcttgttgaaagggatgatgaaaaacaactgatgaatgtggagccaatccatgcagatattttgttggaaacttataagaggaagattgctgatgaaggaagactttttctggctgaatttcagagcatcccgcgggtgttcagcaagtttcctataaaggaagctcgaragccctttaaccagaataaraaccgttatkttgacattcttccttatgattatgaccgtgttgaactctctgagataaacggagatgcagggtcaaactacataaatgccagckatattgatggtttcaaagaacmmaggaaatacattgctgcacaaggtcccagggatgaractgttgatgatttctggaggtgattttggkgawcwkaaagccttwgttattktcatggtcactcgatgtkaagaaggaaacaggaacaagtgtgcagaatactggccgtcaatggaagagggcactcgggcttttggwgwtkttkttttaaarwtcaaccagcacaaaagatgtccagattacwtcwttcagaawttgaacattgtwaat

SEQ ID NO: 47595 - DNA, 931 bp, Homo Sapiens
gtttcggtccggattcccgggaaagaaatctataagtttcaaagacagattctcagagtaaaggatcgtgatgagttcccaatgattttaattggtaataaagcagatctggatcatcaaagacaggtaacacaggaagaaggacaacagttagcacggcagcttaaggtaacatacatggaggcatcagcaaagattaggatgaatgtagatcaagctttccatgaacttgtccgggttatcaggaaatttcaagagcaggaatgtcctccttcaccagaaccaacacggaaagaaaaagacaagaaaggctgccattgtgtcattttctagaatcccttcagttttagctaccaacggccaggaaaagccctcatcttctctttctctcctcagtttacatcttgttggtacctttctagccttagacaaatgatcaccatgttagccttagaccaagaagctggctagtcctttctgtgaagctaatacaatggtcatttccagacaaatttaaaggaaacactaaggctgcttcaaagattatctgattcctttaaaatatatgtctatatacacagacatgctctttttttaagtgcttacattttaatagagatgaatcagttttggaatctaagctgtttgccaagctgaagctacaggttgtgaaataatttttaacttttggaatcatactgcctactgttactctaaatagaaatatagggttttttttaatgtgaatttttgcctatctttaaacatttcaatgtcagcctttgttaaccttaaatacactgaattgaatctacaaaagtgaaccatctcagacctttactgatactacaacttttgttttctgatggccaaaataccaaatgcctgttgtatttatggattaaaaactgctaataaaaccctgtgttac

SEQ ID NO: 47596 - DNA, 603 bp, Homo Sapiens
ggaggagagtgctgccacgcaagcattgaaaagaaatggggcccagattgcagatggatttcgtattagagttgatctcgcatctgagacctcatctagagacaagagatcggtttttgtggggaatctcccttataaagttgaagaatctgccattgagaagcactttctggactgtggaagtatcatggccgtgaggattgtgagagacaaaatgacaggcatcggcaaagggtttggctatgtgctctttgagaatacagattctgttcatcttgctctgaaattaaataattctgaactcatggggagaaaactcagagtcatgcgttctgttaataaagaaaaatttaaacaacaaaattcaaatccacgattgaagaatgtcagtaaacctaagcagggacttaattttacttccaaaactgcagaaggacatcctaaaagcttatttattggagaaaaagctgttctccttaaaacgaagaagaaaggacagaagaaaagtggacgccctaagaaacagagaaaacagaaataacaaccaggaactgctttttcttttcctgctgagtactgctaataaaagtgctattatctgct

SEQ ID NO: 47597 - DNA, 938 bp, Homo Sapiens
aaattaatgtaattaaaagcttagctgactacagaataggtgagggtttcttaaaaatgagatttaagggctgggcacggtggctcatgcctgtaatcccagcactttgggaggccgaggtgggcggatcacttgaggttgggagttcatgaccagcttgaccaacatgaagaaaccctgtctctattaaaaatacaaaagtagccaggcatggtggcgcatgcgtgtaatcccagctacttgggaggctgaggcaggagaattgcttgaacctgggaggcagaggttgcagtgagtcgagatggtgccattgctctcgtttgggcaacaagagtgaaactcttgtctcaaaaaaaaaaaaaatgaggtttaaaacagtttggtcattacgggggggatcgggtcacacaagatagcattaaacgtgacatggcacataaaatgggttaaacaaatttggtgttttaagatcacgtaaggtaaaagcccagcaaacactttatgcacagatgggaatgtatcttcaaatctcagatttaataaacatgtaaagatcctctgtaaaaaaaaaaaaaaacaacaaacacaaaaaacaaaaaacaaagagaaaaaagcaaaatacaacacaacaaaacacacagacaaagaaataagacaggggggcgggaacacataaaaccgtcgagaggagacgccaaaataccatagcaacccacaacgatactagagaaaaacaggacgccccactgaggaggaatgacataaaaaagagcgcgacgggaggagaaggaaaaaaacaagactgaaaggaacaaacaaaccgaaacgacaacacggcagagaaaacacaacggcgtgggggggaagaagacagggagcacaaacacgggagacagcgcggggagacaaacagagagagagacgggaaaagcaggaag

SEQ ID NO: 47598 - DNA, 720 bp, Homo Sapiens
  misc_feature (627)..(627): n is a, c, g, or t
gaaacctctctatgtgaacacagagacactgacccttcgggagcctgatggtttaaaaatgaaacttattctgtcaccaaaggagaagggaagcagctctgttgatgaggagtcttttcaatatccctcccaacaagcgactgtgaaaaaatcctcaaagaaatcagctcgggatgagcagggtgctttactcctaggacatgagttacagagctttctgaaaacagcccggaaaaagcacaagtcatcctcagacgcacattcatctcctggccctgaaggctgtgggtctgacgcctcccagttcgcagagtcccacagtgctaaccttgatctttcagggcttgaacctattctggtagaatcagactcatcctctggtggggaactagaggctggggagttagtgatagatgattcttaccgagaaatcaagaagaaaaagaagtcaaagaagagcaaaaagaagaaagacaaggagaagcataaagagaagcgacactccaagtccaagagaagtttaggactttctgccgtgccagtgggagaggtcacagtgacatctggccctcctcccacatcccatacgctggagcagcagcaccttccctgccacttcctggcctncacacagatgggcatagtgaaaaaaaaaaaaaaaaactcagggggggccccgtcccaaatcgccctatagggagcggatacaattcactgccc

SEQ ID NO: 47599 - DNA, 450 bp, Homo Sapiens
  misc_feature (394)..(394): n is a, c, g, or t
ttagtgataacattatgaacaattctaaaagccctgtgatttgaaaaatatagaatcattaatggcccaagataggccttcacaccttcacaggtgcgaaaggaaaggccttcacaccctcacagaggcatcatgcaaaggacagcggctttggcttttccaattttccatctttaggccctggtgagaggcacacttatgcactaaaatgcacatatatgcacatgcattcaaaaataggcatttggtacaatggtgatcttgtacctgatgggctgaaaccagcttaagaacaaatttgttcttcctgatatgataactaggtctccaagagaaaataggaaaggcttgctttagtgccttacggttactaaatttaaatctttatttaccngggttttgaggcctacagtctatttatggatttacatatccaaaattggtttaaaa

SEQ ID NO: 47600 - DNA, 665 bp, Homo Sapiens
  misc_feature (650)..(650): n is a, c, g, or t
ggtgttttttttcaaacggagaaacatcctgttttgcaaattggaccccaggctggaacttagcatctgaagttgccgcttgtgggctctgggggaaagtgtagccccggagaggtaactgaggacatgagcaaccagtgccagggagggtgggatttgccagatgccaaaatcaggggacgggtggtggtgtctgtcagacacacacaggtcgccagtgacttcacacacacctcatgtgagaaccatgccttttttagtgtgtcctatttcatacctgtacacacttcctcgttttgtaatgagatttacttacacccaaacagatcctgaaagaaagcttcaagttttctcagatgatggatatgttttcactgtattcaataactgacggatgtaaggtgcacgtttcctgatgtgacgcactgtattccagctggtgatcaagtctgggaacagccgtaacaggtcaaccttgtggagccatcgcgagttagagggtgaaagatggcagaaaaaaaagtcttgtgtgtgagtgtgttttttgagtttgcatcaatcttaatgtctcttcataatacttttataatacattaagcctcttgtctacatatttggagagaatatgactttactagcagagaaatacnatatatcttgtctac

SEQ ID NO: 47601 - DNA, 743 bp, Homo Sapiens
cagaagatgggcctcgaaattgttgaagattcaacaagctgagtggagaccatggtctgtagaccccttcccgattctcctgtcccagcttggaaggcattgaaaacagtctccgtttacacatctcttcataccacgtgtttgaagtgttaaaattcaaagggatcattgaataaaacgggtgtagagtacaggaatggggcagacgcgattcaggtgaacagcacaagaagaatatgaggtggttcctaggagcaacactttcgacctccagttctccctgatgacagtagctgtctccaagagaaaaatcctcacttattaactctcttttcttgcatctcatttttatagagctactcatccttatttggaaaaaccaacaacaaaaaaggcttttagaaaatggttgtaaatctgacttctttgcaagtaactatgtatattgtaaatagatataaaaggccttttttctaaataaggacttaactgcctgtaacatgaaacttcaaactaaaccactaactcaatgaactacttatggtttgtctgacatccctcacttaccaattaattataaatatgtttttttaaatccccaaagacattatctgtggtctttttttcctttcaagctcagcctgtgtgcctgatgtcatttctttcaagttgcccacagtatctccacttaaactaggctagtaaccaaaataatgtggaccttctttaggaaacagtgtggg

SEQ ID NO: 47602 - DNA, 734 bp, Homo Sapiens
  misc_feature (468)..(468): n is a, c, g, or t
  misc_feature (545)..(545): n is a, c, g, or t
cttcaccatccggaggagctgtgtttctgtgtcacttgggatatcacctaaaaatgaaacatttgatattttaaggtataaaaaaaaagtaaattggggaacattggctgcagtccctaaaagatactgttgtctgtgcatcaggttagcttgaggtcaccacaggtcctgggagcccagagagtttaggcatactctcctttggaggccagcagcctttcacaaaccctgcctctaaaagggcggtttcacatttgaccatgtttttgcattagcctcagaaactcttgtctttagctgataacctttgagggatgtgagaagcctagttggagcatctgagaaaatgatacctctcaccttcaaattaatcaaatagtttgtccttctagtccccttataaattaataaatggagggctggtcatggtggctcacgcctgtaatcccagcactttgggaggccgangcgggtggatcacaaggtcaggagttcaagaccagcctgaccaatatggtgaaaccccatctctactaaaaatacanaaattagccacgtgtagtggcacgcttcttgtagtccagctacttcggaggcttaagcacgagaatcgcttgacccaggaagtggatttgcattgaagcgagattccgcactgtactggagcctttgcgacagagcaagactccctttcaaaaaaaaaaatacaaaaaaaaaaataattggccgcgttt

SEQ ID NO: 47603 - DNA, 585 bp, Homo Sapiens
atggagagggctctctcactgctagatctaggctgagccatctggaaggatcaaagggtgtgggagtatcaccccctctcaggctgcagaaggtctcgagggtggcgtcacagcaggatttccgccttctgcattgcactgcacagccccatggaacatgaggcacttgaggccttgcttcttggagcctctggggagcagagtaggtcactgccctctgggagtgttttgcagtagttttgtaaatgtgttgctacatagtcaagttcctttgtggcaaagaaatattttgtttgatattaggagccagcccatgtaatgcctctcaggcttgcttgcttagaagaaaaaagtcaccctttgtggtttttaagaaaaaaattctgtgcagatctgttcctcctcctgctccttcccttttctctacatacagtgctcattggaggctcctgctaaaccttcttaaccagagaaataataggtatttgttagacctgagtgtacatttcacatgttatccttcacatatttctcattttcatctagtactttcttaatgcctttatggagtccgcatcctcatct

SEQ ID NO: 47604 - DNA, 389 bp, Homo Sapiens
cattacaactcaagtctttaaaaagttcatttattgaaaatcatatgtataacctagcatacgaatgagcagatttaaacacataacttcaagccatttctgaaaacatacaccaggagctctgctcagctagagtcagactccagctccagcccgactgcgtgcggggacagcgcccgcgttgatgaggaccagccccactgcaggctgaggcggtgtcaccctgggaaggtcgtggtgcgttgtggcatattaagtctaaaccagatgaatgtaaatatctctttgtaaatcatttatttcactctgttccatccaggtcagcaatcagattgtggcatgctgggtaactggaaaaaataataaaaagtaagtttcaatagctaaaa

SEQ ID NO: 47605 - DNA, 1060 bp, Homo Sapiens
  misc_feature (710)..(710): n is a, c, g, or t
tggactcataaaacagtggctttctgttcatctaaagtttcctcagataccacagaccactgttaagtgtgctcattgtcactttaaatttcaacgataccctatttttgtcattctaaatatcagatgtactattggtataattgcacaccaaaaataagccaaacagtgcattacgctaactggatccctgcttttatgtgagctaaggaaagatggagccaactccaacgagggcctctttttctctcttgtctagcctgtttctaaaccgaatgatccaggattcaagcttctattgtcaagtgaaactttcctcagatggactccaggtagccaggtcacctaaacctagtggtcctgtgcgatgctctttctgccagtccctgaatctctgcagcttctcttacctgtcttacctgtagtaaagcacaattgcagtggcgtcgcattcagaagaagggaaggtcagcagaggctatgcatgttgtgtgatgatgagtgtttacagccaccttctcctaaaacgaaatttataccggggtggatagtattccattaggtagacttatcgactttgctaagtgctttttagacagcttaaaaaattttcaagattttaaaagatgtataaggttaagtttgcaaatataatggaaatgctgtatatcttttgaagtgatgaaatccacgttgggaatttaaagaanatatgttgtaataatgctgttgaaagtaatattttaatgtctctttgcctgttttctatttcagcacattcattgtggtgaatgttcatagcattataactgctttaaccattgaattgataccatttgttagtggaaaattggaaaaattattttgtggaaattcggcagaaattcatttttccaatttccaataatttgcgtgagggtaaattaaaaaattttcaaggccattggagggaataaaaataatgaaatgaaagccttttccccccatgaaaagaaacaaacacccgaaaccataaaattaaccacaacagggccggcccctctctaaaaatatcccccgc

SEQ ID NO: 47606 - DNA, 716 bp, Homo Sapiens
  misc_feature (680)..(680): n is a, c, g, or t
  misc_feature (682)..(682): n is a, c, g, or t
  misc_feature (687)..(687): n is a, c, g, or t
  misc_feature (692)..(692): n is a, c, g, or t
  misc_feature (696)..(696): n is a, c, g, or t
  misc_feature (701)..(701): n is a, c, g, or t
  misc_feature (705)..(709): n is a, c, g, or t
ggcagttgggagatgttcagcttcagtccctggccaattgcccgttcttttccagcctgatttttcctgcatgggaagagcccacatgtagccctgaggttcccttcccaggacagctccaggatcgagatcactgtgagtggttgtggagttaagacccctatggactccttcccagctgattatcagagccttagacccagcactccttggattggctctgcagagtgtcttggttgagagaataacgttgcagttcccacagggcatgtgactttgaaagagactagaggccacactcagttaataatggggcacagatgtgttcccacccaacaaatgtgataagtgatcgtgcagccagagccagccttccttcagtcaaggtttccaggcagagcaaataccctagagattctctgtaatattggtaatttggatgaaggaagctagaagaattacagggatgtttttaatcccactatggactcagtctcctggaaaaggatctgtccactcctggtcattggtggatgttaaacccatattcctttcaactgctgcctgctagggaaaactgctcctcattatcatcactattattgctcaccactgtatcccctctactgggcaagtgcttgtcaagttctagttgttcaataaatttgttaataatgctngnaaaanaaaanaaanaaaanaaannnnncccttgt

SEQ ID NO: 47607 - DNA, 665 bp, Homo Sapiens
gtggtcccacaaaaatattttatgtagtgtgccttcagagagaaccatttatttctcttcacttatcgtcccacaaagtcacatttggtggtggtcagccaagtcgcatctggcctagttttactcttgtcccaattttaaagagaaatgggaatgagtttgccctggtgagacccataccattgcaatgattatcttgagcacttaaagtccagtgttggctgttagtgtatttgatattctgcctgtctcctcatggttgaaatatgtctgaagaatagcagcataatctcttggctgtttatacttttttaaactttcctgtgttgtaaatattgtatacttttggtgattccagctatgtaacctctatgctctgtaaggtgattatttgtatatagcaacatggcccagtgatattatatagtttcccaatggagaggttattgagtaacctttgcattagtttaaacactaccagaagaatgctgagccaactataaacactcaattttgtatgttttccaaattggtacttattactgcttttgatactgtattacgtgccaatagtttcccaatcacatagcaggcaagagatattttgtactttctgatccactgtaatatttaataaaaaatgttactatctgaaaaaaaaaaaa

SEQ ID NO: 47608 - DNA, 482 bp, Homo Sapiens
  misc_feature (377)..(377): n is a, c, g, or t
aaaaatactttcagtatgttttgataaaactgttgctttgtcatgagttagtcaattgtatcaggttttccaagacctttaccagtaaattatgtttctgtatgtaaaataaccccttattagagagacagtgttatatgtatttacaaaattatataagttccattgggattgtattgattttgtattttcccaaaatagtactttgaattgatagtcctttatgcaatgtcttagcaatagtctctataatgcccatccaggagaagtgggtagtaattcttcatcatgaaaatgatatattacatatttagtatcttccctttgcagtattgcacttttgtttaactagaatacacctatgagatagccaaagnttcaaacacagttatcttagtttaccggtggagtatttcaacaccaaccacatttcccttcctccctctaattctacccacatgatctttattccttcctttcgc

SEQ ID NO: 47609 - DNA, 606 bp, Homo Sapiens
ctgacctgagatgtatgctgcctgttattgcagtagcattagtttcagattcttttgccattgcaaagtaccccttataaaccagcagtgtcatctgtgaggaagcaaattctcaagtgtctgtcatttacttggttctttttctttgtggtcttcacccttataccctggaaaagtctgtaattaccttagccaggaagatagatggtcatggcaagcgcacagcaccagacttactggctcaccaagatgatggaaaaaggcagatgattttttaaaaagccgtaatgactcctttagaccagccatttagcgtggtaattttgaaaggcctagctccattgcagacttccaaagggtcagctctgagactgccctccaggtgggcagttgattatttccaccagtgttttccagagccttaaactgtcctaaagtgacaactacctcagttggcaggaaagagacatatagtagaaagtgaaaaatgagcagtatttgggcagatgctatgggttacagttgaagggtaaaaggaactttacattgggaaacctttatacccttatgaattatgtacatggtaaaatgttctctctctacaaa

SEQ ID NO: 47610 - DNA, 740 bp, Homo Sapiens
agcgtgtccgtactaattccatgggctcagccactggcccccttcctgggacaaaggtagaacccactgttctggacagaaactgcccctcccccgtcctaattgactgtccccacccaaactgcaacaagaagtacaagcacatcaatggacttaagtaccaccaagctcatgcccatacagatgatgacagcaagccggaagcggatggggacagtgagtacggagaggaacctattctccatgcagatcttgggagctgcaacggtgcatctgtctcacaaaaaggttccttgtcccctgcccgctcagctacccccaaagttcgacttgtagagccccatagcccttctccttcaagcaaattcagcacaaaaggcctctgtaagaaaaagttgagtggggaaggggacacagaccttggggccttatccaatgatggctctgatgatggaccctcagtgatggatgaaacaagcaatgatgcctttgattctttagaaaggaagtgtatggaaaaagaaaaatgtaaaaaaccctctagtttaaaacctgaaaagattccttccaagagcctaaagtcagcccgtcccattgcccctgccatccccccacagcaaatctacaccttccagacagccaccttcacagcagcgagcccaggctcttcctcaggcttgaccgccacagtggcacaagccatgcccaacagtcccccaactcaagcccattcagcccaa

SEQ ID NO: 47611 - DNA, 675 bp, Homo Sapiens
ggaacctatatatttatgacccagtgatgtcttttggtgactaagcttatgaattcaggttacaattgagttgattctagatggttactaccttgaaaaggatgttggtgccttatgtgcacgcgccagagcctgctgggaataaacaaagcagattcatgccaacaccaactcgtagctttagtggcagatgggagggtcacagctcccaaaatgtggggctttggatttccacaccatcccacgtgtgtgtcatcttcctctttcacactcttgatgataatttgaaaatggtgaaatcacctctgaatttgcctatagcatgagcacattcttatgacaacataacaaatagttcataatgtgaatattagaaactgttacagcctgcagttaccataattttccatgtttgtggaattgatattgaaatagcagggctaaggaattactggcaagttttagcctgtgggtaataccttagggttatttaaatatttgtaattttatttaaatgttcatgaatgtttgaaaggaacaaaattatcagggatggctctttgccatgggtcttattttcaccctcttttctgtaagaaaaaagaacaatgtcttaatgtatttttaaggtttttggtatagtttctaattccaattttaataaaagtcttatag

SEQ ID NO: 47612 - DNA, 802 bp, Homo Sapiens
atttgttccaatgactaaattttacctcatttattaatctggtcattaaggaatatatttaataatattatgtaattattctttttatgcatgatacacctagaaaaatgccttttgtttctattgatggctttgttgtttggagctacttttgattacttattgcagtttcccaatttagtctttactttatctaactcacaaagtaaaattaactgatcacatggcaactactgtatttaaatagttctggaaaaatgaaagtgctttttgctgcttggtaaatgggtaatgcccttgattccttgactgtaggacatagctgatctaaagtactctgtcagttttaccttcacccatgactgtcattagttgtcaaagttgaaaagtactttagctgtgagaaatccttgtatgtttttattataagaggtataatcatcctcaaagcctgtttttattacatgatgtggactgattattttttctatcacagtgttaacagatggattttattgtaaatacaaagaaaacatattgattattgtagtattcttatgtcacctggccttttgcgtgagattatttattatttctagcaaggctttcttcctttcttattgcccagagactgactgatacatcttttgttatttttacacataaattaaacatagcctttttggacaaattcactaaatattaatgtataaaatgtaattgagtaaatttttatcagaattttaaaaataaaagagcttagactcagtagaactcagtagaagcttcactatttactcca

SEQ ID NO: 47613 - DNA, 791 bp, Homo Sapiens
gaaatcctgaacggcgcctggggctagcgagaaagatgcagaggatgtaaaaagcacccatttttccggctaattgattggagcgctctgatggacaaaaaagtaaagccaccatttatacctaccataagaggacgagaagatgttagtaattttgatgatgaatttacctcagaagcacctattctgactccacctcgagaaccaaggatactttcggaagaggagcaggaaatgttcagagattttgactacattgctgattggtgttaagttgctagacactgcgaaaccaagctgactcacaagaagacctcttaaaaatagcaacccttcatttgctctctgtgccaccaatagcttctgagttttttgttgttgttgtttttattgaaacacgtgaagatttgtttaaaagtaccattctaatacttcttcaaaagtggctcctcattgtacttcagcgtaaatatgagcactggaaacagtttcatggagtttaagttgagtgaacatcggccatgaaaatccatcacgaatacttttggatcaatagtctatttttaaaaagaaagaaaaaaaccacttttttatagtccctagctttgccatatgcccgccttaagtggaaggaaagttaatcacttaactatgtcttataaacaagaaacacagggcttggaatgctattactgttcacacaaagtatgattctgtttgaataaggcaaatgctcctttttttaaaaaaaaagacattactgtaatatcaaaaccgtggcagttgtatcc

SEQ ID NO: 47614 - DNA, 571 bp, Homo Sapiens
tttcttcatccattaaagaccttgttctcaaatctaggaaatcatctgtgacggaagagtaatgatcttaatttacatttgtcatatagtaagcattttcccccaaggttgaaggtgagtggtcacaaaaaagtagtcactatacaactcccctctccctgcaaaaaccacctcatacacacacaattcagttaaaacagtagtattgtattaaatgtaaatcttaaaaagatgtgaatttttgtaaattgggttcttcatggaagtttttttccacctgattttcacacaaatactatatgaaatttttcacattattttcacataattttaaaaattacatatttcaggtttgttctctttccaaatgttgaatgaaaaacaaattttccaatccatttatccctggggaaggattcatttgttgcgagtgccagtatacttaaatgtatactttatatacatttaagcagaaatttaaaatgtggtctttttttttttaaaagaaacacttctgtgtcagaaatgaaaataaatcatgctttttatttttaaatagaaagcatttcaa

SEQ ID NO: 47615 - DNA, 539 bp, Homo Sapiens
caataagaaagctatagtaatagctttgtaactgttatagtagaaaccaaatcatcatggtaccggggggaaacagacacatagaccaggggaaagaatagagaacccagaaataatttcatatacttacagccaactgactttcaacaaaggcaccaagaaaggacacccttttcaataaatggtgctgggaaaactggatatccatatgcagaagattgcagctaggctcatatctcttaccatattaaaaaatcaaccaaaaatggattaaaggcttaaatgatagatccgaaactatgaaactactaaaagagaatataggggaaatgctcaagaacattggtctaggcaaagattttatggttaagacatcaaaagcataggcaacaacaacaaaaaataggcaggtgggactatattaaactaaaaatctgcacagcaaagaaaacaacagagtgaagagaccaactgtagatgggaacaatattttcaaattatccaacaggggactaatatccagagtgtacaaggaacac

SEQ ID NO: 47616 - DNA, 562 bp, Homo Sapiens
ggaatgataacttttccacttgagaactctttatgttttactgtaatttttaaagtttttttgtcctttttgttattttgcaaaagaaaatagtatttacaggtggcttcttttaaaatataaaaatataaagcaggaatgtatatgaaatgtcagattttattgtatttgcagagtattagctttgaaattgaataaagaaagctgtttgtagttttaaaatgccttattggtatcaattagaaatttcttctattttttgatgtacttagagctttttgagtgtagaattttaaatggcaggattttacagtgtttacatgcaagtgcattttataagtgttctatatgtgtaaaatagtattttcaactggaaagtgttggctagtgcaaaaggcctggccattttctggttcccatgatgttgcctacactgctagactacagtttagtatcgctttgtatcatgaggccaagaaattccatgttgtttgtaaatagaataattgaaaaagcaataaacatttattgaacaaaaaaaaaaaaaaaaaaaaaaacgcgg

SEQ ID NO: 47617 - DNA, 574 bp, Homo Sapiens
ttttttttttttttttaacatactcaaagtaagattgttaaagtaatggatagaaccataacttacacatgaaagtcatatactagatccaatactatttagtttattatcgaaattggaaggattcattgagcagcatagaagtttgtttacatgttactttgagatgctaggtatttgtggaattaaaaagaatcaggctcttttgtactttgtttttaaatctgtgatgcttttcaaatttaattcataataaattgatgcaatttcatacttaggaacatacaaaaggtaatgtaaactctgccacttttttgtgttcaaaattttggtttttatgaagccagatggattgaagagttacataagcatttgaatgctctaatataaggctaatgattttctgttagtgtttgaatatcttcattcctctcaaattcataacagttctatttaattgaattaaataaccatatgaaaaatcttttgggtctccccctttttacacagataattatttttgtcataacactttttacttgtttttcatcataggggcctttgctgaactaca

SEQ ID NO: 47618 - DNA, 544 bp, Homo Sapiens
aggatggtgactggaactaaggctacacagagggtcgcacttggactctgagggttgggtgtggaagggggaaaaggagatggagacctgctccccagctcttcctgtcagccggtttacatgggaacagggttaacatctgtgttaggggaggtcaccttaccctttttcataggggaagagtgtcacactcctggctatctcagggggaatggggaaaagaatctttcaagggcaaagaactcgtgggaggatgtctgttgtatgtaatactcacaatggcttttggttagtgttgaaggtgggaagagcatttgtaggtccagaagagtgaaagagagggaggggtgcagcaacatgtgcacaggcacgcacatgtgtgcacgcacacatacaatctgggttatctttgtgctatatagtggattataattctgtgaaaccaagtttgtatattgaattacattaaggagtgttctttaaaaagagaaataaatatacaattacatgctaaaaaaaaaaaaaaaaaaaaaaaaaaaaggac

SEQ ID NO: 47619 - DNA, 499 bp, Homo Sapiens
accttaagtcatgcagacatgactgttctctttgtacaagtgtgaatcaaaatatgtatctctttttcagagtctggttaagctatgtcattgtctactgcatagtttcctgagtctgtttgtaaagtgcttatggctaacagttcagttctgtatttgttgacaggtaaataagtggagttgagtgccatctttgaaaaaattaccctctagctctaacactgaaaataataataaattgtagatctctgcaactaagtttaaagcagtgtgactgtgttgcttaaatatcaagtattgtttataaccaccaaaaaaaaaaaagccctggtaggttttttggcaccttatgtttaaatcagattcttagatttggaggtagacctgaccttgttatttattagataacattttgaatgtatccattggatttctaaaatgtattgtgaatttctcagacaaacaggatttatgctggagctctgttttgcttagaaat

SEQ ID NO: 47620 - DNA, 855 bp, Homo Sapiens
aaactaccacttaaaaatctaagatgtggattattgttagaatctgcaacttcattggcaaattatttcaagtatttttctataatcactttccccttctaaataaataaacttcgagaataacccatcataatccaaacaaatgatgcctcaacattttgagctgctctgtcggacaaataaacctggtcctcttgaggttatattttggatatacatttttaaactgtcagtaattattgtcagatgtggagttcaatagccagccagtgttcatttttatccttgagcttttagtaaaaacttcctggttttatttttagtcattgggtcatacagcactaaagtctgctatttatggaaactaacttttttgtttttaatccaggccaacatgtatgtaaattaaatttttagataattgattatctctttgtactacttgagatttgattatgagatgtgcatattgctttgggaagagctcgaggaaggaaataattctctcctttgttttgaacctcaaactagataaaccctaggaattgcttaactgcaacaagtaattttcattcccacaaaaacctgaggcagctcttttgcccagagcgttccctgtagccacccccaccccacttgcccttggttctttagaaggagcacacacatcccttgattcctccctgatgtggtaaactggcacactccaggggtctaaaacataaaacagttgtgtttagggaaccttaagtcatgcagacatgactgttctctttgtacaagtgtgaatcaaaatatgtatctctttttcagagtctggttaagctatgtcattgtctactgcatagtttcctg

SEQ ID NO: 47621 - DNA, 608 bp, Homo Sapiens
gggctgctgttcatcccacatcgtgtggggcagtgtccatcccctgcagctacttggtgacttaacaactccaggagccctgtcagctgccctcctccacctaaaccccttcgactcttctgctttgacaaagaaaatgacattggggaggggaggtgctccgcctcccagcttttctcaaaatagtcctatagatactggtaatctggaaatgaagaagtaattctgtctctgcacctacttttgcagaatgttcaaggaagtattctgtgttagtattaatgccaaaaagttgtttttaaaggttttgtactcagcacatcatacaaaccacattacttctgtcacttcagggcatcgggactggctggcgcccttgttatgtgctattttaatcagtgtaacattggtcaagttgttacccatgtatgctgtgtttatcatgtgtatatcgtccagaaagtattaaggctttaggtagatgcaactggcgaaccttggagagggaatgctgattgtcttgaccaaacccacagcctgtctcttctcttgtttagttacttacggcaataaatcatctatgagttagaaaaaaaaaaaaaaaaaaa

SEQ ID NO: 47622 - DNA, 785 bp, Homo Sapiens
  misc_feature (785)..(785): n is a, c, g, or t
ctgataaggtctgccagagtgtattttgagagaaactaccctaataacccctcttccagttttactttttggtggtgatatagaagttcagcaccgagaacgtcttctttctattgatggctggatctattttcaggcccctgtaaagatagctgtcattttcaagcagctgagagttctcattgattcagttttaagaaaaaagcttgaaaatccaaagatgtctcttgaaaatgacaagattctgcagatcattacggaattgataaaaacagagaataactgaaactgaaattcatggtcaactgctttaaaaattaagatgaagatacagtcatgaaattatctgaaaatgggtcatcacattaagtatttcatacttaaaatgttggtactagccattaacttaaaggtggtgggaaaaaagcacatactttaaacatgtataattttctagttcctttttaatgatgattattctgaatgtatttgccgctacatttacaataaattctttggtattaaaaaaaaaaaataaagcaactcttcccttccccgccctgctctttcccccccccgcaccgtacgcgtgttgaggcatatcccccatacggccttttgccgagccaatagtaacctggggcaccttttttttttttgagagcgcactcttcacccctcgctccgcatgtcctaaccgttggggcgcacgaccacgctacatccatccgccatcctaagaaggcgccgctgctcctatccaacactgatcgagtgaccccagn

SEQ ID NO: 47623 - DNA, 702 bp, Homo Sapiens
tgtcatagaaaatgaatccccttctggtcgaaggaaagctcttgctactagcagcatcaatatgaaacagtatgcaagccctatgccaactcagactgatgtcaagttaaaattcaagccattatctaaaaaagttgtatctgccgctcttcagttttcattatcttgcatttttctgagggaaggaaaagccacagatgaagacatgcaaagtttggctagtttgatgagtatgaagcaggctgacattggcaatttagatgacttcgaagaagataatgaagatgatgatgagaacagagtgaaccaagaagaaaaggcagctaaaattacagagcttatcaacaaacttaactttttggatgaagcagaaaaggacttggccaccgtgaattcaaatccatttgatgatcctgatgctgcagaattaaatccatttggagatcctgactcagaagaacctatcactgaaacagcttcacctagaaaaacagaagactctttttataataacagctataatccctttaaagaggtgcagactccacagtatttgaacccattcgatgagccagaagcatttgtgaccataaaggattctcctccccagtctacaaaaagaaaaaatataagacctgtggatatgagcaagtacctctatgctgatagttctaaaactgaagaagaagaattggatgaatc

SEQ ID NO: 47624 - DNA, 1072 bp, Homo Sapiens
tggaaatgagacagttgagtccaaaccccaatgctgacagccatatgcatttgaaaatctatctagattacagatgggcatttattactggcagtggaaacaccagatagaagatcttaggagaggcccagaaatgcatcaccttgtcatgacaaaagagaaggcagtagagtagggatagttacaaatgcatccatcttaattattttcaataggcttgtaaatcttatcgatggaaggagaaaggagacaagatgtggaagaattgacatgtatcccaccataaaatggtagaagatgagttttcaatgagtagtcatagttgaaattttacaaccaaagctcccatttgattgtaatcttgccaaaatataatggatgtataaatgaacttggggtataagcaataatatccactagtgttgttatcagctactgtaaccaagtggctggttcatttggttgatgctgattatggcctttaaccatggtggtttgttgtgtgttttttatttcacaaaaagccaataaaattgtttagctataaaaaaaaaaaaaaaaaaaacacaacaaaacaacaaaaaccaaaaaacaagaaaaaaaaaaagaacaacaagaaaaaaaagggaggaggggcggcacatcaagagccccacaagaggagacacgagcatgcgaacgcacacaccgactttatggacacacaaggtcgcccccataggaaggcccagcatatcaaacgcactacgacgcagcgaccgcgatagaaaaaagacaaagcacaggcagagaccaaacgtgcagaagacagagaaacatgaaggaaacagaagacaaccacaaccagtggggggaggacacaaacacaccagtcgggcaaaacaaaaccccccacgacgaagatgcacgcagaacgcaccgcgaagaagaggacgacataaaacactaccccagacgacgacgcaccggggggcacagcaaaaacacgcagacaataaacggcggagcaaaaagaaaaaagtgatgacagcgaagacgagacgaaagcgacgcacacaaaaactatacaagg

SEQ ID NO: 47625 - DNA, 872 bp, Homo Sapiens
gggaattcctcgggataatcgtcgacctcacgcgtccgataatatacagaactccaaaatagcttcatttaaggatttttttgtgagttaacaatttccttgaaatcctgtgaaatagatttgcacagacaccttgtgagtgattggtattggaggtgttcaagaaactgttcgaaaaagaacaaaaacacttccctcgttattttctctcattttttgatgagaggaaaatttgaaacattattcttgttgttgttggtaatagcataatgacagtgggaggggtacaaggggataagaaaaatgtcatgatttttttccggtcctgccacatgtaacacttactctgttacctaaattttatagttagatcatatccaatctacttattaaactgtgttctatttaccagtggagtttttctgcagtggttgcgtttcactgtaaggataatggagttcctctcctctgctttcctcagaggatggtcctttaacatagccagaaacaagccctgtggtttgaaggtgagctgtgaggatgggactaattgatatgcaccagtttacaaagacagtcttatcatccgagaatacaccatctttttctctggataattatttcttacatcatgcttgattcctacattttgttgggtctcaacattggctcacgaatgctgttaatatttattctgtattgataaaaagtctgtcttgccactacaagtaaatcccccatttaatattttcttctttagcatagcactgtcattttttgtgaaaatggttatgtttatttatttacatactgagtcatatataaattttcaataaaagcaaaaacttttctaccttaaaaaaaaaaaaaaa

SEQ ID NO: 47626 - DNA, 615 bp, Homo Sapiens
  misc_feature (589)..(589): n is a, c, g, or t
cactgaaagccatgggttctgaagaggcgaatttgttgaaaagtcccaagggtctgaatgaaagcatctttaatcaacactcaacactcgcaatattctagaaaaccatatactgtgctggttgaggccaaaggttaacattgctccactgttcaccaaggaagggggcagtggccatccgccgcggcctcacgtgcgttgtaacaagccctcatcacatgtgtgagtcttacgtgcacaaaaagagaaggctttggtactgaaactggacaccttgtgtactcgataccttcacagcttctattggacatattttctttttaggaatgaaggaaaattctcccatttttgagccattcttttgtcaattctacaaaattgcatgtaactttataaatatttttaaaagatatagttttgtaaatatttaatattccgctaatttgattttgaattgtaaatgtcaagtattctgtttttggggtttttatgttttattatactttgttaaaaaggacaaattgtacatttttagaatgtttttatgagtaaatttaatgtactgaaaataaaaattttaaaaaaggcnaaaaaaaaaaaaaaaaaaaaaaaaaa

SEQ ID NO: 47627 - DNA, 709 bp, Homo Sapiens
  misc_feature (601)..(601): n is a, c, g, or t
agccaatagcagctctgcatccccctcggttgctgccggaaacaccccaaaccagaatttttccacagcagcaaacagccagcctcaacaaagatcacaggcttctggcaatcagcctccaagcattttgggacagggaggatctgctcagaacatgggccccagacctggggctccttcccaagggctttttggccagccttccagtcgcctggcacctgctagcaacatgactagccagaggcctgtgtcttccacaggtatcaactttgacaatccaagtgtacagaaggctctggataccctgatccagagtggccctgctctctcccacctggttagccagaccacagcacagatggggcagccacaggcccccatgggatcttaccagaggcattactgaagctaaatctttcaactctccccagtcccctcatcccctggcctcctcccacttacttgttctaaatagagctgtttggaggatgttctctgcgctcccaggccggcatcgagtgtcatcaatttctaccacctgctctctcttctgcccaaggctgtgttgcttattccttacaaagtttatactgcatttggngctgtatctttttttgttttttgttttgtagaaaataaatatctccgggggcagtacaggtgtctgggcttgtatttgatggggtttctccgagtcctgtttctactg

SEQ ID NO: 47628 - DNA, 585 bp, Homo Sapiens
tggccacattggccaatgagccagggctggagtctgagacctttggttgttctttaaggcacctcctgccactttctccctcagaggcacaaacactttgtgttccacgtcagtttgaggggacggtggggggatgatatgaatgtcacaggaggagacaccttctgtctttgtttcaaagaaagtgatgtgccatttgttaatatacaagagaaatattgaaaatatattgaaaagagcaattttaaattatttttggcttatgttgcaatatttattttcttgtattagaaaagattcctttgtagagaaaaaatgtatttttcattaacgcaaagacctatttctcctttttgtacattgtccatgtgcgcaacccttaacgagcaatagaatgtatggtcacctgggtgtggccagtgcccgctgtgccctgcatgattctgtgttgccgctgctgcatagttcccagccccatcctgtcctgctcactcatgggggcttccagaccccggccccaccagggcttgtgtcatagggagccctttgcactcctcgtgtgttggcaaacgcagttaataaagc

SEQ ID NO: 47629 - DNA, 790 bp, Homo Sapiens
gctgaaagcccaggagagcctcagcctccacagctcaagaaagatgatgtcactagctccaccggtccccacaaggagctgtcaagcacagaggcaggttccacagttgcaggagcagccctcagacccagccatcattcccagcgttccagtctctctggggatgaagaggatgaactgtttaaaggggcaactctgaaagctctgaggcccaaagcacagcctgaggaggaggatgaagacgaggtgagcatgaagggacgcccgcccccaacgcccctttttggagatgatgatgatgacgatgacattgactggctgggatgaagacccaggaaactggtgcaaaggtttctctgcaacccttccctaagcatgattttgcacagccaaccctgggtctaggcgaaccacagggtgaggtcaaggtgagcattctgggaacaatatttgggctcagagggtgggttggccaccttctgagccccacccccgccagacctggtgaacgaggatcataaccctgtcttcaagaacactgggatttcagcagcaagttggaacgaaggactggtaggttcccctccaagccagtcacctgtaagagtcctgtcctctgccagactttttaatctcttcattaactctcagactgacctgggagccctcctctacctgaatccagtgctcaactgtgccccggcaacaagacctgggctgaggtctccctggtagaactaagggagattacaccatctaaatcccagtgcagtcaacagcctggcctata

SEQ ID NO: 47630 - DNA, 903 bp, Homo Sapiens
  misc_feature (848)..(849): n is a, c, g, or t
  misc_feature (853)..(853): n is a, c, g, or t
  misc_feature (857)..(860): n is a, c, g, or t
  misc_feature (862)..(862): n is a, c, g, or t
  misc_feature (867)..(867): n is a, c, g, or t
  misc_feature (870)..(870): n is a, c, g, or t
  misc_feature (877)..(878): n is a, c, g, or t
  misc_feature (880)..(880): n is a, c, g, or t
  misc_feature (888)..(888): n is a, c, g, or t
ttctacgatggtttgtttggtccttttgaaccaccccaaagaactcaacatggcaaagcaaatggtaaaagcttcccgactgttctactttgggtccgcgcgaagcccactcacgtgtgatctgtgttgcccctctcggtggtcccaggcgatccagccatgccccctgcccctctgcccagatgcttcaggggcccggcttttcaggcttgccctcaccagcggccgtcagccgacactcagggatgtagctaacaccactccgccagtgctttcagtaggaagagctgaggctgcctgggaggcccggggcgaccggaaaagggctctctcaagttctgaaaagagaatctgccaccagatcgaatttcgacccctgagcttgttcggacgtatggtccaaattcagattaaggtggtcacccaacccgagatgtcaggaaaggccttctgcagagaaaatgtccccccacccgccatctgcagccaggtgtgtgccacacggcagccttcccgaaacatagtatggattttaaaaatgtgtttatttttgtttctcaaccactttataacgtattttttaatttattttgtaatgtcttgttttgaagtattgctgctatccttgttatccttcccactgtttttatcactgatttattttgtgaaagttgtacactaatgttctatgtcaaaatcaaaagtatttaatgaaatactagttctatttaatgtggttatgggaacagctggaaacacaaaacaaacagtgattgtacagcaggctggggcccaggaggtcaggttcattttggtacatatgcaataaaactcccgacttttaaaannaaanaaannnnangcaanganaaaaaannanaccaaaanaaaaaaacaaacaat

SEQ ID NO: 47631 - DNA, 562 bp, Homo Sapiens
ggaggaatacattagataatgacacaatcaaatataaattgcaagatgtcacaggtgtgatgaagggagagtaggagagaccatgagtatgtgtaacaggaggacacagcattattctagtgctgtactgttccgtacggcagccactacccacatgtaactttttaagatttaaatttaaattagttaacattcaaaacgcagctccccaatcacactagcaacatttcaagtgcttgagagccatgcatgattagtggttaccctattgaataggtcagaagtagaatcttttcatcatcacagaaagttctattggacagtgctcttctagatcatcataagactacagagcacttttcaaagctcatgcatgttcatcatgttagtgtcgtattttgagctggggttttgagactgcccttagagatagagaaacagacccaagaaatgtgctcaattgcaatgggccacatacctagatctccagatgtcatttcccctctcttattttaagttatgttaagattactaaaacaataaaagctcctaaaaaatcaaa

SEQ ID NO: 47632 - DNA, 698 bp, Homo Sapiens
ccaacatcagacacaacgctacagatgggatcaagggctccacagagagctgcaacaccaccacagaagatgaggacctcaaagtgcgaaaacaggagatcattaagattacagaacagctgattgaagccatcaacaatggggactttgaggcctacacgaagatttgtgatccaggcctcacttcctttgagcctgaggcccttggtaacctcgtggaggggatggatttccataagttttactttgagaatctcctgtccaagaacagcaagcctatccataccaccatcctaaacccacacgtccacgtgattggggaggacgcagcgtgcatcgcctacatccgcctcacccagtacatcgacgggcagggtcggcctcgcaccagccagtcagaagagacccgggtctggcaccgtcgggatggcaagtggctcaatgtccactatcactgctcaggggcccctgccgcaccgctgcagtgagctcagccacaggggctttaggagattccagccggaggtccaaccttcgcagccagtggctctggagggcctgagtgacagcggcagtcctgtttgtttgaggtttaaaacaattcaattacaaaagcggcagcagccaatgcacgcccctgcatgcagccctcccgcccgcccttcgtgtctgtctctgctgtaccgaggtgtttttta

SEQ ID NO: 47633 - DNA, 620 bp, Homo Sapiens
ggggaaccccctaccctggggctcctctaagatggtgcagacacttcctgggcagtcccagctccccctgcccaccaggacccaccgttggctgccatccagttggtacccaagcacctgaagcctcaaagctggattcgctcatagcatccctcctctcctgggtccacttggccgtctcctccccaccgatcgctgttccccacatctggggcgcttttgggttggaaaaccaccccacactgggaatagccaccttgcccttgtagaatccatccgcccatccgtccattcatccatccgtccgtccatccatgtccccagttgaccgcccggcaccactagctggctgggtgcacccaccatcaacctggttgacctgtcatggccgcctgtgccctgcctccacccccatcctacactcccccagggcgtgcggggctgtgcagactggggtgccaggcatctcctccccacccggggtgtccccacatgcagtactgtataccccccatccctccctcggtccactgaacttcagagcagttcccattcctgccccgcccatctttttgtgtctcgctgtgatagatcaataaatattttattttttgtcctgg

SEQ ID NO: 47634 - DNA, 1009 bp, Homo Sapiens
  misc_feature (899)..(899): n is a, c, g, or t
  misc_feature (901)..(901): n is a, c, g, or t
  misc_feature (903)..(905): n is a, c, g, or t
  misc_feature (908)..(912): n is a, c, g, or t
tcctaaaaaagctctgatgctgggggccctcgccctgaccaccgtgatgagcccttgtggaggtgaagacattgtggctgaccatgttgcctcttacggtgtaaacttgtaccagtcttatggtccctctgggcagtacagccatgaatttgatggagacgaggagttctatgtggacctggagaggaaggagactgtctggcagttgcctctgttccgcagatttagaagatttgacccgcaatttgcactgacaaacatcgctgtgctaaaacataacttgaacatcgtgattaaacgctccaactctaccgctgctaccaatgaggttcctgaggtcacagtgttttccaagtctcccgtgacactgggtcagcccaacaccctcatctgtcttgtggacaacatctttcctcctgtggtcaacatcacctggctgagcaatgggcactcagtcacagaaggtgtttctgagaccagcttcctctccaagagtgatcattccttcttcaagatcagttacctcaccttcctcccttctgctgatgagatttatgactgcaaggtggagcactggggcctggatgagcctcttctgaaacactgggagcctgagattccaacacctatgtcagagctcacagagactgtggtctgcgccctggggttgtctgtgggcctcgtgggcattgtggtggggaccgtcttgatcatccgaggcctgcgttcagttggtgcttccagacacccaagggcccttgtgaatcccatcctgaaaaagaaggtgttacctactaagagatgcctggggtaagccgcccagctacctaaattcctcagtaacatcgatctaaaatctccatggaagccaataatttcccttttaagagaaaaaaaanangnnnggnnnnnaaccttcagggcatctatgtccgggggccggaaaaaaagaggttatgaaatggggcccttgggccatacctggtttcctgaaccccacttttcttgg

SEQ ID NO: 47635 - DNA, 662 bp, Homo Sapiens
gcaagattagtgatactatcccaatacactggctggagaaatcagaatttggagaaataagttgtccaaggcaagaagatagtaaattataagtacaagtgtaatatggacagtatctaacttgaaaagatttcaggcgaaaagaatctggggtttgccagtcagttgctcaaaaggtcaatgaaaaccaaatagtgaagctatcagagaagctaataaattatagactgcttgaacagttgtgtccagattaagggagataatagctttcccaccctactttgtgcaggtcatacctccccaaagtgtttacctaatcagtaggttcacaaactcttggtcattatagtatatgcctaaaatgtatgcacttaggaatgctaaaaatttaaatatggtctaaagcaaataaaagcaaagaggaaaaactttggacagcgtaaagactagaatagtcttttaaaaagaaagccagtatattggtttgaaatatagagatgtgtcccaatttcaagtattttaattgcaccttaatgaaattatctattttctatagattttagtactattgaatgtattactttactgttacctgaatttattataaagtgtttttgaataaataattctaaaagcaaaaaaaaaaaaaaaaaaaaaaaaag

SEQ ID NO: 47636 - DNA, 662 bp, Homo Sapiens
gccccctttcttcccttttctgttttacttcaagggcataccttggaggtgctcagagaagcgtgaagtttgcactatggtggaggatggggaaagagttctaaagtgtctccagctgtgaacccaggaggtcaagtgggctattaaaatctaacgttgagtaaatgtgatagtgatgagaaaggaattttgtgtactgtaaccttgcagtagagatgcagctgtccttcgtgtgtggaaacacacctctcctttacatagttgggaacctcattagaaatgacctcagctgccccatatctacgttcctttcagcagttgtccaagtaggagtgtatccagtgaagacatatcaaatcacaaagtcattgtcattagagtgtacttgattactgggcatccttgtaatataatttcataccactgacacattatacttgtaagagaacatctttcccagagtgcctcagaccttattgctttaaaatataataatgttttcattacttttattatttgaatgatttagtaaagttgactgaatctggtatagactttgggagtatgtgtgtgaagtttttatcaaactgtaatatttgtgaatggaatgccttgcaatatgaatgttaatataatgtgtaaagggagattaaaaagtttga

SEQ ID NO: 47637 - DNA, 821 bp, Homo Sapiens
  misc_feature (705)..(708): n is a, c, g, or t
  misc_feature (713)..(713): n is a, c, g, or t
  misc_feature (718)..(719): n is a, c, g, or t
  misc_feature (728)..(728): n is a, c, g, or t
ggatatttagaacaagtggtaattccctttactaagtgaacagattattaaaacctgtagtagctttgaaccgtttgtacttgaaaatgggggtataaaggggtatatattttttccagaaccacatttattggcgtatacatagaagcaaatcttaaggcatgctgaaatttgttgtaaatcccaatctttactgccatggggaaaagaacgctggaattttccaaacttaagtctgtaaatatgctcatcttaagttcatgtaatgtttccgctaactcaccaagaataagctgacaatttaaacaacttttactgtgtaaaaatgaagtgcacggcatggcatcacagtatcttgacatttgttttgtgtcatttagctactttagaaaatagtttctgaactctttccccctttatactgtattaaggcaaaaacaaaacttctgaagcattaaagatcttcaccaaaataactattggtaacttcaggaatttgtcagttgccttatgtgaggatgaatagatccaccaagcacgcctataatacaaagtaaactatgatttttattgtgaaattttcatagatggaaaattgaatattctgtccatttcattttacaattatcttaccacttatttttgtaccatgtatttcaattgcctggtttagtgaaaaataaaaatttaaaaaaacccaaaaannnnaaaanccacnnaaaaaaaancccttggtcgggcggcctcggccccttgagaaactttcctaaaacatttcgtttggcgccgcgggcccccgtagggaaaggtgaacttggttt

SEQ ID NO: 47638 - DNA, 787 bp, Homo Sapiens
  misc_feature (569)..(569): n is a, c, g, or t
  misc_feature (741)..(741): n is a, c, g, or t
  misc_feature (745)..(745): n is a, c, g, or t
  misc_feature (768)..(768): n is a, c, g, or t
ggcggcctcgaaggagcatagcatttagattacgcttggcttcttttgatagtagtggaaaactagtatgtagtagaacaactggctatcaaatacttatacttaaaaaggatcaggaacaagtggtgatgaacttggacagcaggtttctgaccttccctttatatatctgctgtaacttcttgtatatatcaccagaaaaaggaattgaaaataatcgccacccagaagatccagaaaactgaagatctcatcagttggaaacagtagcactttgaaaactttcaggccagctttaatttaatggccctactgatattcacatctaaggtgactaacaatgacaaaggccttatgaactgtacggacaatacagaagactattcttatcctcattgcatttctatgcatatacaaaaaaaaccattttaaagccaagaaaatatctgtcaaaccatttctgtcagtacgatgtcaactcatgcttttaattcagcatcagcagaaaatgactgtaggtaaatctcacatttatctgcaacaaaatatagatttaatttttagcttanactttgtttctaccttatgttagtggacctcagttatctatctgtaaatttattttttatttggctaaaataatctaaaagaataatttggatggccaattagcaatgctcttttgagctggggcatttaaagctttcctttaatattttttacctgctcatttatgatccntccnttttagtctaatatctttccagnttcataacttggtttttaa

SEQ ID NO: 47639 - DNA, 901 bp, Homo Sapiens
  misc_feature (708)..(708): n is a, c, g, or t
aaaaaagagcagataaagctcaaactattccacctggtagggtcatttaccaagggctggtaggagattccgaatactcaatattctcaggcatgcaagaggacctaagagactgaaaaaagtgaattgttggccagaaaccttgggtcttttcataaaaggaaatttgggcttgtcaatccctctttaaagatataggtagaaagaagagatttttaaccctttgtctgcaaaagaaaaagggttaaatgaagcatctatacagatgactttgggagattatgacaccttttgccatcttcagggcttacgtctttactttcttggctaaccagtttcttagaagaaaatgtgtcagggacttggggatctacagtcatgctttagcatggctatggagctaattatcaagcttaaagggtaactttgggaggactcctcccttcactcctagtctcccttggaagagcagtccaggctcagggaagggaatggataggatgacacagtaagtacagaaactgaagctgtcaatagtgaaggaaaaaggggaattcttcgttgctttggcattgacacataagtactttgattaaaaaaaaaaaaaaactatggatcaaccattcaaagcatcaattctatagctttttgcagcaagatgatcagttattgctggtaactgcagattctacagaaaagcacttttanagttctgttgggccatgaatgaacctggaaggaggaaagcacagtaacaatggaaactaaagtcctattattaatgtgacttttctgcttcagaatttctgagactttatagtcactggaaaatagccatttaattctttaagattagctcttcaacagtagctacacataaaatgcagtatttcaagtggca

SEQ ID NO: 47640 - DNA, 636 bp, Homo Sapiens
cggcacgaggcctgctagcaccctgttctctccggtcctccccgctggcaccagtcagcggggagaagcgcaggccagcctcccagaaagactccggagctgcctccgaacaggccaccgcagcccccaacccctgctccagtagttcgaggaccacccggcgaaagaagtagctgtgttctcccagctgcacgtcctgagagggccaggtcgccgggagtgctctggcctccggcaggacaggacccagccactgtgccttagctgaccctgcagggccaggcacaggttggggggctgcccctggggtttgcagggtgctgcattgagggctccaggccccacccccacgccagccatgcccctccccaggactcccactattgcctctgtgattggcccaggaggaaaacacgaccaagctcaagacccttcccctgccctgggctgtgggggtctgagtctagagcccccaaccctaggccccgtgccagaggggaagaggctgactcccaggggaagaggggaagcactgtcatcttccacgtcatcttcacaccagcccatcctgccctttagatctgggcaccaataaaggcgtcttttgtgaaaaaaaaaaaaaaaaaaaaaacgcgg

SEQ ID NO: 47641 - DNA, 878 bp, Homo Sapiens
ggatctgaaaaccgcttctctaccttcaccaccaccactgcccatcttgatctctttgagggttttcccatttcacttgatcttatttttgtttatcccttcctgcactttgtcaagagagtcctccagtttctatccaggaatgttcacatccaaagggttggacccacggatcattctgaatcttcctgcccctcctcactgcttaaccctgagaaccacaaatataatggaagcagttccccccaccctcaccccatctctttaagctcatcctagcaagacctctagagaccctagagactcgactttagtccttccccgccatggcacagtggggaaggtgtcaatggggagtgtcacggacaggaggtaggatcctgccgctcgcgtcttagtgtttctccctcaagactttccttctgttttgttgtcttgtgcagtattttacagcccctcttgtgtttttctttatttctcgtacacacacgcagttttaagggtgatgtgtgtataattaaaaggacccttggcccatactttcctaattctttagggactgggattgggtttgactgaaatatgttttggtggggatgggacggtggacttccattctccctaaactggagttttggtcggtaatcaaaactaaaagaaacctctgggagactggaaacctgattggagcactgaggaacaagggaatgaaaaggcagactctctgaacgtttgatgaaatggactcttgtgaaaattaacagtgaatattcactgttgcactgtacgaagtctctgaaatgtaattaaaagtttttattgagccccgaaaaaaaaaaaaaaaaaaaaaaaaaaaaaaaaaaaaaaaaaaaaaaagg

SEQ ID NO: 47642 - DNA, 907 bp, Homo Sapiens
  misc_feature (721)..(721): n is a, c, g, or t
  misc_feature (728)..(728): n is a, c, g, or t
  misc_feature (825)..(826): n is a, c, g, or t
cccatttaggaaaggagtttgcactaaactgtttttctcacagcagaggaacctttccaaggtggggatggaagcacagtcgggacagaattcgatggattcctttagttggagtccgcgtagtcagcacagacagcagtggaaaggacgctctgggtcctgttatttgctagggagggtaaagggagactatttcaaagctactgttcctagtccagctttaagtttcggtaagaaacatgctgttttgtttcatgatttcgttaattatggaaatttggcattgagggattattttattgagggtagaagagattccagaatcatcatctgtgatgatggtgtcctttagggctcttggagcagccagaccatgtttccaagagaaacctggtgatattgccagcagaccccctgccatcccccccagttgtcctggggctgaatgggcaaatctgtccaaacagctagtaaccggctgtgagggagagggtcagaagcacttagcgttggcctctgattgctgtcctctcttgtcctcttcccactccaatgatgaaaatgattttctctaaatgcctgggtaaggatgctttcaaggagctcacttggcctgcttgccctgccctctcacctctgacacccagccccaggagccagaccactcctgcctccacctctgactcttcagcagctgaagattaatgcagagaaagagcanagcccanaaggggagaaaaaaaaaacaaaaaaacaaaaaaacgaagcccagagaaggcagggctgtgccctgagcctgggtaccacgagctccgttgctggggnntgaggatgggcactcccccgcagtttttccccacccgacggggatggaccttcccatgggtgttttttccccaacccctgc

SEQ ID NO: 47643 - DNA, 949 bp, Homo Sapiens
  misc_feature (942)..(942): n is a, c, g, or t
gaatctgtccccacctggcactgaggagaatggtagagaggagaggagagagagagagaatgtgatttttggccttgtggcagcacatcctcacacccaaagaagtttgtaaatgttccagaacaacctagagaacacctgagtactaagcagcagttttgcaaggatgggagactgggatagcttcccatcacagaactgtgttccatcaaaaagacactaagggatttccttctgggcctcagttctatttgtaagatggagaataatcctctctgtgaactccttgcaaagatgatatgaggctaagagaatatcaagtccccaggtctggaagaaaagtagaaaagagtagtactattgtccaatgtcatgaaagtggtaaaagtgggaaccagtgtgctttgaaaccaaattagaaacacattccttgggaaggcaaagttttctgggacttgatcatacattttatatggttgggacttctctcttcgggagatgatatcttgtttaaggagacctcttttcagttcatcaagttcatcagatatttgagtgcccactctgtgcccaaataaatatgagctggggattaaatacgaataagacatggtttctggcatcaaacatggctgctgggagagagagataccccctttattacgggcctttgcgctactctacttcatagctatgggcgaactctgcccgcgcacgcagggccccgcagcagggatcggggccccggcctcgttgcaacccgacgcgcgcccattgcacctaaccgcaccgccgccctggggcacacctcacctccactccacttctcaccccgctgccgccgacccccgcagcacgccgcgccgcagccggcctcctgcgccgaggagcgcgcggctcagacgacaaatctcgcacggccgctcgcggacacacaagcgncgcgccc

SEQ ID NO: 47644 - DNA, 557 bp, Homo Sapiens
cggagcttgcagtgagccgagattgcaccactgcactccagcctgggcgacagagcaagactccgtctcaaaaaaaaaaaaaaagtgtaagtggattaaaagagaaacttggtctagttcataatatttttaatagggctttccctggctgctggaaaacttaggccagtaagcatctctttgtttaaagtcctacaagacaatttgaaataattcattgttcatgccaaaattctaagtactgtttttcttagcaagtgtaacataatcaggaacaatgggtacaagtaaaacattctttggatgatattcaaagccttattagcactgcacctgaataataggtcattttgcctcactcatttgccaaagtagccatttctaagttaaggaagtttttagataggctcatagccttgtatttcgttttagattgtaagctcaatggcagggatactatattggtaattatgttttcatatagcaaccaccacagtatattcttggtgcttaataaatgtttataattgttaacaataaaaaaaaaaaaaaaaaag

SEQ ID NO: 47645 - DNA, 667 bp, Homo Sapiens
gcagttgctatgctgaaagccagtgaatccagttttggcaaaccttaatctccctgcacattggaaatgaattacaggcagctgttcaaactcttcaggcaggattcctgtggactttgagattcatgttacctcatcttcttttttaaactgtacccaacttgtgagggtactctgtctaatgtatatttctagtgtttacagacagtaaatgtgtatatgtagtaactatttacagaacatgcatccttaaactgtgacttctcacctagtgcagaacttttaccaggctgtaaaagcaaaacctcgtatcagctctggaacaatacctgcagttattcttcagctgtttggacaacttagattgggtttataactattaggaatcactgcacagtttatttgggttgtgttttgtgtctgagtcccctccctcatcccttagggtccagaagagcaatggaggaagtgacagctaatgttgcagttcttattgtatggcataggactggcattatatagcagaaatcaactactgtacaatttcttggggttaaccatctttagttaaatggaattttaatttaaatgacgctttgctaattttaagtgttaagcattttgcattaaaatattcatataataaaaaaaaaaaaaaaaaacgcgg

SEQ ID NO: 47646 - DNA, 609 bp, Homo Sapiens
  misc_feature (4)..(4): n is a, c, g, or t
  misc_feature (7)..(7): n is a, c, g, or t
  misc_feature (588)..(589): n is a, c, g, or t
cccnttntaggaccgccccggtccggaattcccgggtcgacccacgcgtccggcttttgccaagttgtggtcttcaaatttatgtttactcttcctattggcagaataggtgctatttaagagtaaaccaaaggataagcagagggagtccctataaccaaagatggacagcatagccctggatagccagataaaccactctttgtattaagaaatgtttctttcctagtggtgaggggtgggtaactgtgaaagagctttatatcttgtctattcatggtattatagctgtatattcccaggatgataagcttgattgaaatcctgtatttagtcatatattatttgcgctgcttcatttgtatcatgtgcaatctctagaccaaccctatttttaaactctggtacagcatcattttgtacatattcccagctgcagaactagtatcacttatctcagcaaaagagattgtttgcatggaaagattaatagcactgattagatttctaatattttgcatttttgaaatgtttgttttctacgtgattatatttaaaactttagtaaatactaacatgaaaccattnnaaaaaaaaaaaaaaaaaaaa

SEQ ID NO: 47647 - DNA, 572 bp, Homo Sapiens
aaacaactgtgcttcttcagcactaatatttctgggatttaaatagtaatgtttaaattatggtaaatgtaatttaaaacatctcaattaagtctgtctatcaatattgttcttcaagcatgttttagacctagaaaagtatggtttgggggaggctattttattgtgtggttagcacaaggaatctaatttatagcaagtgtgaaatagttaccattttttcctgatctgtcatcttcatagcacaacaaaacgaaatgatggaaatgctcttgagctcacaacatttgtttttcttttaaagtaaatgcaagtaccaaagctcactactgcggtttgcctgtgcctggacaatgaggcggagccactgttgttggggcacccccttccctccccgggtttgcaaatagaggctaccgggtgctgtattcagcaacacctgttttactatttgttattaaactatcatctccaccttccttttgattagcaatttgtactaagaaacgaaacaatgttatttggtggtgtataattctacttttctagtagattactgtgtggaattctgt

SEQ ID NO: 47648 - DNA, 918 bp, Homo Sapiens
aaggaactaccttctcttagagggtaggaagaatgtggtgtgtgtgtgttctcataaagcaactggacattataggtgcccaggtcatctataaaaacgatccttgggctgtgtaaaaatgaagtggcttttcagtatcctctttcacacttgctgcttcgggagactatgcaatgatgggaaggtgatgcccctttatttcattcagtgccatggtccctgtgttgtagtaatttatttgtttagttcatttttttttttcttaacagtcaaggggaagagtgattcctcacactgctttcaagctggactgagccagtctcattctgggaaagaaacgctgtgtccagaactcagcagctccatctattttttccagtcgaaagaaactgatctttaggcagtttttactgggccagaaagcagtgctgaatacttgaaactgtgtgctctgttctacttaaggttctgtcagaatgttctttggtaggcagtatgtcatgatgtaatcatctatctccttgtctgtttccaagttacactgtgaagtctggacccttttgaggtggtcatcaaagacacagattccttgtttaaccaagtgtcccaaagcatgtacctgaagttatatcattgttaatccctaaaaaaggctatgcaggtaataattctggaaaacttatttaaaacattttccaagggttggtgggtgttcaaaaacacaccggagaagaaagagcttttgagaacaagaaagaaacgaagaaaaaaaagagaaagaaaaaaaaaaggggggggggaataattcggggaagaagagacttttaaaagggacaagaggtaaaaaggggggaaagagaggaaacgggtgtggacttggggagcgcaagagaggaaatggttcgggtagttaaggaa

SEQ ID NO: 47649 - DNA, 578 bp, Homo Sapiens
gtcagattctgtgatgcattcaatattccactcatcacttttgttgatgtccctggctttctacctggcacagcacaggaatacgggggcatcatccggcatggtgccaagcttctctacgcatttgctgaggcaactgtacccaaagtcacagtcatcaccaggaaggcctatggaggtgcctatgatgtcatgagctctaagcacctttgtggtgataccaactatgcctggcccaccgcagagattgcagtcatgggagcaaagggcgctgtggagatcatcttcaaagggcatgagaatgtggaagctgctcaggcagagtacatcgagaagtttgccaaccctttccctgcagcagtgcgagggtttgtggatgacatcatccaaccttcttccacacgtgcccgaatctgctgtgacctggatgtcttggccagcaagaaggtacaacgtccttggagaaaacatgcaaatattccattgtaaacaaatcaaaggaaaagaaaccaagaactgaattactgtctgcccattcacatcccattcctgccttttgcaatcatgaaacctgggaa

SEQ ID NO: 47650 - DNA, 646 bp, Homo Sapiens
tgtgatgtgagacagaaacctaaacatggtacttgattctaaacctgtgccagtctatagcctctgcctccccaagcagagctcaagccaaacgcttctgtcctctttccttctgcattaaccctttgctgatcctcaggggccactcccccaacacccctgtacttgggtgagggatgttggacagagcctgttttcatgtactgcaggtgggggtgtgctgacatgtttgctcttggttgatggagaaggtacagaggccaggagtgaaaatggttgacagaagagggaagagttaggtgtctcatagtcactcatagtggggtggtcaggggtaatggcatctccccactttaggcttctcaaacagacttttgacacctctcaagttcagagctctgatgtggaaagacaggaggtgtggggaaggagggggatttcgtgtgtttgcatgagtgtgcgcttcaggccttgggagttggcaagagggagggaaggaaggagagcaaaatcttcggaaggtgtttcttgtacctgagggatcctgccctgaatctccatagtctccactgtgaactgaggaggggaggggtgtgctggggaataaatcttgtatgagaaccaaaaaaaaaaaaaaaaaaaaaaa

SEQ ID NO: 47651 - DNA, 874 bp, Homo Sapiens
ctggctgcttctgagacttaccaacccaagaaatttggagacattcccctcaggctaaaaggcagcggtccccagagttcagaaagcaaaagatcttgacaactgtgccagtagtggctctggtcctatctctccacagtgctggcctctgctggggaaggcatctttcccaaaggtatccccaagtaccatgttgaaaatgtcctcagtctgttgctccatctttctgagcctctgcttggtatgtcatgtttatggtcactacggatgagtgtgtgcagagtttgggttgattcttttaaatgctacaaacaagagctatttcttttcaataaaaaaggtttggattcggcctcttcctctgagcccacctcccagccctccagggagcatcagtgtacctgagtcactttgtctgcatctcttcatcccacaaaacacgaggctgggtctcattcagcggcctctcaccaaccttcaagatccagaagaaaacaggaacgttcagctctgccctgtgtcgtatctaatcacatacattactttatctaaccacataagttatgagccaccaatatcgccccagaagagtaaagccgtttcaccagcgaaagcaacacaggacacgccacacgcaccgcacacgacgcaccggacagcacacgaacgacacagaaacaacacaccaacaccgacgacggcggcaacacgagagaacacggaaacgacggagacggcgacgcgagcagacaccagaccagagccggacacggaagagaggccagcgcggccggaggacagagaggaaagcagagcagacggacgacaacagccacaaagcaggaacgggagaggggaggaaagaaagaagagg

SEQ ID NO: 47652 - DNA, 568 bp, Homo Sapiens
ctttggcttttgttggtccttctcttaggcctgctcctggacctctttatgatattgtgatagggaaaaaaatcattgacgtcatagaatattcttcttcctctcaggagaagacggaagctggagttggacatggttcataaaagccagaaacacaaacccgtgtggactccgggagggtgactcaggtcctccttccatgtcttgagcactggctcacccagggggtgaaaaattcccgcccctgtttgcacgctttcttgcctccgtgtgtaagctccttgtacaacccagacccatcttgtattttgtggcccagaaaactgaacgattattttgttcctccgtagtccaaagggcagagttgcggaaggccgtcggggcttggtgagcaggggctgtaatacagtctgtgggctccttaccctgcagaggctgtttcagctcacacagagtcatccacacaaacccacggctcccagttgacagtcagtggaatgctcgtctccttaacgtccagggtggggattctgctggaataaagagcttcctcagtgactcatcttta

SEQ ID NO: 47653 - DNA, 685 bp, Homo Sapiens
ggtctatactcaagacagatgtgccacccgtcggtgtagagagcgttgtccccacccaccaagaggaaacgtgtcggagtaatgcgagtccattttctttcagctggtctaccgatgcacagcaaccagccaatcctgctgtctcaagggtatccgtacctcaatgtcagttacattcagcagaaaaagtgacatttaatggaaagcaaaacaaatcaggtcctgatttaaaattttaacacgtttagatagcttatttaaattctaagactgtttttacagactgtattatttgtatataaatatgaactatagtttttactagtatcaccaaattgagtgatacaaatttcatctattttattaccctatttttaagggaattttatgttttgtttaaccttgatgaattgtataaagagagaatttaaaaaattacattctttattttctattagctgtattcatactttggttgcttcagactttatatattgttcttaaaagttaggaaagaatttcatgtgttttaaattgtcacttctattctttacagaaccttgtagtgccaaaaactttttaaaaggtaaaaaaataaaataaaattacaacatgaagattcagattttttttcttttccatacttgtatattgaacattcaaacttgaatggaaagttgatttt

SEQ ID NO: 47654 - DNA, 637 bp, Homo Sapiens
gggcaggcacctgccctccaggctgccggagcaggtggagctgcgccgcgtccagtcgctgccgtccgtgccgctgtcctgcgccgcctacagagaggcactgcccggctggatgcgcaacaacctctcgctgggggacgcgctggccaagtgggaggagtgccagcgccagctgctgctcggcctcttctgcaccaacgtggccttcccgcccgaagctctgcgcatgcgcgcacccgccgacccggctcccgcccccgcggacccagcatccccgcagcaccagccggccgggcctgcccccttgctgagcacccctgctcccgaaggcccggcccgtgatcggggccctggggctgtgagaccccgaccctctcgaggaaccctgcctgagacgcctccattaccactgcgcagtgagatgaggggactcacagttgccaagaggggtctttgccgtgggccccctcgccagccactcaccagctgcactgagaggggaggtttccacagccctcccctgggccgctgaggcccgcgcacctgtgccttaatctctccctcccctgttgctgccgaggcagctccccccggccctttacttcatgggaactttggaggctgcccttcacttccc

SEQ ID NO: 47655 - DNA, 702 bp, Homo Sapiens
gaagacattcattatctgcaaattaagactcaccttcactttccaaaatagctgagggttgttggcttgttgtagctgaccaccaaaagcagtcactgcaaatcttttaattcttccctatcaccttttgtattttaatgcaattattttggtccagaactgacctgtattttctgtattgtacacaaaagctaataattttgtgtactttttatttattttggaggttttatatgatcttcaattgagtattaaataatttgcctagattaagcctaaaatgatgaccagctaattaaagaagatattttgaatctggttctgagctaaagttgagtaaattcttagctaagaaaaaattggaaatccatcatctatattagcaacagattctcagagtaaattgttaacttctatgatttatgataatcaagctggacttgatcatacaagttagtctcataatgtattggaccaaaatgtaaacttcattggtcagatttagaagcattcatgctcacaagttttgggaaagtgaaaaaataattaaatcatcttggattttattctgtatattacacatttatcttttaagggaaacaatcctgtattactacttgcttgtattagcctttggacccttcttgagttttcagaaagcctttaatttttatactttcaataccatatttacattatttc

SEQ ID NO: 47656 - DNA, 842 bp, Homo Sapiens
ggattctgcatctggaagcgctgcatgctctcagaggagcgtgccgtttcccctgtagatggatacttttgtttgttgcctatttaaaaacaattaagtggttatttgcagttatttcagaactccaagtaagtggatggcttgggttctttctgcctggtcccaatggtgttgatgcttctgtggagcgcggacattcccaggagcaggtgcgtgccagccatggctgccagacactgctgcaactgaccagctgccggaagattctggagccactaacattagttttgcacatattttcttgggagtgttacttgaatctatctcaaactgcagaaaaaatcaaaagatcaataattgggagaaaaagagacaaatttaactgttacataattttagatagacaaaaaacatgagtgagtcgtgtacataaggagggaacatggtacagaaggctagaaggaattataggtcttattcccctttcctcagtcctttgaagagaagtacagtctcttgcgattttgtatatatcgtgttcgacacagccgctctctgtcctgtaaatagggaactaaaggctgtatgatttctcaagtgctgagttacacagtcctgagtgagctttctgttaccatactttcacacgtgggctttatttctcactgtatgtttgatatgatattactgtatttatcttacgaaagcactaagatgtaatcacagtgatgaactaatttgttttaccttgaatcgtatgtgtgaaggttgctgtggctccatttcggtgacccaggcgacccaactcctgcttataggagttcacattgtcttaccatggc

SEQ ID NO: 47657 - DNA, 538 bp, Homo Sapiens
cacgaggattaccgaggtccctccggatgagcctgtgagtgcaacgccagatgagcggatcatggagctggttctggggaagctggccaccaccaccactgacaccagctcggttccaaagttcacccatcatcagaataacaccatcacgctcaagaggagcttaattctctcaagcagacacggcatccggcgcaagctcatcaaacagctcggggagcacaagcgggtttaccagtgcaatatctgcagcaagatcttccagaacagcagcaacctgagcaggcacgtgcgctcgcatggtgacaagctgtttaagtgcgaagagtgtgcaaaattgttcagccgcaaagagagcctaaagcagcacgtttcctacaagcacagcaggaacgaggtggacggcgagtacaggtaccgctgcggcacttgtgagaagaccttccgcatcgagagcgcgctggagttccacaactgcaggacagatgacaagacgttccaatgtgagatgtgtttcagattcttctccaccaacagc

SEQ ID NO: 47658 - DNA, 646 bp, Homo Sapiens
ggctggcaatatatatattaaccatattttaaaagtaccaattttgtttttacagaaaagataaaactcaaaagagaacagtgtattccttctgaggggcttttataaattattaactataatatatgatggattttttcctaattttttatatttccttacaattttggtggccattaatttaactttaggcttttgggcatatgctagtctgagcttccgaaaagatacatatatgtttcccttttcattagctgaatgaggatattttaagaagttgaaagagaatttattttcaagttgtgagtaaatcctcctttgaaattcacctgattattagataacttaaagtttatttttaaaagctgacaactttttatgaatcttcgagttgacagttcctaaaagcgtaactcagatattaatgggctgtgtattaaatggttttattttcagttttgcagcacagaacactgttgaaatatccatatcaacttgatttttttaacctaattcaggtgtcctttgcatctcttaaatgttgggggtgggggtcagagccagttatccggcttctgttttgtcgattgcttagatttgttcctgttgtcaaaactgttacccccaaaattggtgtgacacatgc

SEQ ID NO: 47659 - DNA, 552 bp, Homo Sapiens
aagctcccattttgtaaccactagtttgcggttgacttgagtactctggtgacttcctgcgtcaagcgttctcaagctgtgagaatgtgcgcagctccaggcaggttttctctcggagagttaagtcttcccttgaaggcagggaagcaggatggatacacatatatcacacgcataaaacaccaggtgcgggagcagcccagactcaaggctgactaaactggaggctgaataccgtggaggtccacatgcagcttccctggagggcaggccggaggcgctcccgcccctgggcttgaggatgctgcaccccgtgggcttccaggcctgcccagatgatgccttcaggcctctgtccctggcggccatcctcaggccgattttgaccagcaatgatagactcttcttaaccctttcaaaataaatttttcagtgggacagaaaggagagttaaaaaacatttttttaaaggtggtaacatctgacccacaaagggaatgggtctgttttatgcaaaataaaagtttttcaaataaaaaaaacctcgtgccg

SEQ ID NO: 47660 - DNA, 556 bp, Homo Sapiens
ttaattttctgaagttggagtgtagtcttttcccccttaggctatgcattaatcgaagctttcttttcaccatgactttataatgtctagtaaacaatatttctacttcccacatctttgctttacacagtcaccttgcccttccttccaccaccgaagaaaaaagatggtcatactaacaggtgaaatgtacaaggtgtctgtgtgttttgtgtagcttcagagttagattgaaattaccaggcacagatttagtcttgtcattttgtttacacattggggaaaacaattcagtttattaaacgtttcatgtaactgcacccaagttttgccaagctggaaacttggaccttttctgtgtagtgactttttaattatagttttcataacctggagatcagactgttgctttcgcatgatgtatgtagtgtctcatgactggagtttgctttgttttatagtatctgtactccttgtatttttcaagagctattttgtaaacagatgatgtatttctccattgaaaacacaataaaaaaaaaacagcacaatctca

SEQ ID NO: 47661 - DNA, 926 bp, Homo Sapiens
  misc_feature (29)..(29): n is a, c, g, or t
ggagcacaagctgaagctttagtgccttntacaatgtggtatactgttttctagaattttatatgtgctagtcattctcaattcatatggaatctagatggatatttcatgcatacccatagagaagtgtgtaagtkatatgtcagaagagcttcttactgatttcacctaaaatgagaaggaagtcctgttttcaagaatgacattagagtcatgcagctttgggaccatcagttttatactgtgataattgaaaatgaaacatgttcttattttccttaaattgaagaaaaccctttagttgtctacattggatggccttattacctctcaatcatcttttcataaatgatgtgcagaaattgtacttaaggacttaggagtatatgggaggttattggttttatgtttaaggatacgtttacttgagtttaagatacaggtcatccatcattcttaggctcactttttacagaaagtatgcaaatagtaaagtgacagcactgctaatgtttttccccagtactataacttgtggtttctgaactcattattgttgtatttccaaaaaagtaataccttttaattagtgtattaaaagttaagtataattattttaatgcaatctaatacaatcagattactcagttgccttacctcatgggaagagttacttttttagatctaaaaagctgaatagcatgttagttacttggtttcaacttgagttttcttttaatgttaataagattgaaactttagtatttagtggggaatggaaagagttgcccttgttgcaagtaatgaagcctgatttgattatgaagctgcttaatcactcttcatgtgttcagaattactgttttttttgtttgtttttcctttttgtcactgtgtacattaaaattttggaagatgctttacta

SEQ ID NO: 47662 - DNA, 592 bp, Homo Sapiens
gagaccaaagttatcaaggaaatggtataggattttgaagcaagagcaccccgagttggcagtcctcgcagactcggttgaccttcaggagtccacagggatagcttccgacagctccagcgactcttccagctcctccagctccagttcgtcagactccgactcagagtgcgagtctggatccgagggcgatgggacagtgcaccgcaggaagaagaggaggacgtgcagcatggtgggaaacggggacaccacctcccaggacgactgtgtcagcaaagagcgcagctcctccaggtgacccagcaaggctgttgtctgtatggaaggacacgctcgcggcaagggcagggcctggggagggtggcctgtccagtcctgcagacaaggggaggcctgacagagcccaagaatgaggacaccctcggcacgggaacccattcacttagcgtttgctccagtagctttccctctgctaccaatgcagataaacgcggcttgttttactcaggcaagagaatgtgaatagtgccaagaaaatcctttacattatttaataaaaattgaatccattttcaaaaaaaaaaaaaaa

SEQ ID NO: 47663 - DNA, 595 bp, Homo Sapiens
tgcggaggagtcttaggaagtgctgtcataattcataaggtcaagagcaacatctggatgaatgagccacctgaaatgtgtgtgggctgagccacaggaagggtgagtcctcttgcttgtggtgctttatggtgtgcaggttgcttgctttcccacattctctcatttgcttgaaggcagcctaacaaaagggagtccccaaagagctccatgagagcttaagaaaattcatctcctgaggacaaagagaacaaagatctgtcctgtggtcacactgttgaggctctgtcttcacagctgatgttctcctagtggaggtacagctgaagaacattcagccccagcacgagaagatacagagcaacttggaaaccccaaagggagacacacccttaacactgccgtgctgtgctgtgccgtgtcctgaaggaggagagagccctatctcctcctggttttgttgctgacattgcagctgatcatgccttgactccttcatctctaacagaggaagaactgtattatcaaaccttatggtctacccatgaataaataaaatatttgttcaagcaaaaaaaaaaaaaaaaaaagggcg

SEQ ID NO: 47664 - DNA, 2466 bp, Homo Sapiens
ttaatgataacctctatgggaccagcatccagtcagtgcgggcagttgcagagaggggcaagcactgcatcttagatgtttccggcaatgctatcaagagactgcagcaagcacaactttaccccattgccattttcatcaagcccaagtccattgaagcccttatggaaatgaaccgaaggcagacatatgaacaagcaaataagatctatgacaaagccatgaaactggagcaggaatttggagagtactttacagccattgtacagggtgactcactggaagagatttataacaaaatcaaacaaatcattgagggaccagtctgggggcactacatttgggtcccatcccctgaaaaactctgaagggaatcccctccaaccattctcttgtgaacagaagaaatcaagtccctcttccctcctccctcttcattcctgtccccatggggagaacaaatgctactgttcttgtccccttttttagatatgtcatgtcaaaaaaaattaagttttctagtcctgttcttttttttttttaagtttttgtttgtttcagtttattttttgggatgatgccatctcattcatcatgtgactgtgcccattcctgcatggacctttcccaagcgctagcacaggtgcaaaatccatcagagccattgttttcataaaaaccaagcagaagtgaagagaaaagaggaggactgatggaaagacagactctggacagctgcacggcttgtgaagtgagctaaatgcaccacatgatgagatgctcctgggcatttctccctatctgtactgctgtcttgcagctctgaacggtgcaacgtaatggcgacagaaagtatcttatttatatatagaatatatatatgtaatttatataaaatatatagaaattattatatatatatattatacactctcatataatatatatatattcacacacattggggttagaaaatctatggagacttcatcaatggtactatgttattagagaaatgctttaattttcatattccaatcagatggcatcttctatcccagctggttgggaagggattgaagatggtagcaagtgctgcactaagggcactcgcatttggtcattctcttgagagctaggaggggtcagcctgaggccggagaggaagggcttttgcctggggtgagagggtgagagacttgacctgaaagcagctgctgcccctgaggtgcagccagagtcctgtgtgcggacagagagagagatggctaatgatgctccgcgtggaattgcctattgttttatgccacctgatgtgttctgcatgagaggtttcctttttgttcctttttaagctgctgttaaaccaaaaccatgttgtggtactgtgtcagccttttcattattgcaaattttacttttactatttaagtgaatgcatagaatccaatttgccaaggttctaaaggcttatgaggtcctgaaggagccaggccttgtgatggagtaggtgacacaggcctggttgtcctgtcagcagaagggaaagcaggggctgggctgagaggaggacacggagggctctgctgaggttccttcctgggttccaccaacagggacagggagtcacttgccttccagttctgtgctgggatggcgggacagcacttggcttgcttggccagctgcgtcatgagtttgatttggtttttttttttttgcagctgcttcatatgctctgctccagcccctccccaacagctggtagcttatggtttcttcaagaggaaagtagactttatgctgtacatttgagctgtagagctaagattcgcttactggtgagctgtgaaaccttgttgctttttcccagagtctgatggcagtgactgtgatcaagggaatcttcaccgccacaagtgcaggcagcaggtgtggttcaggtcccccccaccccactgtgctcctttgaagccaacgtgcctccctcgcctccatactggagggacgacgcaggggagaacagagaagtgcttggccctaggattgaggcacttgtttcctagcccgctgggttagggctggtgcaagcgaggcaatgttgaggatgctttaagcactaccagccgaatccgggaactctgttaacagttgtccaaccagcagaatgaggctaactgtataaagcatgggacccaggatgaggataaggaaaggacagcggctttccctgggcagtacaatggcttgaaggcaaaaagggataaagtgacagccgactgtgactctggtgaggaggggtgagcagggaggttgattctctgatgttaactaagtggcaaagtctcaaccgtgctcagccctccccctcccagggaagagaaacaaagattcaaagtaagcatgatactagtgggtttaccagtgtttcttccaaggagacactatattttttaataaacgata

SEQ ID NO: 47665 - DNA, 673 bp, Homo Sapiens
gcacgaggaggttttgtcgtttctaatacagacagagatgtgctgattttgttttagctgtaacaggtaatggtttttggatagatgattgactggtgagaatttggtcaaggtgacagcctcctgtctgatgacaggacagactggtggtgaggagtctaagtgggctcagtttgatgtcagtgtctgggctcatgacttgtaaatggaagctgatgtgaacaggtaattaatattatgacccacttctatttactttgggaaatatcttggatcttaattatcatctgcaagtttcaagaagtattctgccaaaagtatttacaagtatggactcatgagctattgttggttgctaaatgtgaatcacgcgggagtgagtgtgcccttcacactgtgacattgtgacattgtgacaagctccatgtcctttaaaatcagtcactctgcacacaagagaaatcaacttcgtggttggatggggccggaacacaaccagtctttttgtatttattgttactgagacaaaacagtactcactgagtgtttttcagtttcctactggtggttttgatattgtttgtttaagatgtatatttagaatgacatcatctaagaagctgattttgctaaactcctgttccctacaatgggaaatgtcacaagaatgtgc

SEQ ID NO: 47666 - DNA, 700 bp, Homo Sapiens
  misc_feature (3)..(3): n is a, c, g, or t
  misc_feature (5)..(6): n is a, c, g, or t
  misc_feature (676)..(676): n is a, c, g, or t
cancnngcacggggcgcctactgggaagtgcagaatgagacatagattttgaggcccgtcaaaatgaaaagatgcaagttagggaacaagtgatcaaaagggagaagggaaaggttttttttaaaaaactaaaacaacaaagaaaggttaaaaaaaaaaacagactagaggatgagtaatgagtaactctgtaaggaggaccatgtcagactattgtaagctaagcattaggactgatacaaataatatatgctcctggcatagaaaaataaaccacagagaacgagttcaaagaatagcaaagaaagaaagaggacccagtgggcgaaagatgagagtgtacttttaccaaaagttatctaagcctgagcacttgaagtctgcacataaataaataaatgacaaaagaaagaaaaaaaggccaaaaagtctacattgcgtgtgtggatggatgaatgagcagtgggagtgcagcgccaggtgacaagatgttgtgaggggttttgagtcatccagtcctgggcactgaggtctgttagatgaaaggatatgagaaaggtaatattggtaaataaagaaataggaaacaatgtaacaaatgttaagtacagaaatacattaatgggtggtaaataaagatgttaaagaaggcaatgcgatcatggtggcaaaagtnatcacagattaagggctatggctg

SEQ ID NO: 47667 - DNA, 554 bp, Homo Sapiens
atttttccctagctccctcaaccgcaccccatccctttagatcgtgcgtctgttttagtgactctgacacgatgccgtcctcaccttccaaatacccagttatttattcaagaggggggaagtgggtagaggatgggatgttttggaagcactttgcaagttaccactatctgaaaatcccctgctgttgcggggagaagctttgaatgcactgaagagaattccttctaaatgaaggcaggtgatagtgttctttctgtaagtaaagggaaagaaaaaaaacatagtttgcttaccaggtggagacaagattcaagacatagcagaagagtggaagacaaatattttccacttaaatgaggctgtttttgacgttctctgccaaggatttagagctttcgttgaactaacataaaaggagtgcgagtcttactagagatgttccgtgtgtgccgcccgtgctctgaactgcgtttccacctgctgtggtgcttgtgcagactggcagttcattgtcatctttaataaactaaggaaataaaaaaaaaaaaaaa

SEQ ID NO: 47668 - DNA, 921 bp, Homo Sapiens
tcgtgacttctcaacaatctagcaccatgtcggacacgttccccatccaccctcctagctctgctctcagagctaggcacatgggcacaggtcccctcccgtctgtcctctcccagcaactgtgccctggagggctccacatggcccccgtgtctctcgggcaccacccatatagcagtcccagagggcccatctgtaaagatcgagcttgtgtgtggtgtcgtggtcacatctcccgcttccccccatcctgtgtctgggcacagttcacatcaggacagcgtccattgtgctctcagtctgcctcaggtgtgtgcctggagggggcctggactggcatggatccagtgtgcagaagagccagcagggaaccggaagctctgatgtcaaggccagagcagttgagaatgggacccagagtagatgctgacctgggcactccaccattccggggccaccacagagatgccagcaggatgccactttgccagcccgacacacggacctttgtaaagaacagcaacaggcaggagaggcagcgtgtgaccagattgtgtcccgtcattgggtggcatatgttaactagctgccaaacaacttcaacccgtgtaattcatgtacatttgcaacagccagcccggtacagcctgtgtgacttctctgtatgtgtgtgtgtgtcgtgaccagcctaagtagttagcataactcaagatgctgatgtgcagtcacccatcagagaaaataaaaatggaaaccacgttcacagccattttaaaaggttttactttttttcttgattatggaagtaatccatgtacatagtaaaatcattttaaaagtacaaaaaagtatgaaaaaagttttgtctttaaaaaaaaaaaaaaaaaacttcgaggcattctatgtccgggtggcggaaaa

SEQ ID NO: 47669 - DNA, 646 bp, Homo Sapiens
tgaaaataaggttttgggacttggcttacccagaaaggtcctatgttgttgcaggaagtactagttccccatctgtgtcctactacaggaaaataattgaaggcactgaagttgtccaggaaattcagaataagcagaaagtaggaccaagtgatgacacccctcgaaggggcccagagtccctgcccgtgggacatcatgacatcatcactgatgtcgccacattccagaccacacagggcttcatcgtaactgcttctagagatgggattgtgaaggtgtggaaataaaacctactgatttgtataaattttaatagttataaatataatactataactcgagaaaaggcatttctagagaacagattcatttgcttaattttcaaaattatgtctccatattactgtttcatgactgactgactaaatgacacccaaaatggttaagatgtacttgactagtttacttatgcatctctttgcaagaatcagccagccaacaatgtctgggatttttattgtatatgttatagaggtgagaaatgtaaaatatgaaaatgaatatgtttattttgtattgaaaaagatggttgaaaagatggttgtaagctattatagtataaacacatttttgctattaaaaa

SEQ ID NO: 47670 - DNA, 763 bp, Homo Sapiens
tgccgcatattatatcagactgctttgagaaatctcatccctagtctattgcagttgtttctattagcttactgattaactcagtcctgacacaccttttgggaaatgctgatttaaacttcttaactggcaacagttggaacagtaatcagtttgctaacatatttaaagtcttgaatgttgaagaactcatgtgatttacccttttcaactttttggaaaacgatttaatttattctaattagattaaccctattaatctatggattgggtatcaaaatgaatgccagtccagatgtgcctagacacgaaattggagctgaggactctcacgatatgcaagttcatccaacgtgaagataccataagctttttctctgaaccagagaaatgaaagtcagtttaagaggctgatagatcttggccctgttaaggcatccacttcacagttctgaaggctgagtcagccccactccacagttaggccaagaattagattttaaaacttcatctgtctgtcccagttaactgttaaataaggcctcatcctccactgaagagtatggattgaaggattgtgaactatgtttagtgtgattgtgaacttggtgcctaatgttccatgtctgaagtttgccccagtgctacacgttggagtatacctatgtgtgtgctttgccactgaagtaagatttgcctgtatgggactgttttgtttggtaataagtgcactgcacccccaatgcaaaaaaaaaaaaaaggg

SEQ ID NO: 47671 - DNA, 725 bp, Homo Sapiens
  misc_feature (715)..(715): n is a, c, g, or t
agaatagaatgaatgaccccaaaatagggttttcttgggcgaggatgtgctggattaggaaaggtgacatgacacaggcagagcagagtggcacccaccacagaatacagtgtgtgttattacgaggagccagcagttgagcctaaggtccttctacctacctggtattggcatttgaggtcggaaaccctctactgccccataagccaggaaaagtgaaaagagaacacagttcctttaagaactggcagcaaggcttgaggccttatgtatgtagctgagtcagcaaggtacatgatgctgtctgctttcaaaaggacttttctctcctagctgactgactccttccttagttcaaggaacagctgagacagacctctgctgagtagctctgtgatgacaaagccttggtttaactgaggtgatcctcaggttgtgaggtttattagtccccaaggcaaacacaaatattagattaataatccaactttaatagtatacatttaaaagaaaaaaaacaaaagccctggaagttgaggccaagcctgctgagtattgcagctgcatttgcccaaagggaatccagaacaagtccctccctgtattttgttcttgagaggggtcagtctagaagctagatcctatcaggatgaggagcagcagcccagggcttgtctggatcagcaccaacgattttaaagaaaaaaggaagagnttcttagatg

SEQ ID NO: 47672 - DNA, 613 bp, Homo Sapiens
  misc_feature (613)..(613): n is a, c, g, or t
ggaaccagcaaacctgccagtttccagcagcctctgggctctaatcaagctctaggacaggcaatgtcttcagcagctgcatacaggacgctcccctcaggtgctggaggaacatcccagttcacaaagcccccatctcttcctctggagccagagcctgcggtggaatcaagtccaactgaaacatcagaacaaataagagagaaataagaatagaatgaatgaccccaaaatagggttttcttgggcgaggatgtgctggattaggaaaggtgacatgacacaggcagagcagagtggcacccaccacagaatacagtgtgtgttattacgaggagccagcagttgagcctaaggtccttctacctacctggtattggcatttgaggtcggaaaccctctactgccccataagccaggaaaagtgaaaagagaacacagttcctttaagaactggcagcaaggcttgaggccttatgtatgtagctgagtcagcaaggtacatgatgctgtctgctttcaaaaggacttttctctcctagctgactgactccttccttagttcaaggaacagctgagacagacctctgctgagtagctctgtgatgacaan

SEQ ID NO: 47673 - DNA, 600 bp, Homo Sapiens
ttcgggtgggagacttcagatgggctcagtacctgtcccagccacaggcttcttgtccacctcttctcccctgcccaccagctgctcagcgcataagaccttcccgacaggctctgcgtgtgcagctctctgcgtccctcctgggccctccagcgtcagacactaatgggagttcccgagatgctcgggtttgagcagggagcaggcagagctgcagtcagagacattagaaaaccagtctgaattgggtctgtctttgagatgcccaggccagcagaaagcagctcagaagtattgttgctcatggtgtggcaatggactgaactgtaatgaaaatgttatttaatctttgtctctgtattttgatacttgaatgactttcccttttgttttactgtatataaaattgttaatctgtctgattttgtctgaattataaacactttgaggtaccaaacataaccaatctgtgcaacaacatagactgacctcagtacccaagagagtgtaaatatttctgggcttccagctttggttttgttattttcataactgtacacaacttagaacagactgaattaataaatgagaagcgacatg

SEQ ID NO: 47674 - DNA, 633 bp, Homo Sapiens
cagggctccctgccattttagtgtcttggtgtagtgtaaccatttagtggttggtggcaacaattttatgtacaggtgtatatacctctatattatatatcgacatacatatatatttttgggggggggcggacaggagatgggtgcaactccctcccatcctactctcacagaagggcctggatgcaaggttacccttgagctgtgtgccacagtctggtgcccagtctggcatgcagctacccaggcccacccatcacgtgtgattgacatgtaggtaccctgccacggcctatgccccacctgccctgcttcctggctccttatcagtgccatgagggcagaggtgctacctggccttcctgccaggagctctccacccactcacattccgtccccgccgcctcactgcagccagcgtggccctaggacaggaggagcttcgggcccagcttcaccctgcggtggggctgaggggtggccatctcctgccctggggccactggcttcacattctgggctgactcataggggagtaggggtggagtcaccaaaaccagtgctgggacaaagatggggaaggtgtgtgaactttttaaaataaacacaaaaacacagaaaaaaaaaaaaaaa

SEQ ID NO: 47675 - DNA, 859 bp, Homo Sapiens
gatagaagcagtatcactgtgaaaactgtggaatttgtaggattggtccaaaggaagattttttccattgtttgaaatgtaacttatgcctagctatgaatcttcaaggaagacacaagtgtattgaaaatgtgtcccgacagaattgtccaatatgtttggaggacattcacacatcccgtgttgttgctcatgtcttgccatgtggacatcttttacatagaacgtgttatgaagaaatgttgaaagaaggctacagatgtccattatgtatgcactctgctttagatatgaccaggtattggagacagctggatgatgaagtagcacagactcctatgccatcagaatatcagaacatgactgtggatattctctgcaatgactgttatggacgatccactgttcagtttcatatattaggcatgaaatgtaagatttgtgaatcctataatactgctcaagctggaggacgtagaatttcactggatcagcaatgacgagcctacacagtactggagaacttggcattttctgatatagaaaaaggctttccttggtatcgtgttatcatgtgtcgtcatctatgcattagagttgatgtgttttgtactagtgtcacagcataaaatcatattacaagtacgtaaggattcagggtctcttgatagacttatcatagctctatattgaatgaaagccactgtgcttgtgttttgattggaaattcctttagtgtcagtttttggaagccaatgatgtttgccactgatacattcatagaagtgtattatattttcatgaagctttgctttaagtgacactacgcgtgcagtcatttctagttcttgataaaatg

SEQ ID NO: 47676 - DNA, 372 bp, Homo Sapiens
gtcgacctcctcaccagcaacagaacaaagctggacggagaatggccttgatgagttgagagaagaaggcttcagaagatcaaactattccgagctaaaggaggaggtttgaaccgatggcaaagaagttaaaaaccttgaaaaaaaattagacaaatggctaactagaataaccaatgcagagaagtccttaaaagagctgatggagctgaaaaccacggcacgagaactatgtgacgaatgcacaagcctcagtagccaatgcgatcaactggaagaaagagtatcagcgatggaagccaaagtgaatgaaatgaagcgagaagagaagtttagagaaaaaaaaaaaaaaagtcgacgcggccgcgaatt

SEQ ID NO: 47677 - DNA, 735 bp, Homo Sapiens
  misc_feature (697)..(697): n is a, c, g, or t
caacctcatttgcctttttcaagaaaatagtgagataatgaattcactgattgaaagttggtgccgtaacagtgaagttaaaagatatctagaaggtgaaagagatgctataagatatccaagagaatctaacaaattaataaaccttccagaggattacagcagcctcattaatcaagcatccaatttctcgtgcccgaaatcaggtggtgataagagcagagccccaactctgtgccttgtgtgcggatctctgctgtgctcccagagttactgctgccagactgaactggaaggggaggatgtaggagcctgcacagctcacacctactcctgtggctctggagtgggcatcttcctgagagtacgggaatgtcaggtgctatttttagctggcaaaaccaaaggctgtttttattctcctccttaccttgatgactatggggagaccgaccagggactcagacggggaaatcctttacatttatgcaaagagcgattcaagaagattcagaagctctggcaccaacacagtgtcacagaggaaattggacatgcacaggaagccaatcagacactggttggcattgactggcaacatttataattattgcaccaccaaaaaacacaaacttggatttttttaacccagttggcttttttagaaagaaagaagttctgctgaatttggaaatanattcttttatttttaaactttcaaaaaaaaaaaaaaaa

SEQ ID NO: 47678 - DNA, 708 bp, Homo Sapiens
cctgtgaatgggcgaccaagaacaggactcaagacatctcagtgttcttcaccgtctctttcagacatcaccaggcagtcccacacgaccacagatacggcaaaagatagagaataaaccccttcaagaacaactttctgttaaccaaattaaaactgaacctgtggattatgaattcaaacccatagtggttgcttcaggaatcaactgttcaacccctttacaaaatggggttttcactggtggtggcccattacaggcaaccagttctcctcagggcatggtgcaagctgttgttctgccaacagttggtttggtgtctcccataagtatcaatttaagtgatattcagaatgtacttaaagtggcggtagatggtaatgtaataaggcaagtgttggagaataatcaagccaatcttgcatccaaagaacaagaaacaatcaatgcttcacccatacaacaaggtggccattctgttatttcagccatcagtcttcctttggttgatcaagatggaacaaccaaaattatcatcaactacagtcttgagcagcctagccaacttcaagttgttcctcaaaatttcacaacaaagaaaatccagtcgctacaaacagttgtaaaagtgaaaagttaccagaagatcttactgttaagtctgagaaggacaaaagctttgacgggggggtgaatgatacccttgct

SEQ ID NO: 47679 - DNA, 875 bp, Homo Sapiens
  misc_feature (797)..(797): n is a, c, g, or t
  misc_feature (866)..(866): n is a, c, g, or t
ccgaacctatctccagatgaaatggccactgcttgatgtccaggcagggagcctccagagtagacaagccctcaaggatgcccggtccccatcaccggcacacattgtctctaacaaagtgccagtggtgcagcaccctcaccatgtccaccccctcacgcctcttatcacgtacagcaatgaacacttcacgccgggaaacccacctccacacttaccagccgacgtagaccccaaaacaggaatcccacggcctccgcaccctccagatatatccccgtattacccactatcgcctggcaccgtaggacaaatcccccatccgctaggatggttagtaccacagcaaggtcaaccagtgtacccaatcacgacaggaggattcagacacccctaccccacagctctgaccgtcaatgcttccatgtccaggttccctccccatatggtcccaccacatcatacgctacacacgacgggcattccgcatccggccatagtcacaccaacagtcaaacaggaatcgtcccagagtgatgtcggctcactccatagttcaaagcatcaggactccaaaaaggaagaagaaaagaagaagccccacataaagaaacctcttaatgcattcatgttgtatatgaaggaaatgagagcaaaggtcgtagctgagtgcacgttgaaagaaagcgcgggcatcaaccagatccttgggcggaggtggcatgcactgtccagagaagagcaagcgaaatactacgagctggcccggaaggagcgacagctttatatgcaactgnaccccggcttggtccgcgcgggatactattggaaagaagaagaagaggaaaagggacagcagccggganagaccatgg

SEQ ID NO: 47680 - DNA, 788 bp, Homo Sapiens
gaaccgccccctcttgacaggaggatgaccgtcgccattcttgcgtgggactgactcacccagctgagaggaggaccaatagaaagaaaattcacatttgagtccacctctctccccctttttctggccttcattcataagatctggttgtttgggctgtaggtggcataattcatgtttatttggcctctgtcacatccagtttctttagcttttaaggtaagcttctttggctttttttcatatgttcaccaagctaaaatttaaaataataagaccaggtttctctctgtacaagtggattataaacattttcaccaaatcataacaatactccagctttccggtccgacttcctaggagcctggagttagcaaaggttgtctctggatttcattctctgagaatatcacagagcctgggagaagatgaatttacatgaaatgcaacatacacacctttttattttctggtgttaagctagttgtctttcctaccttacaaatcatgttagttttatgattgttccgcatgttttatgtttatgttagaactgttatattacatacgctttccatatcaggcaaaatcatatctgttaataaatgggtataactttagcaaaaaaacaaaaaaaaaaaaaattggtgggggcgggccgcgaaatttaaaccctcctgtggggggcgcccaagttgacaggccaggcccagaacccgggcggcatgcgtggttccccaaaaagccggggcgggttgaaacccggggcggggcggttaaaggccgga

SEQ ID NO: 47681 - DNA, 574 bp, Homo Sapiens
tccatgatgcctccgccacccgcccttctgttcgctgaggccacccacaaggcctccgccctctgtcccaacggggccctggacctgcccccagccgctttgcagcctgccgccccctcctcatcaattgcacagccgtcgacttcttccttacattcccacagctccctggccgggacccagccccagccgctgtcgctcgtcaccaagtctttagaatagctttagcgtcgtgaaccccgctgctttgtttatggttttgtttcacttttcttaatttgccccccacccccaccttgaaaggttttgttttgtactctcttaattttgtgccatgtggctacattagttgatgtttatcgagttcattggtcaatatttgacccattcttatttcaatttctccttttaaatatgtagatgagagaagaacctcatgattctaccaaaatttttatcaacagctgtttaaagtctttgtagcgtttaaaaaatatatatatatacataactggtatgtagttcggatagcttagttttaaaagactgattaaaaaacatacagaaaaaaaag

SEQ ID NO: 47682 - DNA, 690 bp, Homo Sapiens
taaaactaaacaggaccaccctttattcttaaattgtgtgtgtccaacagttgaattgaatgtctataaggtctaaaggtagaatgtgaatattgccacagagttcattgctctcagtataagattttactttattaatgcagaaggaatatggatatatttctttaagtctgcagatttttttattatggtgcagcttttttttaattatgtttttaaaattatacagttgaaaaatatgccatttcataaagtctgaggattttcgtcaaccttactgaaacacactggtgctttcatcatcagaggtcaaattattatgataactattccattaagtttgccaaacatttgtcgtggttaccagtgcagcctgtcaaattctgctatttgacacagctttggaaagatttagttcttggtttttccgtttgtattagaatgactgttacagttttatttggctgtttaaagccaaattcagctatttaattatggtttcatggacactgttgagcaatgtacagtgtatggtgtgcttacctgtccactctagagcattgcttacaggttttgttttttaagatgctgtgctgtaaaatactgtcatacttgctatttcctggtacagtgtagtttttcccctttcattttgaataaaagcatggcaccaaaaaaaaaaaaaaaaaa

SEQ ID NO: 47683 - DNA, 682 bp, Homo Sapiens
  misc_feature (671)..(671): n is a, c, g, or t
ggcgtggtggctcacgcctgtaatcccagcactttgggaggccgaggcgggcagatcacgaggtcaggagatcgagaccatcctggctaacacggtgaaaccccgtctctactaaaaatacggaaagttggccgggcgtggtggcgggcacctgtagttccagctacttgggaggctgaggcaggagaatggcgtgaacccgggaggcggagcttgcagtgggccgaggttgtgccactgcactccagcctgggccacggccacagagcgagactctgtctcaaaaaaaaaaaaaaaattaaaattgtgtggtccctttccatgtcacagagtctgcttttggctcagagtctgtatctagcctgtgtcaggatattgcctgttcttcccaccttgacttccagagcagccatcgctggtgagctttagttctccttagggttccaaggcattagaagtaagagtgtagcttggaaaccaacttctgtgatttaggaaagctgtctctttcctaaggtaatagggggtttatttcatttaggccccagttggtaggttttaaaataatttataaagtgttttaataatttggttgtcttttttaccttgctaaaccaagcctctaaaaactcaaattattcccttgataaatttttataatggaaaagcanttatgtacagg

SEQ ID NO: 47684 - DNA, 680 bp, Homo Sapiens
  misc_feature (608)..(608): n is a, c, g, or t
gtggagacaggcctgaagctggccctgtgtggaacggtgctggaccacctggtcggggaggagaccatggctgactacctgctgtacaccctcaacaaacaccagcgctttgggtacgtgcagcactacggcctgggcagtgcctgtgacaacgtagagcgcgtgctgaagagtgtggctgtgaagctggggaagacgcagaaggtgaaggtgctcacgggcacgggtaacgtgaacgttattcagcctaactatcctgcggcagcccgtgacttcctgcagactttccgccgtgggctgctgggttccgtgatgctggacctcgacgtcctgcggggccaccccccggctgagactttgccctgaacttgtccgggtagggaggtccggaggcatgtggcctcccagacctcctgacctgggtggttgaggctcaagacagctcacccggtccagaagctccatgctggtcactagggtgctgtgctctctggcgccccacagcctggccagctccagggaccccagttgcagggcccaagcaggtgggagtggacaccaggcttcccagtggacgtccctgagcagctccgcatgcttggttctcncggagcttcctgctcaggcctcttgagaaatggatgctgtctcagaaggagttaaagctataacctgtaacc

SEQ ID NO: 47685 - DNA, 863 bp, Homo Sapiens
  misc_feature (63)..(63): n is a, c, g, or t
  misc_feature (841)..(841): n is a, c, g, or t
ttgcagattgcagtctcttgtggcccaaacaggttaggtagactatcgcctctggcaggtgcncaccttttggtaccaacatgttctgaggtgttaggatttgggttgggttttttttgtttgttttttttttccttttggtctttttttttttctccttttaaagaaaagctaaaggccgctgtgagtcctggtggcaggctctccatggatgtagcatatcgaagataatttttatactgcatttttatggattattttgtaatgtgtgattccgtctgctgaggaggtgggaggggctccagggaaagccacccaccttcagtgaggttgctccccagctgagcgcaccgggcatgggatgtggaggctggcgacacaccctgtgcctctccaaggctgggcgcgtggggcgtccagagtctctctgggtctcagatgtccatctgccacctcttgttaaggctctagccagaagggagggtgagggtagaagaaagttattcccgaagaaaaaaagaatgaaaagtcattgtactgaactgtttttatatttttaaaagttactatttaaaggttggtttgattgttgcgtcttaattgcctctcctcccagtttgccagtcccgccccccgccccccggggaaaacagccaggccactgttgctgtcacattctggagcctgggccagggccatttcccatcgatgtgagctcttctcatctcacagcatttccctgcgctgcttccaccccctttctcccctttccagaatacccaccatccgcagcaagggaatttcacaattcccatactggtgtcgccctcccatccaagcncccaggaaagggtgggggggtt

SEQ ID NO: 47686 - DNA, 766 bp, Homo Sapiens
  misc_feature (1)..(1): n is a, c, g, or t
  misc_feature (4)..(4): n is a, c, g, or t
  misc_feature (24)..(24): n is a, c, g, or t
  misc_feature (637)..(637): n is a, c, g, or t
  misc_feature (733)..(733): n is a, c, g, or t
ngancccagttttcggcacgaggnagcgcctcaaggtatgcgttctctcaaggaaagctatgcatcgctgcttcgttgtctgattttgcttagattttgctttggttaggttgcgttttggggtttgcctttttttgttgtcgcttaaatgcaatttggttgtaaagatttgattcctttgtgttcatctgttccgcttctcagcggtccatctcagcgtctcccttcaggaaccgctgagtgtcctctcttaacatccaagccttttaatgaaatcgtactgaaatctgtatcagctaagagtcctccaatcctggtcccattaactccaagtgcctttttgacagtgacaacagacagtccctcgctttttgttgttgttggttttcttaacccctttaatggaactgcctggattttatacagttattaaaggatgtctcttttgctttaaactgcatgctgccaagtgccatttggggtcagcatcctcgtttcaacacagtgtgctctctagttatcatgtgtaacgtgggttctgtttagcgaagatagactagaggacacgttagagatgcccttccctgctccatccctgtggcaccattatggttttttggctgtttgtatatacggntacgtattaactctggaatcctatgggctcatcttgctcacccaatgtgggagtctggtttgagcaagcgagctgaatgtgactattaaaaaaaanttaaaaaaaaaaaagaaaatcttatgtactatc

SEQ ID NO: 47687 - DNA, 1002 bp, Homo Sapiens
gaaacagcagaaagacccaagtgaggaggctgctgttctgcgagtacgccagcctggtggggcagaagtgctccgagcggatgctgctgttcagaaactgacctgttcacctctgccgggaagttcctgtgttgtgctgatgatttgtgccaggatacatattcagtacctgtggggaaataactgtcaccacccacaaattagacattttttattttgactatctatggcttttaaaaaatattttgtggcaatgtatctgtgagaatctcatagttaatataaagattttaaaactgcattatgacctagcccccataattgggatttatcattttggaggattctttctagagcaagatatgctcaaattctcctgtttgtattttgtaaaatgaagaagtgaatctaagtaacttaatcacagttgtgcatttttttgggttctgttagagaaattaaaacagactgtttcctcaggcccattttaaactgaacttatgctagggaaaccttaagtatggggaaggtcgaaagttcatttccatcactttagacaatatgtcttctcaaagaacaaaactgtgctgttacaacttcaggggttccactgttgacaattggctggacacatgttcctgctagttctcataggagaactctcgaacacattcaaacatttaccattggaacgcttgtgtcagccatcacggtatccccatctggtccacgggacagacccggtccagggtcatggacggcaactgggggcaatacatttttttaccccctttagacaaacttatgtgacgtccccgcttcttcgctctctatagaaatatttctcccgcttggtggcacaatacaagagagctagtatacgctagcgacaaccacatatgcacgcggcaagccgcacacaaagtatagcacaagcagactctctgcagcacacagtgtagtcacgcacagagattaatcagtagtaccagagagcaacac

SEQ ID NO: 47688 - DNA, 725 bp, Homo Sapiens
gtagactatgtggattgcggcagcagaggctgcagcctaacgtgtggttttaatgaccagcacgcaaggcaaaagcattttgcacagtgtttgttttcctgtcttgcacttacaaataaggtctatgggagtagcatggaaaacgtttgctgtttttcccttttttttttaattgcttttgtttaaaatttgatcgccttaactactgtaaacatagcctatttttgtgcttaagatactgaatggaaaactccattgtgtgttgctggactgttttggaaatatttggttaaatgtgtgttaatttggctgtaatggcatttaaagcaaacaaacaaacaaaaaaagctgtgaaaatggccttggagcattatctttagttacttgaagagtttctagtttttttaaaatacagtttatgttaaaataatttttattaatttagagaagacaatcaatgtctgtgagaaaacggactttctttgtggattttctttttgtggtcattgtgagtgattgctttttccttttcttagtttcacattcttcctttgttctaaaacttagactgacatctagcttttgacaatcatagtatgttttattttccctgagggggaataacttataatgctgttagtttgtactatcggtgtgttggtgaaattttaaacccgggtgctaacttgcataaattttttgagctgggaaaaaaaaaaaaaaag

SEQ ID NO: 47689 - DNA, 886 bp, Homo Sapiens
gcgagtttgagtgcaggacagaaggggtctcggccttcttcggcgtcactgtccaagatcctcccgtgcacatcgtggacccccgagaacatgtgttcgtgcatgccataacttccgagtgtgtcatgctggcctgtgaggtggaccgagaggacgcccctgtgcgttggtacaaggacgggcaggaggtggaggagagtgacttcgtggtgctggagaatgaggggccccatcgccgcctggtgctgcccgccacccagccctcagacgggggcgagtttcagtgcgtcgctggagatgagtgtgcctacttcactgtcaccatcacagacgtctcctcgtggatcgtgtatcccagcggcaaggtgtatgtggcagccgtgcgcctggagcgtgtggtgctgacctgtgagctatgccggccctgggcagaggtgcgctggaccaaggatggagaggaggtggtggagagccccgcgctgctcctgcagaaggaagacactgtccgccgcctggtgctgcccgctgtccagctcgaggactccggcgagtacttgtgtgaaattgacgatgagtcggcctccttcactgtcaccgtcacagagtcttaccaaagtcaggacagttcaaataacaatccggagttatgcgtcctcttgaaaaagccgaagacccggcggctctggtcccgcttccccccatggcgacgaacagctggcactgagtagcagctgcccccatagtttggggcccacattcctctgtcccacctccctgccattgctttttgcctctccccagactgcttcagccgctaacctaacctggcccctgtgggcatttgagtttgcgacccctgtgttaaamcaataaacatgcaaataaa

SEQ ID NO: 47690 - DNA, 948 bp, Homo Sapiens
  misc_feature (751)..(751): n is a, c, g, or t
  misc_feature (948)..(948): n is a, c, g, or t
caccaccattgacacaagaagtggaccttcattccattgctgggccgcctgttcctccacgacaaagcacttctcaacatatccctaaactccctccaaaaacttacaaaagggagcacacacacccatccatgcacagagatggaccaccactgttggagaatgcccattcttcctgagttcctctgtactgggatgtatattttcctagccccaaatccattgctggcaatggatgcactgaatgtgccagcactgaggagttaaaatgagaactccaaacactaacgactcttcttcaagatgcagtataagacaatgaattttaacctagatgtaattatacaatggaaatggtattccagtttagaatatggaaagaccgacctagaggaattggacaactgattgcacctgaaaatcataaagggactttttctggccaataggcaggagtcctctttttgtgaagtgatcttttgtgaagtgatcattaaagggatggaaaacacagtctagtgtccagcaggcccacatgacagtttttgtaattcaaattatgcacttttaaaaaaaaacaaacttaaacagggatcttaatatcttcctttgttttcctttgctttactcttctactttagaatattttcttaaaatcactcaaaggactgtgaggaacagctgtggtactgaccttgttgaaatcaaggcccggcactggtactacaggcctgtttacagattattacgngtgaaactgaatggtgtaccggagggttcaaccaaagagagtactttttcggatcgcagatggatgttcacgaataattgtaccaatttaagaagcattccccctcaaacctaaaaaaaatcaggtacattacaccacaaccaacatcacaacacacacctccacaaacaaaggcgcgcggcgttaaattcacccan

SEQ ID NO: 47691 - DNA, 498 bp, Homo Sapiens
cccagctgcatttctgttaacatttcagtttactacagagacagacgcttaaaacacaaagagaaacagtcttaagtatgaatgtgctcacaacgtggaaactaacgggggagctcctgccaggagccgaataactgctctgcttattaacccgaacgttcggcccggggctgggaagccagaaggacgatgctgagccatggatcgcggaaggcgtcctctggcctcaggagccacccagagcctcacaggctgagttcttgcctctgtgtcctgtccttcctggaagtcaggactctgcttcctcagggagcccggggaaggcggagctcagtggccacaggccgagggccatggggccgctcagtcccgttggggttgtcctgagttgagcctgggggggccgtcctgcccgcctaagagatgcccccagcaccgcacactcgtggttcccaataaactcctgcctgcggcggaggttttatagcaaaaaaaaaa

SEQ ID NO: 47692 - DNA, 614 bp, Homo Sapiens
cacgagggttgaaatcaaggcccggcactgtactacaggcctgtttacagatgattacggtgaactgaatgggtaccgaggcttcaccaaagaggtacttttttgttgttgttgttgttttaggaataattgtaccaattttaagagcattccccccacctgtccccacacacccaaacaaaatgtggtggagttgccttcaaaaaagagaagttttgtgtcattaacatgacagaagaactttttaaaaaaaaaataactgtcaactattctatttgcatttaggagactgttaatctatgctagattgtcattttccctccttctcccacagaagtttactggtagtccatgtcatggctcgtagctatccctctaaccataccatggaaatgcaggcacccaatgtgaaaaggagcacttgctgggcatcactgacaccgctcatgttttacacatagttgagtaatcagcatatctagaagtatcttgcattgcctaaatcatatgtatatagtgaatgttatataatatacctggcaggtctgttttaatttacttgaataaagatacaaatactttgtttggctggcatatattaaattattatatga

SEQ ID NO: 47693 - DNA, 633 bp, Homo Sapiens
cgcgtccggtctggacgcaacggcggcgggagcatgaacgcccctccagccttcgagtcgttcttgctcttcgagggcgagaagaagatcaccattaacaaggacaccaaggtacccaatgcctgtttattcaccatcaacaaagaagaccacacactgggaaacatcattaaatcacaactcctaaaagacccgcaagtgctatttgctggctacaaagtcccccaccccttggagcacaagatcatcatccgagtgcagaccacgccggactacagcccccaggaagcctttaccaacgccatcaccgacctcatcagtgagctgtccctgctggaggagcgctttcgggtggccataaaagacaagcaggaaggaattgagtaggggccagagggggctctgctcggcctgtgagccccgttcctacctgtgcctgaccctccgctccaggtaccacaccgaggagagcggccggtcccagccatggcccgccttgtggccacccctcaccctgacaccgacgtgttggccacccctcaccctgacaccgacgtgtcctgtacatagattaggttttatattcctaataaagtatagcgggagagacctggaaaaacgtaaaaaaaaaaa

SEQ ID NO: 47694 - DNA, 742 bp, Homo Sapiens
cgggatctggcacggcccaggctgccccgccactgcctccacccccagagtcggggcctggacagcctggctgggagggggctccccagccctcccccccacccccaggtccctccacagctgccacaggcaggtgagggacccctgagaagatgccaggacttatagtaccccctcaggacatggacagtatgtgggggcaggaaggttatctcctcccgggtaaagccatttcgtcctctccagtttggggcggaatgaggcctgctcctcttgtaaatacccccttccctcgaagctccctcccggtgctggggggcagctgaggggctgcaggggcagtctccctcctccaagcccctgtacataacctggagcgtgtgaccttcagagcttttcactttatgcaaaatggctcctgtgagggctgcaagctggagggtggtgcaggccttgggccacagggaggcgcctgtggaatagggggagttcatgcaccccttttttccccagaggggctggactcaggttagtttgggggtgggggctcctgcactttgccacaggcacggggagggttttctcctcaccccctctgccctcccaacttgggttgtactttctaagaaggtgattccccctgcccttgcccccttccccagaacaaaacatgttgatcatgtgcaatatttcttactgtgccgagaagccgcaatgagcgagattaaagctgtttaacaca

SEQ ID NO: 47695 - DNA, 731 bp, Homo Sapiens
ggtaagagagacataaaatgggagaagaagttataccattaagagtgctatcaaagagcgaatggatggatttgaaaaaagagtatttagcgctacaaaaagctagcatggcttctttaaaaaaaacaatatcccaaataaaatcagagtcagaaatggaaacagacagtggagtacctcaaaacactggaatgaaaaatgaaaaaacagccaacagggaagagtgtcgcacccaggagaaagttaatgcaacaggaccacagttcgtgagtggagtgattgtgaagatcattagcacagagcctctacctggcaggaaacaagtccgggatactttggcagcaatctcagaagttctttatgttgatttgctagaaggggatacagaatgccatgctagatttaaaactcctgaggatgctcaagcagtaataaatgcctatacagaaattaacaagaaacactgctggaaactcgagatcctttctggtgatcacgaacaaaggtattggcagaagattttggttgatagacaggcaaaacttaatcagcctcgggaaaagaaaagaggcactgaaaagttaatcaccaaagctgaaaagattagactggcaaagactcaacaagcgagtaaacatataagattttctgaatatgattgaaaaaaaaaacagttcacctcttaatacttcacaagatactttgagctgttcttgggagattcactttta

SEQ ID NO: 47696 - DNA, 570 bp, Homo Sapiens
ccataggttttgtggtcggacagactgattgggagaagatcacagatgaaagtggtcacctggctgaaaaagccctcaatcgaaccaaatatatatgagacttagtttttgaacggagtcattattcctctaaggtggttcgctttgaggtggtctgaagccaaggcctcgcggagcttctttgtgtgtcaccttgcttccacgtttcagttcttgttttgtttctactgctttagttttttttaaagttctccagtgtccccaagaggtattagaatcttgctgtacccaagcaagacgttaatttttcttttaactgttttggggagggagggagtgatagcttaactgctgaagccaggcgggggtctgctggaggattccaacagagagtatttcctccactgtacaatgtcacagactatctctatcatcattgctttgtggctgtttctgttttttactgtatgtaactggtagctgattgtactaggattaaaaacaataaactttcatgataaagccgatgagattcatgggctatacagcaaaaaaaaaaaaaaaagggcg

SEQ ID NO: 47697 - DNA, 596 bp, Homo Sapiens
gcggtctcccgccaggaataaagacactccagcctgcagcaggaggtccctccgaaagacccctctgaaaacagccaactaaacagcgcctcccaccagtgtccaggcaggcaggagcccttgaggaagcagtctcgtgtcctccgtgtgaaggcagctggatcacttcccgcagtccttgggcagcgctttgctgtggaacacgagagctcctcctcaggggcctggcactcaccttctattctgtatgatgtatttggttaaacactgtcaaataatagagatgtgccagatttagattttcttaccctaatctgtttaatattgtaactttattccatttgaaagtgtcaagcccattcagataagctataatctggtctttaaggaacacaactttaaaactgcagctttcttttatataaatcaagcctctgttaacttgaattccttatagtacatattttcccatctgtaatgacgaaattttgattctaatattttttctattatttataagtgcaaattttttaaaaaagtgtacagctttctaaaagtaataaaggtttagcataaatacaaaaaaaaaaaaaaag

SEQ ID NO: 47698 - DNA, 621 bp, Homo Sapiens
gccgatgaggaaaatatcgcttccctgtctctgcctctaccttgctgtgcctctctggctttagcagcattggatgttgaattggtttggttcatttctctgaagtcggactgtcaggaggagccagaggttggctttctgggatgtgaaggggacagtgtcagcctaagcctctggagatgcttaggatgctgaattttaaccccttctttcactgcatggcccttcaaacagggattggcaggctccgcgagttacagagtgggtgagtcttggagagaaccaacgactaaggtagcttagctctctgctttgttcttgggagccaagagaatgcaagatcctggtgggtgagcagtggtatgaagaggggacactggtgggtgaacagtggcatggaagtcactgatgcagcctctggccctcagtctccctatcggcaaagtggggggctcttcctatctctaaagagtttcatccctgacaggtggatgggtgaaagatccagagagtgggggtgaggggtgggccctgaagactttttgtctgtagctcttgcatattgagtgtataaacccggcttctggaccaacccaagatgaataaactggggcagaaaat

SEQ ID NO: 47699 - DNA, 670 bp, Homo Sapiens
ttttttttttttttttctcacccccagtaatttccttccaaagaagttcacatgtaataagtagaaattctgtataggaaaaaagcattaaaaatactattataactgcttcatttgctgggaaccattaaaagtaatataaattagctttttccagaaggatccttttgtagcagtgtttatgaatgtaacccccagcaaaatatggctatatattaggggagccagtttggagcagaggcctgaaggtccctgctatgcagccgtggccacagctcgcagcccaagcactgtggagcatccacacctttgatggcaatgcagattggtagcaggttccataggcgtacaaaacagtattaaagctcagtgttttgcatattgttagcatttacaaatatttttgctttagtatgaggaaagtaaggatgggcaaagaagtgatcaaaatagctattgctacaacattttcgaaaacaaagttggggctgtatttctttaaaaagataagcctctaaaaatgcttggcaaaaaaaatatagtgttaaaataggccagtgatattaatgagaaaatgaaagtatgtatcaggaataaagtgatattgcataggagtattgtatttttatgaattttatgccagttgtttacatgtaccctcgttccgaat

SEQ ID NO: 47700 - DNA, 611 bp, Homo Sapiens
cacgcgtccgccccagtgagatgaacccggtacctcagtgggaaatgcagaaatcacccgtcttctgcgtcgctcacactggcagctgtagactggagctgttcgtattcggccatcttggctccaccccaaagcccatgcttttaaccaccatggtatttcacacactcctacctcatcgtagtacaggacttgtgacctcattattataacacaactagaacactgagctcttgtgctttcagatgtgccttgtgtgtaacaaaaaataacaatagaaaaggattatttgaattccaactcactaatgtttcttttgagtagattacaggcttttggatacctaaggtaagacactcaacctgtatttccatacaacctggctgtaattcaagcttctaaaggagtaaatcaggaaaagtactctgttaggtatggaatcatttttcgaattatgtgggttgcagcgtaaattcaccaacacactcctatttcagaagtttttcttcctgtttttcattaaataaagtaggtaaaaggcccctgccataaagcattaaccccacctctgtggacagagatagttaggatggggtttagaatgcatttac

SEQ ID NO: 47701 - DNA, 652 bp, Homo Sapiens
ttgttccagagctcagccttctcactctaaaagaaagatatttttctatttattttctacatctggccagtggctctggtgctagatgccactgtagccagatctccaacagtgccttggaccatggactcatactcaactgagtaagaaggggctggtgcccagtcggggtggctgagctggtccttaataggttgtttcttggtcttgctttcttcatgccctccccactgctcctgccacctttagataagtttctctagctaattttgtggccaatgtaaaattcgtcatcaacctaacaaacacaaccttctcagcagcatttctcccctgtgatggaaataaagtgtttagggcagtgggaggagaaaattctccaggtgaatggggaagggtctgttccagcctctccctactcccatcccatttccaccaactggggaactgtgactatctatctcccccgacttctaccagggatgccttcacgccaaggctgttctcaccagctgcctcagatgacaaatgaggctaatggacataatctacagtgtcctttttcacttgcaccttttttataagaatatattgtaatactaaaaaatattaaattcataccatccctaaaaaaaaaaaaaaaaaaaaatgg

SEQ ID NO: 47702 - DNA, 872 bp, Homo Sapiens
  misc_feature (745)..(747): n is a, c, g, or t
  misc_feature (775)..(775): n is a, c, g, or t
  misc_feature (800)..(804): n is a, c, g, or t
  misc_feature (806)..(807): n is a, c, g, or t
  misc_feature (809)..(811): n is a, c, g, or t
  misc_feature (813)..(838): n is a, c, g, or t
ttatgaacagtggatagattaaaggcatttaatatttgtaattcataataactgtagaaatggccctaaagcatgctgcataattaataatttatattttcattattataagtgtttatattaatgatcttgcatttgattatatcaaattcgtcatttcatagcaacagtattgttttctctgtttttcttctctaacttctctgaaatcatctcctattaagggatagaaattgttactagaagagaatcacatgttctgtgttcattatccctacacatgtaaattaattattttatcaatactagatagagttcacatgctgactccctggatacctacagttgagaagaaaatgacagacaattatttttcctttaggtcaaaataatgtcactgctatctggataaattataagttcatatatttgaaataagatcctggaaacgaatttaaatggtgtcaaactgcagagcaacagggcttcagtatattcacatctaataggttaatatgtacatttggatgatgatttttcttgataacattaacattaattttattttttcagacatactgtaatttaaaaattaatgtgagcgtttgttttaagttcacagaaaacttaataattcaaattctcaggaattaaggactcaccataacattgtcagttctaatgaaatttttgtaaagatggcaagtttgttacctcacttgagtggggttttccttttcccccnnnattctagagaatataatgtgtatactanaacattaataaacataatttttgannnnnannannnannnnnnnnnnnnnnnnnnnnnnnnnngggcggcccgctccaaaaagaattccctccgagg

SEQ ID NO: 47703 - DNA, 657 bp, Homo Sapiens
  misc_feature (604)..(604): n is a, c, g, or t
  misc_feature (644)..(644): n is a, c, g, or t
tctcactacagtttatatttttataggctattttctcaaggtgtttctagattccacatatctattttatataacaagttattatgttatgtgtgtgactcccttgtgtgtatctgtgccagcctcagcctccgagttgcttttccctctggccctgactctcactgactcaccgatgtgatgtgcaggcccacttcttaccccagatagcctcgggcgctgcctgtagtcatgctgacagctgtacagtagccgccaagactgctgacagctggagacggttctggtttcaactacggtatattgatatcggaagtattctagacagatcctcggttgggttttctagctacatgtttgtattgcacagatccccacctgccatcctatagtgttgtcttcctgtgtgttccggggcttctgggcagctgggcctgcccggggaagtccttgcaggtgggaggccatacagagacccactgtgtgccactgagcgtcccactgctgctgggcaactggaggactgcagggggcgccaggtgactctctccttttatatcacagcagctcctgtgctgaccttcaagttacgttttggaactgntatactaaaggaagaaataaactactaatttgtataatanaaaaaaaaaaaaa

SEQ ID NO: 47704 - DNA, 500 bp, Homo Sapiens
tgcaatgaaatgaagaaaggctttatgttcaaggacctttgccatagttcagctaattgtagttttatatagaaatgatcctgaacactctgaacttgacgtagtcctgcggtgatattctatctgcagtatttgtacctccagaatggcagatccctcagcaggaacaaaggcatattgacggttctctcagcgtatgcattaaaaaaggtacttcctgaaacttttgattcaataatgactaaacatactatgtacacaattactgtaaggctaattcacgtgccatacgccacctgaaagcctgagttatcttgctataagcttttcatggagcacttcctttccagaaactgatttgtaactcatttagagaatgtcctggcgtcggtttttagcatatgtggtatttaaacagagctagaatgtgatgtctgaagataatgctgcatttctgggtttcttgtgtggattttaaaataaattgtgcctacaaatat

SEQ ID NO: 47705 - DNA, 949 bp, Homo Sapiens
gggggcccttatggcgcggtgggcgtggacctggccttcgagcagctgctgtgccgcatcttcggcgaggacttcatcgccaccttcaaaaggcaacggccggcagcctgggtagatctgaccatcgccttcgaggctcgcaagcgcactgctggcccacaccgtgcaggggcgctcaacatctcgctgcccttctccttcattgacttctaccgcaagcagcggggccacaacgtggagaccgctctgcgcaggagcagcgtgaacttcgtgaagtggtcctcacaggggatgctccgaatgtcttgtgaagccatgaacgagctctttcagcccaccgtcagcgggatcatccagcacatagaggccctgctggcacggccggaggtgcagggtgtgaagctgctgttcctagtgggcggcttcgccgagtcagcggtgctgcagcacgcggtgcaggcggcgctgggcgcccgcggtctgcgtgtcgtggtcccgcacgacgtgggcctcaccatcctcaaaggcgcggtgctgttcggccaggcgccgggcgtggtgcgggtccgccgctcgccgctcacctatggcgtgggcgtgctcaaccgctttgtgcctgggcgccaccgcccgaaaagctgctggttcgcgacggccgccgctggtgcaccgacgtcttcgagcgcttcgtggcccgccgagcagtcggtggccctgggcgaggacggttgcggcgcagctactgcccggcgcgtcccggccagcggccgcgtactcatcaacctgttactgctgcgcggcaagggatgcgcgcttcatccaccggacgcccgggcttgcgcaactgcagcgcgcctcaaacttcgaacttgaacccgccgactgctgccaggacaccgccgacgacacctccgggcggcgcgaaatccgccccgcatcaccaggcaaa

SEQ ID NO: 47706 - DNA, 1076 bp, Homo Sapiens
  misc_feature (657)..(657): n is a, c, g, or t
cccacgcgtccgcccacgcgtccgggttagctctgggccagacttctcttactctgtgggtaatggcaaggatgtgtaggtaaacttggttcttttttttccctaagatgacagcttgattttatcatctgcagtcaaataactgagccaatccaaatttaaatgatagatgctttaattgagtttaagtagctgaaactgctgagacactaaactttaaccttctgatgactttttaaaatgcctcaaatgtgcacatgtatataggatatttttataacttccctgatgaataatctgatattaaagtagtatttggacccagagccagaactcggtggtggaggctgctggtctctcctcaccaccttcttttgcacttggaaagaacagcaacatctggatagagttctagctttgacttctcatttccttgtctttttgggtgcattcctcagcacactttttttttaaacctttttgttttgttttgtttgtatttcatgtggttttatttgggggttttggttttttcacccttttttgtgatttgcaatgatgtgcttgcccagctaacttttgaattgcactttttaataaatattcttaacaatttttgaagaaggatattttatctcatttgagatcatggtaggntaagaaatatgcctgttgatgaaagctaaaagcaaatttatgaaactaaaaggtgattgacatccatgtttacactccgctctaatgtttgatatataaataaggtattttcaaattaggaaaaaacagtgagtattacaaaggggcttcagatgtttagagtactaggttatttatggttttacaaagtttggaatccttctataaaactaaaaaaagggggatgatcccttagaatttggcattaaaaatataaaaagtcctttttaaaaggtaaattgtggaaaccgtggttttaaagtaactgttaaatccccccacccaaccacctttaataaagaaaagcaaaaaccccggccattctttgagggggagaatttattttagaattttaccccccttattttttaaaaaaggcc

SEQ ID NO: 47707 - DNA, 584 bp, Homo Sapiens
atttttagtagaaacggggtttcaccatgttggccaggatgatcctcaatctcctgacctcgtgatccacccgccttggcctcccaaagtgcgggattacaagcgtgaaccaccctgcccagccagaaactagattttctttatgcctccaccccttcttattcatttactttacaataccaaaataacaaattgcataggagtgtgggatgtggtttctgccttctagagagagatcagaattaaactagtactatgaaatgtccttttgaatgttaggtcaagaaatccatgtacagagtcgtgcacttcattggctgtaactgtcaaacttgccttgtattagaagttaaatcccatcgtaaatacatcacgaggccagctgtgtgatttctgagacctagatgagagtccatttacttcagcctttgattcagtaaatgttaagcagcagaagacttcgaatggttgaaattcattgttacaggatttaactcataaaccaatgagagattttttttttctctgcaatggttgctaagtctattccatgttaacactgtggaaataaatatgaagatgtg

SEQ ID NO: 47708 - DNA, 869 bp, Homo Sapiens
gaaatgtctagactccattctgagttgcatattctattttctgtccccaagtagagactagtactacaaaaagggaccacatttttcaagtatttctaagtataaaaacaaaacaaaaatctcttaggaaatgtctagacctccattcttggattccctttctttccttttattttaaaaaagaacagtacccctcttttaagatgctgtcttacattaatgagcatctaatggaaagaaggtatgagttgcactgaggattagaatagtggtgcgttagtggcattatctataaatacactcacctaaattgaaagctaagaaggaaatgtaaatataatatatatttatatttgatgtaatatggacatctgcagattctaataaacaaggactattgctgataaaaaaaaaaaaaaaaaaaaaaaaaaaaaaaaaaaaaaaaaaaaaaaaaaacaacaaaaaaaaaaaaaaaaaaaaaacaaagaaaacaaaaaaaagaacaaaagaaaaaaagaaagaacaaaaagaagagaaccaaagcaaaaaagagcggggggcgccgcgaagacccgccgagcagaaccccacacaagaatcaacaaacacacaccaacgtcaatacaaaagaaagacaccaaccccaaacgaagcgatggcagaaaacaaacacagcccatcgagcggcgcggcaaacaaaaacaaaacgcactgagcagaaggacaagaaccgagcagccgcccacgaagagaagacacacccatcgagggagcggacacaagcaaaggagaacacaacccgcagagaaggaaccacaaccagacgaggaagtaacaagagcgcaagaacacgactaacacacgaaata

SEQ ID NO: 47709 - DNA, 847 bp, Homo Sapiens
agcgggtcttaactctccccaggaaagtttcccctgtttgactccacctttaaaatcctaagcctgactaggacagccacaaaccacacaaggtgtaaaaccatcatcagctaagtgcccgtttgttcttgtttaccagaatctcctttaacttctcaaagggaagccgggctttctaatccacgtcaactttattttagttgtcaaattgggcattatattttatgtaaattggtcttttaacatcattttcctgatgaatgttggtgaccaccacattgtgaaatttaagaatccgtgttgcatgtttggtagctctctgagtttcaggccataaactcagctccagaggttaccttttaagtgccaagaactgaagtgcaaggtggcctactcaaaaatcatttggtagcattcagttattcatgaattcctctctcgcatgcattataaaaagtgatctgctttaaaacaccgtaatctgatcataggcttaaaattaaatatgagtattactttcatgtacaaaatatttcctttatagtcttcatatgccctttaaaatgccaacaagatttcaagtctgtaggcctctagtgaggtggggtggcaaaccacagctaagtctcgctcaccactgcaagctaagaatggttttacattttgggtttggaaaaattcttttttgaatatttcatgacccatgaaaattattcaaatgtttagtgcccgataataaagtggtactgaaaacaccagcacacaaacttgttttgtactgtcttacagctaactttcacactacaggccgcagagctgagccattccagcagaccgtatgtcccaa

SEQ ID NO: 47710 - DNA, 752 bp, Homo Sapiens
  misc_feature (720)..(720): n is a, c, g, or t
  misc_feature (733)..(735): n is a, c, g, or t
  misc_feature (738)..(740): n is a, c, g, or t
  misc_feature (749)..(749): n is a, c, g, or t
cagaccctgaagattatgaagatggctgcattttgggctacaaagaacagtttctgcggctacgcaagtcatccgtgtgtcagaatggtcgagactatgttgtgaccaagcagccctccatctgcctctgttccctggaggactttctctgtgattttggctactaccgtccagaaaatgactccaagtgtgtggaacagccagaactgaagggccacgacctggagttttgtctgtacggaagagaagaacacctaacaacaaatgggtaccggaaaattccaggggacaaatgccagggtggggtaaatccagttcgagaagtaaaagacttgaaaaagaaatgcacaagcaactttttgagtccggaaaaacagaattccaagtcaaattctgttccaattatcctggccatcgtgggattgatgctggtcacagtcgtagcaggagtgctcattgtgaagaaatatgtctgtgggggaaggttcctggtgcatcgatactctgtgctgcagcagcatgcagaggccaatggtgtggatggtgtggatgctttggacacagcctcccacactaataaaagtggttatcatgatgactcagatgaggacctcttggaatagctcttcagaggagctggacccagcatggatggtggaaccacagtacctcttacactccctgtggctccaacttcaggaaataaatttcccattgcgnagggaaaaaaaannnaannnaaaaaaaanaaa

SEQ ID NO: 47711 - DNA, 943 bp, Homo Sapiens
aggagcgaggcctgggtggcgattccgacgaggacacatttaaggcataacagcacattcatccctttggtttgggatctcaggaatacagtcccatgcaaagattctctggttttatggcttttttccctttctttacaccatcctctcccataagcacccatgtctttgaatatgaatgtatttgtaaaataccacgtttcatgtgtgaatatgtgcttttactgtacatagtgctattgtgcaataggtcttatgctgttttcactcaatgtgtgctaagatctagccccattgactcttctagaaatgcagtattgctttgacctgccatgtggcactccacaatgtcaattgcagtttacacacattgcctaaagtgggggacacctgggtgcccctgaccccttggcaccggatacaggccacgataaacatcctttcgtgtgttcccttctgtgcttgtgtggcatgtgtacccaggatgggcctataggtcacagaggtcagtttctctttggttttccagattttctttagaacggtgactgaccctcctacttgaggccgcccttttctccttatccttgccagcacttgtattgccagactacctaatttttgccagtctcatgggtagatagtggtgcagtgctttaacatacattcatctgatcagcattaatttggggaattttttcacttagcctttctggtttcccttcctgtgcattgcccattttctcatggagtttcttatcttttttggtttattctcaggagttgcttgtacattcttgggcaattgcagataattccaagaatgcatatttggggctgggtatggaggttcactgggaaatcccagcactttgggaaggcccagccagaagggatcgctgcaaccccagaagtccaagactagcctggggcaacataacga

SEQ ID NO: 47712 - DNA, 703 bp, Homo Sapiens
ggctccgtcccaagtcatgctgagttttgcagcctctgtgacttggagatgtcccttcacccctcccctttcaccaccatcctcttttcctcatggaaatgtctgctttatgaaactatgcacatattgaaagtgagttgaaacaaatgagggttgggtaggagcttccaggcctgggatttacaccacgcctagcccagcagaggccttagtcccatttggggcttgggagtgacatttgcttgaggcttatacactggtgtggttgcctggcttgcaggaaatgaccaagctcacacatgctggctgaagcgtaagcagacaactgaggtactcttttgaaggatgaaggtggtggattctcagccctgggggtcttcctcacctgaggacccttcagagccaccctttctagtttgcatttcctggtgcacacatttaaggcataacagcacattcatccctttggtttgggatctcaggaatacagtcccatgcaaagattctctggttttatggcttttttccctttctttacaccatcctctcccataagcacccatgtctttgaatatgaatgtatttgtaaaataccacgtttcatgtgtgaatatgtgcttttactggacatagtgctattgtgcaataggtcttatgctgttttcactcaatgtgtgctaagatctagccccattgactcttc

SEQ ID NO: 47713 - DNA, 581 bp, Homo Sapiens
acatccaagtttaaaattatcagcgaaatggtccatgtttttccaattacctgctgacacggttctaagctaagtgaaggggaagatctgagagcgtgctgtttgtggctgttgatgcatattcgtgatgtaacaggtcctggggcctcactttaccccatttgtaaaatggggctaatgtcacctgcctcttacctacctcagagggatttggtgaagcaaactgttaatcttcgaaaacgaccatttcacttcttggatatcaagtgctaacccagtatgttcttcttttttatgtaagggacagctttctccacagagtcctttctgctggtgaggacagcatttctgagcagggctttgttctctatgtgcattaggacttttatcatgcccttgttctgtgtgtagttacttgacagcatcaaatgccgcctcttcctaatgtccttcaagttttcatgaactagcaaccccaccttccaccatggttctgggcgcctgattttgctgtgactcccagacccagccactgtttctgccaccctgtaacaggccattaaagcttccccaagtgtgca

SEQ ID NO: 47714 - DNA, 793 bp, Homo Sapiens
  misc_feature (689)..(693): n is a, c, g, or t
  misc_feature (695)..(695): n is a, c, g, or t
  misc_feature (698)..(700): n is a, c, g, or t
ggctctttcacagaggcagtcattttgaaaggttgaaatatttggcctttaccaaagagcttttttttttccttaagcaaaatcctttcagaaagaaacaaatggggaagggcagattaagaatgcatatgtcccaatccacttctataggagtttaatcatattcacatgagtaaaatgatggaagaactctttaaggtaatcctttgggataaaggatcctgggaagttctctcaggtaaagaaagcttacagcagatttgtaatatatgtctggagagctatttataagaaatttaagaggattgttttgttttcctttattaaagatttatgcctttttactttgcaaaaagaaaactacaaaagttttatagatataactttgctaattttttaaacttttctgaaacgattagctgtagccaaattatgtggttacgttttgctacattagaatttgaaaatgcaatatggtgtggtaaatctactgtttgaaatttataatggtctctgatatgattcgaattttggtaacttttgaaagtattttcccccctttagtcatggatttctatttgttttttaatgttaatttttctagaaagcatctgaattgactaggctttttcctatataaaaaactcaaaacttgttaactctgtaactttaataaaatttaaaagttnnnnnanaannnaaaaaaaaaaaaaaaaaaacttggtcggccgccctcgggccctcgaaaaacctttccaagaaccattccttttgggcgccgcgggacccaaaa

SEQ ID NO: 47715 - DNA, 679 bp, Homo Sapiens
ctaagaattctctctgttcagtcatctagacaaatcgaattacttgatgtttgccttgaaagaatcaacttctaacctcaaccatccaggaaattgacagtggctgcagtattgactccagtgacataaagttaaccacagtggccttttaacaaatgttgccttttataatgttatctttatgagtttcttgatatgtaagatgaaaaagcatttagaataatcttttaatttgtgtatatttgggatgatatttaggagctatcaatcaaattttacatctcacaatgtactgtttacatggatattggctgctttttttaaggaaaaccacattgagatgtgacaagtgttaggacttgtcacagatttctaactctgccgcataaactataaatctgtaaggtggtacacagcgtgtcttgttagcaaaatttatactttgatatgatcacatgtagaagtagcttcaagaatttcttgtagtcataaatgtttaataatatatgatgtaaaattatattatggagcctaatgatgataacaaagaaaacaatatactgatcttagaaaatgtagacatggttaactgggaaataaaatatagagtggcacttcaagacaagctgactcaatggtttcttctgcttcctttaaataatatccccttactcatctg

SEQ ID NO: 47716 - DNA, 759 bp, Homo Sapiens
tggtgttcggggtggtcaccgccattgacttgctgaacttcgtggccgcccaggagcgggaccagaagtgaagtccggagcgctgggcggtgcggacgggcccgccacccttgcccacttctccttcgctttcctgagccctaaacacacgcgtgattggtaactgcctggcctggcaccgttatccctgcacacggcacagagcatccgtctcccctcgttaacacatggcttcctaaatggccctgtttacggcctatgagatgaaatatgtgattttctctaatgtaacttcctcttaggatgtttcaccaaggaaatattgagagagaagtcggccaggtaggatgaacacaggcaatgactgcgcagagtggattaaaggcaaaagagagaagagtccaggaaggggcggggagaagcctgggtggctcagcatcctccacgggctgcgccgtctgctcggggctgagctggcgggagcagtttgcgtgtttgggttttttaattgagatgaaattcaaataacctaaaaatcaatcacttgaaagtgaacaatcagcggcatttagtacatccagaaagttgtgtaggcaccacctctgtcacgttccggaacattctgtcatcaccctgtgaagcaatcatttcccctcccgtcttcctcctcccctggcaactgctgatcgactttgtgtctctgttgtctaaaataggttttccctgttctggacatttcatataaatggaatcacacaa

SEQ ID NO: 47717 - DNA, 608 bp, Homo Sapiens
tgacagggctggatgaacgtgtgaccctgggagatccgggctggactgtggaccccgatgggccagagtccttgtggcccacagcatagcactggggacagagcgctctatgcaggtggaagtgttggtcgtgcgaaatcttggtattcgcatttcaagaagggagttcttttttctttcttctttctatggaacgtttcaagtgattggatagaaagaagggctctgaagcaggagttttcacctgctctgagggaacttggggctccagggacgtaccccaaatgttgcccaggttgaaactccctgacagcctgttctacgtagtggctcgtggtttccagtttgaagagagttgtgcccctaaaagtgtttgaaacctgtggctttcaagcaaggtaccgttgtccccacagtgttccgtggggtagggggtgatggagactgtgggcaagcctgttgtttttggccccctgttgttacatgggacctgttttgacggtgggagggtgagatgtgaagatgtgggatgaacctggaatgaacgaattaaataaagacatgcatccatctgtcagcgaaaaaaaaaaaaaaaaaaatggccttac

SEQ ID NO: 47718 - DNA, 643 bp, Homo Sapiens
accgtgactgtttctgcccttgtgcctagttaagagccttcaaaagcataatgaacacttttgatatgatattgtaactttagtaaatgctttacttccctctaattgcccccaaatgccttaattttgtggactgtttatttcaacaggtggaagtgttggtcgtgcgaaatcttggtattcgcatttcaagaagggagttcttttttctttcttctttctatggaacgtttcaagtgattggatagaaagaagggctctgaagcaggagttttcacctgctctgagggaacttggggctccagggacgtaccccaaatgttgcccaggttgaaactccctgacagcctgttctacgtagtggctcgtggtttccagtttgaagagagttgtgcccctaaaagtgtttgaaacctgtggctttcaagcaaggtaccgttgtccccacagtgttccgtggggtagggggtgatggagactgtgggcaagcctgtcgtttttggccccctgttgttacatgggacctgttttgacggtgggagggtgagatgtgaagatgtgggatgaacctggaatgaacgaattaaactacagacatgcatccatctgtcagccacaaaaacttcacccaatcataacaaac

SEQ ID NO: 47719 - DNA, 559 bp, Homo Sapiens
taaatgcaatgttttactcacaatttgcacattcacattttttggactgctagtttttctatttaaatatttgccttcatgttaggaatgtactatgtgaacatgacatatttgtagttaaccaaacacaccttcttagtccagtttagtactttttcttttcgtgtattcaaggttaaacacccaaacatttaaggatatgttgaaactacaccaatagagcatttcatatcataattaaaatgaatgttaggcttcttgtggccagttaatagttgatgagattggtgacattatttattgccacagcctattgtataaactatgcagagttaaatatttgcttgtaaaatattagccaatgttgtcattattttgatgtatttccttggttatgaccaaaaatatgttgagatactgaaactaatgtctgtgtgtttaaatgtttaccagcaaattgtcttatcatgttaatgagaatgttcaatgcctgtgtggtaaatagtaaatacaatggcataaaagtaactttctctgaagatgtgatgttcaggctgtg

SEQ ID NO: 47720 - DNA, 572 bp, Homo Sapiens
cccacagatgggggaaggtgagaggaaggggcaagtgatgtgtaactgctcaagagatgcttaaacctccatagagaggagccgggcgcaggggcatctgtgtgtcccgtcacacactgcagcagggaagggtggctggctggctccctggcatcagtggtttggtttaagctccagagggtcttattgccattgtcttttcctctgccccttgagccagcctaaggccctggagtctgtttctttaggcggatgaactgacatgctcctaccatgaccaggctctgggcaaggctcctcacagtatccttgagaggtgggcatggaagtgcccatttctcaggtacagaaaccttcagagaggataaatagcttgccctgtagaagcaggactgaaacccttgtccgcctgactcccccagctactctgcccactgtagccccctgccttactgtcctggcacacccctcaccatcctgtataccttaaatatcaaagagggcaagagagaaagggctttaaagataagttatttttttaaggaaccttaatattatttttaagaagtaac

SEQ ID NO: 47721 - DNA, 706 bp, Homo Sapiens
tgtatctaagacctccaagctgtttttaaaacaaaacaaaaaacctttctctattatctcagaaatataaatactgttatttttaatattaagaaattcaatataacttttaacacacactgtggaacattaaaccgtataaaaatgtagttataactatttttaattccaaggtgttgttgcttttttcttttaaatattttcttaatattttgtcagattaactagatgaataaataaatctagtattaaccgcattatgaattaaataattttgatttaatgaaagggataatatgatttccagtgtttactgtagtgtatcttgtacagataacatgtatttttaaaggaaaaaaaacggaattgaagctattttttcttgcatttctaattgacctgagggacattccgtttgaaatgtactgaagttacagtttctggttttttctccttatttttcttataatgcttgaaatgtctaactattaaaaaagacaattggaaaatgttatgcatggggtttttaagaaaacaaagtgttctttttattgtgactgacaattcattttacactctatataataaaatctccacaaggcatcttgtgggcaaagtcaaaaaaaaaaaaaaaaaacaaaaaaaacaaaagagaaaaaaaaacgcaaggagacaagtggggaccgagagaaacaaaaattaaaaa

SEQ ID NO: 47722 - DNA, 490 bp, Homo Sapiens
gaattgccttatttatttttaaaatcaatgcttactagttggtaggattcccaggtcagcagcagggttgattaaataatcttgacaatgagcagctgccatcttgggggatttcattctgtggttttttaaatgtttcgtctttgatgctaccatccagggcttcttattgtgaccttgtagcctattttgttcctgctgttctctaacatggtgcagttcacgcagactggtttaggtacttcacaactcaccattgtctctctgaccccaagcctagtcccttttacatcaccatcttctcagacttcttgcctattcttaaaatatgttttggttaatgattgaattaggacatcagcttaagcaattcctgtaacggtttaacgttgttgaagttcaaggcacataataaaattctccctgatgtgtgtgtaagtataaacaaagtaatgtatcaaagcgttcactttataatgaagtcatttca

SEQ ID NO: 47723 - DNA, 888 bp, Homo Sapiens
  misc_feature (765)..(765): n is a, c, g, or t
attagtcttgcttagagtaggttatccacttacatgctgcgctaaagccatgcctttgaaactccttgtttaaaacatgatatgatttttgtgggcagtttcagaaaagaaaacaaacaaacaaaaatcgaccctttaattaatacttgcaactcaacagatctccctgccgtactgccttttccaggaactttacttcagggctgtccagattgcagttgtgccccgtgtatgtggatctagttcacagagtctttggaagccagcagtcgtgccctccgtatactgtccactcattttatgtagatttggtatcctcagcagccagtgttaacaccactgtcacgtagtgtacagattcatcttttatgtatttaaagtaatccatactatgatttggtttttccctgcaccattaattctggcatcagatcagtttttgtgttgtgaagttctactgtggtttgacccaagaccacaaccatgagaccctgaagtaaagataaggtacacatacattatttgagtaactgtttccttgggggccaatctgtgtatgcttttagaagtttacagaatgcttttatttttgtctataacaaacagtctgtcatttatttctgttgataaaccatttggacagagtgaggacgtttgccctgttatctcctagtgctaacaatacactccagtcatgagccgggctttacaaataaagcacttttgatgactcacaagatgaatcctttttttcctctgtcccantgtgtgtctctggttccaacacattttaaatactcggtcctgacagtgtctttagctaatccttgaagaaataaaagtggaaattgaatctttttaggttctagaaaaaaaaaaaaaaagggc

SEQ ID NO: 47724 - DNA, 581 bp, Homo Sapiens
ttttagacaacatttgtagacacctcaaattatatcactgttctctagcgccaatattcccaggtaaattgaccattaaagcaatactcactgacctactagtttattttggtcagctgagtaccatcaggatatttaaccctttaagtgctgttttgggagtagaaaactaaagcaacaatacttcctcttgacagctttgattggaatggggttattagatcattcaccttggtcctacactttttaggatgcttggtgaacataacaccacttataatgaacatccctggttcctatattttgggctatgtgggtaggaattgttacttgttgctgcagcagcagccctagaaagtaagcccagggcttcagatctaagttagtccaaaagctaaatgatttaaagtcaagttgtaatgctaggcataagcactctataatacattaaattataggccgagcaattagggaatgtttctgaaacattaaacttgtatttatgtcactaaaattctaacacaaacttaaaaaatgtgtctcatacatatgctgtactaggcttcatcatgcatttctaa

SEQ ID NO: 47725 - DNA, 624 bp, Homo Sapiens
ccttaatacagtgtagtatattaatgatactataccaacatcgatgtaggaacctttaagcaaataaattatgtcattattgaaaaagacttaagggatgattagacttggcaatctgtaagcaggagtataaatgttttaaattgcattgtccctatgtaactatcttaatggctatatatatgtattttataaagccatttatgtatacacatgtaacttggaatttccttcatccctacacattttctacacttacatcaccttattgcataaaacaaagtcacgcgctttctgcttgaacatcaaaatatcaaaaaccaaggtacccaaaagatacaagtcagagacaacatccttgtccatatccaaacccagtgtttcagtgctagcaacttaatttctcatacatttatagagtttggtttgctttgctagttgtgtgaatcattgggctgtttttagagccactgttaagagagaatataaaataatcatgacaattactactgtttccacatttacaaattgtgtacttaaatgaacctcatttcccttttatttctgaatggcttgtctgagaggaaacaaaattaaaattcatctgggaatttgtgcctcttg

SEQ ID NO: 47726 - DNA, 653 bp, Homo Sapiens
cataccgcaacctcaatgacacctttctgatggtctttacacagtctgtgatgtctggtggcccccctgccctggactcaataattgatagattttcctagagtaacagtatgagagctccagccattccattaaaagtattagttctgctttgagctgaaaccagttgagcctaatggaagactggatgtctttcttcttcatccaagcaccctaatgactgtttagttacatccatagatgcagacaacataacacctgtgacttacttgaattgggataagccattccagaagtagcttatcctagacttggaaataagatttttttcaccactaacttccatgcttcagagatgacattcaaagccagattcccaagtgcctgatcatacctcccagtctcaggaagatatttgcttaccccttagaccaagaatcttaagatcttccccagctatgaagcctatcttggaatgggaaaccatgaaatttgtcttttaaaagaaagggaagaaatagccttacagcccctgttcctccaagtgcacatttagccttaaaatcctgggagtcgggagacaccgtggagtccttacatccacagtgtctgctggtcgtggtcagaaggcagtaatgcaagagtccttttgt

SEQ ID NO: 47727 - DNA, 1009 bp, Homo Sapiens
  misc_feature (25)..(25): n is a, c, g, or t
tctggcacgaggcggagctactagnttaattttcaggatgtctgggctttttctgccaacaaaacccaaaatcaaattagagttggtgaaagctttcttcagtgtttttagaagaggccatcttgaatctgtagaataccatttacacatcaacttcaccctatgctcatttcgtattttgagcttaaatggagtcctctgaagggggggtagtcgtgattctggtggcaaaactagaacttttaacttgtaaaatgaaaaatattaaatggacctttttgtcagttgaggatttagattgattcttttatctgaggagcgtatgttcctcagatgttgcgtagagacctttaggttttcatctactttaagattgctctcttggcaattaggggatttgggaaaagaagaaaaaaagatgccatgtgttgctagtacacagttataggatatggtttctaatggttgaatttgaggaactctccctaaagaatgagttttatatctcctcaaggaaatcatggaaaaatctgtttattcttcagtgagtccttttgaattaatgttcttaaatttttttctaagtctgtgtaagtgcttatgtataagtatataattgtataaatatttataaatatatttatataattacggtttcatttctaccttgagtcaaagttctgtctttagattggtgactgagtaatacttaaactttggtgttttttcttaggttctgagttactttatagcagttctgatttatgagtgaagatggtttccatgttaattctcaggtgctctcctgactggatacatactggcgttgaaataaagtggtactggcaagtgctgggttaacattgtggataacagccgaatcaaataggggcaggaaaaaggtggtctttgtgaggccattttcacagtatggcagcaggggaaatcgaaggggattatactgaaaggacagaaggggaggaattagaaggaaagattataagtgata

SEQ ID NO: 47728 - DNA, 759 bp, Homo Sapiens
ggatctaaatataaaagtggtgctttcagtgtttttggcagatagtgttccataacctttccatcagaagggattttagacaccttagaggtccgtgctacatcttcacagttcctccgaataaccttaggtggtagtgttacttgcctttgacacctgtgcatatgttttaatgactagatccaaactgtgttgttcttaaatcaaaaattggataatttttaatatttatgtattaatcacacagtgtgctctctgaagttctcttaagccttcagtttatactcttaattttctttctgagctggggaactgactttgcactttggttacacagaacattggtttccaatttagtttaactgaaatttgctgctgatatgttgagttgttctttaaaaaatatctcatatatctcgtctttcctccttagaagaacagacctaactagcgaatgtatgaatgaaaatgcatctatttcagagccgacatgaagagtttagtttttttactttataaactgtgaatatgagtatgccagctgcattagatgtaactaatcatatttacatatatttcactttgactttagaccttttgaagtctgtataaacttgtttttgaaatacagtctccacttacgaatgtcataacaaaatacttttttgcatgataaaaaaattactttgattaccaaaaaggcatattctttcatggtttctgccaatgagcaggcacgtgttaccgattatttaaata

SEQ ID NO: 47729 - DNA, 734 bp, Homo Sapiens
ggggaggaaaagcaggcctggcctcattggtcccctggagatgtctgtagcagtcagctccagcttgggcctggggaagcagcctgaccaaggcgctcaggtgtgcctgttacaagaagaacctgcagaaggataatttgcacatggagctgtgataacactaatgttgattttttttttttttacaagtcatcagagatgtttgcaaagtgagttttatttttttgtaattcctttatctttacttaaaggtgaatgtgtattcctctgggaggaataggaagaaaacaggaatgttaataatgtcgaacagaaaacttcctcccttattaatatataatcctcatgtatttatgcctaatgtaagctgacttttaaaaagctttcttttgttgcatgccctgtgcaggcatctgtattgtacatgcatgcctttcgtcctgttttcctgtataaagttagtgaacaaagaaatatttttgcctagttcatgttgccaagcaatgcatattttttaaatttgtcatatatggaaagagcatgtttgttacatgtaaaagctttactgatatacagatatactaatgtttgaagatgctgttctttgcaagtgtacagttttcaaatgttgttaccagtgaaacacccttgtgggttaaacttgctacaatggatttattattcatttcctcccatggaactaagaatcatggctatatttcatatcaacgtta

SEQ ID NO: 47730 - DNA, 1156 bp, Homo Sapiens
  misc_feature (604)..(652): n is a, c, g, or t
  misc_feature (654)..(655): n is a, c, g, or t
  misc_feature (657)..(659): n is a, c, g, or t
  misc_feature (661)..(664): n is a, c, g, or t
  misc_feature (670)..(671): n is a, c, g, or t
  misc_feature (673)..(676): n is a, c, g, or t
  misc_feature (683)..(683): n is a, c, g, or t
actagttctagatcgcgagcggccgcccttttttttatgggtaagtcaactaggtttacagtcccttatttttaatgcctaagttttgacagcaggaagaaaacaattttttaaaaattctcattacatagacgcacaagaatatgtcacataaagaaaatgtgtttagaatactggttttctatttacgcatgatattttcctaagtaaaattgccaagtggacttggaagtccagaaaggaaaataatttaaattaatgctggtgatcttaacaatattttgtaaaatgatgcttcccccttctccatggtctagtcaattttgtacaattaggtatctgactttacaagtttgttatcctttctaatttttactgaactgaaagcacaaagaagactacacagaaaatctggaaacagttgcaggtgttgggaggaagatgaaatcgagctgtcttttaacttttgtatgtgttttatcagaatttgctggactatgctggcaaggactttgtttacgatcaaattgtactagtgtctgcagggtttgtcagtactcgtcaaagccaagtccaattaaaaaaaaaagtctttgccctccannnnnnnnnnnnnnnnnnnnnnnnnnnnnnnnnnnnnnnnnnnnnnnnnannannncnnnngggggnncnnnntaaaaanaaaccccgcgcgggctccaaaatttccgcccaccccgcctcttttttacaaaaaagcgccgtcttcttggccccccgtgttacaacttggggggccggggggtccattttttaaaactccgggacctggggaaaaaaaacctcacctccggggggcatacgcgaaaaattccccccctttgggggggggagaactaaacttccgagggggggacaaaaaaaatgtttaaagccgttccaagggaggataaaaaaaatctccaagggggatatcgcggattagtaaaaatttttccaaaggcgcggcagcatagtgagaaaattgcctctttccggccgtggaagcatttggggaaacaattgagccctccgggggagctaaaaattttctccaacccggagggggaaatgttatacatacccccgcggcgccggtggtgaagatttttcgcgccccccacggggtctctttta

SEQ ID NO: 47731 - DNA, 449 bp, Homo Sapiens
  misc_feature (8)..(8): n is a, c, g, or t
cttcaggnaggatcaggaaagaccacagcaagattctttcattcgtctcctcctagcctgggggaccaggctcgaactgaccctggacatcaaaggagggattatgtggctgctaaagccatcggcccacagccctgttcacgtcttggtgcttctctttcccagaggctggtcccagccaggcacacacaaaaggcagattctcgtaaacgcagcctccctccctggaggctgcctcctgccctggatctggagtggagctgctctgagattttgagttcttctgcagagatgattaaatatatccaagagacattggaaaacctgctgaacattttacattggtctgctcagcacatggctggatgcggatatttctataattccagaaagtcacacagctcctctgtatgagaccagtgggcgccatttaaaagaacaggatgaga

SEQ ID NO: 47732 - DNA, 907 bp, Homo Sapiens
  misc_feature (811)..(811): n is a, c, g, or t
caaaggaatagtaagtgaagaagcctatattttatttgtaagaaagaatgccattgtggtattaattccaaagtatggtttagaagggacagtcttttttgaagaaaaggacaaaccaaacccacagcttatttatgatgatgagataccctcacttaaaatagaagatacagtgttccatgtatttgataaagttaaagtgaaaatcatgttagactcatctaatcttcaacatcagaagatccgaatgtccctggtagaaccacagataccaggaataagcattcctactgatacttcaaacatggaccttaatggaccaaagaaaaagaagatgaagcttggaaaatagctatattcaacaaaaatcttcaaagactggtttcttttttaaaagaaaaaacttgaaagaacacttctaagcctaagtgtgtgatacagtttgttacttttaagtacattttaataatttcagacatctgcatttttattgaacagttgactgtatctgacccatcatactactatacttctgggttgaacagaattatttatgcagaataattcaattgaatatccatcacttaaatacagtgacaggacagcaacttcagggatctgtaaagatcatttaaatggagtgctcatctcattgaggagcagattaattttgcgtaagtactttgattatttaatatttgtaagaaaaaactttcattttcctacggaggaaaatagaaccattttaaaaagcaaggaaccatcctctttttctaagtcttgggaacttgtcccccggttgaaggagganaatcctcctttttgccactccttttaaattcccccctaaattttaaaacctaaggggggttccctcccttaccgggccccttttaaaaacactctt

SEQ ID NO: 47733 - DNA, 911 bp, Homo Sapiens
  misc_feature (668)..(670): n is a, c, g, or t
  misc_feature (672)..(672): n is a, c, g, or t
gctgtgccaggcgaggcccttggcgggcacgggtgtcacggccaggcagatgacctcgtactcaggagcccgatggggaacagtgttgggtgtaccacccatccctgtggtctacccgtgtctagaggcaggtagggggtccctccaagtggtccacaagcttctgtcctgcccccaaggaggcagcctggaccactcctcatagcaatacttggagggcccagcccaagtggggcagccgaggtccctgctgccagcttcaggtgacccccccccatcccccggcacctcccttgggcacgtgtgctgggatctactttccctctgggatttgcccacgtacccaggtctggctggggcccaggcccggatgcagaggcctgcagggcctctgtcaattgtacgcgccaccgagtgccttcaacccagcttgtctcttgcctgccactgtgtgaatcggcgacggagcactgcacctgcctccagccgccggctgtgcagtcctgggtcctcctttctgagggcccgtgtaaatatgtacatttctcaggctagggccagcagggggctgcccgagtctgtttttcatgcgatgacacttgtacaattatcttttcaaagggacttggataataatgaaataaaactgttttttgaaaccctgcaannncnaaacagaccaacacaggtgtcgtgcaacaagaagaaacatcacggacacgattctcacgtagaaataaaatacctccccgctcccagggcggacgcccactaatacctgggggggggggcccctcttaaaaaaatccccccgggggggcccaggtttttacctcccccctttttttttttaaaaaagggggccccctaagggggcggcctattttaaaaaaaaggccgattgccccctt

SEQ ID NO: 47734 - DNA, 939 bp, Homo Sapiens
  misc_feature (823)..(823): n is a, c, g, or t
  misc_feature (832)..(832): n is a, c, g, or t
  misc_feature (834)..(834): n is a, c, g, or t
  misc_feature (836)..(846): n is a, c, g, or t
  misc_feature (850)..(850): n is a, c, g, or t
aaggagtaggaaggtagagagcaccactgatgaggccctcctagcccatggcagacccagacctcttctcccccaggaattagaagtggcaggagagaacaacaggggctgggaatggaggggagaatttctaggggaagtttcctgagttgaaacttctcctgtggttactggtattgagaaatcagctaccaaagtgaaaaaggacaagatcaattcttttctagtcagttctaagactgctagagagagataccaggcccttagccttgctctcagtagcgtcagccccagttctgagcctccccacattacacttaacaagcagtaaaggagtgagcactttgggtccttagactcatgtctggggaggaagagcaagtagaaaagtggcattttcttgattggaaagggggaaggatcttattgcacttgggctgttcagaatgtagaaaggacatatttgaggaagtatctatttgagcactgatttactctgtaaaaagcaaaatctctctgtcctaaactaatggaagcgattctcccatgctcatgtgtaatggttttaacgttactcactggagagattggactttctggagttatttaaccactatgttcagtattttaggactttatgataatttaatataaatttagcttttcttaatcaccttgcctggcttggagtcatgactaatcctgcacctgctctgtctggcagacccatgctgtggaaaaactgcttacagacatcacttttaagtccttttgtggatggtgggcacagtgaagagcaataaaaagagtggtgaggttcccntgaaaaaananannnnnnnnnnnaaangggcgggcccgctctagaagttatcccctcgaagggggcccccaaggcttaccgcgttaaccccagccttttccctttggtaacaaagg

SEQ ID NO: 47735 - DNA, 711 bp, Homo Sapiens
tgtttaagaggccaacttctggaaggaggtaggagtcataactttttagaggcatatgccaaatatcatttggtatacttaacaatattagtgttttaaaatgatgagttataattatttgaacatatagatatgtaacatgccacaaatcatttctaccatgcaaggtgtataagttgtttattttttagtgttaaaactataatagcttgaatataggtaccaatgaacaaattcaaattgcacctcttttcttaaaagaatgggatttaaactcttataaacattctttaacttttttgtttgtttgttctctttttttccttttgcattcttctagccagtgattgatctgctaatgctttctttgccactctaagtaaaatttatttcacctcctcaatgaaaacctcatggttttgctggctgtttataactgcatcgcacttctagttgtggcttgaattttcagttaagctttcatggtatgtaattttccagccttttgagaaaacaagcatactataagtgagagctgttttgttttccttgtttgtttgtttcatgctaggcttttcctggcagcatgtccattgcaggcagtggacaagaaaccaccagcattgagctaacccagtacatgctaggacctgtcctagaggggccacttttcattacctgagttatttgtacagaagggcaatagccatt

SEQ ID NO: 47736 - DNA, 952 bp, Homo Sapiens
cgcttactgcattactaaggaatctaggaaagatgactgctaattcagtacttgaaccaggaaattcagaagtatctttagtatgtgaaaaactgtgtaatgaaaaactattaaaaaaggctcgtatacatccatttcatattttgatcgcattagaaacttacaagacaggtcatggtctcagagggaaactgaagtggcgccctgatgaagaaattttgaaagcattggatgctgctttttataaaacatttaagacagttgaaccaactggaaaacgtttcttactagctgttgatgtcagtgcttctatgaaccaaagagttttgggtagtatactcaacgctagtacagttgctgcagcaatgtgcatggttgtcacacgaacagaaaaagattcttatgtagttgctttttccgatgaaatggtaccatgtccagtgactacagatatgaccttacaacaggttttaatggctatgagtcagatcccagcaggtggaactgattgctctcttccaatgatctgggctcagaagacaaacacacctgctgatgtcttcattgtattcactgataatgagacctttgctggaggtgtccatcctgctattgctctgagggagtatcgaaagaaaatggatattccagctaaattgattgtttgtggaatgacatcaaatggtttcaccattgcagacccagatgatagaggcatgttggatatgtgcggctttgatactggagctctggatgtaattcgaaatttcacattagatatgatttaaccataagcagcagcacgatccagagatccattgccatcagtgatctcactaaaaatatacagctacttcccagctaatctccacccaatgaatgatgatggtatagtatgtgcataatggaaagttaccttactgaaaaaaaaaaaaaaaaaaaaaaagggggg

SEQ ID NO: 47737 - DNA, 818 bp, Homo Sapiens
agaggtaatccgtggtgcaatgtcctagagtttagcagaacaattaatcttgacctcagcaactatgatgaagatggagcatggccagttttgttggacgagtttgtggagtggtataaagacaaacagatgtcctaggactttatgcatagcagcgagagagtcactgttaccacagttttgtcacccattagccataaattgctgtttgtatcaaagcgcatgctgcttctcttgcactgtttccctttcgcagggacatgttggtgtttgctattgaattggccagctctgcttgctgtgtggcattgttctcttggaaggctgctttgcagtttgtatttacactacagattggtgaatttgccaacgtcctcactgtgattatgtgtatattgctgtttaaattttgtatatgtgtataaaaggaaaaaggttcacctagagattatttctgaaaaatgtattgtaaaaataattttgtggcatttctagtccctttttttgaatgaaccaattatactttatttggtctcctatgtagcatttcagaaaacaagagaaaactgttaccatgaacaaacattgccagaattaaccttactgtttaagaggccaacttctggaaggaggtaggagtcataactttttagaggcatatgccaaatatcatttggtatacttaacatattagtgttttaaatgatgagttataattatttgacatatagatatgtaacatgccacaatcatttctacatgcaggtgtatagttgttatttttagtgtaaactatatagcttgatatggtaccatga

SEQ ID NO: 47738 - DNA, 647 bp, Homo Sapiens
tccggatctgagcctcccgcagaggaatgcagaatgacgccacggcacgcaggatgtgatgtcaccgagatgcagaggatactcagtcaaccaacatttactgagcatctacttcgtgccgtatgtacgaagctagcaaatatgtacagcaccagtactgattgcagggagcactgtagaagaggaatgaaggccaaacaattaaaagcggaggcggggaggtcttgtcaacggaaaggggtccctatccagaccccaagagagcattcttggatctcttgcaagaaagaatttgaggcgaatccatagagtaagcttagtgatgtgtgtcagacctctgagcccaagcaaagccatcatatcccctgtgacctgcatgtatacatccagatggcctgaagcaagtgaagaatcacaaaagaagtgaaaagggccggttcctgccttaactgatgacattccaccattgtgatttgttcctgccccaccttaactgagcgattaacctgtgaacttccttctcctggctcagaagcttccccactgagcaccttgtgacccccgcccctgcctgccatagaacaaccccctttgattgtaattttcctttacctacccaaatcctataaaacggccccacccctatc

SEQ ID NO: 47739 - DNA, 621 bp, Homo Sapiens
  misc_feature (560)..(560): n is a, c, g, or t
  misc_feature (606)..(606): n is a, c, g, or t
  misc_feature (612)..(612): n is a, c, g, or t
cacacaacaaaaaggagaagagatattttgggttcaaaaaaagtaaaaagataatgtagctgcatttctttagttattttgaaccccaaatatttcctcatctttttgttgttgtcattgatggtggtgacatggacttgtttatagaggacaggtcagctgtctggctcaatgatctacattctgaagttgtctgaaaatgtcttcatgattaaattcagcctaaacgttttgccgggaacactgcagagacaatgctgtgagtttccaaccttagcccatctgcgggcagagaaggtctagtttgtccatcagcattatcatgatatcaggactggttacttggttaaggaggggtctaggagatctgtcccttttagagacaccttacttataatgaagtatttgggagggtggttttcaaaattagaaatgtcctgtattccgatgatcatcctgtaaacattttatcatttattaatcatccctgcctgtgtctattattatattcatatctctacgctggaaactttctgcctcaatgtttactgtgcctttgnttttgctagtgtgtgttgtgaaaaaaaacatccctgcctaggttanttttgncaaagtatt

SEQ ID NO: 47740 - DNA, 607 bp, Homo Sapiens
  misc_feature (583)..(583): n is a, c, g, or t
gtttactgctgaagtaggtcagaaatgtattatttgatttgcctcaaacatccactgtaatgttacatgcaccttttttgaagcatgaactctgaattatgtttttataaatctgactaggcaaacctagattctggtttcacaatggatttattttctctctcagtctccattttaacagtgcttttgaagtttatacagaaagctttaaaagttagtttgtgcccttggtttttattcttaaaactgctaaaatacctctgtaagccttatcctttattctttcatatgttgtataataaatgtatagatttcattgaccaactaaaatgttgggtgtctgtaaatgagaccaaaacgtgggttgcttttttcataaaataatttctattgggggttactgttcaatgacagcaggtaacctataactgtgaatgcttcgtgtcgtcagtatttgcattacattcataaaagtgtgcaagtcctgtgactcccagcttaactgaaatactgttatgccacctaacttgagtacagcaaactggttttaggtttcaatgaccattgatgtaaattgatatcncatgaataaaagtattgtgttttg

SEQ ID NO: 47741 - DNA, 566 bp, Homo Sapiens
gcgtccggcagaggcagtgcccgcagacaatggccacacctctctccccagggcccggcagtgcccaaggatgggtccggggcctcggggccaatgagcgcctcttcctaggtgctgggattcagtccccaaacacagcgggaggggtccctggggcagatggggctttaccagcgtcgggtggtttagttcgagtcctttttgtggagaaagggagatgaaaactgaccacgtgccaggtgtggccgaagcccccagggagggccacattcggggagcggggggtcgggggagggccaccgactggctctgctgccagcacaggcccctccctggaagtcctcgggagcggagcgcggatcggcacgggctctgggctccccgtggagagaagctgtagtttttaccaaattgtgtacatctgggcagatgtttaatttctgtgactaatcactgaactagacgaatgttaaattttttatgtctgaagcctgagtctattttggatctgtaaataatcattgccagtgtgacttttgttcaacaaaaggattgtactgtattaa

SEQ ID NO: 47742 - DNA, 741 bp, Homo Sapiens
gggtggcgattccaagacgagggaagggcatgttgcttatgagcaagcttgggtgctcccaaggttcaaatactttttattagacacggccaggcagagaagaccatgggagttcccgaggggccccagctttcaagggcgacgggagagacacaggataaaaggttaaaagtgcagaggcagagtctggggctcaggttgggtctagggtgtcctcaaacaggctgaggaggttccgaggctcaaaggaggggaaggagccccgaggaggctctgagttgatgtcacttaggtccagggcatccctgggaggagagagtagtgacactcaggatccaaaagctagccctgcccaccccagcccctggacctgcttacctgggtgtgcacctgctccggggggtggaggtgctccccacagtccgggccaggacagcctcaggggagagtgaaggcctgcaggagggcaggcgagacaaggagggtgtccagggctagggagtgccggatgaaaccagctctgtccctgtgcaggctccaggctcccgcctgacaaacaggcagggagccacagtcagggacaataaaaacttggtgcactctgaaagcagcacttggacagccttcaaagtccttccatctggctgcactccaaggccccctctgtccttttcagaacacatggacttggaggcagatttgaaataaacttttagtacatgtaaaaaaaaaaaaaaaaaa

SEQ ID NO: 47743 - DNA, 599 bp, Homo Sapiens
actagttctagatcgcgagcggccgccatcctacaagccacaccccctcctctgagctctgaatatgggacccagtgccaggagctggaagacaaggtgtttctgccaaacggggacctccatccagagaaaaggaagaaggtgcagggtgggccaagaggcaagtgaaggttggcctgagtctgggccggaaactcagaggatgtttctcctctgctgggagctgtagtttcttatcaaaatagatattgttccaccatccccctccttggcccttcaagtgggctgaagcccttggaaagtgacataggaagtccccagatcttgcccttctcactccagaggctagtggtcacagacagctgggaatggcagccacagagggtcccctctgggagaaacagcttcaccccagcctcagggccctgggccatcactgcagtggccctgggaggtgaggaagaagctggctagaggagggggctcccacctaccttttatttaagccagtattctttgttcctgcttgtaataaaacttcagtttataagaaaaaaacaaaaaaaaccaagaaaaagggtcagctcagtaagaagagc

SEQ ID NO: 47744 - DNA, 665 bp, Homo Sapiens
cctgggtggcgattccaaacgaggaagagaatgtgctgtgtactaaatacaggccacatagtgtctgcctgttgaagatctggaaactgcctccccagatctgtattgtatttggtaggtaagggggtcagtttctttttctcattgtgtgttgataatctacacaccatctgttggaaccagggtgttattatggggaactcctcctgtgtactaggaggaggaccttagggagaccaagaggagagaagcatttcctttgatgaagtcacatcctgtctatgagcccactaatgctgtaacattggcctgaaagagagtgttctttaaaagcctttctcggctgttagtataaaaacatgatggtatcagctcttagcatgtttgcttgacccttatggaaggtataaatccacagaacttccttcccagagaactgggaaattgtcctagaaataaaccttgtacagttgagtggacatggataagcaacaatttgttactttgcaggatttgttccttggtaattgtttggtgtgtcatcctgtaaatattcatgatagtctgtttatatccttttgtatatcgttgatactggattgggtagaaaaataaattggcaatttaaaaaaatggaacagttaattgaaaaaaaaaaaaaaaaa

SEQ ID NO: 47745 - DNA, 900 bp, Homo Sapiens
actcatcaagctgtccccgaagaagacctgggaaggcttcattgggggcttctttgctactgtggtgtttggccttctgctgtcctatgtgatgtccgggtacagatgctttgtctgccctgtggagtacaacaatgacaccaacagcttcactgtggactgtgagccctcggacctgtttcgcctgcaggagtacaacattcctggggtgatccagtcagtcattggctggaaaacggtccggatgtaccccttccagattcacagcatcgctctctccacctttgcctcgctcattggcccctttggaggattcttcgcaagtggattcaaacgagcctttaaaatcaaagactttgccaataccattcctggccatggaggcatcatggatcgctttgactgccagtatctgatggccacctttgtcaatgtatacatcgccagttttatcagaggccctaacccaagcaaactgattcagcagttcctgactttacggccagatcagcagctccacatcttcaacacgctgcggtctcatctgatcgacaaagggatgctgacatccaccacagaggacgagtaggggccacccagggccaggagaacaggaacagaactgagcaggggcaggtctccaaggcaagcccagctggtgtgacttagacaatgacgaggcttcaactcactgtctttttttttttttttttttggaggggatttttttatttgtgggttcaaaaaatctgtatatacagtctatgtgtttaaaaattggggttggaaggaaactacagcttttagacttggaaccccccacttccaccaaacaaaaaataaaaccttccaggcatcctttgctcgggggggcgcaaaaaaaaggttactacaatggcc

SEQ ID NO: 47746 - DNA, 1151 bp, Homo Sapiens
  misc_feature (790)..(790): n is a, c, g, or t
cagaagggttgccttctgtaggtcggaggaatggaggcttactaaccaggtaagccttctatgcatccacaccaaaatcctgcagaatgtaagtaagctctgctttataagatgggttcaccttcatcgcagactgaaagtttcagtttttatttttttcagaaagcacgaaaaattatttataatagtctggagaaaaaacacactgtaatatttcaagtgtatgcagtagaatgtactgtaactgagccctttcccacatgtctaggctccaatgtctcctgtaggtccacctaactgtgtgttttcagggacaatgccatccatgtttgtgctgtagacttgctgctgctgaatcctttctggggactttctcatcgggcagggagcagagggcttctcgttcatgcaccctttgcctgaacacccatgtagctgctgtgttgtgtatatattactcttaagaggagtgtgtgtgtctgtgtttgttttaaaagtcacttatttcttacagtgatttcaattgcaccatgacttcttcactaaaaccacaaagtcctgcttaaaactatggaaaacctaacctgattagagccttgactattttgaagattaaatgcacactttttatataatgtgaccagtttaaatgtagtttgtattgtactgggggacctttcgttgttgttggttgcttaaactgggattttttttcccctccctaatttcaggggtgagattgactttgggaagacaggatagttctttgtcaggccaacaagtgatgaantgcgggaaaacaaaacttgggcaccccaatatatcaaactatttccgtgcccggggatgttttcattgcccaacgaggggggtaatgaattgccttctgcaccctgggtctaagggttgggttggggggggtttttggtttggaaaataaacctccactgcctcccctgaaagggcaccggccaaccccagggcttctaaaagggcccgccgaaggatggggccccctcgggaagttttcacttccacaatcccttgaagggaccttcccataatggggtggggggggctttaaaaaggttttttttttcccccgtgaaattttattttcccttttcacccccccggggggtttctctcta

SEQ ID NO: 47747 - DNA, 540 bp, Homo Sapiens
gcacgagaggtaaaagctatgtgcaagaacctcaaaatgctaaaatctagcataatgccttagatctgtttttaagtcttgtatattcctacatagctgtccgatgtattatatttgtatagtgaattgtgtacaatttttgaataagtgcatcatcacttaacctttatgttgtttgaatagtgatgatgatacatttcttcagacatttaactgtcatttttttcctttgtcatttgtgagttttatttgtacagttcctcatgaagttgcatctgagatgtgtgtatatgaaaagattatacaagggtaaaattaagcaatatattaactatggttcttcaggagaaagcttacagtgtttcaggttgtgatttattttcaaaatggagttgactctgaacatcactttgttcacctgcattgatgtttgtatttctagtgtgagcagtttatgcaaaggtagatatattcagagaaattttaaatacatttatgcaagttaatattgctttgctgatgctatttgcttatttgatg

SEQ ID NO: 47748 - DNA, 938 bp, Homo Sapiens
cagggattctgtgactacaagatgaaagacatttggttgctgagatgcagttaatggcttctgttacatggagctcaatggacgtgcccaggaatgcttttggctgttattttgcagttaatacctcctgtaactaaagcatttgtttatgagttgacttgagagaagggctgatctcagagccgctttgagctaagttggattagtcacactaggaagttaattccacacctttcgtctaagtctcagtattgaggcctctccagttctcatgcaccctgatcttagggttagaatacttgaccctgatacctgcaccatgcttcatggttcctgagctctttctcctgtttcatttgagcctccaaactacatatttggtcatattgcctgcctaccccatgcctgctgcagaaatattcatccaggttaaccttgatatacacagagatggtcttggagaattgtgaatgtatgtactgtattgtcatcaaggatactgtcccttatttgaaggcatctaaagagaaactgttttcagatccaagtgctcagatctaaagcctctgcaacaagtcaggtggtggtcatgtttcccttctagttttggctgacaggaagctcagttcagtaccataactaccgaacctggcctctgtattttttgttcctcccccgtttttggtcatttggccctggccttttaactcaagggtgggttagatatacgttacccaccatcccacccccccatcctctcaaaaaaaaaccaaaccaaactcccacgcctctcatgccgcgtgccggcactaaaggccaatgtaactcggccctgctcctcggccggtttgccggcaccaggtgtatcttcgctcaccaccgctcactccagcgctatcctcccgccacgagggatcggccgggtgctttatgtcggc

SEQ ID NO: 47749 - DNA, 637 bp, Homo Sapiens
ctgggctcctgagggaaaggcagccggaattcgtgtgagctggggtggggctgggaccacaggtggcttctctcttgcctgctcctgtccctccagcacgtcccctgcaccacggcatagcttaggtgcgccgtcctggggtcgctgccgagagcgcctggacttcgacgtcccaccagcgggcgcctcctcccagaggcttccaggagcacgagggccttgcggcacaggactgtgccctgtgctgtcccctgcaccccggctcagctgagctggggaacactgctgtcgtgtgaagtcacagtggccttgttggtgcccacagggctgtgtggatggaggaagctgtccctgcccagtgcatcccccaggtcatcacggggacgcaggaggcaggccctgccctgccctctcctcacaggtctgttgcagggactccagaaaccattctgggagccgtggatgggggcggagctggggtttggtgcagtttccagggtgcagtacagcagggcctgaatactggccctggactcccttttccagaacaccaggtgtggccacctggggctcaggtacacagtggggtctctcggaagccaccgtgtggttctttcacaggcacgtttattttgct

SEQ ID NO: 47750 - DNA, 731 bp, Homo Sapiens
accactgctactcgaccgtcgccactcagtggccacctggtgcccgtttagatttttgcttgggttttactgccacctctatagacgagagttgcaaagttgctttgagcagagagggaaagattaatttacactgctggccaccgaaggcaggtgtttcctgggtagtaatctcacggctcttgatctggaaacttcagagtacaaattggtggatggtggaaggcaggacacgtatctctgtctgacggaaaacagacctcggggctggcgtaaaccctgctgccaggccctctccccactgccccaaaccggcctagacacgaagaccaaagcagcctgcacagggcaaggcccccgcggaatcctgcagagcaaactcaggttaacttgggtccatgaccgtttgcattcgaaacacaatacactgcctcgttctctcagttagcagctgggcagcagcgcaccattcatcatttaggcttgtggtttgttgtttactctaccaatgttatgttgaaactgcattgtaaaaagagaagaaaatggcaggttttccaggtccacggaaaggtttggcctgacgctggagtgcggtgatgaacttacgtgacaatgattgtattcctcagtagcactttaaacgccgaagacagccctgcagcaagcctgcacacgggcttgggtgggttcctttggagaagatgtggctggaacacaaacaatctttg

SEQ ID NO: 47751 - DNA, 665 bp, Homo Sapiens
  misc_feature (641)..(642): n is a, c, g, or t
gggtacgagagtggccctgacggaggggaggaaatgaggaaaatgaagctcgggctggttaactgacttgctcagcgtcccatggcctagccgcccgtgactctcacactgtctcctgcatgacgggtggcgcctcccgcagcttcccttctctctccagtgctgcccgctgtgtctagcagcctctaggatcttgtcagagctgcacctctctgtgaactggccattcctttcggtgctgctgtcctttttgggggggttcctgatttctgtatacatgtagctttgccagatatgtacttagtaatataaactgtattaataaaatccatttactgtgtaatacacgagtttaaaaattaagagcgattagctgttcactttggtaacaggtagttaagtgtcacacaaggtgttgttgcaatggcatgacggtgacctgttgacgtaactaagccttagagcaaggcatgtgccgcacgtgctccgtggtacttagagccctgggggccccgctcggactccgggtctccctaggatatgccccagtagcatttgctgtgtagtctgtgtgtgaaatttgggcattctgcttttctctactaatcttgaagtgctcagtgattttgtgtattgtgtcnnttctactttctataactcactcg

SEQ ID NO: 47752 - DNA, 1181 bp, Homo Sapiens
gggacctgatgaccccaacgtggctaagacgaaaaataacctggcatcctgctatttgaaacaaggaaagttcaagcaagcagaaacactgtacaaagagattctcactcgtgcacatgaaagggagtttggttctgtagatgatgaaaataaacccatctggatgcatgctgaagaaagagaagaatgcaaaggaaagcaaaaggatgggacatcttttggagagtatggcggctggtacaaagcctgcaaagttgatagtccaactgttacaaccactctaaaaaaccttggggcactttacagacgtcaaggcaaatttgaagctgcagaaacgttagaagaagctgctatgaggtctcgtaaacagagggtggcagaagtgctcaatgaccctgagaacatggagaagcgcaggagccgtgagagcctcaacgtggacgtggtcaagtacgagagtggccctgacggaggggaggaagtgagtatgagcgtagagtggaacgggggcgtctctggccgagcctctttttgtggaaaacgacagcagcagcagtggcctggaagacgccaccgctaactgaccccgacctggccccgctccaggatgggactgccgagtgtggccccggagctggcccgggacagccagggcgggcagggaaggccccctggccggggacccgcagggctcactcattttctccctgcgttggtgggcataaggacctggatactaataacccccccggctgggcctgaaccttggggcctggggcctgggcctaaacttggtgcccctgctgcgggcgtggttttctcccaagaaaacttgggggcttgacctcggccccccgggtctcccttccaatggggaccctttcccccccatgggcggcgcaacacatattttttatttgtaccctttttcaaacttacaattttatctgcctttccgcatactatgcccccccaccctcctctcataattaaacatactctctttacgcccccctcactctccgtgtgcgtgatataatgtgatcccgtgaccgccgtatgcggtattaattcgttttatgagaaccacttctcttttttttcaactacagcccaatacgtccccccgaccctcaacgttcgacagtcctatctatctcctccagcagaaccagtctccc

SEQ ID NO: 47753 - DNA, 654 bp, Homo Sapiens
ggcacgaggaacaaaaatgttctgtgtgtcaggaaagagtgtgagagcggtaggcagcctgccgcaaacacacggatggctcccaccgccacgaaggttgagaacaaagccagggggcccagaggagcaatagccctgggccacaagcgtgggtaggcctttcacgtattccgtctgcacaggcaaccaaggccagtagaaagctatggctgcaaaaccctggggtggacgatgtttgatgattagacggtcatctctaactactaaactaatatctgcattcttgttaacataaatctctccttggctattttaatagccacagtcccaaacttcatcccagcttagatttctcagcactgaggtaaactctgcattgtcatcccagcgtacacctttaatgttttattgatttcactggcactgtatttggacctgtccttgtatatgtagagacatatgtggcttcattggtaatttacaagcaaaagatgacatgacgtgacacctgtatgaaaatgtgatgattgaactccctgtgtacagcgagtgaattaaaatgtctgcctctccagacatttcttaatgattccacttaatagactctatgtgtgctgaatgttcctgtgtacatatgtgtgttaaataaaacaa

SEQ ID NO: 47754 - DNA, 560 bp, Homo Sapiens
gcacgagtggggcatgggttgcggtcgcttcccaaggggcagcagggaccccggccaccccggctctcggtttgggttgattcctctcctttttgctcttggttttccgacgggtacgaggctggcccggccccctgtcccccgggagcctcactcttccagcaggaccagaccaggggcctccttcctgtccccaggcgttcccggcccctcgcaggccccacccatgcccttggcctcagggtccaacaactgggggagctaccagggctctgccttcaggagcccacagctgggcaccccccttgccccccaggagaccggggcgcaggcggggcaccggcctcacctggttctccaacaccgctgcctgcggtctgttttgcttttgtcctccccagcccagaattttcctttgtataaacagaactcctagtcaggaagcaatatcatttcaggtctaaagaaagggacgtgcatctggccgagggcagttcagtctctgcagagcccgcagcccgctgcgcagctcggcccctcccgcccgcacgggcagctga

SEQ ID NO: 47755 - DNA, 813 bp, Homo Sapiens
aacaatctgatatcggatgtcgtttaacctgggctcgtggtagggctccagcatttctccctccttcctggtttgcctgtaggggtagactcggaaggtgggtggggtgtgcatttcctgttaggagtgtatcagtgcttgtcttattataagcccctttcttttgtgaatttgaagtagcaccaacaagcctggattgtgaaggtattaagaatcggtctgtgggctactgagtgggtccttaggatactggcccagattttgccactgggtatggcagatcattttctaccatggcctgctgctcttgtagtggacttcctgagtccaatcccacctcctggtgtagaatttacactgctgcacctgaggtcgatgtttcaaagtaagatcaagccagtgttttgatctgggctctgagcacaagtcaggaaacaccaacatattcacactctcccagtaggttcctcagtccgatggtgaatggctattcgtaaatggctggtctggctctttggtgttggagcctttccaatagccccatgaaaagaagcatcagccaaggatattgtaaaaaggatgtaacaaggagatagggtagacattgtactcagtgggccttggggcctagcccagctctgagcagaggactgtggcattcactgtccttgagtgtttcaccttcttggataacacacgggccttctcttctggatttcatcagagattacagccagatgggggctgaagaccatcctcttgaccacagaggtgtgactgtgggaaatctcccaattatggttgccagaaaat

SEQ ID NO: 47756 - DNA, 589 bp, Homo Sapiens
  misc_feature (65)..(65): n is a, c, g, or t
  misc_feature (577)..(577): n is a, c, g, or t
taaatgagccttgctgaaattttgaacaggagtacatcaaactcacaccagcaaaaaacagcagnaagaagaaaatccagaacatgtagaaattcagaagatgatggattccctcttcttaaaattggatgccctctcaaacttccactttatccctaaaccgcctgtaccagagattaaagttgtgtcaaatctgccagccataaccatggaggaagtagccccagtgagtgttagtgatgcagctctcctggccccagaggagatcaaggagaaaaataaagctggagatataaaaacagctgctgaaaaaacagctacagacaagaaacgagagcgaaggaaaaagaaatatcaaaagcgtatgaaaataaaagagaaggagaagcggagaaaactgcttgaaaagagcagtgtagatcaagcagggaaatacagcaaaacagtagcttcggagaagttaaaacagctgaccaaaactggcaaagcttccttcataaaggatgaaggtaaagacaaggccttaaagtcctctcaagcattcttttctaaattacaagatcaagtaaaaatgcanatcaatgatgca

SEQ ID NO: 47757 - DNA, 527 bp, Homo Sapiens
cccaaacctctttgaacaagcttctgtccctcccacacctctcacctcacaggcacatcaggctgcagaatgcgctttagaaagcattgttttagtccaggcacagtggctcacgcctgtaatcccagcactttgggaggccgaggtgggtggatcacaaggttgggagattgagaccatcctggctaacacagtgaaaccctgtctctactaaaaaaatacaaaaaattagcttggcgtggtggtgggcgcctgtagtcccagcagcttgggaggctgaggctggagaatggtgtgaacccaggaggcggagcttgcagtgagccaagatcgcgccactgcactccagcccgggtgacagagcaagactccgtctcaaaaaaaagaaaagaaaaaagaaagcattgttttaattgagaggggcagggctggagaaggagcaagttgtggggagccaggcttccctcacgcagcctgtggtggatgtgggaaggagatcaacttctcctcactctgggacagacgat

SEQ ID NO: 47758 - DNA, 565 bp, Homo Sapiens
atggttttgttggagtgcattttagtaagcctttgcagtaaaatgacggttgtaactactaaaccaaatttagttttcacagcatggttttgttgttttccccttgtttttcagaggtaaattttgcattatatccttcagtattttaacactattttggcagtttacacattactttttgtttttccttcctttttgtgaaatgtattaagttgtggttcttattgaaacagtattatataatgtttgcttaattatatcatgtgatgctcagttctattttgatttattcattagtattcacttttacctttaaagtttacttgtagcaaatatgtttacattgataaagccagatatgttttgacaatgaaatttacatatcaagtactgcaaataaaaggtggtgctatgatatatgcttaggaggacagttttaatgattgtacttgcatgaacacaatcatatgatggtaaagcagaaacttaagaaaaaaattggttatgtgttatattcaattagcttaaataagttgctttgttatattttatttgaattgaacta

SEQ ID NO: 47759 - DNA, 499 bp, Homo Sapiens
gttgttggagacgccaatagcaatatctaggaaatttgcattgagaccattgtattttccactagcagtgaaaatgatttttcacaactaacttgtaaatatattttaatcattacttctttttttctagtccatttttatttggacatcaaccacagacaatttaaattttatagatgcactaagaattcactgcagcagcaggttacatagcaaaaatgcaaaggtgaacaggaagtaaatttctggcttttctgctgtaaatagtgaaggaaaattactaaaatcaagtaaaactaatgcatattatttgattgacaataaaatatttaccatcacatgctgcagctgttttttaaggaacatgatgtcattcattcatacagtaatcatgctgcagaaatttgcagtctgcaccttatggatcacaattacctttagttgttttttttgtaataattgtagccaagtaaatctccaataaagttatcgtctgttc

SEQ ID NO: 47760 - DNA, 770 bp, Homo Sapiens
  misc_feature (659)..(659): n is a, c, g, or t
  misc_feature (738)..(738): n is a, c, g, or t
ttttttttttttttttttccttctaatgccaagcagcagaaggaaaaaaataaagtgaaaaagaagcgaaagaaagaaacaaaaggcagagaggttcgcttcggaaagcggagcgacaagttctgctcctcggagtcggagagcgagtcctcagagagtggggaggatgacagggactctctggggagctctggctgcctcaaggggtccccgctggtgctgaaggacccctccctgttcagctccctctctgcctcctccacctcgtctcacgggagctctgccgcccagaagcagaaccccagccacacagaccagcacaccaagcactggcggacagacaattggaaaaccatttcttccccggcttggtcagaggtcagttctttatcagactccacaaggacgagactgacaagcgagtctgactactcctctgagggctccagtgtggaatcgctgaagccagtgaggaagaggcaggagcacaggaagcgagcctccctgtcggagaagaagagccccttcctgtccagcgcggagggcgctgtccccaaactggacaaggaggggaaagttgtcaaaaaacataaaacaaaacacaaacacaaaaacaaggagaagggacagtgttccatcagccaagagctgaagttganaagttttacttacgaatatgaggactccaagcagaagtcagataaggctatactgttagagaatgatctttccactganaacaagctaaaagtgttaaagcacgatcgcga

SEQ ID NO: 47761 - DNA, 776 bp, Homo Sapiens
gggatctgggagccgggaacagattggctacggaacgccccaggttgtacattcagagggctctttctccatgggagctcctggtgccgcctcggcccckagcctgtccccagcccctcaatctggtgcagcagcatcttgtcactgcacaacagtggcctggtcccccacaggcagttagggccccaggtcagacctcaccatgatgatttgttccagttctcccagggcagaggggcgagggagaggcttttgctgtgagagtagccgtcacgtgtctcttcccagcagcgccgggcaagtgggtgctagagtctgagcctcaggctctcctgccctgggcctcccaattggtgctatctgttactgcccgtgctcacggacatggatacagaccctgctgtgctccacaccctgcaggcgcctcgggaagcgcccaaaggattccccttcacgttggtgcacctgctccatagctccgggcgctgcgtcccgaggggccacagtctccatttcagcgtcttgcatggcctggcaccgggtggggtggtatgccccaggacccttgtttgtgtcaaaaatgactttccctgcccttgccgtgggtccggcgttcctcccagccgggatcacagtgggcagccggcacccggcaccactttggcgagcgtcctgcttccgccctcgccctcatctacgctgctccgctttcctcagacccctttttgccgtgcaaagggaattcttgacattaaataaaaggtatccagattgca

SEQ ID NO: 47762 - DNA, 847 bp, Homo Sapiens
ctttttgagcctgtttactcctgtggccttgggcagaacagtaaatactctgtgcacggaggaaagacatgcccaagaggaaggaagtactgaccatcggctgcctgtgagcagcttagcaaggagcccttgctccctgggaaaggcggtgaacttgagtctaaagatgcagtgcctggcccttcctaaggtccctgcctggcatccgagtgtcggtgtgtggcacagaaggctcctgcttgcttccaaagtgatggacaggaaggggcagagtgagtcacggcccagactgggcaccttcacgtctcagcctcagggagccccacagccccaagctcgctgaggcaacgtgagaacaggctatgggaaggctgcaaaggctgagaaatgcaaaggctcatatttataaatcccacccccagagtggggagggtcaggtgccagacctggactaaactgcaccaaggaaacacccagcagggtctcctgtgagccggggaccatgcagcccgaaacctccagtcactgcgcccggcaggagtcaggagccagggactgtgcagcctggaacctccagtcactgtgcccagcagggtgggctgtgcccagcaggagtcaggctaagaaacgccaggtctgcctgttcttgctgggcaatggctgatggctgccagtttctgctgatacacaggtaggatgggacccttcatgaatatctgactttaataagttggtaaggatatatttttttgtctatgttctgtttcaacttatgtagattattataaattgatgtaaaccacgtgagaggaaaatgttaataaaaaatgcaaagccccatcatttg

SEQ ID NO: 47763 - DNA, 866 bp, Homo Sapiens
  misc_feature (779)..(779): n is a, c, g, or t
  misc_feature (795)..(795): n is a, c, g, or t
  misc_feature (834)..(834): n is a, c, g, or t
  misc_feature (839)..(840): n is a, c, g, or t
  misc_feature (848)..(848): n is a, c, g, or t
cctttttaaccacgtaagggccctcaaaccgtgggacctctaaggagacctttgaagctttttgagggcaaactttacctttgtggtccccaaatgatggcatttctctttgaaatttattagatactgttatgtcccccaagggtacaggaggggcatccctcagcctatgggaacacccaaactaggaggggttattgacaggaaggaatgaatccaagtgaaggctttctgctcttcgtgttacaaaccagtttcagagttagctttctggggaggtgtgtgtttgtgaaaggaattcaagtgttgcaggacagatgagctcaaggtaaggtagctttggcagcagggctgatactatgaggctgaaacaatccttgtgatgaagtagatcatgcagtgacatacaaagaccaaggattatgtatatttttatatctctgtggttttgaaactttagtacttagaattttggccttctgcactactcttttgctcttacgaacataatggactcttaagaatggaaagggatgacatttacctatgtgtgctgcctcattcctggtgaagcaactgctacttgttctctatgcctctaaaatgatgctgttttctctgctaaaggtaaaagaaaagaaaaaaatagttggaaaataagacatgcaacttgatgtgcttttgagtaaatttatgcagcagaaactatacaatgaaggaagaattctatggaaattacaaatccaaaactctatgatgatgtctttcctagggagtangagaaaggcagtgaanatggcagtttagaccaacagaggctttgaagggattcangtacnnagtaatanttttgtataaaaacataa

SEQ ID NO: 47764 - DNA, 663 bp, Homo Sapiens
aaacagcccgtgaaattacaagaggctgccaggagcgtcttcctccacttgatgaaggtggacccagactccacctggttcctcctgaacgagctttactgccccgtgcagttcacacctccccaccccagcctccaccctgtgcagctgcacggggccagcgggcagcagaacccctacacgaccaacgtgctccagctgctcaaggagctgcagtgaccctgctcccccaccacagaggccaccgatccctcccctactgccagccagaagctgggctgaccccaccccggcataggcggtggcagcggcagcagagaaggtgaattagttagccaatcgatttataaattgatcgatcacacaactgcttagaaatggattgaaggaaagtagctgactattatttatatttcataccttgtgttttcaagtgacattgtctggtggctctaagggtttaaccccttagcctaccatctctatagccccagctccctcacaggccacacacacacacacacaagaggtcagttcccctccatctgcatacacctccctgtcttcaaataatgagatggaactaatttgttttacctaacctgatctttgggaaacaaacggaaataaagacacttcttggatgaaaagtaaaccacaact

SEQ ID NO: 47765 - DNA, 709 bp, Homo Sapiens
agcgactaatatttacactatgccatattttttttaattatagttgtaaattatgaaagatccttgaattttctacagatctacaactactaatgtaacagacaagggcaatcttggtatttaaatctgagcatggcagttctaccataaaaagtactctatttttctaatttctaggatttttaaaataacatttctgtaagtctgacatactaatagtcactcaagcagtaccatttattttagtttgcatatattttcactgtttttaatttaatgtattgagtctaatagactgttttgcaataattagaataaagatttatttcttctaatcaaagatgcataacagctattatctaggggaccaccaaatgtgatttcaaaattttgttaactattacaaatgtaatccttatatagaaattttaattttgtaaagtagtgtataatattgtaatattaaattcttgttcttaaattcaaatatgtattgatcttcaatgtgctgtttaaatcttgcttctctgaaaagttggagacaagatttgtcttcctttttacagtttgtaattttcactgttttattcctgttaaaaaaaaaaaaaagtcatttgtaacccatgcagaccattgtttgatctatgctaacttatcaacttggctattcaataaagttaattgaaaagagcttaaaaaaaaaaaaaaa

SEQ ID NO: 47766 - DNA, 1045 bp, Homo Sapiens
gaggaggtatacaaggaggaggtatacagggggcaagcaagcaaggtggaagccagcctagcagttttagtcctgggcagagccaggtcactccacaggatcaggagaaggcagctttgatcatgcaggttcttcaactgactgcagatcagattgccatgctgccccctgagcaaaggcagagtatcctgattttaaaggaacaaatccagaaatccactggagcgtcttgaaaggttttagaaaatatttggctgtagtctcaaattttattctgtagcatggagaatgggtgcaaaaagctgacttctgtatccccacacttggattagggtttccctcctcctagaacctaatcttattttttgttctttttctttctttctgttttcctttttttttaattgagggtggggggaggagggagtgcgtctgttcactttaagttactttaaaataactctgaacatgattatattatgccaaataagattacaaagaataagcagcaatattgaagcatctacagtatgttaactacattttttaaatgtcgagtaaaacttcgtgaaaactgctcataaagactaaaagttgacctgttaaaacgttaatgtactaagatagttttaagatttttggttgtataacaaaataaaagtttacccaaaagtataagatacattttttggtaaaccatttaaaatacaaaatcctattttggaggcaataggataagcattgccttagtgtttaaaattattttttgaaccgagttaacaggataaggttacacttgtataagaattggttttttctagagttatggtaccggaaaaatcaggagtggccccgaattactgttgcgttcatttatcccatcctttcagagaaccggcaggtttctgcccaaggccccaagccatctgaaccatggaggaatatttgcggggcaacaatttctaaaaattcacacccggggttacctttaagatcccgcttctcgaatgaaaaacccccaggctctctctcaataaaccctttc

SEQ ID NO: 47767 - DNA, 768 bp, Homo Sapiens
  misc_feature (693)..(699): n is a, c, g, or t
  misc_feature (701)..(701): n is a, c, g, or t
  misc_feature (703)..(706): n is a, c, g, or t
  misc_feature (708)..(709): n is a, c, g, or t
  misc_feature (713)..(716): n is a, c, g, or t
ggagtggagaagctgagcagagatggagctttcctcatggatgcaggctctgtactgatgctttgggttggaaaaaattgtacacagaattttctcagccaagttctaggagttcaaaactatgcatcaattccacagcctatgacagaccttccagaacttgatacaccagaatctgccagaataatagctttcatctcttggcttagagagcagagaccatttttcccaatactttatgtaataagggatgagagtccaatgaaagcaaacttccttcaaaacatgatagaagacagaacagaatctgcattatcatattatgaattcctgttgcatatacagcaacaagtgaataaatgaatgaatgaagaaatttgacttatttttaaggaatgtcacgatagtgcagaatacctggaaatgtgtaataccttctttttctattatgtttgtggactaatgtgatgattgagatgttctcactgtgatttcaacaacctatagcaaataaaagaccacagcagagaatcaaacatgcaactctgaaatactgtatttttcaaatcagaatatagctacgtatgattggatacttttttcttgccaattatgtttgagttggtatggattaaaataagaatattgcagaggcaaagtacattttggtaaataaagatttctgtggtcccnnnnnnnanannnnannaaannnnaaaaccttgtgggccgcctccggcccctcaaaaactttccaaaacccattcc

SEQ ID NO: 47768 - DNA, 846 bp, Homo Sapiens
ccactaagctcagctaatttttgtatttttagtagagacggggtttcaccattttgaccaggatggtcttgatctcttgacctcatgatctgtccacctctgcccctcaaagtgctgggattacgtgatccacccgcctcagcctcccaaagtgctgggattacaggcgtgagctgtgcctggcccaccccagcattttttaagatgtatgtattcgttgttctgtttttccagatgattctgtcgtaaagtgatgctatgttgtcgttacaacatcaaagtgattttacggtttttgatgggattattcaagtgtcagaattaactgttcaaaatgttctgaatcatgtagatacatggcaggtaactgttcatgggagaaaagtacagtgctgttacgtggcactgtacagtcatgtgccacgtaacagcgtctgggtcagtgacggacacttacctgacagcggatccacaatattctcgtgcagtgtgtttggaatcctggtctgggctctcggcgttggccttgtagatcaagtaggggaagtgagtgatgttcagtcatgctgctgggacacttggttttccagatgaaaacacataataaaactacatgcaccatcagaaaaacagcacactagtctaacgaaacgtttttggggcgcttgggccctctgaagacagttcttagaaccacttctgtttaggccaccaggccccatgtgggttattgacaccgtgtgcactacgtggtccactgaggaaactctggggccatacacacgcccgagactctccacgagttaaaagagcgccggggaaacccggacgttttgaaacattctg

SEQ ID NO: 47769 - DNA, 614 bp, Homo Sapiens
gaatacagccatttagtcctaatatacataccaatgagacaattaaaaattggttggaagatggagcttatcacattgtgctactacgactttattttttcttgaaaataaagccttgaggatgtgaacataaatgttggtatcataaaacaagtagtaataaaagcataaattatcaaatatcaggtgatcttactatggagaagaaaaaccaatatctagttacagatgaaaaaatgtttaatacaaagagctgaaaatgtagaaattgagttatcttccctttgcaaaatttttacactttaaattagtaattctttgtttgcaaggttttcatccctatgctgttgttttctactacctgttttactcttgttcatactgctactttcccatgtttcctatatgcctcccctatattggagaggataactcgcgtttacatatgtgatagttatgcttaatactaattcacagagttggctcgatcattttgagattctagttgctttatctcaaagctttcactgaagggctgtaactgaaaattattaaatgttagtctttagtcaaatctctgcattgtttcatgcagaaaataaagatacaattaa

SEQ ID NO: 47770 - DNA, 807 bp, Homo Sapiens
gctcacttctgctctggccatggctgtgaagggcccagccagctccctgttttgatgttctgtgcaacagctccggggtcttgtgactggagatcctcaacaggccctggagccaggactggagtcttggcagctgatgagcagcaccttgccggccaggaggagctgatgctgacgatctccccaacatctgaaggcttaaagaacattgtcgttattcagccctccttgcttctctcaatacaataagacattgcagaagcaaaagggtggcctctgctccaggcaaggcagctggctctgtctggggcgtcggcctggggcttgggtgccacgtgctgagattgcatagtcaaaacagccatttttgccaacaatagcttgtggctccccacattttcctaccctgcactcaagggccagaccactctctgcatggaccagaccatcttcccaaacccatggtgctttttccccaactcaacctagactccaaggtggggagggatgggtcagaggccatagtggcccctggataatcctgacgtggggtggagtggggtgaggcagagggagcagccccaacacctgcactgggccatctatgggaaagaacacgggtcgagtgcagtcgagttgtctggccatctgtatttggatctataactgtactttgcctggcgctgtgcgcaaggtcagaaaaacttactgctagtacctagaaacacacaaggctgcccagccaaatcttaatgtcacacgtagctagagccatggaaagtacagtatgacttcaaccagaaacag

SEQ ID NO: 47771 - DNA, 1031 bp, Homo Sapiens
gggatctggtccaactagaaatggtcaaggaattcatttggctccttgatacatcagtcctcaatattactttctaggtattttatggccagattgcttatatgagtggtcttttggtttggtagtaggtttttatttttaatttctgtactaatgaaattcctgactttaatttctgaaaaccaaaaactctccaagtgtatttatttatattttttttaatagagacgaggtcttgctatgttgcccaggctggtcccaaactcctggcctcaagcagtccttccaccttggcctcccaaagtgctgggattatcaatatgagccaccatgccagatttgttcatttttaaatatttttatctcttcaagtcatcttttgatcttttaaaaagcaccttcaaacagctgcaccttccatttgcactaggaaatgaaggtagtgatgggattggcaatgttcctggcagatgtttcagcccaaaagctcttctacagaccggtttagagctggtgccctatgagaatattagggagcttttattttaaattgaactttacccttgtccatgcaaggcattcctcctgaatgcatccatgaatttgtttacttttgcgtcaaacatatgagccattgtcatgctcagcctgtgccaccattgctctgtctgatgtatgtaatcatacaagacctgattttggttctaacacagtggtctttgactatcaacattgatgtttttagagatgggttcttctggttgatacagactatgcattgcgtctagcagatggggtaaactggcctaaaacaagtctttgcagaatacatgccaatttccaaaaaaaaaaaaaatttgttgbkbgggkgtgsacaattttwtctacactgaggctaycrcccmactaaacacattcagtgggkggggtgcctaactycataggggcatggcycmtgccacactaatagcatgarattggtgtatttcagkagtkgttctcycattgcrctgtgaamtgtcctttattat

SEQ ID NO: 47772 - DNA, 499 bp, Homo Sapiens
tgacaccagcaattatgactttgtctacccttcctccccagttattgttgcagattctggttaagcagaggcttcagaaccactgaacttgaaacttaccctctagggatgcaggtgggatgtccagggactataggtttgggaaaaccataccttaaggttggtcagcagtcagacaactctaatgtgtgtagtgataagagattcaagtaacatcagttctcctccttttcatgcttttccttcccaggtgcagcctgtgattctgatggggactggtaaatctgtgcctctgcctcctaggacttattttcccaggaggccatttacaaggggatctggatgacctgctgatggagatccagcttgccagggacttaggtttatcctgttttgtttgctactggttacaaattctattttctgtacaattagtcagactaaagttttcactgtgtttgtttggcaaaacaaattaaacaaaaagtaaggttttaaa

SEQ ID NO: 47773 - DNA, 775 bp, Homo Sapiens
  misc_feature (741)..(741): n is a, c, g, or t
  misc_feature (758)..(758): n is a, c, g, or t
ggtctttgactataacattgatgtttttagagatgggttcttctggttgatacagactatgcattgcgtctagcagatggggtaaaactggcctaaaacaagtctttgcagaatacatgccaatttccaaaaaaaaaaaaaaaatttgttgctcaggtgttgcacaatttttatctaacactgaggctatcagctccaactaaacaacatttcagtgggtgaggctgccctaacttccattaggggccatggtctcactgccatcacttattagccatgagaatttggttgtagttttcaggtaggttggtttcttcctcatttgcagcttgttgatacttgttcctttttatttattaacatcccaatcaatttgcagctgccatcattacataaatatttttctgttataaaaagaagtgtgatctgtttttttagtgatttcctttgtttgggaatagagattggaagcacatactcagacctgttttgttaactagaattctttaaaagctgatgccaaacatctttacagaggaactgtagttcacatccacctgtctgacattgtcccctaaaaacaagtgcagtgtggcagctgctgaatctgtctgttcagtttgtcaagaaggataattatgcttgggagagatctgaaagaaggtgaatattttgcacttttgatactcttaggaacaaataacttatttggcaaattgtttcttttttatgttttgggtnggtggtttttgttgttnggctgtgttgtttggtg

SEQ ID NO: 47774 - DNA, 670 bp, Homo Sapiens
cacccctctgagacgaaacttccagaggaacaatcaggcagcaacatttgctgttcaccaatatttgctgttctgcagcctctgctaatgatacccaggcaaacagtgtctgaagtggacctccagcaaactccaacagacctgcagctgagggtcctgactgttagaaggaaaactaacaaatagaaagacatccacaccaaaaacccatctgtacgtcaccatcatcaaagaccaaaggcagataaaaccacaaagataggaaaaaaagagcagaaaaactgaaaattctaaaaatcagggcacctctcctcctccaaaggaacgcagctcctcaccaggaacggaacaaagctggaaggaggatgactttgacgagttgagagcagaaggcttcagacaatcaaacttctcagagctaaaggaggaagttggaacccaacacaaagaagttaaaaaccttgaaaaaagattagatgaatggctaactagaataaccaatgcagagaagtccttaaaggacctgatggagctgaaaaccatggcacgagaactacgtgacgaatgcacaagcttcagtagccgattcgatcaactggaagaaggggtatcagtgatggaagatcaaatgaatgaaatgaagcgagaagagaagtttagagaaaaaaga

SEQ ID NO: 47775 - DNA, 532 bp, Homo Sapiens
ggccgctcgcccccagcccccacccgctttgaatgtagagacccgtgggcacttttccttttgtggtggggggtgcggaggaggtacccccacccctggcacagccgcctggaatgcaggactgtcactgctgttcgggtgatgacctcgttgccaagctcctcctgtccccttgttctgggggcaggcgctgtgcttctgtgaggtggtttagcttttgctttcgaagtggccagctgcggccaccaggtctcagcacaagagcgcttcctttgcacagaatgagcttcgagctttgttcagactaaatgaatgtatctgggaggggtcgggggcacgagttgattccaagcacatgcctttgctgagtgtgtgtgtgctgggagagtcagagtggatgtagagcgcggttttatttttgtactgacattggtaagagactgtatagcatctatttatttagatgatttatctggtaaatgaggcaaaaaaattattaaaaatacattaaagatgatttaaaaaaaaaaaa

SEQ ID NO: 47776 - DNA, 691 bp, Homo Sapiens
  misc_feature (12)..(12): n is a, c, g, or t
  misc_feature (15)..(15): n is a, c, g, or t
  misc_feature (20)..(20): n is a, c, g, or t
  misc_feature (36)..(36): n is a, c, g, or t
attggccctcgnggnccagnaattcggaacgaggtnaaatagcaattgtacttttctacctgtacccttttacataaagtgtttaaatttcagaaagatcttttattaagcatactttcacagaataacttgtttaaactatattcatataaaaaagttaaacacgctttttttcctgcctaaaacacaaatacaactgccagtatgtatttttaatggaaccctattttataatggtacgttactgaatgtgtttcatatgcgtgaccgttaagatattatcatttaggtgaaggtttcaactcaaaaccacccaacccggtggttaacgatttaatacatataaccaaaccggcagcgtttagagttgggatatacatttaaacattttcctggttaaggttcccaagagagtgtaaaggttttagcagaaagcaaaatatcttgcatctttatggaagtttaaagcatgtttgcaaatattgcagcccattgaaagaatttgcatgtacaggaaagttgtggatggagacggtttgtggaattttaagtgctcattgtagtaaacttttgctttgtagatttgaaggtacagacttatacaggcaagttcacaaaatcatgattagttacaaacagtaaaatgaagttaaaataaattattattttctatttgaaaaaaaaaaaaaaa

SEQ ID NO: 47777 - DNA, 511 bp, Homo Sapiens
attttttcttttgacataactatctttttgaaagcaatattatactgacagaggctcactgagtgatactttaagttaaatatgtagatcaaggatgtccaatcttttggcttccctgagccacattggaagaagaattgtcttgggccgcacataaaatatgctaacactgatgatagctgatgagcttaaaaaaaaaattgcaagaaaaatctcatgttttaagaaagtttacaaaaaatgtaaaatatttgagaataagttcatgtaattgtcttaagttttttatgcctttatatacttagctatattttttcttttgacataaccatctttttgaaagcaatattatactgacagaggttcactgagtgatactttaagttaaatatgtagatcagggatgtccaatcttttggcttccctgagccacattggaagaagaattgtcttgggccgcacataaaatatgctaacactgacgatagctgatgagcttaaaaaaaaaaaa

SEQ ID NO: 47778 - DNA, 632 bp, Homo Sapiens
gcacgaggcttggagaaagactaagtgaatctacttcaagggattctgttcatggtggtatacagttcttggtgctcttttggaaattgtcaaacatttactgatagcagaaaaggaaccccaaaacacctgtagtgttcaccttgttataagaacagaaacatttggaacaggtttcattctgtttctagatttatgttgttgtagttgaacagcaactgtttttttccctcagtgttaacgaaaggataaagactacctgtattgttgggtatgactatcaaaggatttccggtgattcatgtttgtgaattggagtttaaatgtttgcaggattactgtacttccaaagacccactagaatgtcagctgtactctgtactctccactgagaaaatgaacaaaatcctatgtcttaacagttatgctctaactttttgaaagctttttgatgtaaataataggttagaaactaaaagccttttaatcttacaaaatacaatttgaacgatggaaggttgttcagatactggctttctgtaaaaacatcattgtgttagattgtttgtaatgtactatcaataaaattggctgcttgggcagttttagttaccaccttaaaaaaaaaaaaa

SEQ ID NO: 47779 - DNA, 786 bp, Homo Sapiens
  misc_feature (12)..(13): n is a, c, g, or t
tggcttggtacnncggtccggaattctccgggatcaagcactataaatcccctagtgagctgctggagatctgcgagctcagccaggagaagatgagctctgtgtttgatgacagcaacgtgtacatgttgcacatgatgtaccaggccatgggtgtctgcttgtacatgcaggactgggaaggagccctgcaatatggacagaaaatcattaagccctacagtaagcactatcctttgtactccctcaacgtggcctccatgtggttgaagctagggagactctacatgggcctggaacacaaagccgcaggggagaaagccctgaagaaggccattgcaatcatggaagtagctcacggcaaagatcatccatatatttctgagatcaaacaggaaattgaaagccactgaaactatgcagcatttcagttttcatttaaacacttagttcagaaaccttaaaggatttgaatatttcaaattgcacacgtcactccagcatctctgtaaaataattggaatgaaaatacttcttgcacttaaacactgcacatgccgtactttgaggttagtctgaatcttgaactttaataccaaattaattttgaatgcttttgtttcctaagagataatggcatggtttcatatgttatactttggacagacagagttttaaaaatggaattattttttctttcatgcctcttgtaatgttctgaacaaacttgaatgatgaaagtattaaagagatatcagtaaaaaaaaaaaaaaaaaaaaaaaaagg

SEQ ID NO: 47780 - DNA, 566 bp, Homo Sapiens
gcacgagcattttttgggctgataacgtatgagcttttccctttgcactgaatgatgttctctccgtctcatcggcagtatggggggcagctgtcccagtgtcaatgtttactcaagggtgttcttaggaggcgtgcgctctctactatgccttgatgttgcctaccttattgtggtatcgtggagtttaaaagatcaagttaggatgctgacttaggattattaatgaaagtgttgcaccagttttttcatgttgtaaaactaaagaatttcgctctgcagtttgaaaaactgtggccacagctgtgacttgcagcccacctgccacccaggacgggccctgcactttgaataggctttccattttgttttggaggttctcactttgaaccttcttgtttacagatttttttgtttgttttttgagaaaaaaaaatgtttactcttccatcatttaaaaaaaatgtaaaagacaaaaaaaaaatggaggatgatttaaaagatgctttctatctctgggaaaaaggagcagcatttggccatgttcttttgtttttctattcctg

SEQ ID NO: 47781 - DNA, 950 bp, Homo Sapiens
ctcgtccgctcgtccactcctggcatttgggataaacatcctgtctcagacacacccttctcgtgcgcccatgccacctgctcaggcctatgccgcccgcccgtcctcccaagcgtgcacacccgtccgccatccttctcccgtctgtgccccatgggacagaggcctccagctgcaccaccactgctcgttaacagctgccatccacaccgaggaagcctcttcgagcccagcgagtggaggatggggctctgctgtgcacgtgctccctcgggccctcccagcagtggtagatggggctctgctctgtccttcttggtcatcttcctgggcctgcaacaaagctcagcccagcagccaggcagctccttacagaggctaacgccgggtctggtccctggtgaccccaggctgctgtgagaacttgtgacccccgagatcagaacagccttcgggtcccagagcttcccgcatgatcgtgtgtggaacagaccgggagattccagcagatatgggttcaacgttgaccaccaaccttgacaacccaagggctgcctcccctgaccatgacagccaactcctcctccacagtggctctgccaggcgccgagtccataaagggcagccactgtttggcaaggagggccggtctgccgggggctcccaggccctggggtcaggctgagagaggaagatgggtgtgagggtgcagcgggccaggggggcgggccctgccggctgtgctgggccgtcctgcaccccagcctgggaacccccggcttctcgcctgggcctctggggagcccgcgtccccaaatgttgccacatcaagaggcacacttctccggcagcacttccccaggcatgtccgtgggcttccctcggggggcagggcccccttctggacgctgagctgacctctctagcagcgcctctggtcatctgcccat

SEQ ID NO: 47782 - DNA, 583 bp, Homo Sapiens
ctaggaagtttaaagctgatggaacaggatacttgcaatcttgaagaggaagagcgaaaagcaagtaccaaaatcaaagaaataaatgttcaaaaagcgaaacttgttaccgaattaacaaacctaataaagatttgtacttctttgcatatacaaaaagtagatttaattctccaaaatactacagtgatctctgagaagaacaaattagaatcagattatatggccgcatcttcacaactccgtcttacagagcaacatttcattgaattggatgaaaatagacagagattattgcagaaatgcaaggaacttatgaaaagagctaggcaagtatgtaacctgggtgcagagcagactcttcctcaagaataccagacacaagtacccaccattccaaatggacacaactcctcactccccatggtttcccaagaccttccaaacacattggatgaaattgatgctttattaactgaagaaagatcaagagcttcctgcttcacgggactgaatcctacaattgttcaggaacatacaaaaagagaagaagaaatagaacagttaactgaggaactaaagg

SEQ ID NO: 47783 - DNA, 634 bp, Homo Sapiens
ccggattttccttcaatttttcctaagtccttgaattcaccagtagatttttgtaaacaaaatgtaagtcgatgttttctctcaattatcctaggagtgacctttatatgtgtggaagattaatggtatatgctccttatgtcactgtttttgagtaaaatccatttcctttctctgtttcagcctatgacaaaattgatgtttacaggcctgctttttgcttataattgacaacatgtgcaaaaataccaaatttgtgtcctgtgcagtatgaagaattcagtgaatattcattaatgtattagcttgttttgctctctgttcatatatggctctattcttagaaatataatttgaatgtgatctttcaatagtctgaatattttacaaattatagctatgtcttgtgaaaataacctcaaaaagaaaaatacgactctgttgtcttacttgatatttcttgccctagtaatgtacttgacatttatgttcctaagcagtgtaagtaccagtagaatttctctgtcaaactcaatgatcatttagtacttttgtcttctcccatgtgcttgaaggaaaaataaagtgtcactaccgtatttcttgttttcatcaaaaaataaaaataatttaa

SEQ ID NO: 47784 - DNA, 987 bp, Homo Sapiens
  misc_feature (303)..(303): n is a, c, g, or t
  misc_feature (306)..(306): n is a, c, g, or t
cataatatgcttcagggtgtgtaaaagaagaatctctttgtggctttcatgggcagggaatctcagagatagcaaatgccacctgaccagaagtctttgttatatggatgggaaccctaacttagggcttgggcaggggaaagagaaagaagatgagagattatacttcatgagtcttagcaatatgggagcaggttttcactgaattctgagggtgcctctgcatgtcctccaaggcaaagtttggcaaactgtggcccccccactgtcatattttgttaataaaattttattggaacacanaanaaaaaaaaaaaaaaaaaaaaaaaaaaaaaaaaaaaaaaaaaaaaaaaaaaaaaaaaaaaaaaaaaaaaaaaaaaaaaaaaaaaaaaaaaaaaaaaaaaaaaaaaggggggggggccccttaaaatttcccccggggggcccaaattttcccgtccccctttttttttgaaaaaggggccccctaaggggggcctttttaaaacggggcccggggcccttttttaacacccccggacgggaaaaaccccccccttgggatttttggaaagaaaactttcttttgggggggggcaattttgggcaaacacccccccaaaatatttaacgcccccgcggggaaaaaaaaaaaattttttaaggggggaaaagggggtgaaaaaaaaaccccgcaaatatctttcgcgcttttaaaaatttttttcttccccgggagttggtttttttaaaaaaattttttctccccgcggggcccgggggggtctccaaagggggtgtggggggttttttaagaaaatacacggccccccgggggggtttttttttttggggccccccacaagccccctaataagggggtgttgtgaagggaaaataaaacccgcccacccccccatatttttgtggaggggtttttctttggttcttaataaaaaaaatttcccaaaaatctccccccgggga

SEQ ID NO: 47785 - DNA, 786 bp, Homo Sapiens
tctgcctcagcggatgtacagtgttctcaccaaagaggactttagacttgcaggtgccttttcatcagatacttccttcttctgattcttctagcattactcgttggtggcttcagagacagtgctgcctcctcctgagggagggaaggtaccagggagaacctgggaggtcctggagagggccctgtccagttgggtgatcaggaatcaaaccagcatcggaaagacttcccagcaccaagcttgagctgtgtcgtttcgtggagggggcagcgaggatgggcttgagctgttgagagatttctgccctagagatggcctttgtatatgggggggtggtggggggacacaaacacatcagacactccgtcctcacactggcaggacggtgttcatcgcattctcttctgtgaccagcctctaggctagcggctgcattcgtggtctgtgcaaacacttcgtggttctatatatcagcagcaagtgtgcaaaataaaggacctgttaactcagatttctggatattttggtggtagcttctagtcccagaatctgtgtttttaaaatactacatgacattctgtctattcaatcacctggtggtcatctttcttgtactaattaactgttgatgagcattttggatattctaggagaaagcctataatttcacatagtttctctttttcctgtaactggaacctaaatgtattacttctgataaaactatatatcaaatgtccaaaaaaaaaaaaagggccggccgcctcctaaatatcccctcca

SEQ ID NO: 47786 - DNA, 688 bp, Homo Sapiens
gagagagtatgaagtcgacggcgcgccaattcggcacgagggctgcttcaaggccagagtcacaggaaggacttcttccagggagattagtggtgatggagaggagagttaaaatgacctcatgtccttcttgtccacggttttgttgagttttcactcttctaatgcaagggtctcacactgtgaaccacttaggatgtgatcactttcaggtggccaggaatgttgaatgtctttggctcagttcatttaaaaaagatatctatttgaaagttctcagagttgtacatatgtttcacagtacaggatctgtacataaaagtttctttcctaaaccattcaccaagagccaatatctaggcattttcttggtagcacaaattttcttattgcttagaaaattgtcctccttgttatttctgtttgtaagacttaagtgagttaggtctttaaggaaagcaacgctcctctgaaatgcttgtcttttttctgttgccgaaatagctggtcctttttcgggagttagatgtatagagtgtttgtatgtaaacatttcttgtaggcatcaccatgaacaaagatatattttctatttatttattatatgtgcacttcaagaagtcactgtcagagaaataaagaattgtcttaaatgtcatgaaaaaaaaaaaaaaaaaatggccttatc

SEQ ID NO: 47787 - DNA, 852 bp, Homo Sapiens
cttcagccatcttttgaaaacaagttaaaattctggaacttgtatctgtaatacaccctaactcttgtaaaagaaaataatttatcatagctggtgtcctttcattgaaagttgtaatactgtctctaaggagggaggaaaagattattatataattttataactggcaacatttgagttagtattgactttgtctaaaagaggcttgacttcaactgggataaaaatgtcagtgaattttgttaaagtagtaaaaatgcagttgacttagtaggaacataaaattatttcctaataagataatattgcactcctaccaaataaacaggattttagtaatatctgagggattgttgatggtgagttagactgtatttggcatagaatttggaaatgtaacttgaatgtaaatatgctgcaaaatgttgaatgtatacatagaaagactttttctgtcgacgccaaatgcccgttgtaaatgaaccttaaatattacattcctcctttgcacaataatatttctttataacacttatgatttttttcccccaggacaacaaactgcccttaagagtcatttcctcgcttatcacaggtgtcaatatttttctgtattgcgttcatacattttatctctttcaacataacaagtgtatcaaaataaactgcaaaacaccagcgacaagcaaaaaacaccaccatgtgtcggagcaccggcggccctgaaaaagagccgagaacacaaccgatgaacgccgagccccggtggaaacgacaaggcgaaagcaagtgccggaaaaacaggcagagaaagcgacggaaccccaaaagaaaaaccccggcggaccagag

SEQ ID NO: 47788 - DNA, 558 bp, Homo Sapiens
ttttttttttttaaggtttgactaattgtatccatctcattgtacagtgttttagttgcaagcagaaagtagaatttggtataaagcaggttatttctatattgaaaggagtacagttgaaattgtagatttaagattgttaaaatcatgacaattctaacttgtctattctaacctattgtgtacaatctgattttttaaaattgtaaacatgtatgatcttggtttcatgtgtttttgaaagtgttattgtttaaaaaatgaaaaaagcatatctgctaaagagctgtcagttttcattactgactctgtaaaatacactgttctttgtgtactgtgtgttattttgccagctgctgcattagccttcaaaagtatttggaaacttaagatgaactacatttcttgcaaagtacattcctttctgtggtattttgtcctgtaactgaagtatagtaattattttatggaaatgttagcaattctgtaccaactttgaataaaatgaaaaatttaaaaaaaaaaaaaaaaaaaaagcctacagccgcgcctcgtgcc

SEQ ID NO: 47789 - DNA, 352 bp, Homo Sapiens
atacccacacacgttctgggctgacctttattttatcaataagctcaatattacttagtataaaataagatgcttcagcaaaagtcattctctctttaaccatataatttaaaaactcctcttcacgattgatagcaaaatcaggaacgttagggcaccagtgagttgaaaaaactggtcttaagttggaaaaactattattaataatattatcctatccatccatatctattgaaattgtacaggtccataatttcattttaattaattataggaaagaagaaaagataatacccatttgttctatcacccctctccctatcattaactatcaaataaataaataaaagca

SEQ ID NO: 47790 - DNA, 567 bp, Homo Sapiens
tcacgctttatacttctcataacagctctattatttaaaaaacaccaagtatttcttggtaatccactgactcctcaatgaggtgcccaaattttttgaacaaagcattcatcaaatttgactaattaaaattgatgtttaattagtttaaccattcaggcaagtagttctaacctctaaaccacacctcttttttatttttatttatttatttatttttgccatttcaggtcttttgtggtttcatatgaatttcagaattgtttttcctatttctgtgaaaaatgccattgacattttgatagggattgtgttgaatctatatatcgctttggatagtatggatgttttaacactattaattctcccaatccatgaacatgaaatatctttccattcacttgtgtcttcttcaatttctttcatcaatgttttatagttttcattgtgcagatctttcacttacctggttaaatttattcctacaatttcattctttttgatattagggtcaattgaattattttcttgatttctataaattatttattatcatactcatacttg

SEQ ID NO: 47791 - DNA, 717 bp, Homo Sapiens
gcctgtcggcagctttcctgttcacctttgttggagccctctgtaggcctcctccctcctccccacgccttgctcccacacccctctcctcgtccctcctggtcgtgccccgtctcttttggtcctggctccagaaaacccgcgccccacatacctgcatcttccgctgtgacctccggagccctgcctgcccctgctccccagctcctcctgcctgcacccgactcggccccctcctgacttgccttatttatttgttcgacgcgtctctgaatgtatccgcctcggttcccaccactgccttcgctgcgcacgcccctcgtgtttcagggctgaccgtgtccccacccgactccgcatgtttgcgtctgtttcctccctctctggccctgtcttatcccatcacccgactctggccactgacctcagggccgaaggggaggtggtgtacataggaacgcgttgcggagtccgccccgtcccccgaggggaggggtcttgtacatactgtaacatacagagtatagtgaagaatctatttaaggcgccgcggggagggctgcacggccgggcttgtggttctctagcgcggcgggggcctcctgccggctccacgggcactttctacttgtgcatgggcttggttatacgaattgccattaaacatcgctgcaccaaaaaaaacaaaaacacacaacacaacaaaaaaacacaacc

SEQ ID NO: 47792 - DNA, 903 bp, Homo Sapiens
  misc_feature (714)..(714): n is a, c, g, or t
  misc_feature (756)..(756): n is a, c, g, or t
  misc_feature (796)..(797): n is a, c, g, or t
  misc_feature (903)..(903): n is a, c, g, or t
cacctgtgttttcttgagttctccatataaggagattaacaatttgtttggtaaaacaggaacgtataatgtttccaccccagaagcaaccagctcatccctggaaaactcatccagtgcttcttcgttgctcaactaagaacaggataatccaacctacgtgacctcccggggacagtggctgtgcttttaaaaagagatgcttgcaaagcaatggggaacgtgttctcggggcaggtttccgggagcagatgccaaaaagactttttcatagagaagaggctttcttttgtaaagacagaataaaaataattgttatgtttctgtttgttccctccccctcccccttgtgtgataccacatgtgtatagtatttaagtgaaactcaagccctcaaggcccaacttctctgtctatattgtaatatagaatttcgaagagacattttcactttttacacattgggcacaaagataagctttgattaaagtagtaagtaaaaggctacctaggaaatacttcagtgaattctaagaaggaaggaaggaaggaaggaaggaaagaagggagggaaacagggagaaagggaaaagaagaaaagagaagatgaaaataggacaaataagacaaccacattagggccatattgtagatttccatgttatgatctatatatcactcagtgcacattgagatttttttttaatggctcanaatggaactgaaagcagtcatgggaatgaatctttgggcagnatcttctgatgtctcttagctaagaggagaaaaaaggctnngaaattgggaggaaattctttatcaaacgacttcagtggataccattttataggaatgatggaaggaatttgatcctcctgaactaacttgtttgttaagttggan

SEQ ID NO: 47793 - DNA, 662 bp, Homo Sapiens
gccctcgaggccaagcaacagggggaaaaaaagatacccagattccaaggacctcacgatggtgctgaaaacctatgacaccagcttcctggactttctcagaaggtgtttggtatgggaaccttctcttcgcatgaccccggaccaggccctcaagcatgcttggattcatcagtctcggaacctcaagccacagcccaggccccagaccctgaggaaatccaattcctttttcccctctgagacaaggaaggacaaggttcaaggctgtcatcactcgagcagaaaagatgagatcaccaaagagactacagagaaaacaaaagatagccccacgaagcatgttcagcattcaggtgatcagcaggactgtctccagcacggagctgacactgttcagctgcctcaactggtagacgctcccaagaagtcagaggcagctgtcggggcggaggtgtccatgacctccccaggacagagcaaaaacttctccctcaagaacacaaacgttttaccccctattgtatgacctttgctgagggtatgtcctgctcctttccaccagtgatttgtattaagacagcacttatattgtacaatacttcagactgttttttttaatacataaaactttatgttaaaaaactctaaaaaaaaaaaaa

SEQ ID NO: 47794 - DNA, 583 bp, Homo Sapiens
  misc_feature (539)..(541): n is a, c, g, or t
  misc_feature (543)..(544): n is a, c, g, or t
  misc_feature (546)..(552): n is a, c, g, or t
  misc_feature (555)..(555): n is a, c, g, or t
  misc_feature (558)..(558): n is a, c, g, or t
  misc_feature (560)..(562): n is a, c, g, or t
agaaggctgggagggctgcgcgggctgcgcgtcgccatggagcccgacgggacttacgagccgggcttcgtgggtattcgcttctgccaggaatgtaacaacatgctgtaccccaaggaagacaaggagaaccgcattctgctctacgcgtgccggaactgtgattaccagcaggaggccgacaacagctgcatctatgtcaacaagatcacgcacgaagtggacgaactgacccagattatcgccgacgtgtcccaggaccccacgttgccgcggaccgaggaccacccgtgccaaaagtgcggccacaaggaggctgtgttcttccagtcacacagtgcgcgggccgaggacgccatgcgcctttactacgtgtgcacagccccacactgcggccaccgctggaccgagtgacctcctctctcccccgagtgtaataaacaccagattccaaaaaaaaaaaaaaaaaaaggccacatgtgctcaacctgcaggtcgcggccgttaaactattctaagacatctccccccccaaaaannngnntnnnnnnnttnttntnnntattttttttaaaataatttt

SEQ ID NO: 47795 - DNA, 831 bp, Homo Sapiens
gagcgggagtcttgttgagcccctgccggccagcctggcccccgacagcgaggaacactcccttggaggacaaatggaggacatcaagctggaggactcctcgccccgggacaacggggcctgctcctccatgctgatctctgacgacgacaccaaggacgacagctccatgtcctcatactcggtgctgagtgccggctcccacaggaggacaagctgcactgcgaggacatcggagaggacacggtcctggtgcggagcggccagggcacggcggcactgccccggagcaccagcctggaccgggactgggccatcaccttcgagcagttcctggcctccctcttaactgagcctgccctggtcaagtactttgacaagcccgtgtgcatgatggccaggattaccagtgcaaaaaacatccggatgatgggcaagcccctcacctcggccagtgactatgaaatctcggccatgtccggctgacacgggcgccttcccgggggagtgggaggagagggaggggagggattttttatgttcttctgtgttgagttttttctttctttcttttaaattaaatatttattagtacctggcttgaagcctagtgttttcataatgtaattcaatgaaaactgttggagaaatatttaaacacctcaatgtaggtacattaactcttgttgcggggaggggatttaccagaatacagttaatttcgtgaattctaaaaaaccaaaagatgaatctgtcagtgatatgtcgtgtaattataaccttattcactccttgctgttgagcctgaatacactggcgttgaacaacctt

SEQ ID NO: 47796 - DNA, 763 bp, Homo Sapiens
  misc_feature (706)..(761): n is a, c, g, or t
ccgtccacattgctccagggactgggaaggcgatgcctgtcgggagctgctggtggagagactcgggatgactcctgctcagattcaggccttgctcaggaaaggggaaaagtttggtcgaggagtgatagcgggactcgttgacattggggaaactttgcaatgccccgaagacttaactcccgatgaggttgtggaactagaaaatcaagctgcactgaccaacctgaagcagaagtacctgactgtgatttcaaaccccaggtggttactggagcccatacctaggaaaggaggcaaggatgtattccaggtagacatcccagagcacctgatccctttggggcatgaagtgtgacaagtgtgggctcctgaaaggaatgttccagagaaaccagctaaatcatggcaccttcaatttgccatcgtgacgcagacctgtataaattaggttaaagatgaatttccactgctttggagagtcccacccactaagcactgtgcatgtaaacaggttcctttgctcagatgaaggaagtagggggtggggctttccttgtgtgatgcctccttaggcacacaggcaatgtctcaagtactttgaccttagggtagaaggcaaagctgccagtaaatgtctcagcattgctgctaattttggtcctgctagtttctggattgtacaaataaatgtgttgtagatgannnnnnnnnnnnnnnnnnnnnnnnnnnnnnnnnnnnnnnnnnnnnnnnnnnnnnnngg

SEQ ID NO: 47797 - DNA, 516 bp, Homo Sapiens
ctgtaatttattgacctcaaaaatgctgcataacagacctcactggggcagggaggatccccagggctcccaccctccacttggcgggccccgtggggccaggtgctgaggggagcctctctgccccacccatcactagcttccctctgccctctcccaccccgggggggacccaggtggggcactggctcatttctcgcaaatacctcgaaggggaggggggagggatggggttatagctgttttttttaattggaactggaagagggatcatgttttgttttatgcccttcccagaaggggggagggacaccgggatcgcactcctgtactggccaccgccgctgtcacttgtcacattgagttcatgtcccttgagagtttgtataaattcaggtcagagctgcagctacacagctgcccagtgtcatagaaaagcaattcaccaacgactgatctctccattcagaagtgtgcagtcttaaatgtacagcgataagaaactgttattttatg

SEQ ID NO: 47798 - DNA, 805 bp, Homo Sapiens
  misc_feature (41)..(41): n is a, c, g, or t
  misc_feature (692)..(692): n is a, c, g, or t
  misc_feature (724)..(724): n is a, c, g, or t
  misc_feature (727)..(727): n is a, c, g, or t
  misc_feature (744)..(744): n is a, c, g, or t
  misc_feature (746)..(746): n is a, c, g, or t
aatgcttaagttcttttttttttaaagcgctagatgaccancttgcccctcaacatctgctccttggcaacatcaaggggaacgactagccaacatgcctatggctaaaaactttcctttgcagactaaagcactgcttggtgcttcgtttttctacccttcacaacatgtgtgatttcatctaagagatatatacatgtacacatgccctttgtttccacctggatacaagatcactcatagctaattaggaccattgttttttgttcatctgtcttgttgcatgaagggacattagacccatttccattaaaataagttcttggtgataaactgtggcactgctacttctttttaaatccactttatgatttcaagatggacacttgtaagatgactcgacacaaggccattgcctggaagccccagagctttcctctgtttgtatggcccgttcatgtcccaggcattgcaacacaaactcctcaagatttcaccacaacatgacaagcattttcctaactgatattagcacaatttaactaataagccccttcgctctctagttggccaggcttaacctaatacacatctaacgtgtgtgccacacggccagtagaaagtttaacttcagcttcagggcaaagatacccactcacaccgtgtcaacgcaagcagtagttcctggcctncagagcagcttacttttccctgaagaacgctntgntttcctttatgcccttntnctgttgaccacttttacacatttaaaatgtattttgttgtgagaaataaattagctgca

SEQ ID NO: 47799 - DNA, 534 bp, Homo Sapiens
aaggactgcccacagtggtgaaactggtagccagaaaccccttattaaaagagagagaagaaaagagccgggttgaagaggagaagaggaagaagaaagaggaggcggcccggaggaaacaggaacaagaagcagcaaagctggccaagatgaagattccccccagtgagatgttcttgtcagaaaccgacaaatactccaagtttgatgaaaatggtctgcccacacatgacatggagggcaaagagctcagcaaagggcaagccaagaagctgaagaagctcttcgaggctcaggagaagctctacaaggaatatctgcagatggcccagaatggaagcttccagtgagggggcacaggactgactttttaaaccattgtggactagtggctgctgtctgcctcagtgacaatgtcccagcgctcctatcatgtttacagtcacccttgggtcctaaattaagagttgtgttcatgtaggttcgtgtcgtcgttggctctgagacattgataataaatttttctcaacagtg

SEQ ID NO: 47800 - DNA, 656 bp, Homo Sapiens
ttattcagaacaaaattcatagcttacggtagtaatggcatggattaattttatttgcatgcacacacagacacacatacttcatatatgcaaattatagcattagtttttgatatatctagtggtttttttttcaaaattgcaggaggttgtagattaaattaagtatgatagcacgttttttaattcattaatcatgaagtgctctgttccctaagttatgacatttagaagaaatcacatgctcaaccttaatctgagaacctaagtgtttttgagcattccagtaaaggagtagtgttcttttcctaacttacatcagggtacatctgtgtggcacacagatactatcttttcattcttcactcccagtcttaatttctttcccctgtatgtcactgtattttatgtcacttcacattgtgttaaacagggtaaatagagatcctcagtatctcagtgctgtggcatagctccaataggtgtgctgtggtgcactgcagtgatgtatttgcataacattgtttgatagtgaaaaattttttttcggttcaagtgttttgtgattaaaattttatgtttaattaaaatattgcataatattgatgggttcaaaaaccattaaaataatcaaacaattaaaaaaaaaaaaaaag

SEQ ID NO: 47801 - DNA, 500 bp, Homo Sapiens
actaatttcattattttaaagtaatcagtttttcaaatcatgattttgatatcattattctaaggagttatctcaaaggcacaaaatatgaattctgcaagaaggctattttttattgtagtttgaatgggttaggaaaagcctcaatttttcactcttaagtccttcagtacatttttctttcatcttattacttatgcaagttaaggttctttggtaacagaattcttgcaactgtaaaataaaactacatagatgtaagaagtcatgtaaacggttaacaagcttaccaaggttagcaaaactttcattgtaaatcagtctgtactgagcaaataaaaatcattattagttgtataaacacaaattccattttgactttcaggatgtcatactacttctgtacctagcattttcagtccttatatttgcaatgttacacaaactgtactattttcttttatgtgcagtttgcatgagtaaaccatcagagaataatc

SEQ ID NO: 47802 - DNA, 720 bp, Homo Sapiens
  misc_feature (597)..(597): n is a, c, g, or t
  misc_feature (720)..(720): n is a, c, g, or t
taaacaggcagccatgttcacgatgccttctatgtcttaccatatttttaattaacctgttaaatacagcttaaaatatttttattttatttattctatttttactgaaatatactgcattattgtgttaatgtattctctttcctggatattatctcccagtgtatccagatctaagtaatctcagtgaactatacattgcctaaaaagtggttttgtaatgatttgtagtcacatttctattgggatatgtagaagaaaaggcaaaatgcttaaagttccttttattttttaaaagcagctagatagacacagacttgccacctcatacatctgctccttggcaacatcaaggggaacgactagccaacatgcctatggctaaaaactttcctttgcagactaaagcactgcttggtgcttcgtttttctacccttcacaacatgtgtgatttcatctaagagatatatacatgtacacatgccctttgtttccacctggatacaagatcactcatagctaattaggaccattgttttttgttcatctgtcttgttgcatgaagggacattagacccatttccattaaaataagntcttggtgataaactgtggcactgctacttctttttaaatccactttatgatttcaagatggacacttgtaagatgactcgacacaaggccattgcctggaagcccccagagctttcctctgn

SEQ ID NO: 47803 - DNA, 707 bp, Homo Sapiens
  misc_feature (689)..(690): n is a, c, g, or t
agaatataaattgattattttttttatttaaagggatagttgattcctggggtgttttgaaattaagttggaattaagttgcttaagcatatttatgttgtgagaaaccttaatatgaggtttatcatgccctttttcaagcagatttatgagcagatttctgtcacataagtcgtcttctgcttgagtatcctaatatttcaatgcatcaggggagcgctccactggataagcattttatttcccgcatggcatagtgtttttgcactaaaggctcaaagtgtgagaacctgttctggatttgtttgaaattatttcaccaataaagatcataaataaatgtttctttcaagaaaatatatttggatggcctttttaaagtaacaggatatttaataagagtcctagatggccagcggagactttaagaatcattgcctctagctgggtgtggtggcatgcacctgtagtcccagctatttgggaggctgatgcaggagaatagcttaagcccaggaatttgagtctgggagtttgagtccagcatgggcaacataacaagaccccatcccttattaaaagaaaaatcatgtaggcaccttaccaatatatgacattaagtgagagtgaatcccttaggactggaacacttcaagctcaaccaactgactcagttgtcattcttcacnnaaagatagtagaggatc

SEQ ID NO: 47804 - DNA, 616 bp, Homo Sapiens
taaaattgcaatgacttaaataatgaggttgttaattagagtcagagcctgttcacatattgtgatcaggtagcaatgacatgtaccacttaaattattttatcgtcgatttggtagttcgattttaactactcaatgaaaacagccatgaatatcttttcttaaagagagttttgaaaatgatcacttacctaaaacttgaaagctatgaattagttatccatactctcatgacaattttgttggtgaacaacaaaaaagagatctatttctttaaaagatatttgtgcagaaactgcatgtaactctaagttttactcctaacatacatatgtttggggaagtattctattctatacttgccaatgtggagaacaaaatagttttttaagaatgaagaagtatatatatccattctgtattttacgtgcagcagaattatcttccgtaggatttttttgtgtattcacaaggtgatatttgtattgtaaaacaataatggtgaaggaaataaaaaggcttttaaaattttgtttgttttaaatctttgtaaagttattattccagagagtatactgggtatcttacagcttacctagatcataaattaatcaaa

SEQ ID NO: 47805 - DNA, 740 bp, Homo Sapiens
  misc_feature (683)..(683): n is a, c, g, or t
gaaaaaaagcatttttctaaatgctcaaatgttatcaaaatactatatttatagaagtaatcttctctgttaacagccaagatttgctgttagaaataactcttgtgagttttatattgtgctttttggaggttctaatcatttcagcagtagcgtcttaaacagcagtattactataagcagttgcttcaaaatgtgaattaacttgttgaaactgtggctttaacatccatgtgactagtgtatatggtatttgctctccattagcaaaataattcattgttaggtaaacttcattagtgcaaattgcagatctgtgagcaatgtttcctattgaatataaactactgtctaaaatatacatatcagcagcccagcctttatcaggaaaattatacttggcaagttgctgaaaatgcacaaagttatgaaagttaaaggtatgctgcaaataactagccattattctatgtattattaaatatttactagttctgttaaaagcagagcagaagttagacactaaggatctctttgtgaactctgtgttctctatattagattgctgtttatatgtaagaattttattgcttatgtggcatacaatatttataactataaactttatagaagtacagtattaaagtcagtggtacacagacattctgtacatatcctgtganacgtgctgtcatatgaaataaatatatctgtctttaaaaaaaaaaaaaaaaaaggac

SEQ ID NO: 47806 - DNA, 953 bp, Homo Sapiens
atgagaaatttaagagcacggtccccaacgcagaatcaaaatcaactcaagaaagggaaagagagaaggagccatccagagaaagagatatagcaaaggaaatgaaatcaaaggaaaatgttaaaggaggagaaaaaacaccagtttctgggtccttgaaatcacctgttcccagatcagatattccagagcctgaaagggaacaaaaacgccgcaaaaatgatactcacccttctccatcacattcctccacagtaaaggacagtctcatcgaactcaaggaatcttcagcaaagctctacattaatcatactcctccaccactgtccaagagtaaggagagagaaatggacaagaaagatttggacaagtcaagggaaagatccagagaaagagagaaaaaagatgaaacaggacaggaaagagcggacaaagggatcactcaaacaacgaccgtgaagtgccaccggacttaaccaagagacgtaaagaggagaatggaacaatgggggtttcaaaacataaaagtgaaagtccttgtgaatctccttatccaaatgagaaagacaaggaaaaaaataagtcaaaatcttcaggcaagaaaaaggcagtgattcatttaaatctgagaagatggataaatctactccggtggcaaaaaggagtcaggcatgataaagaaagatagaaaggaagagaaagggacagttaaggaggaacggcagagaagaacataataagtctcggacacgaaagattaggaagattcactcaagggaaaccggacgagaaaggatcggaaggaaccagacaataataaccagaagaacatgccgaaataagaatgaaagggccaaggaagacccacaatatacatacacgggtaatggcacagaggaaaataaagagcaaatgagacaaagaaaacacagcaggcaaagacgtatatagaa

SEQ ID NO: 47807 - DNA, 531 bp, Homo Sapiens
gctagtccagtgtctatatttaaacttgttcttttcttttaataaagtttaggtaacatctcctgaaaagcttgtagcacaaaggctcagctggggatggtgtttgacttcggaggaaaaaagttgctattgcccgttaaaggcactagagttagtgttttatccctaaataatttcaatttttaaaaacatgcagcttccctctccccttttttatttttgaaagaatacatttggtcataaagtgaaacccgtattagcaagtacgtggcaatgttcattccaatcagatgcagctttctcctccgtctggtctcctgtttgcaattgcttccctcatctcagtagggaaaaaattgagtgggagtactgagatgtgtgggtttttgccattggacaaagaatgaggttagaagactgcagcttggagtctctctaggttttcaactatttcttcacaatttgaacacttgacggttgtcccttttaatttatttgaagtgctatttttttaaataaaggttcatctgt

SEQ ID NO: 47808 - DNA, 710 bp, Homo Sapiens
tgactccccagcgtggagatgtctacacctgccacgtggagcaccccagcctccagagccccatcaccgtggagtggcgggctcagtctgaatctgcccagagcaagatgctgagtggcgttggaggcttcgtgctggggctgatcttccttgggctgggccttatcatccgtcaaaggagtcagaaagggcttctgcactgactcctgagactattttaactaggattggttatcactcttctgtgatgcctgcttgtgcctgcccagaattcccagctgcctgtgtcagcttgtccccctgagatcaaagtcctacagtggctgtcacgcagccaccaggtcatctcctttcatccccaccccaaggcgctggctgtgactctgcttcctgcactgacccagagcctctgcctgtgcacggccagctgcgtctactcaggtcccaaggggtttctgtttctattctttcctcagactgctcaagagaagcacatgaaaaacattacctgacttcagagcttttttacataattaaacatgatcctgagttatctgtattctgaactttcttaattgagaagaggcaggaaatcactgcagaatgaaggaacatcccttgaggtgacccagcaaacctgtggccagaaggaggattgtaccttgaaaagacactgaaagcatttggggtgtgaagtaagggtgggcaga

SEQ ID NO: 47809 - DNA, 581 bp, Homo Sapiens
tttctggttgggaagggaaggccaggccaaaagctccaccggccgtatagataatgtactcgcagttttgtatcttccattcatactttaacctacaggtcatttgagtcttcacacaaataataacctatctggccaggagaattatctcagaacagaagtcatcagatcatcagagcccccagatggctacagaccagagattccacgctctcaggctgactagagtccgcatctcatctccaaactacacttccctggagaacaagtgccacaaaaatgaaaacaggccacttctcaggagttgaataatcaggggtcaccggaccccttggttgatgcactgcagcatggtggctttctgagtcctgttggccaccaagtgtcagcctcagcactcccggaactattgccaagaaggggcaagggatgagtcaagaaggtgagacccttcccggtgggcacgtgggccaggctgtgtgagatgttggatgtttggtactgtccatgtctgggtgtgtgcctattacctcagcatttctcacaaagtgtaccatgtagcatgttttgtgtatataaaa

SEQ ID NO: 47810 - DNA, 634 bp, Homo Sapiens
tgttgagtctctgctccgttttgtacagtcacagggaattctgatctgaaggggcaccttctgttcactcccacaaagtggtgtctggttctcactgagacgttttaagatttttccacaaatatttatatgtactaaatgtggaaccattagaaagttcttccaaaatctcattccagcatagttttggatttttcttttgtcttattttaaaataaggaagtcgagatgactttgatcattggtaacttgggcctgggccagacaaagtataaaacttacaaaagaatattctcatttggtcttaactaggtagatgtaatatatgactttttataaaaagggtatctatatgaacttgacacagtattttcagcttttgtattccatactaaagccatgaagaactacacgtaacatcatcatttgtattaattgcacaactccaatgctaaaggttggattgtgttagaggaatcggctctgtatttgcctctagagaaacacagtgttctctttgtatttatggattcctttttaccgtgtcacatttactttggtcctctatgtatttaaatgtttgaagtgccttagactcttgccatattttcaaaataaaattccattaagctct

SEQ ID NO: 47811 - DNA, 470 bp, Homo Sapiens
  misc_feature (52)..(52): n is a, c, g, or t
  misc_feature (54)..(54): n is a, c, g, or t
  misc_feature (71)..(71): n is a, c, g, or t
gaaagcctgagtttgggagcctgcacccacccctgatgaagctccacgggananaatacagagcctccagnagtgctatggtccaggctggcttcgtttttccaaggagcctttggtgagttcaattatctggtaaatatccagcgcttcacctgaaagatagtgcaaattggttaggatgccacctcaagaactgtaactgagagctcagaagtgagcaaaggagcttaatgctaaggtcaaaaggagagtgaaaggttgagaacaattgccacgaacggtaatgttacatgttaggagggtctgttttctttttatataagtgtgtcttagatatattttaaatagaaaataagctttctgatttacttgtttggtatttaaagcacagtttgtttttctgtcacctatagagtgcaagaatgcactcctatagaataaattccctttaaacatttaaaaaaaaaaaa

SEQ ID NO: 47812 - DNA, 874 bp, Homo Sapiens
  misc_feature (813)..(813): n is a, c, g, or t
tctagaagaagtggactggctaatcaccaagcttaagggacaagtgagccaagaaaccttatcagaagaggcctcttctcaggcaaccctaccaaatcagcctgttgagaaagctatcatcatgcaactgggaactctgcttacatttttccacgagctggtgcagacagctctgccatcaggcagctgtgtggacaccttgttaaaggacttgtgcaaaatgtacaccacacttacagcccttgtcagatattatctccaggtgtgtcagagctccggaggaattccaaaaaatatggaaaagctggtgaagctgtctggttctcatctgacccccctgtgttattctttcatttcttacgtacagaataagagtaagagcctgaactatacgggagagaaaaaggagaaacctgctgccgttgccacagccatggccagagttcttcgggaaaccaagccaatccctaacctcatctttgccatagaacagtatgaaaaatttctcatccacctttctaagaagtccaaggtgaacctgatgcagcacatgaagctcagcacctcacgagacttcaagatcaaaggaaacatcctagacatggttcttcgagaggatggtgaagatgaaaatgaagagggcactgcatcagagcatgggggacagaacaaagaaccagccaagaagaaaaggaaaaaataaatgaaatgcctgagttaatggtgaactttggggcttctgcttcatttttaccaacaagcaacaatgccccttgtcctgtagtcacaccgatgttggcatcttgggtctgnacccactgaattcaactgcaccttcagttagaaggaatcttcttggcaagtcctgctactg

SEQ ID NO: 47813 - DNA, 671 bp, Homo Sapiens
aaatgtcctcattatgtagaatggaatgtgaaaattatttttgttaaaacaggattttgccacaattatttaaatattatgtttgtgaactatctaagcatgagaaaatacaaagctttctttgtatctggctgatactcatttggatgattctgtgactcatagaacatgatgttaaatgagaccagactcaactgccaccagtccccagctgcagaccttcatccccttcatctcccactaggggctcgtggtctggaagaaacatgtatcaagcaacacagccccttatcccagatagaaaagtgtctcaaatgcattctactgcgggacagtcagtaggatcattttcataaagcaaggacatcatatgtttctagaaattacaagcatataactttagcctacaatctcttattaaaaatttttaacaaaattgtattacaaatgcatttcatcagaactcaaatttaaatggtgtttgttttgggtttttaataatgctgaagttattccatataagtatcaagttaaacacaattcattttgattataaactatttgactttttaaaatcttctgacacagtaaatatatatatcaagattgatgtatcaaaatttattgcacactttaaagtgtaaaatcattttttaaaatcttgaatccac

SEQ ID NO: 47814 - DNA, 554 bp, Homo Sapiens
tttttcttctcgtttttttttccaaagcaggtaaagagggtagcacatcattccgatgctttgctcaaaaatgcatattcctggtggggatggaggaagaaggcattagtaaaaggttaatcaaacgttacaacttaaccccattcatgtaggaataaatcaagtgagcagttccagacttttgcataatatttttactatgatgctgttttattaatattttctaaatttcaaaacaaaaagtgaatgtttgaaattgctgggtcccgatgttggtggctgttggagttttggaccactcgctagcagtgatttgaagattataattagctaaaatccaaaacaaaaaaccaacaacaaaaattgtatggtgcggaacatgcaccttgacaatggtactaacttgttattctatagaacacgttagaatagatctatttttgccagagcaccctccttcagtcctccgattacatttcactagagttccttacgagattgctgtatattcctgggaccttttttaaaaaaaaaaaaaaaaaagccctcgtgcc

SEQ ID NO: 47815 - DNA, 676 bp, Homo Sapiens
  misc_feature (546)..(546): n is a, c, g, or t
  misc_feature (548)..(548): n is a, c, g, or t
  misc_feature (569)..(569): n is a, c, g, or t
  misc_feature (577)..(577): n is a, c, g, or t
  misc_feature (588)..(588): n is a, c, g, or t
gatgttgcggggtgtgatgctgttgaggagattcaccttcaattgcactgctccacagagccctcatataaggccaatcctaatgggctacctcggctttaaaagttaatttcagtaagtcctgtttcaaaagtttgtctttttttgcttctaccttcagtgccactattttccactgcagtgttttgacttcacaaactgcctcctccagagagaacaatgtattgctgaaaatgggcagtagaagcaaatgctgttgttacatttgacctataaagtattcagagtgactgctaggtagaaattaaaacttagctttcccaaatagctccttattttgcaccttataaaaagtatactaattgttaattagatgttgcttttgtttatacaagcattcccaaagaactagatttggattttgttttgagtttttggatttttaaaaattatcttatttagattgactaacagcatacttacaattttaaaagaagctgttgttcagttcatcttaccagatgtgtctggcgaagtattcagggntngatggactgctttactttcgnttggaagngatagctaagnttattatactctatattaaacaactttgttcatttcactgaggaccttatcttccttatatttcagaacaaagaagcaacaagcgtga

SEQ ID NO: 47816 - DNA, 823 bp, Homo Sapiens
  misc_feature (4)..(4): n is a, c, g, or t
  misc_feature (34)..(34): n is a, c, g, or t
  misc_feature (817)..(817): n is a, c, g, or t
actncctatagggaatttggccctcgaggccagnaattcggcacgagcggcacgagcgggaggtggagattgcagtaagccgagatcgtgccactgcactccagcctgggtgatagagcaagactgtctcaaaaaagaaaaaaaagaaaaaattttaatttaatccttctgtagaaacaggcattcagaaccattccattgatcttaataaagctgctctttactgtttctagtcaaaaatgagacttcgatcaaaccataagattttatactgcagatagtcagcttcaccaaagccgcagaggaaacatgtcgagatcaggcttcctgcttgatagtctcttgactaccattaaaacgaatattgggaggtcatgaaagtcattggtaggccattagcattgatatctttaaaacatctaccctaaaccatctgctatggacccataataagaggcctgttgtatatgaaattgtctagaattcaggtgcaggtctttgccggttaagtaagggagcaacacgtaaaatgggagaggagtggggtgtactcacttgcctcctcttttgtcctgatttaaccagcatttttcaaccctgggaaaatttgcagaatctaagttgattgtaatgattttgagctgcagcagctttaactcttaccctttttccacatagttatggtgtttgagttggaaagaaacaactataggtagctacacgtacataattatctctttattcacaaagggtatagtaaaattgattgtaaataactttctaagtgccaatattcaaaacttttggattaaaatgnattttt

SEQ ID NO: 47817 - DNA, 619 bp, Homo Sapiens
ttaagttatccaggactccaagaaccatagttactgaaaagggagtcctgatacatctaatattggtagcatgtaacagtgtttgacaaagagtaagtaagcagtattcttgggagtcagtgttatgtgtttcagcagagtattattttgtatatgtatgccattttctccctgcaaagcagctcaacaagagaaaaagctctagttatagggcttaaattgatttctatttcaaataatttcctaagagattctagagtagaactgaagagtattctattggaaaagtgaaaggaaagaaatgtaattttctttgaacatgaaaaagaaaacaactttgagagtagtcatttagcagtagatgtgcattattatgagaaaacagttctataagtccagggttaattatattaattggaatgtcagtctttaatgtcgagcttattgtagggtagaaaagagctttctactcagctaacgattactcattgatccaaaacttaaatacatctataatttcctggggctattgtgagtactgtgtatgtatttagcaaatatttaagacctagtaagtgctcaataaattgtagctgttattgctgttgttgtttgtaaa

SEQ ID NO: 47818 - DNA, 709 bp, Homo Sapiens
cataaaagctggagtctcagctccaccgcctccgacagctgctggagcagcctgaatctgattcccgaatcaatggtgtttccccatgggcttctcctcagcattctgcactgagctactcgcttgatccagatgcctccggcccacagttccaccaggcagcgggagaggacctgctggccccaccgcacgacaccagcacggatctcacggaggtcatggagcagattcacagcacgtttccatcttgctgcccaaatgttcccagcaggccacaggcaatgtgaagtattcatccggccaaccaatgtttcctgacgtacagtgttgcccttttcagcaaatgccaattccaagttccattaaatcagaagctccatggctccttggcccacgatgttgagtgctgactgtgtgttctactgaaagagtaaaacactgactatccaaagagaaatggatattttgtttttataataaccatatattattgttttcttcttccctttctatgcaagtgtaaattaatgaacagagaggtatttggaaatggtaatacatttgtcacggatttgtataatgtatacagcattgggaaagtgggtgggggctttctaatatgataccgtctttttaataactatgacaaagcttacataagaattagaagaccactttacatttttacattccttctgctggtcatatt

SEQ ID NO: 47819 - DNA, 919 bp, Homo Sapiens
  misc_feature (764)..(765): n is a, c, g, or t
  misc_feature (775)..(775): n is a, c, g, or t
  misc_feature (891)..(891): n is a, c, g, or t
  misc_feature (900)..(900): n is a, c, g, or t
tggcccagatggaaaggactaatgggtcttttctcactgatagcagctccaccacaggaagtgtggaagacgagcacgccctcatccagcagtattgccaaacactcggaggagagtccccagtgagccagccgcagagcccagctcagatcctgaagtcagtagagagggaagaacgtggagaactggagaggatcattgctgacctggaggaagaacaaagaaatctacaggtggagtatgagcagctgaaggaccagcacctccgaagggggctccctgtcggttcaccgccagagtcgattatatctccccatcacacgtctgaggattcagaacttatagcagaagcaaaactcctcaggcagcacaaaggtcggctggaggctaggatgcagattttagaagatcacaataaacagctggagtctcagctccaccgcctccgacagctgctggagcagcctgaatctgattcccgaatcaatggtgtttccccatgggcttctcctcagcattctgcactgagctactcgcttgatccagatgcctccggcccacagttccaccaggcagcgggagaggacctgctggccccaccgcacgacaccagcacggatctcacggaggtcatggagcagattcacagcacgtttccatcttgctgcccaaatgttcccagcaggccacaggcaatgtgaagtattcatccggccaaccaatgtttcctgacgtacagtgttgcccttttcagcaaatgccannattccagttnccattaaatcagaaaagctccatgggctcccttggccccacgatgtttgagtgggctgactggtggtgttcctactgggaaagagtaaaaaccactggacctatcccaaaagaagnaaatggganattattttttgtttttttt

SEQ ID NO: 47820 - DNA, 629 bp, Homo Sapiens
cgcgtccggagatttattactttatcctcatataaatatggctagagaagaagaatggtgttcatatatgtattgtagatatacaactagttgtatctataatttgtaagtgtttatatatatattaagaacatttgaagagtaatgttaacatactgaaactttgaaatctttcacatttaaaatttcaacatatcttaattactgctcatgaaaatgtacattaagtgttaaagtaaaaaattattaaatctgtggctattaaattttaaactaatttttttcctttaaaagtaagagtcacactgacactgtctgaaatttaaagagtgaatgatttaaacttaaaaaaaattttgatctgaaaatttatttcacccagctttcacaattaagtctgtataaaatgtggtaccttttggtacctatccagagaaacctgtacatattcaatgttatctagatgtgattggataatggagaaaatttatttataatgattttgcaatggcatcaataacatttaaatgattttgaagaagtattattttactaccctataaaatgaatcgaaaataataaagttcttaacataatttactctttaaaaattacctgttcatattttt

SEQ ID NO: 47821 - DNA, 674 bp, Homo Sapiens
atcgaatgaaaatgtagttgtacagttccaaaaataattaattttttaagggaatttttcaagacaaaaggcaaatattttgtttcaaacctacaagcaaattcattccaagaagtgaatatagtagtaaaacataaagactattgcaataaaaagtttccaggccagtgacttgtttaattacattcacatttttacattcactttgcctttcaaagcaggagtattttataaaactgaaataaaactttaaattgtcaagctggtgcttaaagttatgtaaaatctgatttaagtttatttcatttccaaggaaaggaccctgaaaggaggggacagggagcttcctaggtctgttgataaactaactgatgctttgtcaagtcttccaagttttcactgtaaataatacaactaacaatgtaattttgctgttttctaatagagaatgaatgaatatattaatgtattacatttgtttcatgataaaacagttttcactgatactgtgaaatcctttctctcctttctagccttgcaaaataccctactaaataaatcattttagacatggagtgcaggtggacactgtgtgaactgtttttggtcagttattgtagaaattgatagatgtaccaaataaactctatgcacattaaaaaaaaaaaaaaaaa

SEQ ID NO: 47822 - DNA, 726 bp, Homo Sapiens
gggcagcatcacggacgcctgcctctctgtggtggcccagaccttcatggactcttgttcaacgtcagagcaccggctgggcaaggactccccctccaacaagctgctctatgccaaggacatccccagctacaagagctgggtggagagatactacgcagacatcgccaagctcccagccatcagtgaccaggacatgaatgcctacctcgccgagcagtcccgcctgcacgccgtggagttcaacatgctgagtgccctcaatgagatctactcctatgtcagcaagtatagtgaggagctcatcggggccctagagcaggatgagcaggcacggcggcagcggctggcttataaggtggagcagctcattaatgccatgtccattgagagctgagaggaggagcctcgcattcctgggaagagggacctgtccaagctgtcacactgggagtctcagatggaaggacaagtgatggggatcaggccccagagcttgctgtcccctgagaccccatcctggggagaggggaggactcctctccctacgccagccaagtttcgtcatagccagttccagctgggagagacagtgggcgtcgtccatcctcagtgagaacaccagagaacccggggccgggagaaggtggttcttcaagccgagaggcacgagctggggacagttctgcctctgtgactgctgctttgcatgaaaactcatttgag

SEQ ID NO: 47823 - DNA, 768 bp, Homo Sapiens
  misc_feature (735)..(735): n is a, c, g, or t
ttttttttttttttttgttgcaattttttcttcaatggttgtaagtagttttttttttttttaataataaaagggttcactagttaatactctagaaatatctgtgtgttgcaattcaaatgtatgttgagattgtgaaaagcgcttcagtgccactagcttaccggtacactagactaagcccttgatgacttattgcatgatacagtaccaggaacaacaggtggcctaaatacatgaaaagcagtgtaagctagtgacactaaagccagtcttgtattactgtatttttgacagaatggttttgaaaactgtgctacagggactgatgtggcaaatatatctctttatgcagaaggaagtctttttttttcttttttttttttttaagaagtatggctttttatgcatccttcatcgagggcattgaagttgcatggactgataaaagttgatgcaaaacaagaaagaaacaaacaaacaaaaaaaaccagcaaaatgtttaccaaaaaactcaaacaaatgagcagtgcctgttcaatttcacagtctctgttgagttcagttgtaaatatgtttcaaatgacattttcttgggaaaaaaaatctctacaacattgtagaatgtgaggggtaactacatcccaggcataggtttctcaaagctgcagtagattatgtcttcatcaagctgttaatttgtgcttatatcatatagaacttttagcatcctgngaagagctgccccacctcaatgatatttctctg

SEQ ID NO: 47824 - DNA, 1006 bp, Homo Sapiens
  misc_feature (19)..(19): n is a, c, g, or t
  misc_feature (771)..(771): n is a, c, g, or t
  misc_feature (864)..(864): n is a, c, g, or t
  misc_feature (948)..(948): n is a, c, g, or t
ggaccggtccggaattccncgggatcaaaaatgaatgttctactccatgctgaaggagctgaaagctgccttcttcatattttgcactttctggtagttcccctgttttttctaattccctaaaattgtgtgggtggagtggagccctgcagttggggggtaacatggaccactgattttgccctttgaccctgcacaatgacctttgcatcagccaaactcattgccatgacaactctttgtactgtgtccgtgccacagatctgttggtcacattgttaatagtaaaggggacaagttggagacggtcaatttttacattttttgttgcaattttttcttcaatggttgtaagtagttttttttttttttttaataataaaagggttcactagttaatactctagaaatatctgtgtgttgcaattcaaatgtatgttgagattgtgaaaagcgcttcagtgccactagcttaccggtacactagactaagcccttgatgacttattgcatgatacagtaccaggaacaacaggtggcctaaatacatgaaaagcagtgtaagctagtgacactaaagccagtcttgtattactgtatttttgacagaatggttttgaaaactgtgctacagggactgatgtggcaaatatatctctttatgcagaaggaagtctttttttttcttttttttttttttaagaagtatggctttttatgcatccttcatcgagggcattgaagttgcatggactgataaaagttgatgcnaaacaagaaagaaacaaacaaaaaaaaaaaaaccagcaaaatgtttacccaaaaactcaaacaaatgagcagtgcctgtttcaatttcacagntctctgtttgagttcagtttgtaaatatgttttcaaaatgaaattttcttggggaaaaaaaaatctcctacaaccatttgtaanaaatgtggaagggggtaaattacattcccccaggcaataagggttttcctccaaaacc

SEQ ID NO: 47825 - DNA, 500 bp, Homo Sapiens
tccactgatactggcagctcggctcctggacccaagatcccttgagtggaattctgcagtgcaagagcccttcgtgggagctgtcccatgtttccatggtccccagtctcccctccacttggtggggtcaccaactactcaccagaagggggcttaccaagaaagccctaaaaagctgttgacttatctgcgcttgttccaactcttatgcccccaacctgccctaccaccaccacgcgctcagcctgatgtgtttacatggtactgtatgtatgggagagcagactgcaccctccagcaacaacagatgaaagccagtgagcctactaaccgtgccatcttgcaaactacactttaaaaaaaactcattgctttgtattgtagtaaccaatatgtgcagtatacgttgaatgtatatgaacatactttcctatttctgttctttgaaaatgtcagaaatatttttttctttctcattttatgttgaactaaaaaggatt

SEQ ID NO: 47826 - DNA, 561 bp, Homo Sapiens
tcctggactcttggcctcactccttgccccctccccacgacacccatgagccgaaaggatgtcactaaggatggctgattccccaagggcacccgctctccctccctccctgctggaggaacacgtcatatcagatgagaggaagatggcctctgatggacagaatttttctcttaactcagcttttgctactttggtattactagcgaggggtagcagaaacctgcaccaaggattgtccctatgtcttggcccctcctagagcgtgtgcagactgatgattttatatgtaaatcaagactcacatccctttcctagtcccccacatccaaagcccctcagcctgccttgcagaccaatgggctccatgttctgtagccccctcccctacgcctcacccctcctccctctcacaggttctgggcggccagtgagagaaacgcagtgggggaggcagggagtctggtgcctgcagagattctctgcttctttcctggggggaggtggggaggtcttagcaggagcgggccctgtacccacctgctgacctgctgtttggta

SEQ ID NO: 47827 - DNA, 586 bp, Homo Sapiens
cgctccatgttcatgctcagatggcagagaatgaagaagaaggtagtggtggcggaggcagtgaagaggatcccccctgcagacaccaaagctgtgaacagaaagactgcctggccagcaaaccttgggacatcagcctggcccagcctgaaagcatccgcagtgacctagagagttctgatgcacagtcagacgatgtgccagacatcacctcagatgagtgtggctccccccgctcccatactgcagcctgcccctcgacccccagagcccaaggtgcaccgagcccaagtgcccatatgaacctctctgccctagccgagggacaaactgtcttgaagccagaaggtggagaagccagagtatgaagtggaatgaatgctcctgttctgagaagcacacttgtaactgcatcttttggaatttttttttttttttttccaaggggtagagatttatgtattttatttcacagattctctggtcacaggtttttgcccagggaaattctgagaaattcacaatttcttaccagataaaacatgaaaagtttgccgttagttcccctcccctcccctccctcttt

SEQ ID NO: 47828 - DNA, 895 bp, Homo Sapiens
  misc_feature (690)..(690): n is a, c, g, or t
  misc_feature (727)..(727): n is a, c, g, or t
  misc_feature (757)..(757): n is a, c, g, or t
ggagtctccggtgtgtacctagactgatggtgccatgtgttcgcctccgccccccacccttgccccacactcgcccacttgcccaccgggtcccgccggataaatgacaggcccgaggtcagaatggccatccccgggccccgtcctggggtctctgtccccacttccttctggcctgggaggtctgtaattcctgtctcctggactctcctgggaagttccctgctctgcagctctggcccaggagctgcaggctgggagggggcagccaagaagccggagctggcagcatacccagagatccggggcccccccacccccaaatcacgagtgcagctggagcttgctcccccttgttcggaagctggacgttcacttggtgactggtgcctctgcactgacggaggactctgggggtccttcttaccggctctgacctctctcttcgtgcctggtctgggactgggtcagccctgggggatcagaaggggccatctgggcccagctgtgtacagcgagggtgggcagccccctccactccactctgcttccacaaagtcggctcccgagagctcgaggctgcttctgtttatatgtgcagggcccgggcgggtgaagggtcagagagacggacacaaggagccggcaggagggcggagcgaggatgtcctttcccgggagacaagtcgngaaagcctggctggactgcctcagccccgcgcgcctnctggactcagggttccccgtcctgagctcngggagatgtcagagtcacactgccgcccggtctgccacgcagaggtccaactttgcacccgcgttcttggtacctgagaccaccgacatcctcaggttcctgaccgtgcggccttctacccagcccatggtgcggccg

SEQ ID NO: 47829 - DNA, 618 bp, Homo Sapiens
  misc_feature (594)..(615): n is a, c, g, or t
cggacgcgtgggccgtggcagcgtcctgcagttcatgcccttcaccaccgtgtcggaactggtgaaggtgtcagccatgtccagccccaaggtggttctggccatcacggacctcagcctgcccctgggccgccaggtggctgctaaagccattgctgcactctgaggggcttggcatggccgcagtgggggctggggactggcgcagccccaggcgcctccaagggaagcagtgaggaaagatgaggcatcgtgcctcacatccgctccacatggtgcaagagcctctagcggcttccagttccccgctcctgactcctgacctccaggatgtctcccggtttcttctttcaaaatttcctctccatctgctggcacctgaggagagtgagcagcctggaccacaagcccagtggtcacccctgtgtgcgcccgccccagcccaggagtagtcttacctctgaggaactttctagatgcaaagtgtgtatgtgtgtgtgtgtgtgtgtgtgtgtgtgtttgtgtgtattttgtaatatgtgagggaaatctaccttcgttcatgtataaataaagctcctcgtggcaaaaaannnnnnnnnnnnnnnnnnnnnnaaa

SEQ ID NO: 47830 - DNA, 640 bp, Homo Sapiens
gccagaaaacccagtcgaggctcaagtttgaatttcagcttcactgtgtggctctgggaaaatggctttcccactctgtgcctcagtttccttgtgtttacaagactaatcccattgactgtttattaagcacctactgtgtgccaagcgcttttacgtggcttctccctcagccagccttgagaaggctggaggtggtgtcatcacctccattttacagacaaagcagctgagaccccagcgaggggcggagacctgtcccacgatcacccagcaggagtcgtggcagaacggagcatcagccagaccctgttgtgggcgttgtcatcaagggagcttgaatggagggtctggtgtcagatacagccgactccagccccagctcatcccccatgatgctgtgtgacccactgggcactctggtgagggagctttccagacatcaacagcccactctgcttccctttctgagtcccctgtccagcactgcctagtgttggagggtagaccaaggctgtgcatgattcaccccctccttccatcctggagctggcagtgaataaaagcccgtatttacaaagaatgaaaaacaacaaacacaaagaaatgaaaaacaactagaacaaaaacagggcggcgg

SEQ ID NO: 47831 - DNA, 547 bp, Homo Sapiens
cagaggctagctagttgatcctccccaacagccttgtgggaggattttgagatacttattctttatttgagccagtcttgcaaggttaacttctcactgggcctagtgtggtgcccaggtttttgccttgcttcacttctgtctctacatttaaatagacgggttaggcatataaaccttggcttttcataagctctacctgcctatccccaggagttagggaggatctatttgtgatggcctagggtttaagagctgtggaggactgaaaactggataaaaagggggtccttttccttgcccctgtctctcactcagatgcgcttctttttcgccactgtttggcaaagttttctgttaagcccccctccccctgccccagttctccaggtgcgttactatttctgggatcatggggtcagttttaggacacttgaacacttcttttccccccttcccttcacagtaactggggcaggggcctacggggaggggcttgtactgaactatctagtgatcacgttaacacctaactctccttctttct

SEQ ID NO: 47832 - DNA, 786 bp, Homo Sapiens
catttcttggctgtgcaggtgatgccatgttatatccaataactagaaaaatcactgtgctgaacttttatgtttagcttccaagtatttttctaatgttttgcatttcaagtggtatcactgttaaatgccatttgttttcagattgtggccttttattattggctgctagatcctggtgtttctatgttcttttttaagcaccaaaaagaagatggggaagaaaagaagggaaattttctgatataaatatgttgttcaaattatgagtattatttaaaaaagaaaaaggaacataacccaggagtctaagttaaatctaatattgttaatactgaacttgcaggtccaggttggtatacattccaccctctagaagtattttcttacagtagataagctgctcacattttgttttgaatgggcatctcctgaggaaatgtagcatgacattggtactaactgcatgtgtaaatacatcatactggcaaaccgtaaaatataaattatgtatcatcattcatgtagtatctataatttgtaacagtgggggggaaagatggacatggttatttaataataccaataagaaatatttcttatcacttccaaagaaagaatacaacgcccacaaaaaaccctttggtgggcgcccctggccctaaaaaagttttctaaaacacttctgttgggccgcggcccccttggtttttggtgacaccggggcccaaggggttcccgaggaagacccgggccaacactagggtgggttttcccccataagag

SEQ ID NO: 47833 - DNA, 601 bp, Homo Sapiens
  misc_feature (563)..(567): n is a, c, g, or t
  misc_feature (576)..(576): n is a, c, g, or t
  misc_feature (588)..(588): n is a, c, g, or t
ggaattaatatgattacagagaaggctttttctcaggtcaggcttttcatgaaagtattttgagaacaatgaattgcaataaccagcttcacacaagcataactgataaacgcgagtgctattgtagtcttggcaagtgagccaagaacctaggagcagggccattcctactgaaggacgggccccctacggagatgaaatttgtttcctggtgagcacagaatcagaacaaagaacaatatcccaaagaggccctgtgtctaccaggagcttctttttccaaatgtaatggattatgtggaattgtagtgccatcggtttttacttagagcccttgacgtgcttggaccaatatttccttccttcttatgaaccaggtttttccttctgattttcccttttcaacattccttaccagtcaccaaagtttcctgttataatttcttttagcagacaagttataagtcagatttaattagcatcagagttgattttatattagtcagattttggatcatcacagagatctccacaactccttggcttaaacagctccaccgacnnnnnaaaaaaaanaaaaaaaaaaanaaaacatgtcggc

SEQ ID NO: 47834 - DNA, 878 bp, Homo Sapiens
  misc_feature (757)..(757): n is a, c, g, or t
  misc_feature (767)..(767): n is a, c, g, or t
aatatcccaacaaaaacttgctgccagttcttcattttgaaaaagtggtttgttcaacattaaaaaagaatgcaaaacgaaatcctaaagtagatcgggagatgctgaaggaaattatagccagaggaaattttagactgcagaatataattggcagaaaaatgggcctagaatgtgtagatattctcagcgaactctttcgaaggggactcagacatgtcttagcaactattttagcacaactcagtgacatggacttaatcaatgtgtctaaagtgagcacaacttggaagaagatcctagaagatgataagggggcattccagttgtacagtaaagcaatacaaagagttaccgaaaacaacaataaattttcacctcatgcttcaaccagagaatatgttatgttcagaaccccactggcttctgttcagaaatcagcagcccagacttctctcaaaaaagatgctcaaaccaagttatccaatcaaggtgatcagaaaggttctacttatagtcgacacaatgaattctctgaggttgccaagacattgaaaaagaacgaaagcctcaaagcctgtattcgctgtaattcacctgcaaaatatgattgctatttacaacgggcaacctgcaaacgagaaggctgtggatttgattattgtacgaagtgtctctgtaattatcatactactaaagactgttcagatggcaagctcctcaaagccagttgttaaaataggtccccctgccctgntacaaagaanagcaaaaagaatttaccgaagattgtgggatctcttaattaaatcaattggttacctgatccatggaatggttagtttacaaaaatggttagggggttttaaccttaacaa

SEQ ID NO: 47835 - DNA, 570 bp, Homo Sapiens
  misc_feature (436)..(436): n is a, c, g, or t
cactgggaaagcccatgtggtgaccccatatttttctgaggttcttcttttccatggtgttactttattatcagaaagtaaattcagaaaacaggtcttgcccttagcagacaagaaccacaccagtttcttgtaaaggtaacggatacattgggattcaggagtgacacagaggtccagccccagaacttgtaaggattttgtttgaacactgagcagatgcctcctccctgccacccatcacactagttagggctggccatgaattctatgccagagtcactcctgcagtctgctagggatgggccttcttatcccactctcgcacacatcccagtctagtctttgccttcacagagtcctccttgacacccctgacttaatgatagttgctgttttggagtagaattgatcaggtttaagtcatcctgctcangttgggcatagtggctcatgcctgtaatctcagcactttgggaagccaaagtgggaggattgcttgagcccaggagttccaaaccatcctgggcaacagagggagaccctgtctctccaagaaaaaaaaaaaaa

SEQ ID NO: 47836 - DNA, 620 bp, Homo Sapiens
ctgaagagagggttcaaacggaagccgagaacttgacactgttcaccccaacacctcacctcccccaggacatttggaagaaagcagcgccaggattcctcggcagtcgtccccacccgcacctgcagtcccctcatgtgctgttctgctgccccactcagctcctggaccctgtcctttcatcccgctaaagcaccccctaaaaccccttcatcactttcattctcagcaaaaagtaattgagcacctcctctaggcgctggggagtccacactgaacaaaagaaacagaaaaccctgtcttccagcagttgagttctagggcagggagacagagtttacaagataaggaaaatatatatgtagtatgctgcaagttaactgctgtgtgggaaatccagcagggggtgggatgtgtgatttgaattgagggccacactgcccaggtcgtgctccgtcaaggggtgagcaggagcaacaggggtggctgagtaagggcttgcagctggaggcaacagcacatgcaaaggccctgagccaggatgtgctgcaataagggccactgagggggacagtgtaggttgggggtgaggaatgtattaaaagatgagattgccttct

SEQ ID NO: 47837 - DNA, 834 bp, Homo Sapiens
ggggtacttttattgatggatatgttttccttttattcacataaccccttgaaaccctgtctgtcctcctgttatttgcttctgctgtacaagatgtagcaccttttctcctctttgaacatggtctagtgacacggtagcaccagttgcaggaaggagccagacttgttctcagagcactgtgttcacacttttcagcaaaaatagctatggttgtgacatatgtattcccttcctctgatttgaaggcaaaaatctacagtgtttcttcacttcttttctgatctggggcatgaaaaaagcaagattgaaatttgaactatgagtctcctgcatggcaacaaaatgtgtgtcaccatcaggccaacaggccagcccttgaatggggatttattactgttgtatctatgttgcatgataaacattcatcaccttcctcctgtagtcctgcctcgtactccccttcccctatgattgacaaagtaaacaaaagccacatttcctatcctggttagaagaaaattaatgttctgacagttgtgatcgcctggagtacttttagacttttagcattcgttatttacctgtatgtggatgtgtgtcgtatgtgcatacgtatgagataggcacatgcatcttctgtatggacaaaggttggggtacctacaggagagcacaggttaattttgtgcttttagtaaaaacatttaaactacaaagttccttcactgggggtggaactcatattcggatggcaacatatttgatcacgttaagactttgtaaaacttctacggtaacttgggcagcttatatggactggcttcgcaattg

SEQ ID NO: 47838 - DNA, 728 bp, Homo Sapiens
  misc_feature (651)..(651): n is a, c, g, or t
attttaagatgatacagaaagtatccaaaacaacagaaaaaaaaagccacgtcattttagatgaattgcgtgccttaaaatggtgaacgttagaaaattaaacaagtctggattccacaagtagttccaagtcaccaagtgacaaaaacaaggttaacattaaaaaagaaaaacaacaacaacgacaaaaagctccaagctgcagtggatttaattatgaggctaaaactacctcatactttccttggaagaactaattagctatggtttattgtagggttttgtttgtttgttttttaaagcaaatgatttccatattcctgattgatcttttttgtcatctttgcttcaaaattacataaaaggtgctcctttcccccttcttttatacaagtttcttgttcatattgtgaatagaaaagtttctgaacaacttttttggaacattttctatctatattccaaagcatgtaatatatacataaaaacgatttgttaaactggtccttagtcatttgtataattagaaatgaagtttgggaaaaaattttggaaaaaagacaagcaaaaaaaaaataacttattccttttttgcatatttgtatagccttctagaatcagaaataacctttttgcatattcttttattgntctgacttttcaagacctattatttttttacataggtcaataaacaaaaaggtgtgctactgaaaaaaaaaaaaaaa

SEQ ID NO: 47839 - DNA, 734 bp, Homo Sapiens
ttcttaattctctccagtaaatgactcaactaatttgatttttttaattaagtcaaaatatcaagagaaaaattgctactaaaacttacattttgatccacactgatgtgcaacacaaaatgaaagttttcacctccattccattttttaaaaattcacggtccacactgaaacttgctgggttttagcaggagacaaaggtgtcacccacgctgtcctcatcctgctctctctgtcccagtgacgctccagcatatgatcactgcagccggtccctggcccgtgccgattctgccacctcccagccacacacatttgcagacccacaagaagaactgtagccttgataatttcagttcaggctggaaaaatgccatgcaataatctggtttgctttcagtaagtaggcaacaagtgaaaactgtataattttcatcacctattctgctgttctatctaaaatgagtgtacctgtggtttgtgaactgggcccttgtttgtgccagatccttcaaagatgttccctgtcaggacacctgtggccctgcccctcctcagacaccttcccactggcattcacgttccttatatgcagtgttagccatctttggcctacgtggactttttttgtaaattacaccatttccagacattaaactttttatattatgaaatttaccatgtaaaaagaacttcatatttttattgagattgctaaggcacttggccttcct

SEQ ID NO: 47840 - DNA, 506 bp, Homo Sapiens
ccttgcccctgacatttggactcttcccttgggccgaccactctgttctcattctccttcccaccaacatccatccgtccttctcagacaaaccactcactgggtaccccacctcctctctcatatgcccaacacgaccactgcctccctgcccccacacctgcacccaaacagacacatcaacgcaccccactcacagacaccccttaccccacccccactgtacagagaccaagaacagaaattgtttgtaaataatgaaccttattttttattattgccaatcccctaagatattgtattttacaaatctccctcttcccttcgcccctcccttgttttatattttatgaagttagtgcgggctttgctgctccctggcccaggaaagagggactccctgaccctcacctggcacccccctgctgctgcccaagccgctgggcctttttaattgccaaactgctctcttcatcagctcagcacatgctttaagaaagcaaaac

SEQ ID NO: 47841 - DNA, 565 bp, Homo Sapiens
ggatttcctttgcttttcgacatggaggcttactcaaatcagcccctttgcctggcttaggaactgtgtgaactttaactgaatgtgacggttcaccagagcccaacttctctcctacgaaatcttgtgactgaagtaattcctgaggttcttctttctttgaattttttccttcactctctaaactctctttgatgtcatcactgagtgttttaagatcacactgtatatccagtttatttatcaatgcaaagtcacccgcaacagcatcatccattgtggaatccatgggctcatcctcacaacttcctttgggaacctcccctttagccagaaatttcaacatttttttcaaaaccttcttgtgagattttgaaggctgaaattgtaaaggtcggcaccttattgtgtactgaggacaacatgtttgattcatgacaggtttgtacacatattttccacttcttcgccatcctcggtctatgagatcctgataatcctgtactgtcatggaatgtgcccacatgccattggagcggctgcccgactcgttcttgcagtagcc

SEQ ID NO: 47842 - DNA, 549 bp, Homo Sapiens
tttttttttttttttttagcagcttaaaaggtggttagaaaagtggattaatgcaaaaggggtaataaagactgcaacattctcaggaccaaattaaactgctaaaaaaaaaaaaaaagttcattgacttgcttagtcgtatactcaaatgatgataaacctacatgtgcaaaggctcacgtttaagattgtcaagccagcagtctactgttgtgttgccattgcttttccattgggagaagaaagaattaaccagtcattaaaccatttggtaagttgcactttgctgtgctgatcccacaggaaaggcttgaaacacgagaagcagcaaagacagagcacacaagtgcataaggctgttgtcttcggcttgggtgaaatgacagttcctcttcattctaaaggtttactccattgaatttaaggcatttgttcattccagtgttgagatgctttgcatctctgcagaagaaatttattttaaattgtttaaatatctggaaatacttttagctatcatttataaagatagttttgttctcagtttca

SEQ ID NO: 47843 - DNA, 703 bp, Homo Sapiens
  misc_feature (674)..(674): n is a, c, g, or t
ttttttttttttttttttaggtttaatgaatccacttcctttattgcagtaacctctgtacaaagcagcaactgcaatactcaaggttaaaacattagaaaagcatttgtgtgacagttctatacagtgctctcatttactaataacataatgccttctaaataatttttttgggaaactacattatcacaaaattatacaaatttttttacaagtatttacatactgtatctgaaaacagactttaaagtcacaagattataaatgtacatatgtattctcacattctgaaaaataacattctcagaatccacagaaaatatacttagttactactgaagataatttttgaaatgtaaaaattagatttaaatagtatattttaaatgacagaactataattacagagatcagatcagataggtaaactgcaagatagataggatgaaacttttggcctactgtattacttacagagtttttttgtgtgtggtttttaaaactgttaaggcaagaagtgtcaaatgctttagagttaaataacagatcactgatttcaaagacttggtgtatagtgttaaaaattaaagcttaaaaggtggttagaaaagtggattaatgcaaaaggggtaataaagactgcaacattctcagggacaaattaaactgctaanaaaaaaaaaaagttcattgacttgcttag

SEQ ID NO: 47844 - DNA, 848 bp, Homo Sapiens
ctgtcttttacagcaactcttgtttgaagcatcagaaggaggtaaaactgataacctgagaaaactagtttccaagtgccaagagattggagtcagcctaaatgagctcttaaatttaaacagtaacaaaacagaaagcaagaatcactgaacactgggtgcagtcagttctaagtccttataataattgccaaaattatttgaatgattcttcaagattaggctgatccctggctaaggtctgtgtaaggcagacaagcgttattgatcatatcaagttccctacaatatcctgtcctcaaaaccggaagcaatgaacatgatcctcttcggttggataaatgaacttcctgtttggcctgcttctaggccctgccagattctcataacatcatatacgtaagtatagttcctcaaagtgactgacatttattttaattttgctttgtttttttttattttctcccccattcctttattttgtgttattcctgactcacttgacactctctgatgcctgagagattcctgtttgggatttaatatccagggctgtgtttacagtaaaaaaagcaggcagtcccttttagtttttcctttttaaatttttttgagattcttcatttcaggatttaaaactatagcagtccatcttaaggaaagtgtaactgccatggccacaagtctgctagttgcacttgaatgctctatcagggttgtttattaccctttctacgttctggactccttgccgagactgtttaacttgaagatttaagaaactattgcaaatgccagtgcatcagaacctaagagtggtcaaatattatgtgcattttttgtaacgg

SEQ ID NO: 47845 - DNA, 928 bp, Homo Sapiens
  misc_feature (693)..(693): n is a, c, g, or t
gaggagactggctgcgctgcagccgtggccccgactctggcctggtgcccctggcctacgtgacattgaccccaactccaagtccaacccctggaagcagccaaaactgaggccctgtgcatgctggtggcctcagggaccctcataacccccagactcagagcccgagagcccttcccaagccattggcttggctgcagagtagactgagagctggggccacgtatccctgtgctggcacctgctccctgtgctcagtattaattacgcccccttaactgtcccagtgaccttgtccagacctccacccaggagagggatgggacacagcactgggctgccaggattcccctggcctgtctgggccaacccttccatgggtgaagacaagcaagtccccctggaggcgggtggcccagaaagccatctacagggttccctaggccaggtggagatgaggatgggtaacagtattggggccagatccctaagccccccagctgtaaataggctgtggccagtgcctggtcatcagaagagggaggaggagcccaggcgtctgtttatgtatttatttatttatttattatacctattaataaaaaaggtgctcagcctccaaaccattttctctttgtgttcccccaccctcccacccacctctctcccttccaaaaggatggctggggatangatgaaaaggggaaggaaacttgatgtccagtggcctaagcccagagctgctttctggaaggtgctgaaggcccgagcctcatgggttgagatggcccaaggtgtggccaaactggaaatttaaacccgggggggccaagagaagccggccccatggtacaaatgggcatggcaaagccctttaattcccaaccagttggctaaacctcccaaacagcccctctaaaaattgggt

SEQ ID NO: 47846 - DNA, 878 bp, Homo Sapiens
  misc_feature (672)..(672): n is a, c, g, or t
ggacgcgtgggttcagacagagatatgagatcctaactccaaatgctattcctaaaggttttatggatggtaaacaggcctgtgaacgaatgatccgggctttagaattggacccaaacttgtacagaattggacagagcaagatatttttcagagctggagttctggcacacttagaggaagaaagagatttaaaaatcaccgatatcattatcttcttccaggccgtttgcagaggttacctggccagaaaggcctttgccaagaagcagcagcaactaagtgccttaaaggtcttgcagcggaactgtgccgcgtacctgaaattacggcactggcagtggtggcgagtcttcacaaaggtgaagccgcttctacaagtgactcgccaggaggaagaacttcaggccaaagatgaagagctgttgaaggtgaaggagaagcagacgaaggtggaaggagagctggaggagatggagcggaagcaccagcagcttttagaagagaagaatatccttgcagaacaactacaagcagagactgagctctttgctgaagcagaagagatgagggcaagacttgctgctaaaaagcaggaattagaagagattctacatgacttggagtctagggttgaagaagaagaagaaagaaaccaaatcctccaaaatngaaagaaaaaaatgcaagcacatattcaagacctgggaagaacagctagacgaggagggaaggggctcggcaaaaagctgcagctgggaaaagggtgacaggcagaggggcacagatccaagaagatgggaagagggagatttctggcttcctcgagggacccaaaaatttccaaaggttcatccaaaggaaaaagaaaacctccc

SEQ ID NO: 47847 - DNA, 1038 bp, Homo Sapiens
aaagtattaaatgccaattaatttgttgtagtaaagtatcttcattagcgttatactccatcatatctggtgtaaactgctcaccagaaaaccctatgaaaccaaagggggaccattcaggtctaaaaagcgacaggtccgagactgggtctgtcacctgggcattttcaaagaggacattttgaagaatttgcatattcagatttttaaaatgcacttaacatacttcattacagatttcttgggtagggaggatgggataggccaggatgggatggaatcagttctgcctgggaaactaatccgaatcatttacctttctgtattaaccttggcctgtcctaaaaagagaacgactgtttcatcatgagttgctctgagttttgttaatgtttgtgttggtggattgacggttaaatgaagcatttagctggaatatgaactttgggagttttcatgttgtcctggatttctctttgtaaacctttaaaccttagcccctggttgattgtgttaaacccattatgagcaatgttatttaaagttgtattataattgcaacctccactaattattcagtactgtagcagcaaagtattattgtaagaattggttatttttatacttatatccactctaaggtctggcggttctagtcaggtaaaaatggatgcaaatacaaattaatattcattttcaagacaaatgacaccacctatagcaagacaacacacctaaaaaagagggggggggggcgcgcataagagatacaccgcgaggggagcgcaaaaatttaagcgggaccacccagacttgttgtgtaacaacaggcggggccccccagtagacaggggagccgtgaattaacggccaggcacagggggaccgtggataaaaaaaacgtgcggcagtcgggaaacactgcgagcaggggaacaatcgtggagagacacaaacaccgcggcggggcaaaatatgggggaccaccagaccaagaagagatttaagcgcacagcgtcaaataaaactgaggagaag

SEQ ID NO: 47848 - DNA, 673 bp, Homo Sapiens
  misc_feature (619)..(619): n is a, c, g, or t
  misc_feature (670)..(671): n is a, c, g, or t
acattaaagtaaatctaaaaaaagtttaacaaactggccaagacactaatttttatgtataatcacaatattttatactcacctttattgactaaaaataattatgctacatgttgtcctgcatcagaagaattatttcttcttgccagtgttttgggatttgaagataatggttcactcaaagaacctattattttctctactgaggaacccaatgtagaacttgcactgatatttttattactgcctttatatgaatctataggtatctaaatgttaaggcatgtatgatctttgatcatttcttttttcaaattaaagttgtataaaagtttcaatatcttgccttaaattagttgcctattctttctaggattcaaatattgtgacatttaaaaaagaaaacattcacttttgaaacttagacttcagatcaaaaaggactgaacccccactatcataatccatacattcatttccatgttgtttgactagcagtgcatatatgaatgaatatggtaattaatcttacctataagaaccaaatactttaattatattaagatagtgaataaagatgtataatatttttattaataccttgaatatattcagtggnattgaatgtgacttcataactgtactacgtatgattaaaataaaaaataannta

SEQ ID NO: 47849 - DNA, 499 bp, Homo Sapiens
gtttggtttgtgcacaggatccgggcctcctatgagctgactcagccaccctcagtgtccgtgtccccaggacagacagccagcatcacctgctctggagataaattgggggataaatatgcttgctggtatcagcagaagccaggccagtcccctgtgctggtcatctatcaagataacaagcggccctcagggatccctgagcgattctctggctccaactctgggaacacagccactctgaccatcagcgggacccaggctatggatgaggctgactattactgtcaggcgtgggacagcagcactgctgtattcggcggagggaccaagctgaccgtcctaggtcagcccaaggctgccccctcggtcactctgttcccgccctcctctgaggagcttcaagccaacaaggccacactggtgtgtctcataagtgacttctacccgggagccgtgacagtggcctggaaggcagatagcagccccgtcaaggcgg

SEQ ID NO: 47850 - DNA, 750 bp, Homo Sapiens
  misc_feature (749)..(749): n is a, c, g, or t
ggctggaccggtccggaattctccggatgcaagatgtgacaatgtttgagaaaaggtgtgtcatactcagtgacttcaatttgcaaatgtggggcctaaagaaagctctgcagctctgaacctctcactggccagagctcagcctattggtcccatccatgacgctgagacaaacagaaactggaagctgaagtcagtgtctctggtgcttagaaaccctgtggatttccctctgaaccaagatttttagtagtaaaataaacaactcatggacatctgtcagatgagaagttttggtcctgttagagaggagaaagactgtaatgaaactactagacccatttgggctaaagtttggcttttccttccttgagtcatagaacatatccatctcccaggaaatgtccttctctggcgtctgcttgcccttctgagtctgccttttttgcactgaacataagcactttatactaatgggtcacaaatcttgcagcccttaatttgggataagaccagattttcctgacattttcctctaactcattgaactatcaaattataggcaaccactgactagactgatatgagatgaggctaaaagcctttgaacaccacgctgtagtctccaacagaaaaacaccaccaaaacagatacccatgttgaggggttgaatgttttactacaaacaagccacaataaagtgtctatcaacatgttaaaaaaaaaaaaaaaaaaaaaaaaagggcgng

SEQ ID NO: 47851 - DNA, 806 bp, Homo Sapiens
  misc_feature (761)..(781): n is a, c, g, or t
  misc_feature (783)..(789): n is a, c, g, or t
  misc_feature (791)..(791): n is a, c, g, or t
  misc_feature (794)..(794): n is a, c, g, or t
  misc_feature (798)..(798): n is a, c, g, or t
  misc_feature (804)..(804): n is a, c, g, or t
ggacgcgtgggtgcagataaaaattatcaggaaattaaccttatggcacagaccaaatacttagtgcatggctgagtttctacaattcaaggagccaagaaaataggttcaagatggaatatagtacatgcatataaggcagatgcacacatgctggttactttaagattgtgtgtgttgattagtcacaatgatagactataacatgagacaatacaaagttacatttttggaccatattaaaactgcaagaagacaggggtcttactgaagatcttttagaaaacttaaatcctgtcacaggatatttagacatgtgtagaatgtagctcaatttttaaaaagtaactgacctagagggtgaaagttgaaactgacacattttcaaattaagattatgcttattttgtacagaaaacaatgtttaaacacaagcagatctgttgtatgtaataagtaacacagagttttaaaacaaattaattatttagctttattgaagtttgtttttttccttccgaacctggagtatcatattataaacagcagtttcacaccagaatagcagtgccctttctttttgtacatactgattggacctttctttactgttacgtggacactttctatgttagttttgatgcataattctttgaatccttttatacaaactagaatgtatgtgtaagaatacctgtcccctgcatgtagtaactacaaacttattttttaataaatagaaaaacttgtttttctaaaannnnnnnnnnnnnnnnnnnnnannnnnnnanaanaaanaaaaangg

SEQ ID NO: 47852 - DNA, 1144 bp, Homo Sapiens
tcctctgtgttcctcggcggactctgctgacctcctgcagacccaaaccacagccacatcccagcttctgtgccagcactgtgacagtacctcgctcctctgtgcaccagatccggcctcaggacttacacctcctgcctgacccccaggcttctctctcctttctcccagcaaactgcagtggcagaaaggaggttcagaggctgggaaagtgggcctccccttgcaactcagagctgctgcactcaggagggccccatccaatccccggcccctgcagggaaaagcgctgggtgtgtgtcagaggcgcagggtgggtggggctgccagccaggaccctggcctgcagcctgatccaaaccaaagactgtagaaccctggggtgtggctaacggcccctccagcacccatagccaggtcttcctggcccttgaggctgggctggcggacaggcacctacctcttccttaagctgaagctcccacactgtcttccaggctgaggagatgctctccttttctactgaccatcttgatacttatttatacgagaggcagttgctggacggggtagtactgggaagcaggaggcagaatggctctgctgagcctcctacccatgacaacaccccaataaacagaacattcagagccaaaaaaaaaacaaaactcacaaaaacaatgacaaaaaaaaaaacaaaataacaaaacaaaaaaaaaaaacaaaacaaaaaacaacagagcggaggagcaaccaaaatagcccacaagagggcgcgaaaaaaacacgagcacacaccaaaatgtactaaaaagaagtcgacacaacacaaggagaccaagacaacacagaaacaagcagagcgcgcgcgaggaatacacacaagcggcggaagacggagagaaccaaaaaacgagagaagcggaccacctcatgtgagagaggaacgaacacaacaaccccgcggggagcagacaaaaaaaggcggaacaacacacagagaacaaaacgaaaagcacacgccgcgagcgagcaaaaaccaaacataacgatgactagcaggaacgaacacaacacgcgcacgaccgactgggggacgagagaaagggggaagacggcggaagcacgaagaaaaaaaaaacag

SEQ ID NO: 47853 - DNA, 730 bp, Homo Sapiens
ccgccttttcagatatgattttcctttttcgcatatatggtttaatcacaatgggggataattttttttttgtaaatccgtgcttgtgccaagtctcatatttctttgccatctcagaattatctttttaccaccactgtttataaaatttccttagagactttttgaagggaaaatagagcaacagggaaaaatgaaagaaatgtcttggttactgagctctaaatagacaggtttgatggcacttctcatgatacattttagttattcttataaaagcaaacaggcaaacatgagtgtaaattaaagacaaaaagaaaactctggttttatatttgagaacacgtgaaaaatcatgggtcaacataaaatcttgagaaccttctactttctctgggaaagcattatatagtggtgcattagtttagaaagtcagctatgattttgcctatagttctagttattagctttggggttttcttgtactttaagacatacctgtaaattgaacctatttgaattatattccactgtatgtgtattatggctcttttcctattagagcaacttgtgtttccctgataatgtgtacattttttaggcatgtacttaatagttcacaatgttctaaatttggaaggacttaaaaaaaaaacttgtttaaatttccatctgttttgtaatatctagctctatatgtaaatgatgggtttgttggtatttaaaatga

SEQ ID NO: 47854 - DNA, 536 bp, Homo Sapiens
cacacaaaaacagaaacaaaaaaaaccagcattaaaataataagattgtatagtttgtatatttaggagtgtatttttgggaaagaaaatttaaatgaactaaagcagtattgagttgctgctcttcttaaaatcgtttagattttttttggtttgtacagctccaccttttagaggtcttactgcaataagaagtaatgcctgggggacggtaatcctaataggacgtcccgcacttgtcacagtacagctaatttttcctagttaacatattttgtacaatattaaaaaaatgcacagaaaccattgggggggattcagaggtgcatccacggatcttcttgagctgtgacgtgtttttatgtggctgcccaacgtggagcgggcagtgtgataggctgggtgggctaagcagcctagtctatgtgggtgacaggccacgctggtctcagatgcccagtgaagccactaacatgagtgaggggagggctgtggggaactccattcagttttatctccatcaataaagtggcctt

SEQ ID NO: 47855 - DNA, 573 bp, Homo Sapiens
gggggatgggctgaaggggctccaggcaactgagccctactcgcaggtcctcggccttggcccaaacaggaatgaggggcacagagtgccgggtaaccgctcctgggagcagtggggaactgtcggatacttgaactctcaagagctgggctctgagcgtcctcgtccagctgccaacttggccaaaggctaagccagcagattgttctgttgccgggcaacgcgacttctaaacctgagggagtgggcatgtgagcacataatggcaccagtgacagagcgaccataatggatgaataagcgcascaggtacccgcgcaaggcacctgctggcaatggcaggaggcggacgtggggggtcgtgcagtaggtactggagggagagacgtgggcacaaaggtcgcgggaggaacaggtgcccacaatggctgcatatttgcccgtggatcactgaagattcctgctctcctgctgaggtggagactgcagtgagctgagatcgcaccattgcactccagcctgggcaacgagtgcaaactcagtctcaaaaaaaaaaaaaaaaaaaaaaaaaaa

SEQ ID NO: 47856 - DNA, 890 bp, Homo Sapiens
  misc_feature (878)..(878): n is a, c, g, or t
atcaaaacaaagagtgaaatccaaatttgtcaaactgtacgtattaaacatgtccagtttttggttaaaaaaaaattgcactggctttgagggaaaacacacagggtgagggaatgggctaaatgacttcttacaggcccctttctgattctttaactttgaaaggcaagccatattgatccagttgttatagtgaactcatggtaatggttgtgagaacaatagagattttcatttctatgtagatgagtggtatgagaatatatggaatttttaagggactgtttaaatctttgattgtagactattaaatataccgtatgcataaagtaagcctttaactctaaggtaaagacgacacgttttcggtttgtgactacaaataggttaaaaatagattttaattttattaaaaatataatttaatgcaggttgtttgaagcatctgtcttcatatgatggcattagaacacctggtataataaaaagttaccgtaattatgattatttgaatttatccattctgaaaattaataagatctaaaaactgggcatgacaatcaagattgtgtatttagtgacatttaaaataatgtgagcatagttaaaactgtggtgcattcatgaatgccttagggaaaggtcccagtaaagtcagaaagctgaactttccggtgttataggaatgttatgcggaattaatgtgggggtcttaactttagggatataactggggtcaaatgaagttaaaatatttaatgagtcttctaaaggggaaaatggggggtatattgggaaaatgtcgcatttggggaaaaacgggcggggggagggggctaaaaaaattaagtagtgattttccctgtggaagaataggnccaaaaatgttt

SEQ ID NO: 47857 - DNA, 741 bp, Homo Sapiens
  misc_feature (669)..(671): n is a, c, g, or t
  misc_feature (673)..(740): n is a, c, g, or t
tcagctccactttagaaattttcaataaccagatgagaaaaaaattaagaaattgctcaagggaaacatttgtaaatggatttgaaagattgagccaaattctgttgtcagttctaagcatgcagttctcacctccatttagtcccccatcagaacagaggtcaggaatttagctggggagcctaaatttagttcagcttacctttgagaatagcatcaattcagactctcttttcattatgttttcttttctttttccctctttttaaactacattgtgttagagtcatagtctaggatcctgagagattttccattcttgtcaccattcacttgcattgtaaagattttctttgtctgttgttggcatagattcttttgtacatatttatttatttgtgtttatatatgtcaattggtttcctttcttagcttgatattgcctagctttgttgttttaattaactttctattagagagactgtatatattttttctaaatactttgtgaaatcatttttggtagcaatatctttgaatatgatgaataaaagtgactgtgagtgcaaatagaattagcagtaagaagctactctagctaatttgccattttacttaaatggaaaatgtttttcaaataaatacttatgttgttcatgttcaaaaaannnannnnnnnnnnnnnnnnnnnnnnnnnnnnnnnnnnnnnnnnnnnnnnnnnnnnnnnnnnnnnnnnnnnng

SEQ ID NO: 47858 - DNA, 814 bp, Homo Sapiens
gcgggttaaaatgatggaagaagtggaaaaactttgtgatcggcttgaactggcaagcttacagtgcttgaatgaaacactcacatcatgcacaaaagaagtaggaaaggctgctttggaaaaacagatagaagaaataaatgagcaaatcagaaaagagaaagaggaagctgaggctcgtatgcgacaagcatctaagaacacagagaaatcaactggtggaggtggaaatggaagtaaaaattggtcagaagatgatctacaattactaattaaagctgtgaatctgttccctgctggaacaaattcaagatgggaagttattgctaattacatgaacatacattcttcctctggagtcaaaagaactgccaaagatgttattggcaaagcaaagagtctccaaaaacttgaccctcatcaaaaagatgacataaataaaaaggcatttgataagttcaaaaaagaacatggagtggtacctcaagcagacaacgcaacgccttcagaacgatttgaaggtccatatacagacttcaccccttggacaacagaagaacagaagcttttggaacaagctttgaaaacatacccagtaaatacacctgaaagatgggaaaaaatagcagaagcggtgcctggcaggacaaagaaggactgcatgaaacgatacaaggaacttgtcgagatggtaaaagcaaagaaagctgctcaagaacaagtgctgaatgcaagtagagccaagaaatgacaatctttgttgtgtgtgcatttttataataaaactgaaaatactgtaaaaaaaaaaaaaaaa

SEQ ID NO: 47859 - DNA, 605 bp, Homo Sapiens
gcctgggtggcaattcggacgagggggaacctacgagaaaacagctcaggttttatcaccgactgggaatagacaacctcaatgctgaaccgcactggagaaaaggggcaaggtacccctgctgaggtgtatgggctgccatctcaggctgtcttgaggacctgggctccctctgctactcccaggaaatgggctcctgacacagcagtctgccaccacagccccaggagggtgtcaacaccagcaaatgctgtatttgcagcatgtccaagatgacccttctcccctacctctacctagccactggcagggaggggagacagtggtgatagcagcagcactctaggcatggtgaacgcctgggaccaagccatgtggcgttttttattttgcctttctggaagactcaagatatgtctcttcattctctctcagtatttgtttactttggtttttttgtttttaatctcagagagaggtgtgtttagtgggcacaagctgtaatattcagcaaaactttgtcgactggcactgtttacaagtctgttagctgcataagctcaataaaaagttggtctgggcattaaaaaaaaaaaaaaaaaaaa

SEQ ID NO: 47860 - DNA, 1077 bp, Homo Sapiens
  misc_feature (742)..(742): n is a, c, g, or t
  misc_feature (829)..(829): n is a, c, g, or t
  misc_feature (963)..(964): n is a, c, g, or t
ctcgcggatccccaggacaggagcttgacggatgaagtgcagccagccacccaggtgccatttccagtctgacttccagaaatgtgcaccatgtcctagagcacagacccattggctggagcctcctgggagggttcaaaccatcagctctatgagaaatgcccagaaaggttttgccgactccatccgtctgtggaggctgcctgcctccggggtgggatgggtggtttctcctccaattcagacccaagaggtagcccccgagggcatgtacctggtgggaagcagctcaggtacccttgggggttgcagggcccttacgcaggtatttctctctctctcctctctggggtgcgtgtgtgcgtgcgcgtgtgtgtgcctatgcttttctctgtgggcacatcaggatgcccctcggagagcatgtgcacgtgtccccacctgagcgagcgtgtgtgtgtgctcctctgcgtcccaggtttggacgtctagggtttggtgtgcctgtcttctgccctccctgagcccacagggtcagtcaatgtatcttctacgtgcctctccctctgccttctctcacagtgcccccggctccagagctcaggggtaggggttctcctgagggtgcaggggatccttctcatctcctggaccctccagggcactctggtccctattccccagctcctaggcagctgagccgggtcccttaggggaggtgaccaggagctttggtgcaggnagctcttggtggggcaaagggctggacccctgccaggtctgtggacatggttatatgcccgggagaagggggtgcagggccccaggnatggcccccaatcccaccctctgtttattctgtaaactgcaacctataaataaccctttagcatttcctattgttaacaaaattaatttttattgaaataaatttatattttcccaagcctagtaaggaaaaanngcgcgaaaaaaaaaaaaaaaagggccggccgcctcctaagaaatattcccctcgaagggggcccaaaacctttacccggtaaccccaactctttctttgtgtaccaaaatggc

SEQ ID NO: 47861 - DNA, 574 bp, Homo Sapiens
tctagaactagccaccccttccccccaaaaggttttctttgcaagtgcttttggaactaagagctagtatcttggattaactgatgcctgctagtgctttctgattactcgcattctgtttcttgctttaaaagaagagtaaagacaagagtgttggaccagtattgcagttctgtagtgtcatttcttataaaaaacaaaacaacaacaataatttatcaaaattggcatatttaaagcctaacattctaataaaggcacaaatttctttttaatacttgtttcagcctctttaatctctttataagttaactaataaatctattttcttcagacttctgcaatagttctttaaaatcacaacagttagcaagctgacttttgtaatgtgctcaatacaaatacttgtgaacttttaatatgttgagtgctttcattttgataactggatctccatttgatattttcatttgtataactcatttgcagtctgaaaattttttttagtgccagtccctgaacatatcattgaaagttaattttctttgcattttaaaatatctggattatgaag

SEQ ID NO: 47862 - DNA, 703 bp, Homo Sapiens
  misc_feature (563)..(563): n is a, c, g, or t
  misc_feature (638)..(639): n is a, c, g, or t
ctttctatgagtttggtatggtgcgaggaaaatcttacagtttgaattatgacctagaaatttttcattcccatgtctacctaagaaggaagcagtaaatccataatttaccttttgggcaatgctttgtgagcaaaacaaagtcacttctgccataacatcttgaatttaaccatatatgccagattactttatatgcatcaacaagatcaccagtgaagtttaatctagctaaacactggtcctgctcctgagatgggatcctatgtgtttggaaaacgtgataggcacacgaggatgagtggctttgtatcgcccagagaggtgcttgtccagatttcacatgcacatgaattgcctggggatcttgtgaaactgcagactctgctccaagtaatctgggctgggcctgagattctgcatttctaaggagtctcagggatgcctatgctgctggcctaaaaccacactcagaaacgaggacctagaagatccctaaaacagaataagaacaaatgtgattggatttctgattctccctctcttcgaattatctgactttnttgtttttgtgcacatagtaatcatatcaccgctgcataacaacacagtgcatcttttttaaaaaaaaaaaaaannaaaaaaaaaaaaaaaactccaggggggccccgtccccaattggccctataggaagtcgtttaac

SEQ ID NO: 47863 - DNA, 493 bp, Homo Sapiens
tccggatcttcgatgtggattcagggagagagtttggaaaccccaacaggcctgtggccagcacccggctgccctcggacactgatgacagtgatgcgtctgaggacccagggcctggcgccgagcgcggaggagccagcagcagctgctgtgaagaggagcagacgcagggacggggggctgaggccagggccccggctgaggtttggaaaggaatcaagaaacggcagagagactgagggttgcagacacatatatttttgaggctgggtgacgagaaaatctagagacatgagggacataaatgggcctggcagcctcggctctttgcggctgctggcaggactgagctgtccgggttctccccacacttccagcacagctgtgctctgtgtcctgcctcggcgctctcgcaaatgaagctgcaggccaagaaaaaaaaaaaaaaaaaaaaaaaaaaaaaaaaaaaaaagggggggcccccctaaatttt

SEQ ID NO: 47864 - DNA, 688 bp, Homo Sapiens
  misc_feature (677)..(677): n is a, c, g, or t
aggacatttggatggagtatttatgcataagcgagctcaaaggttaaagtttctatgctgaaagaaatgataaggtattttttgcatccgtgcgatctggaggaagtagccaagtgtttttcatgaccctcaacagaaattccatgatgaactggtaacagaagagcacttggcacttatcttcatggcgttatttctaatttaaaagaacataactcatgtggacttatgccagtctagaggcagaatcagaaggcttggttgaacataccgctttccctttttcctctccctccgcccctcccagtacagtccatctttcaatgttgcagcctggttgagaaggagagaaaaaggtggcaggaatttccaggagatccccaagaatgctgccttgtctgtggacaaagatggaccatgtgcccttcggaattagggatagaaacaaatattgtgtgctcttaacgattaagctgtgttatggtgggttttcaggtttttaccttttttctttacccctttactctgcaagaatggggaaagaatgcatactgcgaaaatgagtcttttaaattctgtctgcctactagttttaagtatatggtatgttgtaaaatttccaatgatgagagacagcacaataaatgtaccttatctccttaggctgaaggccatanctacatagggg

SEQ ID NO: 47865 - DNA, 614 bp, Homo Sapiens
  misc_feature (482)..(482): n is a, c, g, or t
tattcaaaatttcctacaaactataattttttccatgatttagcagtgagtgattttctagctttggctcttattaggtattgtaaatagtagggttatatcgatatcagcttttgtgatggcattgtggtcatcagcttcatgacattttacccatttgcagtgatcctgtgtaaaactgccaaggaaagtaattacctgtaggagtttgctgagcttgaagagtgaaaactgttgtgaatgagcctgatcataaaacggaccaggccattcattattcctcaagtgttaatatactgacttatgcagtattcaaaccatctagtgcaatgtttttgtttttgtttttttttttttggtaacacaggtgcagtgtattatagaaaaaataaaaactacaatcattagcagttttaatactgctgtgtcagttttgtaaaaaatgtacattatgtcttttgacatgttgaattttaaactanggaaatgacattgtaaatcatagtagcctcttttaatttaatatgaaaaatgccactatattgaaagtacttaatgtattgtatatatttctctactttgggtctagctattttatatgattgacatgttat

SEQ ID NO: 47866 - DNA, 664 bp, Homo Sapiens
actttgcctatcccagcaaaacacacacacacacacacacacacacaaaataaagacacacaaggacgtctgcgcagcaagaaaagaatctcagttgccaagcagattgatatcacacagactcaaagcaaaggcatgtggaacttctttatttcaaaacagaagtgtctccttgcacttagccttggcagacccttgactccaggggagatgacctgggggaggaagtgtgtcaactatttctttaggcctgtttggctccgaagcctatatgtgcctggatcctctgccacgggttaaattttcaggtgaagagtgaggttgtcatggcctcagctatgcttcctggctctccctcaagagtgcagccttggctagagaactcacagctctgggaaaaagaggagcagacagggttccctgggcccagtctcagcccagccactgatgctggatgaccttggcctgaccctggtctggtctcagaatcacttttcccatctgtaaaattgagatgaattttggtgttgaaagttcttcctggagcagatgtcctagaaggttttaggaatagtgacagagtcaggccaccccaagggccatgggagccagctgacctgcttgaccgaaggatttctgacagactatctttggggatgttttc

SEQ ID NO: 47867 - DNA, 949 bp, Homo Sapiens
ggacgcgtgggcggacgcgtgggttaacattaatattttgttaattcctgtctctccaacctgaagaagaagagcatttgaggattattctagttatttgcaacctccctttgggtttggccctggagtcctagtagagtggaccctccattcctcctttctgagcccaacactaattaattttatgctcctgctgcagaacccccagtgtgggcctgggggtgggaggatgggacttaggtatgcctgctagacaggttcagggaaggactgatgggggtgtcatggatggacacacctctccacaattccttcaggcatggactggaactttcctcctctaggccgggccctgccctagtgcccacccccgcccccgcccccgcccaaccccaactcactggcactcaagccccctacccctgcagtgcctttcacttcttttttccccagaaatccggggcgggggggtggggggttggtagggatgactcctgccacgggggccactggaaagaacgggacacgctctcgcgactcgtctattcctgtagccacatcgccactcccccaccaggtgcgcgaatcaagggcagaaaacccggacctccccaccctgggctggggcgccgggtcttgatgattagcgcggaatgggcggatatcgccaaccgacgccggccgaccgaacggggatggggcaacccccgcaggtgtccctccctgcagggaccgccgcggcgttataggccataatccagagtcctgacacacccatcacccctgtatgtttttaatcttgcctcgggagcgtccggggagtcctacaaagcccgacgacccgctgcgtagcccgcccggtaccgtcgcgccccgccggcgtatctcgcaccgcgaaaatagtaaccccgcacacaacataaagtagtagcgacgcccgacaccccgt

SEQ ID NO: 47868 - DNA, 584 bp, Homo Sapiens
cggactttgaggaggaagatgacaaccccgactgggtgtcagagctgaagaagcgagctggatggcaaggcctgtgcgacagataatgcctgaggaaatgttcctgagtcacgctgaggagaggcttcactcaggagttcatgctgagatgatcatgagttcatgcgacgtatattttcctttggaaacagaatgaagcagaggaaactcttaatacttaaaatcgttcttgattagtatcgtgagtttgaaaagtctagaactcctgtaagtttttgaactcaagggagaaggtatagtggaatgagtgtgagcatcgggctttgcagtcccatagaacagaaatgggatgctagcgtgccactacctacttgtgtgattgtgggaaattacttaacctcttcaagccccaatttcctcaaccataaaatgaagataataatgcctacctcagagggatgctgaccacagacctttatagcagcccgtatgatattattcacattatgatatgtgtttattattatgtgactctttttacatttcctaaaggtttgagaattaaatatatttaattatgattt

SEQ ID NO: 47869 - DNA, 724 bp, Homo Sapiens
cgtccgccccgcgtccggaatctcttaaacaggaactggctaaagctaaaatggctcttgcagaggctcacttggaaaaagatgctcttcttcatcatataaagaagatgacagttgaatagcaggagtggcagtcaaaactgaaattatagctctggagtaggaaggttatatttataatgtggatgttaccagttaggggaagacttttattttcatgaaaagacaataaaacaaaatggaatgtgatgaagtggtgactatttcaaagccagtttagaaagtattagtacgggcattacaatcttttggttgttttgtgttttggggcttaaccctcttttaagctgttgtgatctagggaagtcaacacatagtgtaaaataattacatgcctaatgaaaagaagatgtcatttcctaattttgatatctcattttcggcattttttaaaatgtaaaaggaaaacctcttgtgttcacacagattgctgaattgatttctccatatttgttaataatttactattatttacaaagattcaaatgcttttatgactaatgtaaaatgaaaagaggcttacattttaaatgttattaaaattatgtacttaaatctataattatttaattattgtaaaaagtccaagcagatcaataaactatataattaatgggtttggaaaatcatcaccctactgaacttacaaaatatcttgaaaatg

SEQ ID NO: 47870 - DNA, 470 bp, Homo Sapiens
gagagtcaggataatctctccatctaaagatccttcatcatcctggaagagccttttgccatgcaagacaacatagccacaggtggggattaggaccaggacatctttggggtgctgttattctgcctaccacaccttcctgccactgactcccacaggagaggctacaaaatgatctggcgcacagggatgttttgtttagcttgcggactctaacacttaaaaaaaaacccagatcagaagatctggccatgctggggctcacattctcacctagcaacaactggctggagctgggcaccagctctgcctttagaaggggtgtccacttcaccaggtcaccacagcccacactacgccctatcacttcccacaatgaggctgagtgtttgtttctactgatcaatgcccctgcaggttgcatttattgtaatgaaaaagaaagactgggattaatctctaatcaggtg

SEQ ID NO: 47871 - DNA, 1176 bp, Homo Sapiens
  misc_feature (724)..(749): n is a, c, g, or t
  misc_feature (751)..(764): n is a, c, g, or t
  misc_feature (773)..(774): n is a, c, g, or t
ggtccggaattctcgggatcagaagtggagaggatggtccttggaccccatgtgtccatcacctagctgcatcacttatcagctatggtcaacctggtttcatctgtatctctctcttttcacctgtattgtttattgaaaatccaagacactatgccaatgcaaccgtgactactttgggagattggtagtctcttttgatggtgatagtgatggggtgcactatcataatcacatcaggtctgctttttgcttttaatgttaactaatgaagttccagagatgggccttagaaatgtgttttaagaattaacaaggagtctcaaaaagaaatgagagggatgcttcctttcccttgcatctacaaaacaagagagagactgttctgttgtaaaactctttcaaaaattctgatatggtaaggtacttgagacccttcaccagaatgtcaatctttttttctgtgtaacatggaaacttgtgtgaccattagcattgttatcagcttgtactggtctctaactctggttttggaagaataatttggaaattgttgctgtgttctgtgaaaataacctccccaaaataataagtaactggttgttctacttgggtaatttgacaccctgttaataacgaattattttcctgtgttcttaaacagataattagtttggtaagtttgcatgcatgatggaaaaataaaaacctgtatctctgtttnnnnnnnnnnnnnnnnnnnnnnnnnncnnnnnnnnnnnnnnaaaaaaacnnaaaagggggccgctttaatatccccctcgagggggccaagactttacggaaccccagttttttgtgaacaaaggggccccataaagggaggcccttttttaacttaggccttggcccccccttttttacaactcccgggcctgggaaaactgctaactctggggaaccttttggaaaggaaccttccctcttgtggggggggccaaaattcgggcacaccccccctccgaaatttttaacagccccaacggcgaatataaaattttttacgggataaacgggggtaaaacaaccgcgaataactctcgctccctaaaaagatttttctctttctggggtcgttttttctacaattgtttaccacccgcgccgggggctcccaacggggggggggagactcca

SEQ ID NO: 47872 - DNA, 825 bp, Homo Sapiens
gggcaggctgctgttcgagaatgagtattcctatacgacccagatagactacaaccccaaggaccgcctgctctatgcctgggacaatggccaccaggtcacttaccatgtcatctttgcctactgacacccttgtccccacaagcagaagcacagaggggtcactagcaccttgtgtgtatgtgtgtgcgcgcacgtgtgtgtaggtgggtatgtgttgtttaaaaatatatattattttgtataatattgcaaatgtaaaatgacaatttgggtctatttttttatatggattgtagatcaatccatacgtgtatgtgctggtctcatcctccccagtttatatttttgtgcaaatgaacttctccttttgaccagtaaccaccttccttcaagccttcagcccctccagctccaagtctcagatctcgaccattgaaaaggtttcttcatctgggtcttgcaggaggcaggcaacaccaggagcagaaatgacagaggcaagaaagaagtgctatgtggcgagaaaaaaagttttaatgtataggagaagttcaaaaaaagccagacaaacgctttgatatattactacagaagaaattacaaatcacaaaaaaaaagcaaacaaaagaagacaaatgaacacaaaacaaagaagagaaaccatgtgggacgactcggacgagtagatcataagtcgagcaccttatgattgggccgaaattagagccaatgggcaattggccctataataagcctataaaaatccgggccgtcgttataaagtctgacgggaacacctgcgttacaaatcattgcatgtag

SEQ ID NO: 47873 - DNA, 566 bp, Homo Sapiens
attaaaatgaggaaatgaatgtaaagcacttagtacagtatatgaaataatgggtattcaataaatgatagtttctacagatccttctccccaccaccctccacagtccttgatccagaacttaccctaatctgatactgcctcacgtcaatggtgagctgatggacacaagatcaaataaggctatgcttattttgtgctgccagaaactgtagcaacctctgtgttcttagaggcacactgtttttgcaggccctcctgcctgggtttcattctggctatccctctaaggcgcaaggtgaagaagcttctgggccaggaaggaaaaaaaaatgcccacctgcagctctggtgaagcttgggcctgctctcctttccatcctctaaggagccaacttggcttttacctgtcaaatagtcataaagtcccctatcctttaccccaccttatacacacgaggctttctcaggaagtggctctgccaggcaggactatgtgggaaagggtttttccttagcacacgaaaaaaccccttcccctggattcatgtttcttattttggagg

SEQ ID NO: 47874 - DNA, 454 bp, Homo Sapiens
ggctttctcaggaagtggctctgccaggcaggactatgtgggaaagggtttttccttagcacacgaaaaagccccttcccctggattcatgtttcttattttggagggagaagggaattgcacttcacactgccatcagggtttagttgacctcataatggtgcccactttctcgactttggccaggatttccttcaaagaaaacgactttccttcatttccctaagcctgtggcccaaatggtggaccagaatgatggtgggagggggcaacccccagtagctttgcctgcttttataaagttgaacaaattgaatttagacattcaggctaacctgcctttcttagtactcctttgttggcatgggcaggggttgagtcagcagaagtggaccaaaggattcctctgaataaagttatttaaattgaaaaaaaaaaaaaaaaaaaaacgcgg

SEQ ID NO: 47875 - DNA, 698 bp, Homo Sapiens
  misc_feature (617)..(617): n is a, c, g, or t
tgaacccattttcatcgacgattgctgttagttgacaagtgacatcttgaaaatgccacattccctcatgtcacaggaagttctgggatcaccaaggattgttggagagtccagtgagatggaaccacacaaccagttccctaccagtgtcttgtcagctctgggtgtttgttccctgccactaagtggctcagtcacacctttgctgaaacacagtagtcttatgaaaagcactggacacatactttgaatacctttcatattttaggtgctgaaaatggtgagggagtgagtgctctgcacccttgggcttttcaactcttgcacctggagttctgctggttaagtttgttaaacttagttgaaactgggaacctgttggctaaccattggggccttacactgtttttcaaatggttgcaacatttaacttctcgcacatggttcccgtcctctggagctctgtcttgtcggggagatgggcatgttgtataccaaaagagtgtacaaagtgttgcagggctgtgacacaatagggactctatggaaaactggcagccattgggtgtgggggcagtctgtaaatcagtcacctgtgttgctgcaggccaaggtanaaacgccctccgtgtgtgcatatttgttggttctctgattaaagttttgagtctaaaaaaaaaaaaaaaaaaaaaacgcgg

SEQ ID NO: 47876 - DNA, 1032 bp, Homo Sapiens
  misc_feature (799)..(799): n is a, c, g, or t
  misc_feature (821)..(821): n is a, c, g, or t
gaggaagaagagaagaaagacagtggtgttgcttcaacagaagatagttcctcatcacatataactgcagcagccattgctgccaagaagcatccattctacaccagtcctgctgttgtcatggcacacggtgaacagcccatccctggtctcatcaattattcccatcattcaacagatgaacggattccagactccatcatttctcgtggtgttcaggtgctcccacgagacacagcctccctcagcactactccttcagaatcgcctcgtgctcaggctacatctcgcctctctacagcttcctgcccaacaccaaaagtccagtccaggtgcagcagcaaggagaacattctcagagccagtcacagtgctgtcgatatcaccaaggtggctagaagacatcgcatgtctccttttcctctgacatctatggacaaagcctttatcacagtcctggagatgactccggtgcttgggacagaaatcatcaattaccgagatggaatggggcgagtccttgctcaagatgtatatgcaaaagacaatttaccccccttcccagcatcagtaaaagatggctatgctgtccgagctgctgatggcccaggagatcgtttcatcattggggaatcccaagctggtgaacagccaactcagacagtaatgccaggacaagtcatgcgggttacaacaggtgctccaataccctgcggtgctgatgcagtagtacaagtggaagataccgaaacttatcaaggaatcagatgatggcactgaaagaacttgcagtgcgaanttctggtgcaagctcggccagnccaagatatcagaaccatcggccatgacaataaaagaaggggaaatgtggtttgggccaaaaggaacccacatggggcccctcagaaaattggtcttctgggcaactgtaggtgtccaccaaaagttgaaagttaaataagtttcccaaggggttgcaaaccttgtcaaccagggaaatgaaaccgcttaaaacccggaaaaaagaccttc

SEQ ID NO: 47877 - DNA, 688 bp, Homo Sapiens
  misc_feature (582)..(582): n is a, c, g, or t
gaaaaatcatcagcagtgcggattctgacatcgagggatggcattacctccgtgtttctccctttcgagccggcgggccacagacgtcggaagaaactcccgtatttgcagctggaactgcagcccacggcgccccggttttcctccccgccctgtccctctctggtcaaacaacatactaaagaggcgaggcaatgactgttggccagttctcaccggggaaaaacccactgttaggatggcatgaacatttccttagatcgtggtcagctccgaggaatgtggcgtccaggctctttgagagccatgggctgcacccggccgtaggctagtgtaactcgcatcccattgcagtgccgtttcttgactgtgttgctgtctcttagattaaccgtgctgaggctccacatagctcctggacctgtgtctagtacatactgaagcgatggtcagagtgtgtagagtgaagttgctgtgcccacattgtttgaactcgcgtaccccgtagatacattgtgcaacgttcttctgttattcccttgaggtggtaacttcgtatgttcagtttatgcgatgatttgntaatgcaatgccgtagtttggattaataagtggatggtttttgtttctaaaaagaaaaaaaaaaatcagtgttcacccttatagagacatagtcaagttcatgttg

SEQ ID NO: 47878 - DNA, 841 bp, Homo Sapiens
  misc_feature (748)..(748): n is a, c, g, or t
tcagcggagttgtgggggccggaggcgccatgggagccactggcgacgccgagcagccgcggggacccagcggggccgagaggggcggcttggagctgggggatgcgggcgcagcggggcagctggttcttacgaacccttggaacataatgataaagcaccggcaggtgcagcggaggggccgccgctcacagatgacaacaagtttcacagatcctgccatctccatggatctcctccgagctgtcctgcagcccagcatcaacgaggagatccagactgtcttcaacaagtacatgaagttcttccagaaggcagcactgaacgtgcgagacaatgttggggaggaggtggacgcagagcagctgatccaggaagcctgtcggagctgcctggagcaggctaaactgctcttttcagatggagaaaaagtaatacccagattgacccatgagcttccaggaataaagcgtggccgtcaggcagaagaagaatgtgcccatcgaggaagcccccttcctaaaaagaggaaaggacggcctcctggacacatcctgtcaagcgaccgggcagccgccggcatggtatggaaaccaaaatcctgtgaaccaattcgccgggaaggccccaagtgggacccagctcgcctgaatgaatctaccacctttgtgttgggatctcgagccaacaaagccctggggatggggggcaccagaggaagaatctacatcaagcacccacacctctntaagtatgcagctgacccccaggataagcactggctggctgagcagcatcacatgcgggcaacagggggcaagatggcctacctcctcatcga

SEQ ID NO: 47879 - DNA, 661 bp, Homo Sapiens
tttaagatttctatattggtgttgatggagatattgtacttttgtatccttttcttgtaatgtctttatttgattttggtgtcaaggtgatattgggtgtcataaaattagatgggaagtgctgtctccttccctgtttttggaaatagctgtgtaagataggtatgatttcttctttacatgtttgataggatttaccagtgaagtcatctgaacctagagggttttgtttggtttggttttagttttttgtgggagaattaagattttttaagagatattttcagatttttctgttgtcagttttggtaatttgtgtcttttaggaaaatttcatttcatccaagttgttggatttattggcataaaatttttcagaatattcctttaatatccttctaatgtctgtagaatctaatctgtattgcagtctcttcatattggtaatttgtgttttttctattttttcctggatcagtcagtctagctggagatttatcaattctttataagatcacttattttagatcattaatgatcttttagtacaggggtattcactcttttagcttccctgggccacaacggaaggagaagaattgtcttgggccacacataggatacattaacgataagctgatgagccaaaaaaaaaaaaaaa

SEQ ID NO: 47880 - DNA, 689 bp, Homo Sapiens
tggtgaggaaattgtctctgcctcaacagacagtcagctaaaactgtggaatgtagggaaaccatactgcctacgttccttcaagggtcatatcaatgaaaaaaactttgtaggcctggcttccaatggagattatatagcttgtggaagtgaaaataactctctctacctgtactataaaggactttctaagactttgctaacttttaagtttgatacagtcaaaagtgttctcgacaaagaccgaaaagaagatgatacaaatgaatttgttagtgctgtgtgctggagggcactaccagatggggagtccaatgtgctgattgctgctaacagtcagggtacaattaaggtgctagaattggtatgaagggttaactcaagtcaaattgtacttgatcctgctgaaatacatctgcagctgacaatgagagaagaaacagaaaatgtcatgtgatgtctctccccaaagtcatcatgggttttggatttgttttgaatatttttttctttttttcttttccctcctttatgacctttgggacattgggaatacccagccaactctccaccatcaatgtaactccatggacattgctgctcttggtggtgttatctaatttttgtgatagggaaacaaattcttttgaataaaaataaataacaaaacaataaaagtttattgagcc

SEQ ID NO: 47881 - DNA, 555 bp, Homo Sapiens
aaattgacgctcattcttcttcctattgttccctgacatccagcaaattgtgaatttgaaaaatgatggccagttttcagaagtgctgacaaattcatattggtatgcaaaagctcatcacccattaaggtttgttgttgaatcaacagtactcagcatattaaaacagtacatcagaactcatgccaacagtctttatgatgggattaaggtggacaagatctcctaagatctgtgaatgggattaaggtggacaagatctcctaagatctgaaaagaaaccttaatacgctcatatggttggagtgttaagtgaacctctgattttgtcagggtttttctacgtgtaggcgtgaatagggggcaccccttcaaaactgtacaaagaagacgactgttttccatttccatttaaacatttttagccacttcatttctatttattgaacaggtcaaatttgtcttgttatttgtgagtacagtacatttaaaaaacatccttatcggttatttttttttcagtcggagtttgacgtataaattggttatgctttt

SEQ ID NO: 47882 - DNA, 603 bp, Homo Sapiens
caataatggagaagactcagccaatgaaagttcaagtggaatgctcacgtggtgtggatataaaagccgatattgtgtttttggttgatggctcctatagcattgggattgcaaactttgttaaagttagagcctttttggaagttcttgtaaaaagttttgaaatttcaccaaatagggtccagattagtcttgcgcaatacagccgggatcctcatactgagttcactttgaaaaaattcaccaaagttgaagatataattgaagcaataaacaccttcccttacagagggggatctacaaatactggcaaagcaatgacttatgtcagagagaaaatatttgtgcctagcaagggatcaagaagcaatgtgccaaaggtcatgattcttatcacggatgggaaatcatcagatgctttcagagatcctgcgataaaactgaggaattcagatgttgaaatctttgcagttggtgtgaaggatgccgttcgctcagaattggaagctattgcctctcctcctgcagagacccatgtgttcacagtggaagattttgatgcttttcagaggatatcttttgaactcacacagtctatctgcc

SEQ ID NO: 47883 - DNA, 746 bp, Homo Sapiens
  misc_feature (511)..(511): n is a, c, g, or t
  misc_feature (688)..(692): n is a, c, g, or t
  misc_feature (701)..(702): n is a, c, g, or t
  misc_feature (707)..(709): n is a, c, g, or t
  misc_feature (711)..(711): n is a, c, g, or t
  misc_feature (713)..(713): n is a, c, g, or t
  misc_feature (746)..(746): n is a, c, g, or t
gggacatgacaatgtggatgcaggatttgtagaggaagcagctctgaaacacaccgcgatgcttttaggcttatgaaaaagaaaacgcaattggatctgctgctgccattttaatcttgctcattaaccttactcctttgagaattctttaacaatatttaaaattggtaacaaaaatagtttagccataattgtttagccatgtgagtttcaggttggtacacgttcagacagaactgctgtatcacattccaattttgaatagccagtgagcaatcaagtgtagagaaatgataaatggcctaagaaggcatacagtggcataaacgatgctcttcctagtagcttaataggccacaagctagtttctgttgcactctgaaataaaatatgctttaaaaatgtagggaacagtgcttagaaaagcaaaaactaggtgtgtcattgaaataataggcataaaaattaaatgttacataagaacactatttggaaagagggtccttttaanaactgaatttgtactaaatcagatttgccatgtccagtacagaataatttgtacttagtatttgcagcagggtttgtcttttgtgattcagatgaaacatatttattttttttttatttataaaaagtttgatttaaggaatattttgtcagtccattaaaaaaacctggaaacccnnnnnaaaaaaaannaaaannnananaaaaattgtgtgggccgccctccgggcccttcn

SEQ ID NO: 47884 - DNA, 665 bp, Homo Sapiens
ggaggatggggcatgctgtcatctcaagtctgctgcggctcacccccaccacctttaccccctcccccgcccttcccatcccccactgcacttcactcatgtaagacgtctgcccggtgctggtccaggcgggcatgtgagtttgtagcctctgctccaaaggatggtttacacattattttttcattaccttcagtattcctgtgaatggttcaagagagaaagtcttcatttactaagatttgggttctgcctcccaagtgacaatacggggctgagatccctctcagcttctttgagatgtggccaccataagcatcatcgttgtagggacagtctcattgctgtcttctagcagacagaagagttaggtgccagaaaggacaatcttgatggtgggtcccctccctgaaggactctaagaaggcataaagggggttgggtggagggtggcgtgtgaaggaagaggcccttgattaggtcagtggtccctgggagccatcggcgagaggcctccagccgggtgacagtctgggctctcgggtactaatctttctaatatggcagtgggtgggggcacttctgacttgaattgataattctcatatctaataaaacccaagaagtccctcggtgatatcttatagaaaaaaaaaaaaaaaaaa

SEQ ID NO: 47885 - DNA, 664 bp, Homo Sapiens
ggaaagaggccttttctcacagccattatattaaatagtaggtcgattcacatccgtgctcctggccaccctcccctgtgcctcagtgacatgtagatgactgactgccaatacttgtcaccattccctggaagcagctacctaggggaaacaagatgtagtgctattgccgataacaagtaagattttccacactacagctgggtgtttctcttttctaaagtgaggccagtgttatttcccgggagtgttcagtcttgaccctagtcactgattttttctagttgttaatagagtggttggcttttaaggttcagagactgtggcttggcacctgcgcccaggctttgtgggcctttgccccttagaaagtagctgtaggcaaagatttgtgattttccaattacagtctcagctctagttttagtatctctaattctttggttcccttctcttccctgaaatatattagcacctgccagccaggccctcattttgcccagccagtgtgggcagatcccaccgtggagacatctgtagtgtgtatgtccttgtaacactctgttttcagggactacaacctttttccttctgtgaccagccccggattcaggctgtactaaatacaggtatattgtggaatttagtataaaggccaatctgt

SEQ ID NO: 47886 - DNA, 614 bp, Homo Sapiens
accaggctccggcggcagcgggggtcacatacgggttccctcaccctgccagccgcccgcccgcccggcgcagatgcacgcggctcgtgtatgtacatagacgttacggcagccgaggtttttaatgagattctttctatgggctttacccctcccccggaacctccttttttacttccaatgctagctgtgacccctgtacatgtctctttattcacttggttatgatttgtattttttgttcttttcttgtttttttgtttttaatttataacagtcccactcacctctatttattcatttttgggaaaacccgacctcccacacccccaagccatcctgcccgcccctccagggaccgcccgtcgccgggctctccccgcgccccagtgtgtgtccgggcccggcccgaccgtctccacccgtccgcccgcggctccagccgggttctcatggtgctcaaacccgctcccctcccctacgtcctgcactttctcggaccagtccccccactcccgacccgaccccagccccacctgagggtgagcaactcctgtactgtaggggaagaagtgggaactgaaatggtattttgtaaaaaaaaaaaaaaaaag

SEQ ID NO: 47887 - DNA, 560 bp, Homo Sapiens
  misc_feature (446)..(446): n is a, c, g, or t
gggtcaggctctgcccaggaactcgcacctgtgctggagccctgttcctccctcccacactcgccatctcctgggccgttacatctgtgcagggctggtttgttctgactttttgtttctttgtgtttgcttggtgctggtttatttgttgttttctgggggaaaaagccatatcatgctaaaattctatagagatagatattgtcctaagtgtcaagtcctgactgggctgggtttgctgtcttggggtcccactgctcgaaatggcccctgtcttcggccgagctggtttcctgcccagcctggggcaaacctagccggaaggccgaggtcccattgttggcgctgaggtgtctggcctgaggtcaatggtgcaaaggagccgccaccgggcatgtctgcctggagtgctgtgctgtgtttaatcaggggatacaggcccctgngtttcttttttctttcttcctttcttccttggccaagagaagggcttacaggcatggacatgcacgttggcaaacgggcttgactttggctgatttaaaaagtgagaaagaaag

SEQ ID NO: 47888 - DNA, 832 bp, Homo Sapiens
tagttctagatcgcgagcggcgccctttttttttttttcttcctttcttccttggccaagagaagggcttacaggcatggacatgcaggttggcaaacgggcttgactttggctgatttaaaaagtgagaaagaaagtaaaaaaggttaatttttccttcctctgtaagatatcccagctttaaaaagaaaaaaaaagaattaccaagagaaggggacttctcttccagtttctgtaaggtcttacattgcctgactaaaatgtttcatttacctctaaatttccatatccttctggctgtagataaataatgtagttttgtttatgcatttggaattagtggatttttttgtcattaaaattgttaccactggtaacatgtgacaagcacaccacaattctccctatcttgtgaagttgtttttttaaatcgccttgaacaaaaagttttttttttgtttgtttttgctttctgaaattcacagaagcctaggaggactggggtaagcggaataaactagagaagggagacattgtttggatttcctttatactgtgaagttacatgcataaaagggtcaaacctgtagatgcagaaaaagaaaaaaacctataaatacaaatctgtataaatgtctattattatgaagaattgccaatcttgttttaagcaaatgcattctatcgttattataaatgttagttctagctctatttacttctaatcttaaatcagaataaattaatattgtattgctgctgtgcgtggaaaaagacgatgtttatgttcttatagaataaaagctggggaatgaaaaaaaaaaaaaaaaag

SEQ ID NO: 47889 - DNA, 553 bp, Homo Sapiens
ctagcgaacctttgcccaggcaacgtccgactcttcacgtcatttacaacagagtacacggtggcagtgcccaagtccatgttccccgggctcttcatgctggggacattcctctggagcctcatcgagtacctcatccaccgcttcctgttccacatgaagccccccagcgacagctattacctcatcatgctgcacttcgtcatgcacggccagcaccacaaggcacccttcgacggctcccgcctggtcttcccccctgtgccagcctccctggtgatcggcgtcttctacttgtgcatgcagctcatcctgcctgaggcagtagggggcactgtgtttgcggggggcctcctgggctacgtcctctatgacatgacccattactacctgcactttggctcgccgcacaagggctcctacctgtacagcctgaaggcccaccacgtcaagcaccactttgcacatcagaagtcaggatttggtatcagcactaaattgtgggattactgtttccacaccctcactccagagaaaccccacctgaagacgc

SEQ ID NO: 47890 - DNA, 581 bp, Homo Sapiens
gcacgagaggaaatgcgtagcttgtagagacggctgattcaagttacatgtacagcctccaaagggctgtctccattctgtccccttcccataaaagaagtgggggtgttcgagaagaccagggaagggacccttgcctcacccctccccctggcctcaccttgctcccagccatcgtgcccagtgttaacctcggctggccttcactaaggggactagacctccctctccccaggagccccagccccagagtggtttgcaataatcaagatatgtgtcgagtcatttttctttcaactccctcatttttcattgaacaaatctctgcttttcaagagttgggggtttctgctattttttgctttctctccctccccctgcaaagatgagaaccaatgagttttagggatgtttgtgcgggtagactccatcatccatatgtaacttgttttgaagagaagtgtttccgttgtgtgtcttgatgtaaatatttgttcatatttttgtgaattcaatactatgtaccattgtattatagtaacttttataaagcaaaccataaatatactgacttttcttac

SEQ ID NO: 47891 - DNA, 645 bp, Homo Sapiens
caaatgtgaaagcgagacattatatcttctcttgcttggtgtaactaatcactgttaatttcaggaaacagaactcattaaaactccttagcaaaccaggtctacatcctgttttgtttgctgagtgaggttagtgggagtggtcaaattggtactcttggaggaagaaaaactgtccttccttctccaaaaaaggaaaaattataataatataaatgacaaaaataaaagaattctgtttcctggaataagcatttcttattcctagttgtagggactcctatttttaccttccgttacagtgttgattcataagaaatattgttacatttgagataacttcatctgtatggggtatttatttgcaatgatgtctgagtactgtattttttctgtgcattaccttagtgtcagaatgttggtctttattttaaagtcatatgcatgttctcctgccaaggaacctttacacagacccaaacaaaaaaataataatcaaatgccttcaatttctgagaaaatgaggcagagcatgggaaaaggaataggaaggagaaattaattgagattttcaggacacagacatatgatgtgaatgcctacaaagccagtgcgcataggaacagggggcctgggtaaaagagt

SEQ ID NO: 47892 - DNA, 666 bp, Homo Sapiens
  misc_feature (643)..(643): n is a, c, g, or t
ggtctgaacaaggtggggataaagtagagtggaaataatgtagagtcgtcagactgaaaggccaggttgtagtcccagctcttatctgccatcttggacaaagcttttcccatctccagtctcagtttcccatccataaaatgggggaagtggtaggtcttgctgattgcatccacattcattcctccatttcctttcccagcaaccccccatttctgtttgggaattcatatgatctgccagagcctctccaggggtggaatacatgtcctggactaagccaatgacaccttccatctttccagctatggtgactgggttaggtatgatcttgtgagttaagacaatgaagccagagggaatttcaagacttatgggaatgctgggtagaagctgttttaattcccctgttgaatgtgaaaaaggtagtagtattcctgggtctttatgatgaccaccttgggccttgggatcatgaccaggaatcacgtgaagctgacaccactgaagggagagttgagaggcagaaagagatcaagtccttggtgaaattgtttaagtacaggatcaagccttgcttgagattggccttacctctggactttttttgttatatgagctaataattctgtttattgtttanaaaaaaaaaaaaaaaaacgcggg

SEQ ID NO: 47893 - DNA, 426 bp, Homo Sapiens
aacaccttaagtcctgccaacaattcacactccagaaaggcagaagtgatttacagagtccaaattgtggatcccagtcaaattctggaagggatcaacctgtctaaaaggaaagagctacagtggcctgatgaaggaatccggttaaaagctgggagaaatagctggaaagactggagtccgcagatgggcatggaaggccatgtgattcaccgatgggtgccttgcagcagagatccaggtaccagatcccacatcgacaaggcagtgcttctggtccagattgatgataaatatgtgactgtaattgaaactggggtactagaacttggggctgaagtgtgagccagtgtttattataaagacatttctttttccctctcaattccaaggcattggaaaaagagaggaacaagcagaagatgc

SEQ ID NO: 47894 - DNA, 700 bp, Homo Sapiens
ggacggaatgtgtctcctgctgggggccacgggcgtcgggaagacgctgctggtgaaacggctgcaggaggtgagctcccgggatgggaaaggcgacctgggggagccgcccccgacacggcccacggtgggcaccaatcttactgacatcgtggcacagagaaagatcaccatccgggagcttggggggtgcatgggccccatctggtccagttactatggaaactgccgttctctcctgtttgtgatggacgcctctgaccccacccagctctctgcatcctgtgtgcagctcttaggtctcctttctgcagaacaacttgcagaagcatcggtgctgatactcttcaataaaatcgacctaccctgttacatgtccacggaggagatgaagtcattaatcaggcttccagacatcattgcttgtgccaagcagaacatcaccacggcagaaatcagcgcccgtgaaggcactggcttagcaggggtgctggcctggctccaggccacccacagagccaacgattgactgcacggcagaggcgcagctggcctgagctggggagaggtggcagagggcagtatggctttgctgccaatagtttcttctcacaggggcagaataacccaaagtaaccctacatgatggggctctgtgctgagatgcaatgatgtgtaaactgaggcatgtggagatgga

SEQ ID NO: 47895 - DNA, 571 bp, Homo Sapiens
ttttgctctataccactgaaagcactataacataattgttgtccatgatactgaagcttttcccctcacttctaggttgtttacattcagagctctatcaataagaggaatacatattacagtgaattcgacaaccgcacaagttggcagtaggtatccccaacctaatttatcttggtaaattcaccctgtttcctagtgctgctggataaaagagtgtttactttttattgctcttagacagagtagtctagataagttttcaatttatcaacatagcctagacttctgtaagtggaatgttcattagtaactcatctttttgttgttataattggaaacagaaacgaggcttattgctattgcagaaatcccaaactggcaaaggccagtatatatggtattccataatataaccagcttttgaaatttatgtgtttggattagtgccttctggttaccagtattgactctgctagtttgcacctttccgttcttaacagaaaatttgtatttgttattcctcttaaattttgtcgtaactagtgaaggaagtaaaaaaaaaaaaaaa

SEQ ID NO: 47896 - DNA, 753 bp, Homo Sapiens
  misc_feature (750)..(751): n is a, c, g, or t
  misc_feature (753)..(753): n is a, c, g, or t
tctgcagctaggtacagtaaatggaagtaatcataactctttaccagtagtggtaaacctatgaaaaatccttgcttttaagtgttagcaatagttcaaaaaattaagttctgaaaattgaaaaaattaaaatgtaaaaaaattaaagaataaaatacttctattattcttttatctcagtaagaaataccttaaccaagatatctctcttttatgctactcttttgccactcacttgagaacagaataggatttcaacaataagagaataaaataagaacatgtataacaaaaagctctctccagatcatccctgtgaatgccaaagtaaactttatgtacagtgtaaaaaaaaaaaatctcagttatgtttttattagccaaattctaatgattggctcctggaagtatagaaaactcccattaacataatataagcatcagaaaattgcaaacactagaattaattttacactctaatggtagttgatcttcatagtcaagaggcactgttcaagatcatgacttagtgcttcaatgaaatttgacaagggactttaaaacttatccagtgcaactcccttgtttttcgtcagaggaaaaggaggcctagaaaggttaagtaacttggtcgagaccactcagccttgagatcaagaaaacctaatcttctgactcccaggccaggatgttttatttctcacatcatgtccaagaaaaagaataaattatgttcagcttaaaaaaaannan

SEQ ID NO: 47897 - DNA, 844 bp, Homo Sapiens
gcaagattgcagtcaccggtactggtgcccatcctgccttcaagtacctggcccagacttctgggaaggagcccacctggaacttctggawgtacctagtagccccagatggaaaggtggtaggggcttgggacccaactgtgtcagtggaggaggtcagaccccagatcacagcgctcgtgaggaagctcatcctactgaagcgagaagacttataaccaccgcgtctcctcctccaccacctcatcccgcccacctgtgtggggctgaccaatgcaaactcaaatggtgcttcaaagggagagacccactgactctccttcctttactcttatgccattggtcccatcattcttgtgggggaaaaattctagtattttgattatttgaatcttacagcaacaaataggaactcctggccaatgagagctcttgaccagtgaatcaccagccgatacgaacgtcttgccaacaaaaatgtgtggcaaatagaagtatatcaagcaataatctcccacccaaggcttctgttaactgggaccaatgattacctcatagggctgttgtgaggattaggatgaaatacctgtgaaagtgcctaggcagtgccagcmaaataggaggcattcaatgaacattttttgcatataaaacaaaaaataacttgttatcaataaaaacttgcatccaacatgaatttccagccgatgataatccaggccaaaggtttagttgttgttatttcctctgtwttattttcttcattacaaaagaaatgcaagttcattgtaacaatccaaacaatacctcacgatataaaataaaaatgaaagtttcctcctca

SEQ ID NO: 47898 - DNA, 878 bp, Homo Sapiens
ttcatttgaaacacaaattcagtaggacgtaatgcatgaaataatttaatttttgacatgtacatcgaatcataatttaaaaacaaggtctgaccaggtgtagtgcctcatgcctgtaattccagcacttgggaggccaaagtgggtggatcacctgaggtcaggagtttgagaccagcctggccaactatggtgagaccccatctctacaaaaaatacaaaaattagcctggtgtggtggtgcacgcctgtagtcccagctacttgggaggctgaggcacaagaatcaatagaacccaggaggtggagactgcagtgagccaagattgtgccactactgtactctagcctgggcagcagagtgagaccctgtctcaaaaataaataagtaaataaataaataaataaaataaaaaccaggtcagtacctggagaatttgaatgatagagaatgatagagtaataccctaattattagttaaaacctacaggccgggtgcggtggctcacgcctgtaatcccagcactttgggaggccgaggtgggtggatcacttgaggtcaggagttcaaagaaccagctggccaacatggtgaaagccccattctctactaaaaaatataaaaatcagcgggccatggtggcatgtgcctgtaatccccagctactcaaggagtctgaaggaggagaatcacttggaaccttggaggcaaaggttgcacgggaggtcgaggttgggccaaggatccaggcggggacaccggggggaccgcggctcaaagaaaaaaaaacctccagcggttcaaggcaccgacaagcacaggggcggtttcggcgtgaacccctaaaagggaccgggcggcgcaggagaaaacaca

SEQ ID NO: 47899 - DNA, 575 bp, Homo Sapiens
ttacatttttacatgtaaaaataaactaaacaaatctaatgataaaatataatgtcagatccatgttctaaaaaatttttgtaatgacatgacattacaagagtataaaaatggacattaaatcatggccttgcattaaaatatggaaagcagagcagtacatattcaaatgtattcagaaagtcaaaagattacctatcgttctacaataaaatacatggaaatagcttgctatttttatatacatttccaaaatattaagataactttctgtaagagtcaatgattctgttcgactaaatagctgtcctttccaacacattgctacttttttaaatactgtatcataagttcagcctgtcatactttttgcattgatcgttatgaataccagaccatttgtaagtgtggttgaagagcaaaatgctaattgacatctctagtaaatactgttacaggattcatgaacttgaataattctacagtttgaaactctgatgctatatatacatggtataatgtattcagactttgattactacttatttaaaatggaatgttttatggttgtgcat

SEQ ID NO: 47900 - DNA, 632 bp, Homo Sapiens
ggacgcgtgggtcgtgttgttactgtttttaaagatacgatatttcagataattcaggagcacgtaaggatgaaacttaggataacctaaaatcacacaacctagagagaagcgcattttgtcttcccccattttctaggcaaaaatgaaagtacttgtcctcttgaaaaacaattctctaatgaatatcctatgttacatagaggcctgtgtaatgcatttgtgtggccacatggtgtcaatttcatgaatatacaataatattattaattccctgctgaggacattaactggtttccaaggctgcttgttgtttttgctactacaaataatgcattgatgataaatacttttacatccatggttgtatgtttatctgaactattttcaccaatatattcacctagtgtgtatggaagtgtccatttttgtcatacccctggtaaccctgtgatattatttttaaacattttgctaatggatctctgttcttgtttgaatgtatttaatttccagcagaatgagccccattcttattttgattggccatttatcatgtacatatggtgaaatgcctattcgtgacttagccaatgttgtttctttttcttactgattactacaagtacatc

SEQ ID NO: 47901 - DNA, 663 bp, Homo Sapiens
cggacgcgtgggtcgacccacgcgtccggttgtttagaggaaagaattctaattttaattaattgcgcagtgagttaatctcactcgcttttctgcttccaggcatcttaggaaaaacaaatggttttagtagataagggatgcctactaatgcttttttaaaacaaacagggacatttttattatagatttgatttttttaatgaatgtttttaaaaatatataaataggacaccaaagcggcagggttttttggggggagggggttgttttccaactcaagatggcacattagtggccagcaatattttttaactcattccaaccaggaagcttttttatacattgcctaaatctacgccaaccagaaaatagtctcatctctttttttctcaaatgagatccgtgttttattttagcattaaattagttacactgtgatgactggcctattacctgactcagtccctctaccttgaaattgacatttttaaaaaatgcaactaagtggttaatagtgtgtgacgctcaaagttaatgtaaactgggaaaggtttgtgtgtcgttgcttttgtgtttggttaggcttggtttgttttttaaatttttatactttctaataaatttgagttccattctttcaagaacaggacacacaaaaag

SEQ ID NO: 47902 - DNA, 754 bp, Homo Sapiens
gttcatttaattatgctcctttaacactgtctttctagatttttcacccagtattttcaaaattgggaatgtaaacaattgatatatttattgtatgttggctagcagttcatccttctgcaaaatatgcattcagagaaatgtgaagctgttttaatgaagacttaaaccattgtgtcattgtgttttcatattcaaatacaccaaattaaaattctgaacctatatttttcatcattaacttcctaatataccagaacatatacctttttcatgtaaagtggcaatgggatatggcagttttatttttgaaaaatatgtaacatgactttaatatttttatagttttcagaattagaaacataggaagggaaaatgttttaattagataagtcaactttttatgtgtctgtagtggtgtactataatagcaaattataaagcattattaaatgtttataataatttttaatattacctacattatgaatttaactaaaataaagtgtgagttgtatattttttaattgggttgtttcaatagctggaagcattctgaagcattatattgatttttgaactatttgaactcaactgaggtttgatttgaaataaattataattaaaaacatccaaaaaaaaagaacaatttggggggggggggccgaaaatttaaaccatgttgggggggcccgggtgaagggccggtcagaaccggagaaaatgtggttcccaaaaacggggcgggttaaag

SEQ ID NO: 47903 - DNA, 648 bp, Homo Sapiens
gtccgctcaggaagaaggggaggcccctggcctctccgggatcagtcctaggacacaggctcagcctcaggttgatgggggatgatgtgctcccggggcctgcctcctgcacggggctccacggagcccagctcccagacacgctactaagtgcctagggttgcccgctgtggcctgctcccagggagcaacagagaggccaccaagcagaggcccgtggggctgaggatggagccgcccccagccgactccaagcccgcagagggcagacgccaccctggactgctctccctgcccagctgggcctctctggcctattcctaccttccaggcccactgcactcctgtctgggaggcccttatgagggcagcccagcccccgcacccacccccaaccagagaagcacagatcttggggagctgccccacaagccccgctggccaccgagggctgcagccgctgcgctgccggcttctccccaccaccctgccacctccactgtgatgtatgtccgctccctcgtctgttcccccaggatctcgaagtgactccgggctgagcagtggggcggctgggggaggggtgacgattctcctcaggctttggccctgcaagcaaacccacatatctgctctgtatgtaataaa

SEQ ID NO: 47904 - DNA, 710 bp, Homo Sapiens
caattacttagtttttaaatttttaaggtattgcctacttttctttaaatgcagaaatctcgtcctgagcccttattatgcctgtggtagagcaatgcaagactgaaaaggtgccagtattttcaggcttattgactaagaattagtgccaagaactggaaagtctactttttggagggaaatgatacttagaattgtaaacataagcagtaatagtgtaaatatttagaaaaatagcaagtgctttaactgctcaataaaatagtatagatgttatttcacccttaaggcactggctgtgcccattattttccgatttcgtgattactgtatatattacatttgagtaatgaataatggtaatagtgtattatagtgttctacagcacaccttactgtacagtatttgaagttttcttttatatcaataataaaactataagttaatactgattttcccctgaaattctccacattagcttttaaaggtaattttatgttctttagtttcctggaattataatgcatgaacatatagttcagttttataaagaaattcttaaataataaagttttctgtgttggaacttaaaaaaggaaaaaagaggaagagagaaacaaagaagaaaaaaaaaagaaagaaaagaaagaggaaaagaagaaaagagagagaagggaagggaaagacaaggagaaaaaaaagaagagag

SEQ ID NO: 47905 - DNA, 512 bp, Homo Sapiens
cgctgtggcctgctcccagggagcaacagagaggccaccaagcagaggcccgtggggctgaggatggagccgcccccagccgactccaagcccgcagagggcagacgccaccctggactgctctccctgcccagctgggcctctctggcctattcctaccttccaggcccactgcactcctgtctgggaggcccttatgagggcagcccagcccccgcacccacccccaaccagagaagcacagatcttggggagctgccccacaagccccgctggccaccgagggctgcagccgctgcgctgccggcttctccccaccaccctgccacctccactgtgatgtatgtccgctccctcgtctgttcccccaggatctcgaagtgactccgggctgagcagtggggcggctgggggaggggtgacgattctcctcaggctttggccctgcaagcaaacccacatatctgctctgtatgtaataaatgtcttaacgtcgaaaaaaaaaaaaaaag

SEQ ID NO: 47906 - DNA, 645 bp, Homo Sapiens
cacgcgtccgatgatcatgaactcttagtatcattggggaaggccacatttgccacttatgattgtaaaccttatcctccatttttcctgttattgttggtgcaaaaagcacctattataccaggactttaaaaatcagtctgataagtctttgataagtctaataataataactgataagtccattgaatttgcttctgattactttttctttagtagctaaacatgtatgtactcctatgattacaatgaacactcctctccatttaaattaattatttacattgatgaaatagcaaaatgttaatgactaaatactgtcttggttttttcgttccaggtcagtcaatattaacttcttataattttcttttttttctttatgtgtgtgtgtgtgtgtatttttttttttttaatttcaatggcttttggggtacaaatggcttttggtcatatagatgaattctacagtagtgaagtctgagattttactgcaccggtcacctgagtagtgtacattgtacccaatatgtggttttttataccttgcccccctcttaccctccccactttgagtctctagtgtccattatgtcactctgtatacctttttgtacccataagttagctctcacttataagtga

SEQ ID NO: 47907 - DNA, 621 bp, Homo Sapiens
  misc_feature (518)..(518): n is a, c, g, or t
  misc_feature (598)..(598): n is a, c, g, or t
  misc_feature (605)..(605): n is a, c, g, or t
ttggcttctgtctctttagagccaagaaaatagtaattaagtggcctagatataggaagggcagaataagcacttactccccctgccttccaagatgaagaggagaagcaggccaaccctcaataattgcaagcctgaagagaagtgatcttagagaaagcagagaacagaatggactggatagacatcttgactctattcagcccgtagtctgtgatctggagagtccagttaaggtaacccagatttttgacaaccgccttcctgctgagccaaagttttctcattacccctccactggggaagcagctgaggcccagggccttgctccctgggaaattctcttctctccatctttcggtgcattggccatgttactgtgccaaagtgtcttaattcttgtcccatctattctcagctggccttggaacccacataggagttggtgggggagggatggaatgggtattattcattgtagttgatcctggtgtgtgtattatataaagagacccctncccttattttgtgttttccatccctctcccttaacaggattgaaataaaacatggctctgtttttggaaaaataaaaaanaaaaaanaaaaaaaaaaaaaaaa

SEQ ID NO: 47908 - DNA, 673 bp, Homo Sapiens
  misc_feature (651)..(652): n is a, c, g, or t
  misc_feature (654)..(654): n is a, c, g, or t
  misc_feature (656)..(665): n is a, c, g, or t
gggataccagcaggcccttaagccttccaggacactaaggtcgtgggagcgggactgcaacaagcaatgccagataactgagaaatcatgttctttgtggactatttcagacaaccaggttccgacagtccagcccagaacttttccttctcattttgggttttctcttctcctgctttcctggggagagattaagcgctcattaagcagaggagcccactttgaggagagcaaagcacaagcttgcctgaagaatggatcccaacttctccccggcagctctgcctccctaagtctgtgaagccgcagccctgccctgtcctgtcctgtcctgacttcatctctccttctgcccaagtctgtgtcccatcagacttgcagcctttcagcttaacagttgcccggtcctgctggccccttttcctctggcccccctcttctgaaacaggatgtgcacacatgggccatagccctaaggactcctgccagaccacacagcccacacctggccctggttcacggctgttccacccacccctctttattctggagcatatcagggaaagaaaagttggatgatagattgccttcaccctcacagcgcacaaataaagctacgatgccaactttgcagatgcaaaaaaaaaaaannanannnnnnnnnnaaacatgg

SEQ ID NO: 47909 - DNA, 721 bp, Homo Sapiens
gctatcctgaaataattatatacatgaagacaatgttgactaatgaattaagatacattatatactagttaatgctaactagtctcagtacctgtttttagccatctgttactgtccaatagcacctcattcccacattctattttcccccggtattctttagatcctagtatttggaaaacaatcggctaaccttgacatttctttttaccttcatatgccactatctcggtagttcaaaaaaatttagttcttgataaattgccttgaagtttaccttgtgctggagagccttatgataactccaaagactttcttacggtataatacatgttgtttaggattgtgtttcttagtcactgaagataataaatattaaaatggatgttttcatcagaaaattttcatgttttcctttaaggtaacataattgtaagaattgtttaataaaatactcaggaaattctaaaggtttctcccaatacctaaacatttctgaacatcagtattgcagttgtggaagagcagaaggaggatacatttgtttgtgttgctccccaaaattccaccttgcatttgcatcacaaacttccctcaattgaggcagttttctttgttagaacattaagtctgtgtattgtaatagagtgggctcaatattttactataaagcatttaatagactgttattaatagaaaaaaaaaaaaaaaaaaaaaacgc

SEQ ID NO: 47910 - DNA, 761 bp, Homo Sapiens
  misc_feature (519)..(519): n is a, c, g, or t
  misc_feature (658)..(659): n is a, c, g, or t
cttcgcgtccgcccacgcgtccgccaggcccccaccccttctcccccttcagccacttcccagcgagttggaaatgtgccttgcacccccagccgagtgaagcccagaacgcatctatatgcatcgatgtaacaagctcggatcagggacctaattggtttcccagtagtgggtaatttctcgttgcaaatattaatccgttgtttttctggcgcccagcccggcccgccgcagtactgtactcgaggtacgttcctatgcaaccgagagccccggcaaatacttcatgagcttagcagcctgggctcgagcagctatgcaaacgcgcttttcatttggagcacggggctgatgtgaagataagaattgtttctcctggagaaagatccatcatttctccagcttccaagcccccggcacctctgctcagctcccagatgtgacgagcacctcccgccagggggagtcaggggttgatcaaaccagctcttgtgacccaaaccagtgccgctgcattanagggaggcccagctactccttcccagctgagatgtgggtacaggtcagatttgtcagggagatggcactaacacgacacaagctcactcccagaaccgcagctgatgtttataataatcgtatgtactgtgcaatttanngaggggaaaaaaaggctgtacaagctttaactctaaaataaatttctatttttttccctctgcaaaattaataaaagatgttatttaaaaaaaaaaaaaaaa

SEQ ID NO: 47911 - DNA, 675 bp, Homo Sapiens
ggtgtgttggagctggcttgtaatgtcttatgagtgacaatcgttagtttgaggaattttgtgagacagttgtcaaattgttgctagcttgaaatctgcggcaattggagtatttacaccatagaaatgctataagtgaagacctacctttcccttaagagctagttgttaaacctttaccagcataccactggaccttgtctaaaatttctttgtgttcccagtgtcttgcccagtagatacaagataaatattgccagaatcagatatcaggaagtagtaagaaaaggagttaatatgcaaactaaatcactcgctcaattgaataattgagatcttctgttcatttgttccttggaccttaatcatttgcattttggagaaaattttttctgctttaaaagtctgtaatttcagtttttgtgtcggggagagggaaaaactatttgtctgtagttgctttttgtgacaaagtgaatacccactgggctaagtttcatatctaaagcttgtcactaagaattttcatttttaggggtcaaaaacctattttgaaaatagtgttgtgtgaatgctgtaagtgttgtacatgtctctggtttcagaattaaaagaattcagagttaccttgtgagataaatgttctttgcttcatattcacagtttcacctccat

SEQ ID NO: 47912 - DNA, 445 bp, Homo Sapiens
aaaattggacttagacagtttcggtccggagtcccgggatcgcgggtctgtctcttgcttcaacagtgtttggacggaacagatccggggactctcttccagcctccgaccgccctccgatttcctctccgcttgcaacctccgggaccatcttctcggccatctcctgcttctgggacctgccagcaccgtttttgtggttagctccttcttgccaaccaaccatgagctcccagattcgtcagaattattccaccgacgtggaggcagccgtcaacagcctggtcaatttgtacctgcaggcctcctacacctacctctctctgggcttctatttcgaccgcgatgatgtggctctggaaggcgtgagccacttcttccgcgaattggccgaggagaagcgcgagggctacgagcgtctcctgaagatgcaaaaccagcgtgg

SEQ ID NO: 47913 - DNA, 856 bp, Homo Sapiens
ggagaccattaggctgagaatcaatatgattgaggttatctattctcctgaaaagtgaattggagaataaagaaagaatatttgaaaggatgttgtgtactaggcaatatactagcatgtattagaaaatacggtaaactgtgggttagaagagtgaaagtagctggtatgatagagcactggactgagtaacgaagagattctagtcatggctcttgtggtcatttcatttttgagcctcacattcttccaattaatgagggtaccagattaaataaactctggggattcatcccaattcgaactctgtaattctctgaatgaactctctcttcaattaaagccaaattattaacattttaactcaagtttaaatttaatagagaagtcaaaatgaggtatgcactttgtggaatgtttttggtcttatcacaataacctgattaaaatggtgcctttatttccatgtttactcctttaaataagatgaaagctttcagaacatttatttgcaaaatgactgtcaatatcaacaatatgcatcaaagtaccatatatgctaagggagaggagcacttgatgggctgctatgttaactgtaaattgagaactgcttgttttatggcgtttgctgttaaaaaaaaaactgctggcttttaatatgtactttaaaatatactcatgtctgggagactcagaaaaaaacaacaaaaacaacaaaacaccattgtggcccacatgggccctaaaaaacgtttgaaaacaatgtcgtgaggcccggggcccatgaggtaagcggacacggccaagaggcgcccagagaaacggggcacaacaaggcgggatctccgcataa

SEQ ID NO: 47914 - DNA, 892 bp, Homo Sapiens
ggtccggaatcccgggatcagaatataattacctccagaaagataaccctgctgaatatgccagtttaatggaaatactttatacccttaaggaaaaagggtcaagcaaccacaacctgctggctgcacctcgagcagcgctgactcggcttaaccagcaggcccaccagctggctttcgattccgtgttcctgcgcatcaaacaacagctgttgcttatttcgaagatggacagctggaatacggctggcatcggagaaaccctcacagatgaactgcccgcctttagtctcacccctctcgagtacatcagcaacatcgggcagtacatcatgtccctccccctgaatcttgagccatttgtgactcaggaggactctgccttagagttggcattgcacgctggaaagctgccatttcctcctgagcagggggatgaattgcccgagctggacaacatggctgacaactggctgggctcgatcgccagagccacaatgcagacctactgtgatgcgatcctacagatccctgagctgagcccacactctgccaagcagctggccactgacatcgactatctgatcaacgtgatggatgccctgggcctgcagccgtcccgcaccctccagcacatcgtgacgctactgaagaccaggcctgaggactatagacaggtcagcaaaggcctgccccgtcgcctggccaccaccgtggccaccatgcggagtgtgaattactgaccccaccacacaccggaccaccaagagagccagggctgctgtttcgcgactcaccagcacagatttgctcagaaactctgcccaagattgggcagaagttactttaaaaagacttggttcagctggtcacggtggctcgcgcctgtaat

SEQ ID NO: 47915 - DNA, 621 bp, Homo Sapiens
gtcatttgggactggggcgccctatggggctcgaatgccctttgggggccaggtgcccctgggagccccgccaccctttcccacttggccggggtgcccgcagccgccacccctgcacgcatggcaggctggcacccccccaccgccctccccacagccagcagcctttccacagtcactgcccttcccgcagtccccagccttccctacggcctcacccgcaccccctcagagcccagggctgcaacccctcattatccaccacgcacagatggtacagctggggctgaacaaccacatgtggaaccagagagggtcccaggcgcccgaggacaagacgcaggaggcagaatgaccgcgtgtctttgcctgaccacctggggaacacccctggacccaggcatcggccaggaccccatagagcaccccggtctgccctgtgccctgtggacagtggaagatgaggtcatctgccactttcaggacattgtccgggagcccttcatttaggacaaaacgggcgcgatgatgccctggctttcagggtggtcagaactggatacggtgtttacaattccaatctctctatttctgggtgaagggtcttggtggtgggggtat

SEQ ID NO: 47916 - DNA, 891 bp, Homo Sapiens
  misc_feature (860)..(860): n is a, c, g, or t
ctgagttgtgaattttttcttaaagcagtactgtagtactgaatattcctttaaaggaactgcagtgagcctatctaagtttttttaaattaaggcttttaaaatagaaagctgatgcttgatcttgcacaatttttatgtctagtatgtatgcttgagtgaatgtgcgagtatgaatgattagagaaaatttgagtcagtgtactttatagtgtgaatcctgtgagctaatacagtctatacttatttcttccctacctgtttcacatccgtaagatttaagatatacattttttgagaggtagtctgtctgatacaatgtaaatgacaaaacataattcctgagaggcccagaacaaactggagtctagcctggagttaaattgagacttctaaaatgattggaacaaagactaagttgtgccagatgtaaatcaacccctcttttagtttactttagactttgtattagctcatcttttttgtagtaaatctatagttttaaggtttctcaagatgtggctctacctactatgatgaaaattgaagtgggtcaaaagaattagatgtacagtgaagggaaaagaaaaaaaatgggcgaagagagggtggaaaataaaaggattcttttttcttcctttctgtttctcgtatccctgctccctttttcctccccttccctcattctttgcctctatccttagctgaagacaaactagaggagcagcatcccaggtagtttggcttttgactgcaaggtagttaagaaaggtgtagatataatgaggtagaagtagaaaggaagaaaaactcaaagaaattcttaaaaggatcttaggcacataatgtggtccctggantaaaggatgcctgctatccgtgagttcatgg

SEQ ID NO: 47917 - DNA, 564 bp, Homo Sapiens
ggagcagcccgccctcaatgactccagatactgcctgagcagccgcctgagggtctcggccaccttctggcagaacccccgcaaccacttccgctgtcaagtccagttctacgggctctcggagaatgacgagtggacccaggatagggccaaacccgtcacccagatcgtcagcgccgaggcctggggtagagcagactgtggctttacctcggtgtcctaccagcaaggggtcctgtctgccaccatcctctatgagatcctgctagggaaggccaccctgtatgctgtgctggtcagcgcccttgtgttgatggccatggtcaagagaaaggatttctgaaggcagccctggaagtggagttaggagcttctaacccgtcatggtttcaatacacattcttcttttgccagcgcttctgaagagctgctctcacctctctgcatcccaatagatatccccctatgtgcatgcacacctgcacactcacggctgaaatctccctaacccagggggaccttagcatgcctaagtgactaaaccaataaaaatgttctggtctg

SEQ ID NO: 47918 - DNA, 738 bp, Homo Sapiens
  misc_feature (653)..(653): n is a, c, g, or t
ggagcggccgcggctgtaggctcttttttttttttttttggttttaaaagcacaatcactaaactttatttgtaaaccattgtaactattaaccttttttgtcttattgaaaaaaaaaatgttgagaagcgtttttaacctgttttgttaatgctctatgtttgtatttggaatatttgaataatgacagatggtgacgtaacatgcatactttattgtgggccatgaaccaaatggttcttacttttcctggacttaaagaaaaaaagaggtttaagtttgttgtggccaatgtcgaaacctacaagatttccttaaaatctctaatagaggcattacttgctttcaattgacaaatgatgccctctgactagtagatttctatgatccttttttgtcattttatgaatatcattgattttataattggtgctatttgaagaaaaaaatgtacatttattcatagatagataagtatcaggtctgaccccagtggaaaacaaagccaaacaaaactgaaccacaaaaaaaaaggctggtgttcaccaaaaccaaacttgttcatttagataatttgaaaaagttccatagaaaaggcgtgcagtactaagggaacaatccatgtgattaatgttttcattatgttcatgtangaagccccttatttttagccataattttgcatactgaaaatcaataatcagaaaagtattttgtcaattatttattaaaatgttc

SEQ ID NO: 47919 - DNA, 708 bp, Homo Sapiens
ggatacaagataccaaatacagaacttattcatcagagttcccccttgctgaagagtgagttagtgaaagaagtaactaaatctgtggaagaagctcagcttgcccaagaagtcaaagtaaacatcattcaggaggaatatcaagaatatcgccaaacaaagggaaggagcctatacacacttctagaggagatacgggacctagctctcctggatgtttcaaacaattatggaatatgagaggctcttacttcactaagagctgtcatatgtgaatgttttacagtcttttcaaacttaacatttaatgtgtgtcactcagtgctctagtcgatcaggactgggtagctatttcgcatatatgtaaaatgttctcagccgggcacggtggctcacgcctgtaaccccagcactttgggaggctgaggcgggcggatcacgaggtcaggagattgagaccatcctggctaacacggtgaaacccagtctctactaaaaatacaaaaattagcccggcgtggtggcatgcgcctgtagtccagctacttgggagctgaagcagagaatttgctgaccagaagagagctgcatgagcgaatccacactgcatcagctggcacaacagatctctcaaaaaaaaaaaaagttctctctaagtgcatatagtatagtcttgaacgtctatgtgagaggtgctcagcctcaata

SEQ ID NO: 47920 - DNA, 1037 bp, Homo Sapiens
gttttttgtttgcgagcttgccctgtccctgcttgtagcccctgagccctcacagttgtcacacacccagcagtctgccaaggagctgcttttcctgactactgtctctccatgcctagggaagtcaaagccctgggccttgccttcagggagttgacagtgtccttgaagtggtgaagtgcccaccacatgaaccaaggagagacgccaaagcagctgccatggactctggcctgtccaagcctctgtgcacctgcagtctctttccactggcacttccctgctttgctaccatcgtggaagaatggaagggagggggagaaggtgggtgggctcagggagaacggccagagtggccagaagatgcagagagaagccccactgggatctgagtattccccaagggcactcagccacagggatgaactagtgtttgtttgtatccttgcagttatgtgacttaaagtgactcagagatatctatgtatgcgagtgtactccgctggcaatgaagtaaatatatcaatttgtggaaaaaaaaaaaaaaaaaaaaacaaagaaacaatacaaaaaaacaaagaaagacgaggggggggccgcgccactaaaaatatacccccggagggggccccaaatttgggcgcttacaccacattttttttgtcaccgaggggcgcccctaatggggagcacagttatataaagctgaggcagcggtgcaccccaccttttttacacacaacagtggagagccgttggaaacaaactgtcacagcgtgggaacaactcgttggggagagaagaaaaacccattaattacttggggggggggggggggcaaaacataattttgggggacaccaattatcaccttcaaacaggaaaatttttaagaggcccctctgaggagagaacaatatgaaaacttctaagaggaggtaatagcggtcgttaaccacacaggagtagtgttattctcttggttgtctatgagaaatttggggactaacggaatatattctttgaaaaattttccc

SEQ ID NO: 47921 - DNA, 645 bp, Homo Sapiens
ttttttttttttttttttgggttttatgctttttatttttcctaatgaagatgcaattaatttaagatggcaccttgaactactgttgatatatataataaatagcagtgcattacaaaatattcaaatacagtcattaatttttttctatttttccccaagctgtggcaaccaacaaaaaacacaatgacgttctagtgacctagatataattatgttcctttcagaagtaaagttttttaaacatagtaaaaacaatatgaccttattaaaataaaactctcttaactatacgtgcctttaacaaatttttatatttatatataaatataagaatatacaaagcttgcacataactaataagtataatagcatatcattaagaagcactgttttctaaaaaattcgtgagtctgcccttcttgaaacataaagcttattttccattatctgtatgccattttaaaacctttcaatattcccttgaaattaataaatatgaattaagattaatgcacaaaacttctgtagccttaatgtcatatatgataaaaagagatctagaagatactagtgtaggaaaatctaagatggcatcactatttctgcactcttcacttgaagcacgctgaatagctccactgg

SEQ ID NO: 47922 - DNA, 568 bp, Homo Sapiens
ggaggcaccaggtctggctccttcagggctgtcacagtcctgaaaccaccacttgcctaggccacggatgcctcaagagacccggtcagcccagactggaggagtgccccaaaccagtccagtgtccacttgccagaatttcagctccttttttctgtggtgaggcaaaggctagaaataaaatggaatccgcgcccaagtgggacccaagcaggcatctttcggtggagaaacgccccccagtgtccttgacacagctgactgctggcatgagcccaccctctgcctgaagatgcaggaccatttttgccttaaaagttggggaggagggacatgtagattgtgtgcattgtgcatagtcaaggaaatcctagggccacctccagttcatttgtgtgggaacaaggatattttatagatacaaattatttttatgctgtgttgaattaatcaattaggagaggaaggggaaatcacttccttcaaactttttatctgattgtctaaaattctaaccatgcttttaacttattatttttacccagctctgaaggtcattgttcttgcc

SEQ ID NO: 47923 - DNA, 726 bp, Homo Sapiens
tttttttttttttaatagagacgagcatctcactatgttgcctagggtagtcttgaactcctggcctcaagcaatccccacccgactccgcctctcgaagtgatgggattacaggcataaaccaccacgcctggccagaaggtgctttaacaccaaatctgaaaattgttcagaagagaaacattgagcatgaacaccatctgtgcgagtcatttacttattgcccttcacctctaaatctaccttctgtactcttcttccctgtaatgatggggctagttgtcctcaaactgtttctcagacttctttttaagcttgcttcctgttcagttctgccaataggggtcactagagagagactgggaggcagaaggagagaatatgcttcctgttttttctgttcttgttaatgttgcttacaggaccagcaatgcttcttcacctagagacacttctcccagcagtggcagtgccacttcagcttctttcagcactactggaatcagcctcagtgattccccctgtacccgctcagagattatcaacagcagccagatggttctaccttccacaaagattgtggttgcaattctgggcttctaagttctggttacttcatatttttccttttgttcctccagccctagaggtggtagctgctttctgaagttattatttctagatgacttttggtttttcagcctttgtattttgcttttcagccct

SEQ ID NO: 47924 - DNA, 1073 bp, Homo Sapiens
  misc_feature (806)..(806): n is a, c, g, or t
  misc_feature (812)..(812): n is a, c, g, or t
  misc_feature (831)..(831): n is a, c, g, or t
tgacgcgtgggagagccggagccggtggcagagccagaagaggaacgccccaaaccaagccgccccgtggtgcctcctttgatcccgccaaagatcccagaaggggagcgcgttgacttcgatgacatccaccgcaagcgcatggagaaagacctgctggagctgcagacactcatcgatgtacatttcgagcagcggaagaaggaggaagagaggctggttgccttgaaggagcgcattgagcggcgccggtcagagagagccgagcaacagcgcttcagaactgagaaggaacgcgaacgtcaggctaagctggcggaggagaagatgaggaaggaagaggaagaggccaagaagcgggcagaggatgatgccaagaaaaagaaggtgctgtccaacatgggggcccattttggcggctacctggtcaaggcagaacagaagcgtggtaagcggcagacggggcgggagatgaaggtgcgcatcctctccgagcgtaagaagcctctggacattgactacatgggggaggaacagctccgggagaaagcccaggagctgtcggactggatccaccagctggagtctgagaagttcgacctgatggcgaagctgaaacagcagaaatatgagatcaacgtgctgtacaaccgcatcagccacgcccagaagttccggaagggggcagggaagggccgcgttggaggccgctggaagtgaggatgccgccccggacagtggcacctgggaagcctgggagtgtttgtcccatcggtagcttgaaataaacgctccccctcgactanaaaaanaaaaaaaaggggcggcccncccctttttttttttttttttagtcctggggagagccggttatttccagccatcgaagggggactaaaccctcccagggcttccccggggggtcaccggtccggggggtgggacattcttacctttctggggggccccccaagggggggcccttttcccgggcccgccccttccggggaaccatttgggggggggggggcctggatgggggccccgtgtattcggccccgggtgggtctccc

SEQ ID NO: 47925 - DNA, 1148 bp, Homo Sapiens
tcgtcgacccacgcgtccgcaggctggtcagttatacaaattgcatttctaaggctcaggctacttctcctcaaggaaatcatcttgccctgggccctgtgatctgcttgaaaggaaagcaagaactataaggaggatgtgtagttgcaaaaatggctccatcggtaactcaagcttcagaatgttatgacatacagaaaatcaaagatgctgtgtcttagcattgagtaatatgggtggtgctgtctgtaatctggtcagattcagttaactgttcagaacaaaatttcctctgaaatactgttgagaaagtctgtcatttgcaaaaagagcagagtttaaatacaagccagtctttccagtcaacaatgcctctttgaagaaaaccaattaaagactgtttgcatgccgctgaacccttgtgagcagttaggacacagtctaggacagaaagatgacaaggggaaggactgagggccatctgagagcacaagctgtttctacctctcagaggcattgaaatattgcatgctataaactgcctttgtgtatctgttaccacctctcacttgagacatcactcactggtaaaatgttttataaataaattaataagtagccatcccgccatttactaaagtgacccgcctcgctctcccccccccacatcaccccgtctcccacccccttttctctcgacaccaaagctcgcgaagggttgggggcggccccccataaaaatatcccccccgaaggggcgccaaaaggtctacccgataccccaatttttttctcggacacaaggggggtccctctatacggggggccccaaataaaaaattattgggccctgtggccgcctctcttaacacaccctggcgaccgggagaaaacaggcaccactttggggacccctttgcgggaggagaaaccttccctcccgtgggggggagaactacatggggaaaaaaccctctccacgcccatttttaaccctccccacggcccaaattcaacacattctttaccggcgagaaatggtgggtcaaacaaaactgcgctaaaatactctcaccgagcttagaacaacatactcgcctccacggagggagggtcagtttgcgaagaaattttagtcaccgcgagag

SEQ ID NO: 47926 - DNA, 665 bp, Homo Sapiens
ttacaagcgtggtgttcttgaatgcttccaggcgccttatgaggcccccgatgtacaatctgtgcttaactaaaccccactgtcttccagggtcaggttggccatccgcaggcgtagttgctaggaaggtttgacagatgtccgcctgttgattcagacgttcccaggatttggagcaagaagagcaaggaaggccaggcgcggtggctcacgtttgtaatcccagcactttgggaggccgaggcgggcggatcacgaggtcaggagttcgagaccagcctggccagcatggtgaaaccccgtctctactaaaaatacaaaagaaaattagccgggtgtggtggcacatgcctgtagtcccacctacttgggaggctgaggcaggagaattgtttgacctggcaggcggaggttgcagtgagccgagattgcgccactgcactccagtctgggcgacagagcgagactctgtctcagaaaaaaaaaagagcaaggaggtgttgacaccatgggttccctggctgggcgtggtggctcacgcttgtaatcccagcactttgggaagctgaggtgggcggatcacttgaggtccggagtttgagaccagctggcccacatggtgaaacaccgtctccctaaattgaaatacctgggtgtgtggaggc

SEQ ID NO: 47927 - DNA, 567 bp, Homo Sapiens
cctctgtgcctgccccctctgcagaggaaaccctgctgcggtgcagagacctggcctcctccctgcgcctcctgcgggccgactgcctcagcacgggcatggagctgctccggcggatccaggagaggctgcttgccatcctgcagcattctgcccaggatttccgggttggtcttcagagtccatcagtagaggcctgggaggcaaaaggacccaacatgcctggcagtcagccccaggcctcctcagggccagaggcagaagaggaggaggaagacgatgaggatgatgtgcccgagtggcagcaggatgagtttgatgaggagctggacaatgacagcttctcctacgatgagtctgagaacctggaccaagagactttcttctttggtgatgaggaagaggatgaagatgaggcctatgactgagggggcagatgcaggaaacacctagagcagccccagagtcacggggctgagggggcgggagctgcccctgtcatagggagggggattcccagcgtctgtagtgcttcctgtttgctgaataaaggtctctttctcacac

SEQ ID NO: 47928 - DNA, 638 bp, Homo Sapiens
ttttcaatggctgacactgtctccaactctccccttcctccttcttcctcaagcttcctatgcaccctactttcccaggccaggatggttggcactgatcccaaacctctgggggcaggtggaaattggctgtggtgagccatttcttcatgtccattcagctctgaggccttcctggccctagctgagatcatcatctcctcctttgcttttaccccaggagtgaggttgggttagaggtggattctgattccgtagcagctaaattccattctccctgtcctgaccatcctgcctttacccataaagcacccgttcctactgaccaaatctctttactttgttggagaaaaaaagtattttgtttttaaatctattttctaatttaaatgcaatttaatatgtaaatctctgcacttttgtgtgagcctacaaatgtgtatgtgttgggggtttttcactctctggtatttcttaataaagaaatctttcttttggggggaagccaattaatgaaggagccttgaatggttttagaaaaaaaatattatatattcaaaaaacgaaggcgggccgaaggcttattccctttagtggaggttaatttttactttggtacctggcccgcctttttccaa

SEQ ID NO: 47929 - DNA, 609 bp, Homo Sapiens
  misc_feature (555)..(555): n is a, c, g, or t
attcacacatctgctttcagtgcctggtgaaaaatagaccttggcctaacagtgtgactctctccaccgcctcagtgtagggaagggtccaggccagggaaggagcaccctctagtggaggcgggggtgaattcttaggtcgagctgatgcaagaaactccggtagccagcctctgtgaccttgtacatgagtttggtgtgcctattgtgatttaaaacaggtgggttatcaagaggaacttgagatctctttattacatggacatttacttcagggggaccactgtaagaaaagccaaactccaagaccaagtaagttagaggagtcttgattttttagacttcactgcggagttctgtacaccctttgccctgatgaatttgaatgggtttgatttgcaaatttggatttacacccattgttttggaagcacatcagctgaataaagttgaggtttattttatttagaaaatcacattttgtaaaagaattcgatattcatttttataactaatggccccctttttttatgtttctaggccagagattctcanacactgctccatggccaggggctgggctggctgcttcagaagcagtggggaagc

SEQ ID NO: 47930 - DNA, 1073 bp, Homo Sapiens
atgtaaagaatgttgaataaaatttggcccatgttttaattgactctaggcacctctattgaaataagtctgaggcatagtttgtgaaacatgtttcaaaagtgtttgatgtataataaatgctagaaatttacagtacagaaatagtaaaaaaaataaaataaaaataaacctgtagattacagctctgttcctaagaacctcagcctttattgtgtcttagtaaagttgatctgctttatttttagtttattgaatttctggtgtactagcctcttaagatagaacttttaatacatatgtactggttaatgcctgtttacgcagaaaatggcactttgttctttcagtgtgtttccctcagtgtcacagggtatatcaatttgatagatcatttgacatttgtcaaaaatacgtttcccattttaaaaatatgtataaytggttgcatagacatatgtcactttttgcagtgtcttcatcttgatcatagttttagacatcaactatgtctcactttccaactgccatagaaatttggtacatttgcaaattctggtggaatctagtgagctgaatgtattggtagatcaaatgatccaaaggacttgggtgttatccttcagtctgtgttgaaccattcagatattgggaatggtccttacacaagggaagtcttttgagaatatttgttctcttattttttgtttgtttgttgctggcaaaaaaaaaagtaactttaaaaactcagaaaagccactgaactgtattttgtgaccttatgattagttttatctttcaactgatttttattgttacttttactcaatatcaacagtacttcaatagatatttattagttatgttcaatctaatgacyttaaacagttgaaaaggaggaaatcaactccagtccacacatacagtcatgtatmatwagatgtcatgttgtatgtcmmmtgtttctaattgatttcyctgtkgtatagktataacatcaaaatgccaaagggatwttaaatagctcmatatatymmcagacttaacyggrcctwtktttatwattatcaatt

SEQ ID NO: 47931 - DNA, 621 bp, Homo Sapiens
ccggcaaatggagagcctaatttaccaaaatgaaacttgtaaatttttgtgtcattgtatgtaagtttactttttatggaggaaggattctagataatgacaaatgaagattatgacatgtatttcactcctgtgattaggttctacgcacatgggtcataactcgcatgtcgagccccctctagtgaagggtaggagagctcagcctcggatggccaacattcagttgttcaggttcattcgtcaaagttaagttttagaactatttgtactcagtaacaaaaatcattttcttttttttttttttttttctgttgtggaaaagcgtgaatttgttattaagcatttgattttctgtgtccttaagtacttcctgaagatgaagcaaaattttaatctggcaattatgaaaaagaaatattttagctctgaaggatttagtagattctgttagattagggaggccttacagactgactttacttaaagaggacgcgtcactcgctgtcagtgtggtgtgggctttatttgcttaaataccttcatttgtatagtacgtctcacttgaaattgctttgtatacattttgtaaaaatatttataaaatgttttgtaaaaaaa

SEQ ID NO: 47932 - DNA, 828 bp, Homo Sapiens
tctagcgaggtgacagcgtagaacccaataatcttctccatgtgtgccttctctagtagaatgtgagctctttgaggccaaggtctatttaatttgtttgaaaaattcattgttatatcctcaaagcctagcacatagtaggtactgaatgaatgaatgaacaaggggtgccaggagactgctactcccagtccttcccagaaactgcctagggctttgagtcattttatgaagctaggtcttaatgcgtaggcaacctcccagctcactatgaacgctgacagaagagtgttttcatgtctataatcaagaattccagatacattccttttactgaaccttgaattgatcctaagattggtagtaaaggtattatgttacctcctaacagcactacaaagtacctttttttatcagaaaaaaattttaccattaggactcaatttgaagtactaatgcttctcaagttctccactatgagagttaccctgtattagaccgttacctataagaattaaggggtaaagcactaaacagaaaagaaaaaaaaaatagcaactctggtgagcagatttctttcctttcttccttccttctcctcttcctaccttcctccctcctttccctctcctcccattctcttccctttccctcccccttcccttcccttttcttctttcctccgctccccctcccctttcctcccctttcccatcttcctttctctttttttttacttaaatcccccagtgtggacgttaatatagggctggatttctaaaaattgtgggggaatttccagggaaagggagttggcccttgggttaa

SEQ ID NO: 47933 - DNA, 535 bp, Homo Sapiens
  misc_feature (525)..(525): n is a, c, g, or t
cggacgcgtgggttaaaaggtactgtcaatatctcactcttggggatatgagctctaaatatgagaagcaagttatatgtgttcacctgaggaagaagctgacggacaaagcaaaccctctttaaaaaaaaaaaaaaagaaaattccacgtgtgtggaatacagccggtgaaaaataatcactgtagttagaatcacatacagaaaaaaaatgattgaatcctccaagaaggtatttcaaaaatgggaaatgctatacttataagaattgaaggaaaaaaaaaaaaacacctcacgtatgttattcttcatcctgttcttcccattgggactgttatggccatattctacagtatagtaaattttaaattggccacatttttttttgtttcagcaagttatgtaaaatgctataaattatgtgtatgttaaaggagtactttaagaagagatctttatccaaagttgtttttgtatatttaaatgcttacctttattttttgtaaagtgcagcatactcatttgngtataatctt

SEQ ID NO: 47934 - DNA, 624 bp, Homo Sapiens
cgcgtccgacctcattcagtataaggcagcctttaatttgcttagaaggcaacattagaaggttagagttcagcaggaacatagaattttaaaatgtgacttcaactgaataaatttgaatttctgtagggagtaaagaatcaaaacacctatttaaagactgcaaaatatgataattatttttaaagtaattgattaaacctggtaggttttcccaaaatgaaaaacaatcagttctaaaaccaaagctgatttttagaaaatgtgaaaatgtaaatcaaccctatccataacagattctctaaaactttatcttacagtcactttcaaataactattcaaaaatgtaactgctatattaacgtcttaaaataatttaaaacattttaaaatatgaatactgtagtttaaaacaaagaatctaggggaaggaaaagtagacaaagaaatgccaattccagtccaaagctgtatttgccaagttttcttagaatgacttttaccgatttatgaattcttatacacagaatgcataatggaaatactgatttttgtctaaagtggcattattgactgctgctgtgatgctactataatgtaatacattattaaattgtttcaagg

SEQ ID NO: 47935 - DNA, 601 bp, Homo Sapiens
ccaaaagactaatctgcacactctgttacagcacttgtctaattgtgctgtagcgtttatttacatgtttgtttctcctctagccagtgagcacctctcaagcagaattatcttccttgtttctctggcaccctaaatatttgttgaattaatagtccttctcttcttttgtaattttgctttctgtaatagaagcttaattttaagtatagttatatcagtaatcaaaatgaatcacacactgagaaatcaatgtggatgcccttagggttctgttattttttttattgccattgagtaaaataagatactctgtgataaagtatattagcattaaagtgttcaaatctgatctttattagtaggcctcaagtgaatccttgctgacatttaaggtttatgacatttccttcacgttcgttcttgactggaaggcataaatggctgacagtaaagagcaattaataattttccaagtaaaacattttcagggacatctgcctttattgctccccagatgagagtacagcctgtttcttatgtgttccaaagatgatttccctatcagctttttggtcagttaaccaaaaaaaaaaaaaaa

SEQ ID NO: 47936 - DNA, 483 bp, Homo Sapiens
ctcagggccttgttcatggaagggagatgagtcaggttgaaagctcatcgtgtagggttctgtgcagggcccttacaggactggaccgcagccaagatgcctgcctgttaaccatgcccagcccccgtcatttccgcgtgaagccgcaggcctcggagccttggtctgaaatgcctgtggagtaacctcggtccataaacatgggtgcacagtctgttctccccaagtacagggcaggaggaaacaccgccctctgtagctgctcgaatggaaagggctcttttctctgaggtctttatacattagaaagctcttctgggaagaatgtttgaatccatagtgtctttctgtattcacttttaattgctttctaaattagctgagaaattctgacttgaaatattgtcaggtaagcatttcttcagttttcatgtgtgtatgtaacagtagctttgcatggaaattgtaatcagagtcaaatac

SEQ ID NO: 47937 - DNA, 786 bp, Homo Sapiens
aagacctttacaaagaaagagagtatgaaaatagcatcctctgtgcaccaacgagtacgagttcatagtaatgattcttataaaagaaggaaaaagcagtgataatgcatttggcactttgtttggtaggttttatagtttcaaatagtccttcttgtttactacccatggtagacatgtttaaagctttatgtaaaaacaagccagttagcaaacagtcctggaaaaatatggtgagaatggtttaattccggtcttcacatattctaaaaaattttaaagcctctaagtataaaatcagtgagttgaaagtaaaatttcttatttaaagaacccatctgttaatgtagtaaatgttggctttaaagaaatagctccgataaggactttttagaaggaaatacttggtaaaacttaataaaacaggtggttggctgcattttttaagcccagttttttacattttaaattgtctttattgtgtataaaaccagattagactatattcttcatctgaggagcatctatatgtttaatacacctaatgtattatgctggagtatttaaatgtaagtattttaatgagtaaatagaattaaccttttttacaaatgaaatgataggcatctatgtaaagtgagaaaaatatgtttcgtaaatatttgcatctttaatattgttagtaagtagtaaacaggtgttttgctgattgaagggaagttatcttggtaaattgagactcaaagtgaaatacaaaaatgaaaatttttataataggaaaaaaaa

SEQ ID NO: 47938 - DNA, 683 bp, Homo Sapiens
  misc_feature (13)..(13): n is a, c, g, or t
  misc_feature (148)..(148): n is a, c, g, or t
  misc_feature (335)..(335): n is a, c, g, or t
  misc_feature (551)..(551): n is a, c, g, or t
tgacaatcatgtnagctcagccacagacctcagctggcggtttgatccctggcaggtccctcgagcagtactggtaagaggcttcacacattttcccactcttacagttcatttttcatagtaggaagggcccttggcctccccagtncctcttccagagcctccaccagcactaagctcagaggaaagaagaaaagggccaggagtcagacgtcacacccgggggctcccctttcccatgtagaagtgttggcatgcgtcagtctcctttacagaggggtggatgtatccgtggaggaggggccttctctctttctaattgcactatacttgtnctagcttcagtctggagatacttaagacctccatggggtcgtgatccatagacttagcaagtcttgccttatctatggagctcgatggtgagaattgtgaccattgtctgatgtccatagttccttccccctagattgtttctttccacggattgtgttcatctgaaccattttattttttatttaccaaagtactgtacttggctatttgcagtnttttcaaaaccaaatgtttctttttttgtgtttttaatcttcgatacttggtgcaatagaagctgcaaagatgttccactttatctatgaaatggagttttgtataccaataaattctagtttaaaaacaaa

SEQ ID NO: 47939 - DNA, 608 bp, Homo Sapiens
  misc_feature (570)..(594): n is a, c, g, or t
  misc_feature (596)..(603): n is a, c, g, or t
tgctgtctgtcctatggagcctctgcagactcgttctcgtgacccagtggcataccgtttggtgtctgatgtgtgcccagatcgttctgccacttgcactgtgcttgctcctaagcaaaagggaaaaggagcgcgcgtgatagaagaaaagcactgggagaactaacagaggagaaaggtgaaacacacacacattcttaaggcaataaaactagggggtgtatattatcttctggtgcatgttcttttctggaaaatatggtagctcgccaaccgcatctgctcatctgatattcaaacacacagtattcgtgaataagttgattctgtcccccacgtggactctgtgctcacccattgtctcattgccagtggtgtccaagggcccccgttgggacccacggctctcgtccctctgctccgtgtgtctcatgccagcagcacgtcgccatccgtcaccagaattagtcctcacagcctaggaccagttttgtatcaaactcgtctgatgttttgatgccatttgtcttttgtaaagttaattcattaaaagttttatgtactttgaannnnnnnnnnnnnnnnnnnnnnnnnannnnnnnnaaaaa

SEQ ID NO: 47940 - DNA, 643 bp, Homo Sapiens
  misc_feature (511)..(511): n is a, c, g, or t
  misc_feature (517)..(517): n is a, c, g, or t
  misc_feature (519)..(519): n is a, c, g, or t
aaatccgctgtggcaggcccaaaccttgcctttggtgggcttaagtaaggtctggtttccagtacaaaggcaaaggcaaatgaggattattagtattccattttgccctatggatattctcagtgctttctactggaaactcacaaccaattctgaatatgccacatactgtgtgatttgcccttgctgtccaaccctgttcttgctgccatttaaaaacaatcaggccaggtgtggtggctcatttctgtaatcccagcactttgggaggccaaggtgggtggatcatttgagctctggagttcgagaccagccagggccacatggcgagacctcgtctctactaaaaattaaaaaaaaaaaaaattagctgggcatggcggtggttcatgcctgtggtcctggcactttgggtgccggggcgggaggatcgtttgagctcagcagttcaggaccagcctgggcatcatggtgagaccctgtctctatttataaaaaaaaaatgaaaaanaaaaananaaaaaaaaaaaaactcgaggggggggcccggtacccaattggccctaattgtgagtcgtattacaattcactggcccgcgttttacaacgtctgacctgggaaaaccctggctttacccaatta

SEQ ID NO: 47941 - DNA, 886 bp, Homo Sapiens
tcggaagttactgttgaagctaaggcggccataactgataatggcaaaaggagattcctggcttcctgtttccagggtgacgtagatttttttccttcgccagtctcaccgttacccggggcaacagctgagccgtctgggaagggatgcatcttttcttctgtatgcttgagtcaagaactctaagtcatcttggtaataccgggttggatgcttaaagctgcagcaaaaagaccagaactttcaggaaaaaacactatatccaacaactcagatatggcagaagtgaagtcaatgttccgggaagttcttccaaagcaagggccactgtttgtggaagatataatgacaatggtgctgtgtaaacccaaacttttacccttaaaatctctgactctggaaaaactagagaaaatgcatcaagcagcacagaatacaattcgccaacaagaaatggcagaaaaggatcaacggcaaataacccactgaatgataactgagcactttagggaacaacctgccttatctactatttaacaataactagaaaatatgcttctgtgtgctgaaagtagtatgtgttatcaataaaattgatagtattcatagaaatacaaaaatatccaagattgatgaaatttgtattgtgaatgtaaacactctggtttgtattgaacataaacagttaaactatgaaccaagttttatggggtttaagtcatgtttttagaattgcaaattaaattatttgttcaccaattcctattgctatcttttatagataacatttcttgggatcttttatagcattctttgggcacaagggaatttaaatacaacctttttatataccagagggattctttcacattggtttaatttaaaa

SEQ ID NO: 47942 - DNA, 930 bp, Homo Sapiens
acttgaaatagactaagataaagaaaaggggtctgtatgatgtgcagttttgtgcctttatgtatttgccttgttctttgtcgaatgtgtgaaattctgtactgtggtttttcctataatagaaagtagagctgtgtattaaattagactgtgtctctctgatacctttacactactgagaatagcatggttttggccatgtaaaccaattttcaaagttctaatgacatagccatgtgtttctggttttttatatttcattttaaaatttgagtatcaccatacattaattaatactcctgtagtagataagctgtcattaagtaattcccaaaaaaagggccatttgcttgcattactttgaatttaatgttgcgcttgtgcactgtgttaatattgtttgtgatggattggacgttgtgactcttgccttttaagaagaacaacaaagataggacaaagtatttgaagctcttaaaatgtacatattttgggttcttctatctcaaattcatttaaaatgcataattccacattttcgtaataattctatgcaattttgtggcatgatgtttcttccacttgtaatcttatgtgctttcatcacaaatccaaaggaagaatcacaattcttaacacaagaaaaaaaacacaacggacacaaacaaaagctgtggtggggccgctggcgacctcggaagaaagttctctagaaacccatgccgggtggggggaggcggggccgccgagcggtgtgcaggaacaccgcgccccaaggacgtgtgcccgagggaaacccgggtgcagacaaaagggggcggtgtctctcccccataaaaaaaagcggcgggcgacagcgggctttgcgaaacaccccgaagggtggcggggcaagacggggcccacaacagggctcacggaagcattatc

SEQ ID NO: 47943 - DNA, 646 bp, Homo Sapiens
gcacgagccaaaatgaaaaaataatttactgagagagtagcattgttgtacattttcacaaatcctgtcagtgtctggcttaatagaagacagctagggaccttgcgtctgcttccgatgtagtctatggaaatgtgttgtttcagttgaactgtatcaagaaaatctggcctcacgcattttatagttgaaacagggaaaaggattttagtacctttttcagctaactaactatgaacattctttgctattacaccaaaactcaacaagtggtagcttcttaaaggctggttataacatggaatctgaagcctcatgaatagacttttgggctctgtggcagttaaatccgctgttctctctcactttgaacatgtggtttttcatggaaaaatgaatgttcacttgaaaaatgttggttcacagagttctgcagaaattcaaatttttgacacattacattatatagtatcaaaaaatcacttaatatcaccatccatctcatcagaaaactcattatgaggaagttgtcatggtgataggagaaagtttttcaaaattctgatttttgcttaaaagctcaaatgtataccattggcaataaataaagtcagctgtttctggaaaaaaaaaaaaaaaaaaaaac

SEQ ID NO: 47944 - DNA, 595 bp, Homo Sapiens
gggactccagactccccacagcagcagagactcgggactgaggcatcctctgttcacaggacatgctggcatctactgggtcagggctctgctgctcggtggctgtgcaaccttgggcaagttcctcaacctctctgtgtcttcgtaccctcatctgtaaccatgcgtgtcgatagaccctactactcagggttgatgagaagattaaatgtgcaaaacctgcttgactgtgcccacaaatcctgattgtaggaataaattaatgactttttataaatattttgatcagatggactcagatgatcacagatgtcttcacatgcctatgactaatttgtacacaaactaatgctcgtgtttcccaagcacctggaagacatgccagatccatgtgcagtaatgcctggtggctccaggtctgccccgccgtcctgtggggctgtgagctttcccagcctcctgcccgtgtttgtgaatatcattctgtcctcagctgcatttccagcccaggctgtttggcgctgcccaggaatggtatcaattcccctgtttctcttgtagccagttactagaataaaatcatctactttaaaat

SEQ ID NO: 47945 - DNA, 722 bp, Homo Sapiens
ttacattaattttaagcacttgagaataaaatgactgcatttatcatccaagtgtcaaacaattaaaaacctaaaaatggtaactatatataagctgaggtaatatgggcttgataaagcccatgaggtaaatatgaacactaaacttggttttaattctaacagactatatctaaacctgtaagcagtatactcctaacagtaccctcataaattctgaatataattcttgttgctgcagtcaatattggaagtttaaattagcacagacgttgaggccttgctgagttattaggctatgtaaaagaggttaaaaatatgatcattctttatgttaattggtaatattttctcatacattaggtaaatgtcaagcttgggtctctggagtataactttttgtaacattagccattatttggtaacagaatttaaggatgatggaatgatggaaggtattacatatttctaaaacttaattaagctctaggtcagataacaatggagtaaagtgatacctgcattttttccccaggtaatcttaatttactatgtatgtttcacttacaatttgtagggaaaaaaagtcttcaagggaacactaagattaaatgacctagcgttcaaatatgcttccttatgagattcacaatttacctgtgtgaaattaacgttctaagagacctaaaaatgttctccccaataagaactcatactgcttc

SEQ ID NO: 47946 - DNA, 510 bp, Homo Sapiens
attgtgcactccagcctgggtaacagagcgagactccatctcaaaaaaaaaacaaaacaaaaccaagttcccactggtgatgcctgtctgacacgttttggtatttagtaggaaatgaagtgtttcgaagcttcgagagaagcttcaaaattgtcacaattgctgaaaacagaatgaatcgtgaacattatctcaatattttgtataatagacaagaccacagtgttttggttccctgacctgtttttgtgtttatgttaggatctgaatcatgttctgggtaaggggacgaggagcgaacactgcactaagatttggtttgccaaatcagattctttggtcaagagtcagtttggggccaggcgtggtggctcatgcctgtaatctcaacactttgggaggctgaggtgggtggatcactggagtttgagaccaccctggccaacatggtgaaaccccatctctactaaaacaaaaattggccaggcatggtggcgcctgcctgtgatc

SEQ ID NO: 47947 - DNA, 693 bp, Homo Sapiens
tcattgactacttcataacagacatgtttgatgcttgggatgcctttgcacatctgccagccctgatgcaacatttggctgacaactacaaacactggaagacactagatgacctaaagtgcaaaagtttgaggcttccatctgacagctaaagccaagccacagagggggcctcttgaccgacaaaggacactgtgaatcacagtagcgtaaacaagaggccttcctttctaatgacaatgacaggtattggtgaaggagctaatgtttaatatttgaccttgaatcattcaagtccccaaatttcattcttagaaagttatgttccatgaagaaaaatatatgttcttttgaatacttaatgacagaacaaatacttggcaaactcctttgctctgctgtcatcctgtgtacccttgtcaatccatggagctggttcactgtaactagcaggccacaggaagcaaagccttggtgcctgtgagctcatctcccaggatggtgactaagtagcttagctagtgatcagctcatcctttaccataaaagtcatcattgctgtttagcttgactgttttcctcaagaacatcgatctgaaggattcataaggagcttatctgaacagatttatcaaacaaaaccaaaaaaactttttgggcgcgcccgggccctggaaaaaatttttaaaacct

SEQ ID NO: 47948 - DNA, 988 bp, Homo Sapiens
  misc_feature (945)..(945): n is a, c, g, or t
tgtttgctgccagccttctcctcggccccagaggccatgcacccgtgggagctctttgtaaagtactaccatgctaagaacggccgtgcttatgtggaatccccagcccggaagctctcccagtccttcgcccttcctgttacgggaggcactgttgtcacccccaaacagagcctactgacagccatccacatggtgctgacagagcatgacccttttaagcgcagtgcagactcagaattgaaggccttggtgtgcatggcactgaatgagcagcgtctggtgtcctgggtgaacctcatctgcaagtccgggtcactcatcgagcctcactaccagccctggagctacatggcacacacaggctttgagagtgccctcaacctgctcagtcgcctcagcagcctcaagtttagcctccctgtagatctggctgtgcgccagctcaaaaacatcaaagatgccttttgatgagagtgccctaaccccagacaagctccttgttcagtagggatagatgtgctagtcttctagcataggagcaaggaatcagaggtggggttaaaggcatttttcccagaccctgctcaggcagtcggccaaatgagtgcaaagtctgttttccccaccaacttagctctcggaaagatgtgctggaaggaccctcttggtaaaaaaggttatggccaagccccggcgccgttgggtatacccctggtaaccctcaaccacttttgggaaggagaaggaccgcccgaacccccaatctcccccccccacccctattaaatattttatttcaccgcattgccagtgtatacaccctaatttagaaccccatattgttataccgccatatttacgcattcattccctcttcaaatttcacgcatacgtacgatgttacgatccacttgaaaatagcacgaaacaaaagttagaganttctcaaaacactagacattagcacacgtgaccttcgctagta

SEQ ID NO: 47949 - DNA, 662 bp, Homo Sapiens
  misc_feature (568)..(568): n is a, c, g, or t
ggagctgcgtcaggagttttgcttcaagatgtcagaaagtcaagttcagctaagagacacccaggtccccagcttgccctgagcagcccttcagggcttctggttccttctgccgcccttcctgagaccttagaaaccagaagagccatacagtcagtggaaggcgggggggccctggcctctgcaccgggatcccagtgggaaccttcatgccttatttatttctaatgggtaaaggggttttcttaccaagcatccctgacctcctggagacaccacctgctttccgggcggcactgtgatgggagctggtggcgactgagtccttctgtacgtgcaactgggaaacttttgtcctttgaggctaggcagctccctgccctccgtgtgtgtctgttatctgggggagaggagtgtggaagggttgggggaagagctccagcctgtctgctccccagctctgtagtggcagaccagcgtcacctttgaagtatacgtgagagaaatatatttacaaatgctttattctcttctttaaaaaaaatgcaccagtaatctaaaacctcgngaaaaaaaatgcagatgacaaaaaacgacaaaaacaaaaaactattaaataaaataatagagagtagatctgctgtaaaccctccctccgctgc

SEQ ID NO: 47950 - DNA, 522 bp, Homo Sapiens
gtactctgatccagtctttccacagataacttctgttaacaacttgatatctattgtacaagatgtgttactggcatttccatgtatatatgtatataaatgcaggaaaccaacatgtcattgacacctctcttctttacttttccccatatctaatcattcctcaagtcttactgatttttatcagctagaatctatctccttatttctacctctattgccactctgatccaggctaccagcatttccctcttaggcttctgaagcaacttcctaactcccacttgtgctcctcacactcactctggtcggctatccattcattctccatacagcaactagagtcattcttttaaaattgcggacctgatccttccatctcccagctgaacgcttttcatttgcttcctgttctcatgagttatgccaaaatgtattctgggcttaggaggccctgaggaattgggtccttccctcctccccccctcgttttctgtgcttcgccctcactggatcagagta

SEQ ID NO: 47951 - DNA, 500 bp, Homo Sapiens
tctccttgccaaacaacattataagtttagttttcttcttcctcttgcagccggtacagaaaggtgtaagtggtggctgaaaattgaggaagcttcatctgaccaatgtgggtgctggtttcttgtgaaatgtgtccctaagcctccttctccttgcaggcagccacccacccaggtgtctaagataggacatgctcctttctttctctaatcccatcctgaggttgccggcaaagccaatatgaccactactgagaaatagtaatgacttctacaaatgcaagggtcttaccctcctctttcccttaaacaccctcccttttccttagaccccgtttttgccatcccccaaatgtgtggtatggtgaaactaatcccctgaatgtgaattgctatccttattgccctattaaagaagagccagctggtatattgtcaggaagcactatttaaaatgtgaactgttatagagtaaataaataaatactctacaggaatac

SEQ ID NO: 47952 - DNA, 972 bp, Homo Sapiens
  misc_feature (678)..(678): n is a, c, g, or t
  misc_feature (826)..(826): n is a, c, g, or t
  misc_feature (928)..(928): n is a, c, g, or t
gcctgggtggcgttctcggcacgagggaaaaagaagggtgtctgcaccctttgcgaggagcatgtagaacctgagaccacgctgcctgctagacggacagagaagtcacccagcctcaggaagcaggtgtttggccacttggagttcctcagtggggaaaagaaaaataagaagtcacctctagccatgtcccatgcctctggggtgaaaacctccccagaccctagacagggtgaggaggaaaccagagttggcaagaagctcaaaaaacacaagaaggaaaaaaagggggcccaggaccccacagccttctcggtccaggacccttggttctgtgaggccagggaggccagggatgttggggacacttgctcagtggggaagaaggatgaggaacaggcagccttggggcagaaacggaagcggaagagccccagagaacacaatgggaaggtgaagaagaaaaaaaaaatccaccaggagggagatgccctcccaggccactccaagccctccaggtccatggagagcagccctaggaaaggaagtaaaaagaagccagtcaaagttgaggctccggaatacatccccataagtgatgaccctaaggcctccgcaaagaaaaagatgaagtccaaaaagaaggtagagcagccagtcatcgaggagccagctctngaaaggaagaaaaagaagaagaggaaagagagtggggtagcaggagacccttggaaggaggaaacagacacggacttagaggtggtgttggaaaaaaaaggcaacatggatgaggcgcacatagaccaggtgaggcgaaaggccttgncaagaagagatcgatcgcgagtcaggcaaaacggaagctttctggaaacacaggaagtggacggggaaacccagttttggccagtggggaatactggctggngtttttgagaaacgaaggacccaaaaaacttgaaaattttctcc

SEQ ID NO: 47953 - DNA, 629 bp, Homo Sapiens
  misc_feature (594)..(610): n is a, c, g, or t
  misc_feature (613)..(614): n is a, c, g, or t
  misc_feature (616)..(619): n is a, c, g, or t
ggtaggaagaaaaatgttgccctttcacactcacagtgtaaatacattcataatattccttcaatcatctaaattaccgccaggtcatgaaaggacgcgatcaatgatgacctattgcactcacaggtaacattgactcaaattttggcaatattgctatattatctagataattcttgtgatgtttttatgtcactatcaacattaaaaatattttgttaaacaactatgaaactttcaaaagtttgcatataactgtatgggcactctcatttcactgcatacatacaatactttgtatacacatacttctcgtgtggatattttataattttatttaatctaacatttaacttttaggtttttgtggtactcatctgaaaggttggcatttgttttctttttatgttatatatgtattttagatgaatcaataatgtgtattcctagaaattttttctaggcataaatagatcattttatgttggcatttaagagatatcatttttgttttattgttctgtgtaaaccatattcattgtacactgtgtgtatatttttgtttaaataaatgatttttattttttccaaaannnnnnnnnnnnnnnnnaannannnncttggtcggc

SEQ ID NO: 47954 - DNA, 739 bp, Homo Sapiens
ggcccaacatggccctcggcaagaaggcggctgacagcctgcagcagaatctgcagcgggactacgaccgggccatgagctggaagtacagcsggggagccggcctcggcttctccaccgcccccaacaagatcttttacattgacaggaacgcttccaagtcagtcaagctggaagattaaactctagagttttgtccccccaaaactgccacaattgctttgattattccatttatgctggagattacaaattttttttgtgaaaaaatcagatcttggtgaggacctcgagcagtaagatataaataactcccataagcttagcgttccagtaatggaacactaggcataaatggtttattcagttgtgcaaatgaaagccatctgacagttggctcacattgaacacctgtggagattaaggacgaggacaactatattgatgggcttggatgaactggggcagggcagctcatatttcgggagccaggagaacgagtgagtgctaaaacctcctgttttctgtgttaaacattccgtccctgtttgagacatcagtatgtacagttaacttttgttgagtgtttagcaggtactagggacatactagtgttttccttaatgtatttaatcttcataattatgaaatgggtgctattattagccccatcttatagatgaggcaactgaggttcagggataaagtaataaaattgcctggggtcaccagccactaa

SEQ ID NO: 47955 - DNA, 787 bp, Homo Sapiens
  misc_feature (734)..(734): n is a, c, g, or t
ctgaggtggagccttcattggaaaggggaaagagggattctagggtttcatcagggaccaggaatgcattcctctgtcaggttccaatcaagagaagaccttttatgagatctgcctctgtatagatgttgtcagttaggaaactgaagccataggtcaggcagacatcagctcagcctgtggcccattgggtgatttcctgtattttaaaactgacagtagcctgatcaaagtgatacaatcaatttcaaaacaatcttccagagaccacttgaaggttcatagtttttacaataccctgagacttttcaggtgttggagcctctaaaatatgagatataaacagaaactaatacaagttgttctctggaggtttctatgaggttcttagaaaaatttggttttaaaatcatttgaggacaggaatgtctatagcaagtttactcctattgcgaatcatgtatgctggctttagttgtaacaaacgattttattctaagtaaggccaggtgctactataaaatcatatattcctgttgaagttcttttgaagtcctatctctatttattatatttgaaagttgtcagccaccagtcatccagaatttccttcctgaatctccatgctcatatgcaatgtctacatcaaggtcttcttaatgactattattctcagggtttagttttctaccttctgcctactattttggtctgacatttttgtagccttctgntattattggaaatagtctcttacataagctgatttcgagaactttcaaaatct

SEQ ID NO: 47956 - DNA, 645 bp, Homo Sapiens
  misc_feature (168)..(168): n is a, c, g, or t
  misc_feature (639)..(639): n is a, c, g, or t
tgctatttcccaagctactttacaaccaccagcagcataccaataaattacaaaagcagaaaatgaaaattaaccctaggtgttctgatgatagagaaatagctaaattagaaaagaaagatatggatagatgcttttaggaggaaaacctttttagaatggcaatgnccacttggatctaggtcaacatattccaaaatgtgtgaccttgggctttgtgtttactgaactcactctagaaaattctggacctgattcattaaccccgcttttcttctctaatgtgtcctgaagctgagctagatgatgagtaaattctttgctgactgttgctcatcactttctctcaaagttagaacttttcagtataaaaataattagcttttaactgattattaattttctttaatagtttctgtcaaaacttgtctaaaatttgtgttgtgccaaattggaaatacccactataatatggtgcattcagtttactccacaagtggttaacattttaagtcctagattttttatgtcttgcctttgtataagcatcgctttggggaataccaagatgattcattattcagtgattattttcttgaaagataactatgatgattggctgtaaaatcttcaccctantaaagg

SEQ ID NO: 47957 - DNA, 449 bp, Homo Sapiens
cagaatatcaaatgtctacacatgtcagccaaagaagagatgcagagggttgggtggggctggaagcagataggaggggtctccagggactataggagtacaatcaacttgagtaatcacctgcttttttccccaaaccctgtgtggaatgcagccagctagctggtttaaaccagttcatgacagacctcagcaatttacagatggatcccagtgtactttcctcattaccatgctagtatcttcaccctgggagatgctatagcttcattaccataacatgtgacctgtgtgctgaaataacgactcactgcatctgcacaactgcaacccctttccatgcaacgacataccctcttccctctctatcaccccataaaaccctcctgtcactttcctgctttggagactatgcccggtgctttatttgtgacaagtaataaaaggac

SEQ ID NO: 47958 - DNA, 978 bp, Homo Sapiens
agcaggctggtaccggtccggaattcccgggatcggagccctgcaggagaggcctttgtgttttgttttgttttgttttttctcttttgagacagagtttcactctgtcgcccaggctggagtgcagtggtgtgatctcggctcactgcaacctctgcctcccgtgttcaagcacgttctcctgcctcagcctcccaaatagctgggattacagttgcctgccaccacgcccagctaatttttatatttttagtacagatggggtttcaccatgttggccaggctggtctcgaactcctgacctcaagtgatccacccgccttggcctcccaaagtgctgggataataggtgtcagccaccgcacccagcctggagtggccttttatgagaggggacccgtcaaatctgtgccttatggaggggtccggcagcggccacaattgtcttgtcccctcaccccccaactccccctggaacacctctcccaggcaagacattttcacagcaccattcacaacggttgggccaaaaagaaacttttccttcatcatttcctgcactcgctgaccacaactttggacaccccaggctgccacccctccccacccgttcacccccaggatgctgttgctgtaggacgcctgctgccctggagccctccccaggatgtgagcmagttccctcgctggtacggaatgccgctgggtgcccggaggcggccatggtgtytcgatggacggcagccaggatggagcacccatgggtctcacggccatgcttcagggtcttcaggtcctgcccccggccagtttgccaagaggcacccccttccccagcctctcgcctgcmctgatgcagacaaaatctcacctggsaggcccaaccccaccccacccctyccccgccgtgtgttgccctygccgcatcgttggggtttttgtacgtgaaaatatctkgaaaaaatwaatktatttgca

SEQ ID NO: 47959 - DNA, 747 bp, Homo Sapiens
tcagtaggacatggtgatccctatttcagcctctaagatgactggtattctatctgaaatgcagagattaagccaaatacctgatgtattgtgaaagccactgattttaagaatggagagaaagggattttttactgcatccctctgtatgaatatgaaatcagagaccagggcatgatgttgctaggattagagcctctcagtctggcctcttcacccaagtgcaagaactcagtctcttactgttcaaagaaagaatcttaacagttgaattatggagggaaattcccttttgccccaagcgtttctatatttaaagcaatatcccaggagaatatgttagacttaggatgataccttcagccacttgaagaagaaatagaaggcgctcgttccaatatagtctttatttcccattcagatacaggttgagcatccctaatctgaacagttaaaacccccaaatgccccaaaatccaaaccttcctgaacgctatgacaccatgagtggaaaattccacacctaacaaacacatttgctttcttatggttcaatgtacacaaactgttttatatagaaaatgatttcaaatatcataaaattaccttcaggctatgtgcataaagtatatatgagccataaatgaattttgtgtttagactttgtgtccatccccaagatctctcattatatatatatatatatatatatatatatatatatatatatacacacatacacataca

SEQ ID NO: 47960 - DNA, 585 bp, Homo Sapiens
tacctacaatattactagagatttatgaaattaaattaagagataatgtaagaaaatacatttttttggttctatataatgcttcatgattcatttagggacctagaaatattgtgtgaaaatatataaatatcacccaaaaggctttctgccctatatttttaaaatacagaatagttatatttgaagtagccctggccctagttctatagggcttggctatttaatatttttatggaagaagtgtttagttctggaaaaggtaaatgcttgtatatatttttgcagcctgggatctccctactccattttttcctttaatttaagtggccacatgtatatgtcttccctgctgtgttaggaaaatgggggctggatatcccaagaatcagaggttatataaaaatactgcaaatagaccgcagacataaatatctaccaaatgctatcttaaattttggtccaaactgaacatatggaaatagatttattgtaagtatttacttagagctttttcttaaatctgaactaacttgcttttagaagtctttttctttgtaagcattgtaaatgctaataaatcct

SEQ ID NO: 47961 - DNA, 565 bp, Homo Sapiens
aatatggagacatgatccctactcatgttacagtggatacatgttggagggtttcctgaggagtgtttgtttagaaaatggaacatggacatcacctcctatttgcagagctgtctgtcgatttccatgtcagaatgggggcatctgccaacgcccaaatgcttgttcctgtccagagggctggatggggcgcctctgtgaagaaccaatctgcattcttccctgtctgaacggaggtcgctgtgtggccccttaccagtgtgactgcccgcctggctggacggggtctcgctgtcatacagctgtttgccagtctccctgcttaaatggtggaaaatgtgtaagaccaaaccgatgtcactgtctttcttcttggacgggacataactgttccaggaaaaggaggactgggttttaaccactgcacgaccatctggctctcccaaaagcaggatcatctctcctcggtagtgcctgggcatcctggaacttatgcaaagaaagtccaacatggtgctgggtcttgtttaataaacttgttacttggggttactttttttatttt

SEQ ID NO: 47962 - DNA, 805 bp, Homo Sapiens
  misc_feature (733)..(733): n is a, c, g, or t
ggacaagaataatgtcctttgacattgtttgaaatctgaaaggagaaaaaaatcaagaatctgaagtgggccttaaaaaaatcagtaagtcccttgtgactctgatttttatgaatctgtctctcaaaagccagggtgcccccagaagaactgagacaaactgagtttctgaacatttgaaaatgaggagcaggctcaggatccacagggtgtaaccatcccgtgaggccctgcctgagcagccagccagtcagtgaggctctttaccttacttccatttctctgattccacctatgtacaacttacgaaaacttgcattattatagactgggagttcttaaattggaatctgtgaatctaaaggggccagaggatagaaatcaggaaatctgaaaacttcgatggaaaaaagaagtttttatttatttccatcaggaaaataggcaacaaaccacagcagtattagtacctgtgtctctgtcatcactaggagtcacagatatccacgttacagatatcttaaaaatatttatgtacagcaccacttctgaaaatatgggtaataattagatccacccccctagggcttgttaacctttaatatggtaaacaaaggaagcacatctatttatgtggaccgaattttaaaggtttcaaaaaattttgaattttcaatggaaaattggcattttccaaaaaaaaaacttgtgcctttcccttttggccgaaaancaggaagaaagaaaaaaataagaagcgtaaccgagatggagtgaacgtacgccaccgcgagtgtcacgtagt

SEQ ID NO: 47963 - DNA, 779 bp, Homo Sapiens
  misc_feature (699)..(699): n is a, c, g, or t
  misc_feature (707)..(707): n is a, c, g, or t
  misc_feature (763)..(763): n is a, c, g, or t
  misc_feature (766)..(766): n is a, c, g, or t
ttttttctcaaaatgcccattatccaaatgcagaacctctgcatctccaagccagttatgctgaatttgtcaaacttagacacccttgacaactgcactcctactgtaggctcctgtgcatactgtcgtcttctgtgggggatggagaggttagtgtgatgaggtggtgtctgcccaggaggtttctttcaaacatcatggcctcccatccaatcaacatcatcaaattacatgtgtaatcaaggctctgtgccatgggggaaatgaatcatttagctaggccaggatctagtgaaagccacagagtttaaaaccatgaaagaagttgaaggcagcattcctcagctctgtgacttgtgaccctatttgaagtttcaggatttgggtgtcacaaaggattgtccctaatccttggccctggggtcttccgagtgagctggtttaatactctgagaatgagcagggagatccagagaatgaatccctgaccgcatcacctaaactgtcttccaaacatgagacaaagctgactgttcacactgattgcccagcacataccgtcttgccagtttcttcttttctcccagtctcctgttcatccattctgttctcccttggggtgggaatctatgatggaggttactggggaaacagctcagcagatttttggagaccaaaccaaaggtctcactaggaaanttatctgntttaaaacattgcttccttcctggctctgctaaattgaatgctcattggttggtgntgntggttttttaatt

SEQ ID NO: 47964 - DNA, 500 bp, Homo Sapiens
caggaaggaatattattattattatttttaattatttggtaaaatattttgtcatatgaccttctgaagcagccacaacttagataatgtcagaactaaggtgatttttttttttttaattttgaaagcccagccaaaatgaggtgtgaatttgtcatactgttacattgaaattggtaacaaaatatatcccctcccatttggacttttagggtaaatgaaaattttattgtattttaaagtagtttctaagtgttagcaagactgactataattccagtttctgttttctatggacagacctgataaactggagaccctaaagcaggaatacccaaattatagtgtcaggattttagctgtaccagaggcctttatgtgctacacataatttgtataaaattttatatgtgcagattgggtacataaacagttctccatttttctaagggaatgcaataaatgtagcatcgtgaataaatataacttttataatccgt

SEQ ID NO: 47965 - DNA, 488 bp, Homo Sapiens
cccaaggacaggaaacaacttttccaaaatcccacagctagttaatgacagatctccccactacattaatcccgtgctcctcctcactgccattatagtttattgtgtggtcatgtttacattgtgacatccagccccaaggatggctgggagttgctcaggcatccaggaaaagtggggaatgctgccatctggtgacagcatgtagatttgggcagtgaacagggattgccatgccccagtcttcgcacctcgccccctcaccccctaactcacagcacaaaccctgcaaacccaaagagaatattaatacttgaagcaagaagggtgcatgccagtccttctccgacatggccagggggtaccaggccttgtgcgcctggcctcctagccctagccagggcgagagggcctttcccttgagctactgagctgctttgtgatgctgaaggatactgccggcagcaggcagaagagggagggggcct

SEQ ID NO: 47966 - DNA, 647 bp, Homo Sapiens
  misc_feature (9)..(9): n is a, c, g, or t
  misc_feature (591)..(591): n is a, c, g, or t
gggccttcnggaaatccctgggatagattctatgaaatgtttggccatccacagccaggctctgcaaactcactctctgcatctgtctgcaagtgcctgtctcagaaaatcactcaactaagaggccaggagagccaaaagtatgccctccgcagttttcaaatggcccgggtgatcttcaaccgggacggctgctccgtcttacagaggcattccagggacacccacttctacccactggaggaaggaagtacatctttggatgatgaaaagccaaacccaggactgtcaaaggatattactcatttcctcttgcagcagaatgtaatgaaagacctgtaactggtgccgggcagtgtgcagggtagtaatggaggtgctgtgccatgaccagcagtgttggtggccacccagatcccctagggtctctggccagctctgtgtgcccaatcccaattaagtgctttgaggttaaaggctggcacctgtgacctggtattggagccagtcagcccatatggagagccagcagggtctgggagttctccgtcctcttggccaaggccgctgactgactgggctacgagtcanaagcccagctcccttgcctcaaggaaggaattctctgaggagtatttatgctctag

SEQ ID NO: 47967 - DNA, 809 bp, Homo Sapiens
  misc_feature (645)..(645): n is a, c, g, or t
  misc_feature (689)..(689): n is a, c, g, or t
acgccagtaacttaaatatagaacaaaataactcctggaccgctgagaacttctggcttgaccctgctgtgaaaggccagtcagagaaggaagaggatgatggccttcggaaatccctggatagattctatgaaatgtttggccatccacagccaggctctgcaaactctctctctgcatctgtctgcaagtgcctgtctcagaaaatcactcaactaagaggccaggagagccaaaagtatgccctccgcagttttcaaatggcccgggtgatcttcaaccgggacggctgctccgtcttacagaggcattccagggacacccacttctacccactggaggaaggaagtacatctttggatgatgaaaagccaaacccaggactgtcaaaggatattactcatttcctcttgcagcagaatgtaatgaaagacctgtaactggtgccgggtggtgtgcagggtagtaatggaggtgctgtgccataaccagcagtgttggtggccacccagatcccctagggtctctggccagctctgtgtgcccaatcccaattaagtgctttgaggttaaaggctggcacctgtgacctggtattggagccagtcagcccatatggagagccagcagggtctgggagttctncgtcctcttggccaaggccgctgactgactgggctacgagtcanaagcccagctcccttgcctcaaggaaggacattctctgaggagtaatttatgctctagcactccctttcctctagatccgcctgaggctgggacattacatgaaatcacacccttgctgg

SEQ ID NO: 47968 - DNA, 664 bp, Homo Sapiens
atgaagtcagccgctttctggcacaagctcagccccctacacctgcagcaaccccaagtgcgccagctgcggggtggcagtcgctggagaccggccagaaccagtcagatcccgtgggacctgctctgaatctttttggtgggtccactgggctcgggcagtggagcagcagcgctggtggcagcagcggggccgatcttgctggcgcttcattgtgggggcccccaaactattcttctagcttatggggagtcccaacggtggaagatccccataggatgggcagccctgctcctttactacctggtgaccttctgggaggagggtcggattcaatctgaacttagaactttcaactctgacctcgtgaccttttttggaacagcagcagcactaacttgaccttttcgttttttttttcaacttgcaataaatacatttttaaaaggaaaaaagaaaacggagagaaaaaaaggtgggtcattgacagactgtctgagcacatagttgcctcccttataacttcagttttttcgtttggaatatgaatccaaaaagagaacatatcatcttgaaatacttgaatcatgaagccaactagaaagacaatgtgaagcaagtacacattacatttaaatttaaacaacagtaaaaacaaaaaggg

SEQ ID NO: 47969 - DNA, 882 bp, Homo Sapiens
gttttgggtgaggactcattactgcagtatattgatctcttcaccaaatgctttttctttttctgaataaatgctgtattagaggttctatttatatatgatttttaaaactttggtttccttctatccaccaaatactgtgaattgtttttccatttatttttcttagctaatgtaactttattcttcacttttttttagccctagacttcctagattttctgtggcattctgtaggacattgtattgcttggaaaaaaaaagatcaaaatcattctggggcaaatgctctattatccttatttatgacaagagaataatgaaattcataagaaattaataacattcagatattgctataaatgtacttgagtcattttcatttggggatagtaataatggctgtggcagctttaatggagaaacctgtgttggcctctttttctggcattaggatctcttgtcatagaactattggtaaagtacaggtttgatagcagagttcctgaattcagcatatcatcagaatttccatttaccttatgtcttttcttttcatggtatcttttaaccttttggtttctattcctactcccatgagtaacattgatttctgtgaagttagaattggtgttaagaattgatttaaatttctgaaatagttgaatattagaaggtgggttcagttggcatgaaatgattggtttcttttctttattttccttaattaaaaattatgcagacttattatatgtctcttcccctcagaatgtgattaggctgggcataggacttcacgccggtaatcccagaacttggggaggttgacacgggaagattgctgagcccggaacttcgacagctgggcaccaggaaattcat

SEQ ID NO: 47970 - DNA, 595 bp, Homo Sapiens
gcacgagaccagtttttaaatgtatgtatattaattctcccccatttacaatccttcatgtattacatagaaggattgcttttttaaaaatatactgcgggttggaaagggatatttaatctttgagaaactattttagaaaatatgtttgtagaacaattatttttgaaaaagatttaaagcaataacaagaaggaaggcgagaggagcagaacattttggtctagggtggtttctttttaaaccattttttcttgttaatttacagttaaacctaggggacaatccggattggccctcccccttttgtaaataacccaggaaatgtaataaattcattatcttagggtgatctgccctgccaatcagactttggggagatggcgatttgattacagacgttcgggggggtggggggcttgcagtttgttttggagataatacagtttcctgctatctgccgctcctatctagaggcaacacttaagcagtaattgctgttgcttgttgtcaaaatttgatcattgttaaaggattgctgcaaataaatacactttaatttcagtcaaaaaaaaaaaaaaaaaaaaaaaaactc

SEQ ID NO: 47971 - DNA, 617 bp, Homo Sapiens
  misc_feature (597)..(597): n is a, c, g, or t
agttcgctaccctagcttaggctgacgttctgatgagtctctgcttgctgagctcatcactgtgggatggtgacctgcagagctgcagattggagcaagtggacagaggagggagccagctaagccaaatccgtcactgccacttggctggcaggccttataagagggcggatctgggcccgtttgcaggaggccattgcctaccctctccccacagtgagccagcagccatcagctgatcccacctgggaaaccttcatgcctctctgatggttactgcccacccttaccccacccctcagctcagcctggtatggaaagcaaggtgcacgttggtctttgattgttctgtcctcacagcagagccagctttccccccatgttgctgctgcttttgctgctcatgctgcttgttgttttctcttccttatctttccaaattgtttccttgaaatgcttgtttccaatttttcttagattatgtttctaatttttattccaggtgtttttttttcttacttgacagaaaaaaagaaaaccccaacaatatcttgctgtattatcacattttttataaagttaaagcatttctcttanaaaaaaaaaaaaaaaaggac

SEQ ID NO: 47972 - DNA, 525 bp, Homo Sapiens
tgtttctgtgtgtgtggttttgttttggattggtaggtttcactgtggcgtggttttgctgttgttattttgcttgattctggaaaatgctgaggagatggactgagctatgaagttcaatggttcaccctttaccatgtttgcaggagatgatcgaatacagatgaccctgctgtcgtgtcttcatttgtaaaattctcctacaaatggagacattgaaggattatgtgtatggaaatttttacaaaattcctttctgtacctattctgtagatgcctgtataatcggtctggatgtacagctataaatgtgttgtgagagcaagagagagagaatgggtagagcctgctgtaccttttttcttttaaattcttcgagttggtaaatgagtaagatattggaaaccttaatgaaaagctgctgttcatgatttgtgtgtatagtgagctgactgtagtattttactattgtctgttaaaaaaagaaaaactgtaatttatatcccctttgaactgtattgtgtt

SEQ ID NO: 47973 - DNA, 828 bp, Homo Sapiens
atttgttgtaattttatgttgtactcagtgcatttaagaaatggtagagtattttaatcctattacttgactaagagtgtgaaggtagtactttttagagtgcactgagtgcactttacatctttatttaaatttttttttaacatcttatgtttacaggcttcctgtttgatgaagatagcaacggaaaactcaaaatggtggcagttcttattaccagttgttagtattgtttctggaaactgcttgccaagacaacatttattaactgttagaacacttgctttatgtttgtgtgtacatattttccacaaatgttataatttatatagtgtggttgaacaggatgcaatcttttgttgtctaaaggtgctgcagttaaaaaaaaaaaacaaccttttctttcaatatggcatgtagtggagtttttttaactttaaaaacatcaaaaattgttaaaatcattgtgttatctagtagtttataattatcggcttatatttccccatgaatgatcagaactgacatttaattcatgtttgtctcgccatgcttctttactttaacatatttcttttgcagaatgtaaaaggtaatgataattagtttatataagtgtactggctgtaaatgatgctaaatatactttatgcaattaagggcttacagaacatgttgaaactttttttacttttattgggaataaggaatgtttgcacctccacattttattgcttctggatgtgaaatcatggaattatttctgctgttatataaagggccctacttttaataaaggaaatgtacctatgaaaaaaaaaaaaaaaa

SEQ ID NO: 47974 - DNA, 591 bp, Homo Sapiens
ttgcactaggaaaggaaggaaggtacatccatgaagttaaagtgttaggagaacagtctgattaatagctgatctaattaatagctgacctcccaaatctgacaggatagacactgccacgtgcaaggcctgccagcccctcagacgcacaaaatgcgtaaaacaaatgcatcctttcctggctaagcgagtattactctcttatccctgcaccaaacctccaatctagccacatttaactctttttttcttagacccgcagagtgtcttcctgcctctgagctgtgagtgttgttccctttgcccgggatgctcttgtttttaataccagttcaagtcccactctctcagtgaagcactcccttccccactatagcctttagtgaaccctcgtttcttgcttctttattatctgtactgttgtccacttggcaattgttcaggcctctgtgttgttactgatttttgtatgtatatatatatatatgtcttgtttttccaactagattgtgagctccttaagggcagagccatgaattatacctctttgtatccccagtgccttgcatacagtaagcactcaataaatat

SEQ ID NO: 47975 - DNA, 569 bp, Homo Sapiens
ccggaggcataaaaatatgaaacatatttaattcatctcttttgtcagtttttctgggactccaatagcatttcagtgttatagagagtgacagtgacttgaatgcatgtatatgcacatagtcaattcagagcgtaataactaaaaattcagaatgacttgttttttgaaagtacttggaaattgtgctgctacttaaatattgaaggaattcagaaagttgtgtatttatcttaaaatgttccttctcacttattctactggaattgaccatgaaaaagaaaatattatgccttatttatatctaattattgactgtgcaaactgtgactcagtggatatttgtatgccccccaaaaacattttaaagctgagcaatttttaataaagatgtataaataattttgattattctcattgtagttaagttactgttagtttggtgcaatacattctttccttcctcatccttttaaaattaaatatataagatgtatgttttgttttattacattaagtgctatttttaaaaaattcattgtgtgtatatgagctaatacttgatttgt

SEQ ID NO: 47976 - DNA, 604 bp, Homo Sapiens
attttttaaaatatagtattttaccaggcaggaagtattaatattataagtaattcttgctcaccaaacaaagggctatgtctcttttaagcaaatgttttgatgcatatctttttaattaaccctctgcagcaagggtagaaatacagatcagatggaatgggtattataggagaatcaagatagcaacagctactccttttaccattactagtgtgttttcaaagtatggaaaaagatgcctgaagagtcattttatatattttaaatctaaaaagtgttaacaggtatgcttataggccatgggagaaatattcttataaattttttagtgtaaaatgataaattctgtgtcacaaagacaagtttaccacttgacctaccagaatcacagatacttgcatttaactagcaagtatcatttggtggaaatttctaaaatcatagtagacaggcccaaagatagaattcttaggtgatcagtagtgtttaaaataattttgtcctcagcactaactatataactgtaatttctacataagaacaagtgcttccaaaatatagtggagggaaaaaataaaaaaggaaaataaaaaaacaaaac

SEQ ID NO: 47977 - DNA, 772 bp, Homo Sapiens
ctccttgatacaacattgtcatgacatgagaagagactctgctgggctttttcatgtctgtaacatggtattggcttatcgtttttatctctgaagggcagtagcctgaagataacagtgcacaaggtgggaaaagccagctcagaggtgacgttgccgagctactctgctctctatacctgttctctactgggactttttataaccctcaataactgttttttatttggtcttagggctgtctgatacttagagctgaaggcattccagctgacacagaggaatatttttctaagtgttaatgttctatatggtaattagggggaagaattatttcttttcacaagttaatatagggatggctgttgtatcagccatggttctttctggtggaaaacagaattctccaactaaaaatattttaatggcagactgattacagtggtgtgggccagaaacaagggacagtgaaacacccagagacttgtatcagcaggaagccattgccattctgagccttgaagggcaaggagggaaacagtgttaccagagcccagtaagaactgctgtcatgaaggaggggccaccttgtaagagacatcattactaccagaactgtggtgccaaattgctggtgtctctctttggagaaaccaaccagatacatctgctggagagcccaggtgggcacagagaagggtggagagagaatctgggaagagaaatggagaataagcagcacagtgttattcatttctgtaaattcctatgt

SEQ ID NO: 47978 - DNA, 1093 bp, Homo Sapiens
  misc_feature (872)..(872): n is a, c, g, or t
  misc_feature (890)..(890): n is a, c, g, or t
  misc_feature (1006)..(1006): n is a, c, g, or t
cctctatctctctgcttgcaatttttggatttggctctcgcattgccctctgaaaaccttcctcagtttcagatgtaccgatgggcctttattccagaagcctcagatgattcaggtttggaagtcagaaggcagggtatacatcaacgagaatttaaaccttacgtggtacgactagcaaaacttcttcggaaaagagcaaagaaaaatccagaggaagacaactcagggagaacattgggttgggagccagggcacttgctgctcaccatctgcaccgtgcgcagtatggagcagctcctgccgttcttcaatgtgctcagtcaagtcttcaacagcaaagtcacaagccgatgtggaggacactcagggagtcctatcctctactcaaatgccttccctaataaggacatgaaactggagaaccacaaaccatgttccagcaaagccaggcaaaaaatagaagagatggtagaaaaagattttctggaagggatgataaaaacttgagcaccattgctggttccatttagcttacatgtaaatgtaattatttaaaacacacacactgctctgcgttgtatagtttttccttttttgtatgtaacagaacacatttcagattgtatttaatttaaatatttgtatataagagcaaatgtctgaatgtggcctgaatcaagtttaaatattgttggctcatactgattatggtgcctaagagagctatatatatacacatgtaaagtccattgtttttattgtcctgagttgtcttaaacctgcaaaatatacactacccattttttttttttccattgggttcagacttggttcaattaagattggttgggggatttttccctttcccntattaccatgtttctggntatcagaatgggggttccttctccatcagaaggctggggaacgtatttattattaggtttttcttcccacatacccttcaccaagaagcagtggaaagaatacctggagggctggnaccatgcaatcccttaaaaataattccattgagcatctccacccttcccatattgggaaaaagggattggaccaaccccccatattc

SEQ ID NO: 47979 - DNA, 496 bp, Homo Sapiens
ggcacgaggcttatgtagtggtctccagcctcatcagctgctggttttctcccaggccactgacacagcaaaacaccagttgtgactttctgccagccatgaagtctgcagacttcgaggggctttaccaggaatgagtgactgctcagaggccgggcttcttttcaagtactgctggatcatactcaccccttgggattatggcttagaagaagggggctgggtaggcaagcactccttggctgtgtcctctcgctttttcacttacttgtaggatcccgcagcagccaatttagggattgtgttgttcttgtgttggttcccatgtaaagaagcagcagagaaatgcgatggttcaacagctcgccctgccccaagtatgcagacttgaccttggcggggtcctgggcttctagagtctagcccgttgaccccaaagcctcagggcttatgtccaacggtcccattgggagcaacagtgattgtttatagtttt

SEQ ID NO: 47980 - DNA, 478 bp, Homo Sapiens
  misc_feature (146)..(146): n is a, c, g, or t
tctgacccactgatctctactaccacaaggaaaatagtttaggagaaaccagcttttactgtttttgaaaaattacagcttcaccctgtcaagttaacaaggaatgcctgtgccaataaaaggtttctccaacttgaagtctactntgatgggatctcagatcctttgtcactgcctatagacttgtagctgctgtctctctttgtccctgcagagaatcacgtcctggaactgcatgttcttgcgactcttgggacttcatcttaacttctcgctgccccagccatgttttcaaccatggcatccctcccccaattagttccctgtcatcctcgtcaaccttctctgtaagtgcctggtaagcttgcccttgcttaagaactcaaaacatagctgtgctctatttttttgttgttgttgtgactgacagagtgagactccagcctcggtgacagcgcaaggctccgtctcaataatt

SEQ ID NO: 47981 - DNA, 599 bp, Homo Sapiens
agctggtgcagcagccgggcacctcggaggaggcgctgtgcggcacgctgcacaactggatcgacatgaagcgggccctgatgatgatgaagtttgcggagaaggcggtggatcgcaggcggggcgtggagctggaggactggctttgctgccagtacctggcgtctgcggagcccggggccctcttacagtcgctgaagctcctgcagcttctgtgagccaagccccagcctgcaccgtcgctgccccttccctgcctaaccctttcctgtctcgccttggaagcacccatgtctccctgggaaatggtacagatgactgggatacctggatgtaaaatatataaatatatatatagaaaatacatataccatatataaatatgaaagactaaggatgctgttgcccgtccacactcgtctcctctctgcactaagtcctccctgttttcttctgtaattatacacatttccagttccatgcaacgtcctgaggacagttctgtgaactgaatgcagcctggacactggcctcaataccttgtttaggatttcttcacccttttgtcaaattgttatttaaagaaaaaaaaaaaaaaa

SEQ ID NO: 47982 - DNA, 581 bp, Homo Sapiens
  misc_feature (338)..(338): n is a, c, g, or t
  misc_feature (448)..(448): n is a, c, g, or t
  misc_feature (475)..(475): n is a, c, g, or t
tgactggaaagaggagcttttcttccaggcatgttccagtttcaccctaagactgaccttcaaataatcaggttgtactgaaataaaggacttgttaaaaattaaaattatgtcatcgagatgatagcttttttcctcctccaacagtttattgtcatgtgttgtgggagagctcgagtgaagagcaataaactccaggtcttataagaatgtacatacaataaaggtggtgccagcagtttttttttttctaaagagtcacatgtagaaaagcctccagtattaagctcctgaattcattccttaaataaattggctctctctctcttctataattnctttttctttttatttttgagatgaagtcttgctctgtcgcccaggctggagtgcagtgacacaatctcggctcactgcaacctctgccttcccggttcaagcaattctnccttctgcctcagccttccaaagagcntggactacaagcgcccggcaccagcctggctaattctgttttttagtaaagacggggttttaccttgttccgacaaaccctaagccctaagggaaattccaaataa

SEQ ID NO: 47983 - DNA, 889 bp, Homo Sapiens
  misc_feature (651)..(651): n is a, c, g, or t
ttaacagtgtttgtatttgatatttgtatatgtttgattgctatctttaaagtgccttatcagatttatggctctgtgctattactttttgagctttgcaagttgtgtacataataattctaaagaagttactttgtttgcaatgcatcaaatttaaatgatgtgattttttttgtattatttgatcttagtgacagtgttctattttgcatcctgtatcttatgttgcttttggtgttttgtgttgtgtgtcaacgattaagccaactaattctctaccatatataacttctggacatttttgatacaacatcttaattctttgtagatatggagataggtacagaactatattctaatgccccacaatggggctatgagaggggacagatggatgggcaaagaatagttttgtttaacatattaggtcatagttcttgattagtttttttagttaaagataaacacatagggtgtgatttctataccaaagatatgcttatttcagtattagaaaaatattcttcttacatctcctgaaaattgcaatttttaaaatgtgtaaaaataaattattattaaaagcacattttatttccatttgtttggattcattaccttaaaactttattgacatatttcaaagatatnaggaaaggtaaatgatttcaagaaaatccgtgtatttctaccatgcagatgtaataaatgttagcatttggctatattttcttcagacacacatatgcatgtaattgcaaatgttagatacatttgaaagttgctttgttacctgtttggatcctgtcccgttcctcccttcccaaagtccccagagtaaaccactagaggggcattattaataccatggggtttttatatttttaaa

SEQ ID NO: 47984 - DNA, 571 bp, Homo Sapiens
tctaataccatctacacaaaaaaatgttgtacttgcagaacttagtttataaaaacaaagaatgtgtatttcttcaatagccgggtatttggattgttctcttgataatatttgaatgtgactcttggatttaagtgcactattattcatggcttatacaataaaattgcactgtatggcaaatatgtctataatgtatgctttgctgaaacctcaagagtgctgtaaggtacaggtttccatattgtgaacctgtgtacgcacacacacatatacatacagtcttagggaaaaaaaaaagcagaacttttgtaagtctgtgtaacattttaatattgtttgtaatattcactaggtgataatttcccctgtaccctataactgtaatcattcaccttgggttggccggtttgtcaagcttggtttactgaatcaagaaagagtcttgtcgaatgtggtactgttcttagtgtgtaatatttgcgtatggtgttcctctgcctcagaggacagttgcacagatggctagtgttaaatttctatagacgatggtaataaaatctgaatatat

SEQ ID NO: 47985 - DNA, 527 bp, Homo Sapiens
ggcacgagggctggaccgtgtgcccctttgggaggaagaagacaagccccactagggccaagggcagcagagccctgccgagtgagaggctgtggggcagcggctctgtcctgtgccttaccagccctggggaggggggcatttagctggaagactggaatttaattgccatcgtctttgattttgtgacatttctgcttggaagtgtgaactacccccccccccccccgcttcctgctccttagcatgcgtgcagctctctcctgttttgggtgttccccttggacactccagctcggggactgctggcgtgtgagtgtgcaaattcccctgtgtggtcgaacctaagaactgtggcttggaagtgatgctccatgtgacgacgactttgctttctttcctcttagtgaggaggtgattcgtagatcccaactgcctatgtaatgtaaataatgtacatttaatttattgctatggtagcacattgtatttgttaatgtccaaaacaaattctaaaaggttgacaa

SEQ ID NO: 47986 - DNA, 938 bp, Homo Sapiens
  misc_feature (596)..(596): n is a, c, g, or t
  misc_feature (640)..(640): n is a, c, g, or t
ttcgttaacacatatattttattgaaggtctactctatgcaagacactatgtgtgaataatacttccaaatatagtagttaccttttgaacttttctatagctgtaaaaagaaaaaagtctcactgttctgagctttaaagccctctttaaaatctcaaaactgatttgcaaagcctttatcatacagaaaaggtgtacctaaaagaacacatgttctcatatgtttccaaaatacaagaagatcttgcttttatagtcttgtaatattcatactgtgagcctgtgtttttgaataaaaatgctttctaatctccctccttcttactttcccttgatagcaaaaagggtgtatagtgtggttgtggattatatataaatcaattttaattgactataattcatatactgtatatgatcatctgatttgaaaatccagtttaatttgggtagaaatttgaagtatatgttggggttatgttcaaatggtgagattaatgatttaatttatgccctgtgaatatttattaagaaaaggttaatgtatagaatatcaatactaattgtaatacatacctgacttagcctcttcagcatntcagctccaatacctaggcttttaaatagacaatgcaaagtggnaaactgccaaattcacttaacttgttaattggcttttgttttaaaaataaattatttcctaaaacctcgggtaacatacaacaaaaccaccacaacaactaccacgaacaacaaccacaaacaaaaacaaagggggcgcgccaaaataaaccccgggggcccatatgcgtccccagtttttacaacgccccactaggcgattagaaacagcgcgcgctaaacgcttggaaaaacgctggctttagcctcctgtgggtttgcaccccgagaaccgaaaaagtataaccccgcgaatgaa

SEQ ID NO: 47987 - DNA, 777 bp, Homo Sapiens
cggacgcgtgggtcgggtcagtgtgccaagacctctccagcttctcattcatgatgacctctcaaagttgggaaacaagctgatttcttgccaagaggtctcccaggagatattgggaaatgtgaagttcgtatctttaaggagcattttggtcagcatggttgatgaactaatgatgagagagttaaggaatgttgctagaacatagggcttgctggtacctatgtgactaagaaagggacatgatgtaagggaaaaggcctcaaattcttgtgaatgtggacattctcgttaatattcttttgggctaatagtgacatagtgtgcagaggtgtaccaggatcatgggggatttcctagcactagtatgcttctagttttagataactccctcctttattccctggccccttgtattttccttatcttcctctttcaagacccctacccattttgcctatccgtaggctggggcttgtgtctttgtcattgtctggttcttaagagtcccagactttgggagaccagctccaggtggcgtcctccctgcctctccgtcttgtaaatgagttgtagtatttactcttaacataggatcatttggaacaggagttctgaggaggagagagtgagggttttgctattgactgacttgaaacgatggttctcctcaagctgtaggctccaagagttctaacctagtaaaatgtccaggaacagacgggagatataagtgtttccctctatcattaaggtgtttaacaaaaaaaaaaacag

SEQ ID NO: 47988 - DNA, 575 bp, Homo Sapiens
ctcagaggcaagaaagttgtatgatgagggtgggggggtgtgcggatagaggttgaagcccaaaagccctgaaagttcagtgttgaggctcagggtggggaccctagagaggcaaaagatgcccagccagatggaattggtggtgtgaattgccaggactggaaagagcccagatgggggctgcagcatgggccttggttgaagcctctaatcctgtaagggctgctttggcccaagaggccttagaaacccggtgtaagcctcaatcggtagccggtctggcctctttctcacacttaaccgacacagctcttgctctgatctcatcccaagtcatctcgctggaggacaattaactcggcttcaaaatggccctcagcctggagccaagatttaggagcaagaccgtctagttgggagagaagatgtttttggagagttgaagacttcttgaaaaagttcgaaaagttcttgaaaaagcaaaggatgcttctttccgtctgggagagggaaaacctctcccagggcaaaaggaactaagaccaggggtgggttaaaaaaaaaaaaaaaaaaaa

SEQ ID NO: 47989 - DNA, 770 bp, Homo Sapiens
  misc_feature (578)..(578): n is a, c, g, or t
tttgattatactcactcaaggcagtgcaagatcttgaagtactttttagcagttaagtaatattgaattgtattgaatagtttacatagtttattctagtctttgaaaattactgaacatggacaatgtgcatgtcattgacatctgccttagaacttctgggacaatcctgattcgagagattctatcccattatttacatataccaaaaatactttgttaatttaatgtgttggcttcccaactcctgaacacgacacaattttattattagattttgtatggtgattttaggctatgaaaacatgatcattatatgtatatagatacatttttatttgttacaaatgtttgagcagctcactagcccacccctcctctattttgggtaagagaatttactaccttttttaactatgtagttgagagcaacatgtattttgttatttttagaatggtcagtatattgctataaaattttaaatgagactatgaaagttaaagtattctgattctggttaaattaacgaatatggttccaggccctgttctctgggtttttgagagagaataaaggntatgtttgtcttacctttgttatcgagtttgctgaattcttttgaacgatgatcttaaaggcacaaacaccaccagccactttgctaatttcttaatagcagatttacattgcagcaagaaaaccatcttttatagtaacattcagttaaaatgaactcaattcattggtaacttcctaaaacagaatttga

SEQ ID NO: 47990 - DNA, 731 bp, Homo Sapiens
accaccacagattcactattgtgatgtttgtaagatcagctgtgctggaccacagacttataaagaacatttagaaggacagaaacataaaaaaaaaagaagctgcattgaaagcctcacaaaataccagcagcagcaacagttctactcgtgggactcaaaatcagctacgttgtgagctctgcgatgtgtcttgtacaggagcagatgcgtatgctgcccacattcgtggtgctaagcatcagaaagtggttaagttacacacaaaacttggtaaacccattccatcaacagaaccaaatgttgttagccaagctacttcttcaacagctgtatctgcttcaaagccgactgcctctccttcaagcattgcagcaaacaattgtactgtgaatacgtcatcaattgcaacgtcttcaatgaagggtcttacgactacaggaaactcgtctcttaatagcacatctaacactaaagtatcagcagtgcctacaaatatggctgccaagaaaacatctacccccaaaataaattttgttggtggtaataagctgcagtcaacaggaaataaagcagaagacataaaaggaaccgaatgtgttaaaagtactcctgtcacttctgctgtgcagattcctgaagtaaagcaagacacagtgtcagaaccagtcacacctgcatctcttgctgctttacagagtgatgtgcagccagtgggccatgattatgtg

SEQ ID NO: 47991 - DNA, 622 bp, Homo Sapiens
  misc_feature (595)..(595): n is a, c, g, or t
attgaacacaaatgtgttccaaaccagtcttgtccatcttgtcacttttatgtgactgctcctctgaaccagaaggggcacgatagaaggccataggaatgaaagtaaatcattcaggtgaagtgagaaattcttccatatacagagtgaaaatgtgtgatttcattcctgccttcctttaaacgttgtcttgatctctgcctagtagtagttgagccctcagtcgcccaaacatgaggagagacccaactccagcagccagaatttagtatttacatttgccttcccaagttgagaatagaatgtggtgttctgtgctttctgtttttattattccaaaatatttttttaaagaagtgttatttttcaacagattcataaattagttcctgatgtacggtaaattaaaactcccactgtgtcagtcaaactgagatgtgctcatttcataaccactcatttctagtctgtcagagctgcactggtggcttattgctggtttttaaaggtgtttttaacttacatgtaacatgtttaggacatgttttttttttctaatttgtgtgtctttacaactgattaaacagtagtttanaaataaaaaaaaaaaaaaaaaaaaaca

SEQ ID NO: 47992 - DNA, 773 bp, Homo Sapiens
  misc_feature (773)..(773): n is a, c, g, or t
ctggttctggggctgctggtatgtacgcttattgctggaactgagtacttccgggtccccgcatttggctgggtcatgtttgtagctgtattttactgggtcctcaccgtcttcttcctcattatctacataacaatgacctacaccaggattccccaggtgccctggacaacagtgggcctgtgctttaacggcagtgccttcgtcttgtacctctctgccgctgttgtagatgcatcttccgtctcccctgagagggacagtcacaacttcaacagctgggcggcctcatcgttctttgccttcctggtcaccatctgctacgctggaaatacatatttcagttttatagcatggagatccaggaccatacagtgatttaccattttgataattaaaaggaaaaaaaaaggaagactctcactgtaaaaacagctgtaggtataatgtatattcccagagaattgtatttaactaattaatgttttttatattcttaaatttgctcacaaattgtggtttgttacaattaaactggatacttatttgcaaagtgttgtagcttataatggactcttaagtatcttattaatgtattaatgtcttcatagatcatattttcttagacaatgtttaaatagataaattgctaatattgagaatgtgtcaagtttggaaacctaacttttaagatgccagattcttttttgattaaagttgcaaaatccaaaaaaaaaaaaaaaatggcctcgttggcctcagcggtggagctn

SEQ ID NO: 47993 - DNA, 778 bp, Homo Sapiens
cgtccgagcagagttgcttatgtctgggaggctgaggtgggaggattgcttgaggccaaaagtttgagaccagcctgagcaacatagcaagatcctgcctctaaaaacaaacaaacaaaaaatgctgccagttgatcattacatttatcccgacatcagatatgtcaaattgtgaaaagcaccttaattttgatgaaatatgataggtaaaaaatagcgcaaagctaagtataagtgacttttaaattatctgctcttttggattatcactactgctactagccgttagaatattggtttggataatggaaagttgactagagctacaaaatctgtttcaaaataaaagatctgctcaaacaagaatgtgatgatcacttgctgtattgtacaacaaagtcaaactgctgttagactcaggtgacagtcaaatgttggaggctgtgttgggatgagttgttacaaagcctctttcattcttcccatgccatgtccaggagttcttctctgttaaacctgaagagatgccagccctcctcagaggaaaggtctaaagcccctcgactagtatagtagttgatagaagcctggttccaaatgacgacaagaaagtgcatgcagttacattgagttgtgatggctatctgtttaaaaacaaacaagcaaatattactttcatttgaaagtataatcttcgttaacacatatattttattgaaggtctactctatgcaagacactatgtgtgaataatacttcccaaatatagtagttacct

SEQ ID NO: 47994 - DNA, 697 bp, Homo Sapiens
cgacctggtcgctgagaagttcatcgatgacatggaggacgtcctctgcccggaccctcagatcgtgtgcccagaccttccctgccaaacagatgcaccgtggcctggcggcgagcccccggtcaccttcctccgcacggaagaggggccggacgccaccttccccaggaccattcccctgatccaacagttgctaaacgccacggagctcacgcaggacccggccgcctactcccagctggtggccgtgctggtctacaccgccgagcgggccaagttcgccaccggggtagagcggcaggactggatggagctgttcattgacacctttaagctggtgcacagggacatcgtgggggaccccgagaccgcgctggccctctgctaaagcccgggcacccgcccagccgggctgggccctccctgccacactagcttcccagggctgcccccgacaggctggctctcagtggaggccagagatctggaatccgggtcagcggggctacagtccttccaggggctctggggcagctcccagcctcttcccacgctggtggccaccgtgtcccttgctgcggctgcatcttccagtctctcctccgtcttcctgtggccgctctctttataagaaccctggtcattgaatttaaggcccaccccaagtccagaatgacctcgcaagacccttaactca

SEQ ID NO: 47995 - DNA, 757 bp, Homo Sapiens
cagatcttctggggcttaactcaaatactgttgtgtctgcaccagtcttttagtgtctcaaaatagattattaatacatccataagtctgtggttcttctcattctcatctataatccaccactaccaagagagatttctgtgtcttaaatgatttggtgcatattttgcaacattgagagaaaactgcccccatctcaagcaagaatggcgttggtttcttccatttcaaactaatcagcattctccagcaatgacaaagtgccagagtgtatatatgaaagctaaggaaagcacaaaacaatggttcagagataaattggctaatttgtttaacagttggagactgtgcaatgtacgacttggaggagtttgtttggcataatgattttgtaggtctgtcagcattttgatatattgtggattagccaggtgaatgatccttgaaacatctctttcaggtctggagaaagagacagaatgcccttaaagtgtgaaataaccttatacctgaattacagttttgtgatataaaataaagctgagtataaaataaaaccaatcaaacacagaatttgattggatttgttattcattggtatacaacaatttttattcttatgtgtgctttaagggctgtgttttgctcttagggtactcaattttatgtttccttttggcattctttgtgcaaaaagaagcatgtggtggctctcatttaaatttcaaaattattagttttatctttaacagattac

SEQ ID NO: 47996 - DNA, 684 bp, Homo Sapiens
gaaggaaaatattgttaattaaaatgtgctgctgccaaggaaactgcaacttgaagcaaggattttgtaaaatgcaaaatccagctactgtttccatttcacagtagttaactatattaaagagagaatgctttaaaattgatcttgttttgaaacccacttttatgtagctcatcatggtttatcttactaaggaatatgtttgttcattcagttctcaacttttgtatgtgctaaccttaaagtgaagttctgagcccgtgtgccattacagtgcttttaataaaatttatttgggattattgtttccttaacattaaaataatagcgacatttagactatgcaattttagcatagaaaggagtctttgagtatgtacagttttgaaaattctctttgagataattgatttcatattctgtggctttcaacctccatttacctcttgtcattccaacatctttatagagaaataaaaacccaatttctctttcaccatttagtttgattatcatctggattttcactcaagatgcagctcctaagattattgttatgttaaattcataaactccttcacctttaataattaaggaaacaataccagtgttgataaagatattacaaggggtaatttcatgcaataaacatgtaccgtaagttttcttccacatattttgggg

SEQ ID NO: 47997 - DNA, 482 bp, Homo Sapiens
tcactgtgttttaaagtcttcatttatttttataacatgggttagggagaagggccacaaatggagggattgtcctttcaagcaccacagcttcagataaaattagtactttcaaatattgtccactttaacttaaaaaattctagagggattatattggagactcaactgcccttggttttagtttataaaatggcctagtactgtggaattttaattttagaaagtcttagcatcagatcataaacattcattaaaagaactcacatcccatctgaaacttcccaggggagttgggattcttagtagattggtagaaaggggctcattttctactgcatttcccatttttggtatcttgttcagcatgttttatttttttttttgtctgcagaacatcctatatttatgagaacattctttaagaagaccaccacatagaataccccttcctatcagctcgctctgatttagccttaatt

SEQ ID NO: 47998 - DNA, 927 bp, Homo Sapiens
gtgaactctctggcgcaggttaaatgcagttttgagaacctggaaacatcaaatggaggcgggaaataggctggggccgagctgaggggctgaacacagcagtgaccgtgggtcagcaggtcgcctgcccagcaggccccccaggagagggctcgggcgcccctggcagcccccatacccccaggacctggctcgtgagtgcgtctgggtcaggaagagacctctctgtgcgtctcaggctgagatgcagatttctgttttctaaaactggaagcgaccttgacgtgtattgaaggtgtgtgtgccaaatgcttccgacggaggtgctggccttggttggtttctctctgccccgtgtggtcatcaagtcctgggggatgtgctctgcccagccgccctcggggagagcagcgccgcctcccatggggccgtggggctgctgttctcactgcactggctgaagcaacccgccagcctccgtgccccaccccacccagcacgcactcattcagtccattgccttaacacaagcctgatggggctgttttctcacaatataaacgaataaagtgtcttctggcctacttctgaattacttctcaactgtatggtttggggaagggagggaaacctaaaatcccgtccaaataagtgaaattcctgaagaagtggctgagtcctaccaggttggggttagggaaatgttctgggttcaggcgcccctcccagggctgagaaagtgcagccagggacagctttctgttctctcccagggtggctaggttagtatcttacatgacaaaaaactgagagtgttctaacttctgtgcaagcaaggttaatcctgagactaaatcttggcgttcagactcccgtagaggtcatctgtgtccaggcccacccgggcgccggctcagcggtagtgcc

SEQ ID NO: 47999 - DNA, 912 bp, Homo Sapiens
  misc_feature (625)..(625): n is a, c, g, or t
ctacccacctcatctcaacccccaggacccgctcaaagatcttgtctcgctggcctgcgacccagccagccagcaacctggaccgttaaatggaagtggtcagctcaaaatgcccagccactgcctttctgctcagatgctggcacctccgcccccggggctgccacggctggcgctcccccctgccaccaaacccgccaccacctccgagggaggagccacgtcgccgacctcgccttcctactctccgcccgacacgtcccctgcaaaccgttcctttgtgggattaggaccaagggatcctgcgggcatttatcaggcacagtcctggtatctgggatagcaaaggtcttcttccctcgccccttctccatcgtcccaggaatcccagggggcagcacagccggcccccggcccacgttttcggtggaaaattagagtgaacaagaacacccctgccgactcccagcccggccaaaaagacaaaacacatagacgcacacactcaggaggaaaagaaaaaacaaaggcagaagaagaagaagaagaaataaaaacccacccaagcaagaagacaaaaggtaaagacgcaacgtttccaactctcgggacgcccaagccgcangactggagggccaggccccgccacccccccgggagacccgggacagggcgtcttcctaagttattcatctcctctccgcctgctgctcgggaaggacagacgccggccgcccgcccgcgccccggaagccctgggtctgtccggagaccaggtgagcacagcctgaagcctgtgcccaaggccgaacaggcgcgacacccagcaagggccaccttctccccgggggcccccgcgccctttgccgggaaacgggaccgggcccccttcagtcccccacccgaaggacc

SEQ ID NO: 48000 - DNA, 531 bp, Homo Sapiens
ggaggccacgtccagcctgctcgggggcatgcgcaaccagattgtccccgacgcccacaaggaccacgccctcaagtggcgctcggacagtgcccaagactgagcctggggtgcccggcacccagagggtgctgcccaccatgctcctgagcctcccaagagctgcagcccacgggcccggcccggcctggcccttcaggggatggccactgtgaaggacgccttcccagcctgcccgttgccaatctgctgtgagaggggggcctccctgccttggggccttagccctggctctgcacttttcctccggggagaaaggacactgcccctcccccgacctgggcccacactgctgccttctcccaggacggaggcttttggaccctcggaccccatcccactcagccaagtgtctttctgtgtctggggggaggaggggatgatatccgtgtggttcgatgtattatttttaagctccgtgagtgcgtgggtcagtgtctgcatgaagtggaataaactgcccaccgccaa

SEQ ID NO: 48001 - DNA, 617 bp, Homo Sapiens
agatatttcaaaaataaaataaatttagactttagagccacaataaagctgagctaggttcctattctgtataatcagcaacacacagaaactccaaatcttgattgttttgttggacccgtgaattctattgggaaatatttgttcttcaaggcaacctcataattcacattagctagaaaggtaggtggtattttgtacattaatttagtgtataaccaggacaaatttcattctgaattgctttgctaaatcatcacagagctgagctctcccatggtcagggaactccttccaacaccaagtcataagcacataaagacccgttcctctaagctgtgacctttcatctggctaaggagtgggaagtcagccatggactttgtgtcgtggagttaacctcatgttcatgacttttcctccatagagaaatattcatttatacatccagaaacaagaagaaagggcagagaatgtcttgctttatgtttttgtattgatagtgatgagagctgccatttttgagccagcatgcatgccagcactgtgctaagtgacttacatggatcacatatgtaagtcatagttactaatcttaaaaaaaaaaaaaaaaaaaa

SEQ ID NO: 48002 - DNA, 655 bp, Homo Sapiens
ttttttttttttttttttgaggcagtctcactctgtcacccaggctggagtacaatggcgtgatctcggcccactgcaacctctgcctcctgggttcaagcaattttcctgcctcagcctcccgagtagctgggagtacaggcacacaccaccacacccagctaatttttgtatttttagtagagatagggtttcaccatgtctcccaggctggtctcaaactcctaacctcaagtgattcgcctgcctcggcctcccaaagtgctgggattacaggtgggagccactacagctggcccagcagctctgtttctgatagaggtggttggggctctcatccctagatcctaaccctttagtatgctggaattctactcttcacttactgcattgactgttgttgattagttattattgcaaagcactgtcaccggcctcagggagtttatgtgtaatagaattaaaaataatagctgtgtataacacttagctcaagccacgcatgtgtgaggcatttggtatgtatctgaattaattctcactaaaattcagcaaaggacttgatagcccctccccgccttttcaataaaggatgaatgaaggttaaaaaaaaaaaaaaaaaaaaaaagcaatgatcttcggccgctcctcgtgc

SEQ ID NO: 48003 - DNA, 662 bp, Homo Sapiens
  misc_feature (26)..(26): n is a, c, g, or t
ttaaaacttgacgataatgaattganttcaatttccttgcaagataggacaactaataaaccttcgctttttgtcagcagctcgaaataagcttccatttttgcctagtgaatttagaaatttatcccttgaatacttggatctttttggaaatacttttgaacaaccaaaagtccttccagtaataaagctgcaagcaccattaactttattggaatcttctgcacgaaccatattacataataggattccatatggctctcatatcattccattccatctctgccaagatttggataccgcaaaaatttgtgtttgtggaagattctgtctgaactctttcattcaaggaactactaccatgaatctgcattctgttgcccacactgtggtcttagtagataatttgggtggtactgaagcacctattatctcttatttctgttctctaggctgttatgttaattcctctgatatgttaaagtaatgggtgagaccagaaaaagaaatttcaataacagatcagtttggggtgcatgtatgattttgcagcgtcaaattggagtaagggaagatttctgtatacttgctggagaggaggaatgtgtatagttactcatttagatgactccaaaacttttattaaaaccaattttagtttt

SEQ ID NO: 48004 - DNA, 659 bp, Homo Sapiens
cttatattcatcacataaaaacctaaaatattcatgaataattcatgaaatctgagtcacatgggatgaattcaattttaatatttttgagaaaagtcctgctcatttgcactattctatagaaactacaatttgttgccctatatgtaaaattagaattgtaattaaaaatacacattttattatgtaatcatgttctggtatgtctcatttctcagccttattttataacgtggaagtcattgaactatgttatcagaaactaagtttgtatattatttgtgaaaaacatgtatttctgaatcagtccgctaatatgattgtgcagtattagcttgcttttgctgctgtgttaatgtcatatatttgcttaccttttgggttcaattatctacataattgtgaaatttaacaagttataataaagcatgacaaccaaagttttagaaaacattaaacattttaaatgcacgtttaaaaaacgtgttgaatgtaacccccctatttttgtgtgcaaacactaaattttattgctttatgttttgacctttataaaggtgttattctgctgcccagttttgtaattctcaaaaatagtgccaggtcttctatagcttttttcagaattcatgggcttacaagtactgtatgcatcttta

SEQ ID NO: 48005 - DNA, 591 bp, Homo Sapiens
cccacctctaatatgcatatatatttttcctgctaaaattggtttctacaattgagtaaatggcaaatacatgaagcaatgtccctaaattttataaagaaattatatttaatgcacatttcaattttcattcttatttttgaccttttgtaaaatattttcatgttgctataagtaaatgatgatgccaccccatgttgactatggtttttctagaaagcaactatgctgctaaccatagaggaacatagaagggttccagaatctttagtgctggttttaacaaccgatgcaacattaaaaatgtgttagtgtgctgtgcaattggttttcaattcatattaatcttaatgacagagaacaatgtgttactaattattttggttgtatgccattagtaaattgatagaaaaattaaggggattaacataacttcatttcattgccttatattaacatcttataatacaatagtttaagactaagggaaacagatggagctgtttattgagacaactggtgaggaattatcatgtgttcattcccattttagagcgtgaaactcctacattagaatatataaagtcactt

SEQ ID NO: 48006 - DNA, 1047 bp, Homo Sapiens
  misc_feature (16)..(16): n is a, c, g, or t
  misc_feature (31)..(31): n is a, c, g, or t
  misc_feature (37)..(38): n is a, c, g, or t
  misc_feature (990)..(991): n is a, c, g, or t
  misc_feature (994)..(997): n is a, c, g, or t
  misc_feature (999)..(999): n is a, c, g, or t
  misc_feature (1010)..(1010): n is a, c, g, or t
ccccccgcggcccggnccccccaaagcaccncaaacnnaaaaaggatggtaccggtccggaattttcaaaactcgtcgaccacgcgtccgtccacgcgtccggtttacttaaagatcttatttttaatgtagtgaggatattatttaaacttttattttaactggaaatgtcctgaaacacatatttaaaatattgggatagagggaaagaaaaattcaaattttaataacataaagatttcctaactttatgttattgaacacttactcactagaagtgagttctttagaaaaatacagtgaaggactcagttcagtcttgtttttatcagagtgataatcatcctgtttcacatcccaatactattttgaaattctaaacaattaaaccaaaattccaataaatataaggttatgccttcaatatattcctatacaattctgtaacaatggtttaaaatacacaagcttaaaataacatgcttagaaatacacaataatatgaacagtatttcagccttaattgtgaatttccttgttattcaagtattaaatgaaatcttttgagtttttagccaaaaattggcatttttaaaatacgaaaatttccttggaattataatgtactgtacctcttcttttttaaataaaggcattttactatatggaaaataactcactaaagcataaattacattatacaaaaccaaaaccaaacaaccccgacaaacaacccccaacaccccgacaaccccccgctccacacatataacgccccgtcaacacgaagaaataccacacagccactcacgccgaccccttttctttgacaacccccaacttcccctaaccacgcacctaaaaacatcacctcgcggccgtgcgtcccctttatttcccaacacttactccccccctcacaaagacggggtgggcaccaaacacccgctccgcataccctccacccacccccccctctctaacacccgnntcnnnngncggcctccccnatgagggcgcggccctctcctcctcacaatcctcaat

SEQ ID NO: 48007 - DNA, 766 bp, Homo Sapiens
atgaatcggtctctatctctatctgcttattttggtactgaaagcaatagttcctcattcaaatcaccacccactgttctccccctttgggacatgttaggacgaggccctattccatgcccctctttaatggtggaacaaatgttaaactgctcatctaaagatcatgttgatattattccaggttttaagatcaacttttgttacatactgtaatttaaataaactgcatttacatgcctagtttctgtaatattgtgtatacaaaacccaaatctctcaaaatgtaaattatgtatacctgccaagataccttttccagggtgtctgcgcacattttaagttaattcacataatataaaaattactcaatgtgactgttgatttgctgaactttacatatcacaaagtgaattatttgtgatactttagttaataaaatggtaaatttttttctcagttattgaacaagcaagcattatccagttgatctggcaatgactttttgtgtgtgggccacaatattgattttcccattaacaatttttttgtttttaaatactaatatgtttcacactatagttagtgtaacaacacgtgttcgcattatctatgttgctgttacttctgtgctttttattctttttagactttataacaacaaataaaaaagctccgtgtaattgggcctttctcccaatccttaaatccctgtatggcaaccaaaaattactggtcacaaatacatatactattgcctaaggta

SEQ ID NO: 48008 - DNA, 912 bp, Homo Sapiens
ttttaagaaaaaggtttctatcatgtcctgtttgcttttgtgcaaattatttttgtttaatgtattttatatcttcgttgcattctaattttgcccttctttaaactgctggagtctcttctcactgcttgtacatttcatcaacttgtataaaaactcttcagactaaaagattgcccctaatgtaaataataaatatttatgaagtagttattttttaaatttttatcgtgtttaattctggctttctctgaaatccactgtgatttcagccaggtctgtaatgacgctggatagaaacaaggctagagaaaaagccatcgttcaaagaaatttcccttgagctcagcctgcgcagtgcccggaaacatggtggggaaagggcccgagcagttggaaggaaaacaaggcaatttaaatttagagtttatgacttgaagttgttttgtttgttgtctattttgtttttgtaaatttctttgacagacttttactaaaaggacatgtagtttccatgaaagtaaaaaaaaaaaacaacaaaaaacccacatatactgtagcattttgtctttatattgttttatttctacaaatctgttcattaatattgtgctttaaggctgaaatgaagtatattatgaatttttttaagaaaactcatcaaatttcagggtatcacaaaactttattatattattatactgccccctatttattatatgttatagatgccctgagaggtaaacccaaaattttatttttactggttaaaaaaacttcaatttaaactttattaacctattttagcaacttttgggataaatacggaccttttacttgaatttggaaaaaatcccagtggaaggccctgtggctggatccggtggaagcttaaaataggggctttgaaac

SEQ ID NO: 48009 - DNA, 602 bp, Homo Sapiens
gctaattacagtctattaaaactgtgaatgtatgtagcaatcctgcgtgtgaaggcaaataaactctttaacaggcaattatattgctggccaaaatatgctatatttgtatacaaagacattctaactcagttccagtatgaagaaagattattcactctagctccactgagaaacattttcctaagtgaaaacaatttcttaagatggaaatggattggattgtcaaattattatttattggagaaaaaaacctgatctacacatttttacttatatggggttgccagagtctctgggttctagatgattttggtggcatgcttgctgagccataattactaaagagaatgtaagtggacgggttccctgaatccccagggtccttggagagccatcgaggagaatgtgcaattggactgaagctccctggctgaagatacatgccgagtcagcacatgggtagagatgatgtaaaagcagccaatctggaaacaatacattgtaaatagttcttcattgtttgaagtagtgttcacattaaaaagatgttttatgataaaaaaaaaaaaaaaaaaatgagcgggccgcaaagcttattc

SEQ ID NO: 48010 - DNA, 668 bp, Homo Sapiens
  misc_feature (32)..(32): n is a, c, g, or t
  misc_feature (517)..(517): n is a, c, g, or t
  misc_feature (582)..(582): n is a, c, g, or t
ttcagcgcccattcttctcttgttactcatanagagaacacacagtgggagaaaaaccgtataaatgcaaggaatgtggaaaagccttcagtgcgcactcttcccttgttactcataagagaacacacagtgggagagaaaccctatacatgccatgcctgtgggaaggcctttaatacttcctccacactttgtcaacataatagaattcatactggtgaaaaaccctttcagtgcagtcaatgcgggaagtcctttagtcctttagctgcagctctcaccttactcgacactgtagaatgtgtaatggaaaatttagcaaataaccaaaactcaaaatgttaattctgattattctgtatcatcaccagtactttgtactttgagtctttttaaatatgctctgttagttggtatggaatgatatttcattgcacttttaatttaacttaaaaatgccttcccttgactgttgatatgtattttttgtgaagtgtgtgttgaagccttgcagatnattttttaaattagaggtttatcactaggtatatctcctaatgctatccctcccccctccccctnatgtaaatgacgagttaatggtgcagcacaccaacatggcacatgtatacatatgtaacaaactgcacgttgtgcacatggtaccc

SEQ ID NO: 48011 - DNA, 561 bp, Homo Sapiens
tacattaatgcaaatttcctgattttaaacattgtagtttgattgcacaaggagaatgtctttatgtgtggaaaataaatagtcaacattctgtcttcaagcttctgagaaaactctgcttttagggcatagatagaagtggatgataattcacctgttcctctgctactaattgagctgctctctgtttccatggctggctcatgggatgagagaatatatctagttttttatgtttcaatttgtctctctatggcatttttgtgaaaataaggaagtgtggagacttatatatgtttctaaattgtaatagttcattaatgtaaagtacagacagtcttcacttttccttcttagaccgtttaaatatggccacgaaacaagtagtctctggttggctgggcactgtggctcatgtccttaacaccaacactttgggaggccgaggcaggcaaatcacttgaggtcaggagttcgagaccagcctggccaatgtggcaaaaccccatctcttctaaaaatacaaaaattagctgagtgcggtggtgcacaccggtaatc

SEQ ID NO: 48012 - DNA, 1114 bp, Homo Sapiens
  misc_feature (772)..(772): n is a, c, g, or t
  misc_feature (776)..(839): n is a, c, g, or t
gtccggtattcttcgggatatttcactcaaggttcattgggctctgctctcctccctgccattacgggagctgtggacagagctccctcacttcaagattcctagtgtttttgcacaacaggttgtccaagtgagaaagactgagttgcgtgtctgtaaatgtctgcgcagggtgcacatgctgcgaggtctccatcctccgggcctgtccctcccagatgggctgggcctttgggccctcctcagagtatgcctgggtacaaacctcactgttcagatgggctgtaagttctcacttcaaagctatggaatggattttagcacctttaaaaaaaaaaaaaaactttgacttttaatttatatagtgatatgctgacaggctgacacgcagatggttttgtcctcttttctgcgttcagtgttgaggcggctgcttacaagaggcactggttttgtatataaagacactcgggttgttttgtagctctttttcttattggctgtactaacgcttgctgaggttatctgtaataagggaggtaacaagtggcaaccccctccccaccaaccatcccctttgctgctttctgtgtctttcttgttcagttaccaaaatagctgtaagcctatctaatgctaggtgtgtggacattgtgctaaggtagtttcagtgtgtcaactttatgaattgaaatataaaccagtaaaattgtattactgtttcttttgttggttttattttaacagcatattgattaaatattttggtacnggannnnnnnnnnnnnnnnnnnnnnnnnnnnnnnnnnnnnnnnnnnnnnnnnnnnnnnnnnnnnnnnggggcgggccgcttcaaaaaaaacccctcaaggggcccaaattttaaccgaccccacttttttttgcaaaaagggcccccctaaaggggggcccatttaaaatctagggccctggcccccctttttaaccaaccccctgcacttgggaaaaactcgtctaactttggggattctttttgaagaaggaccctttccttttggggggggggacataaatttggccaaactccccctccaaaattttacagccccttagggggaaaaataaaaatttt

SEQ ID NO: 48013 - DNA, 867 bp, Homo Sapiens
tcttgccttaaaatgtaacattttctacttaaatttaatttccaagagagtgattatttgcattacaaaggaattcttaataattcctgtaagcctaggaaataggaatgccaaagtaacatttaatgtacttctctataacttttcataatcagaaattttaaattatgtttatataacccatttacttttattttaatgtgaatatatattcagaaattatttgatgtaaatttcaaaatgattataggaattaagctgaattctaattttttgcttagatttagaaatatgtatgtgaaatttaagaatttatataatctgtgattagtggaaataagaacatccctacttgttcctaatgagtatattatgtactgtttgttttagttgtgaacaaccatgtattagctttacttagctgatgtcagtaaatgtttctgtctcctaaatgtacaggactgtactcattaatttgtgtcacaagtaaaacactacagtagcagaaaaaattgcactggctctttagccaaaatagcactgtaccatggatgtattactattactgcaataaaaagttgatggaacacaacagacaaatcacaaaacacagtgcggcgctgcgacctgaacgattttcaaccattgtcggggcggccccagcaagctaacggcaacggttcctgagaaacggacggacagggggcgattccccaaaagcgcggacacggtggacaaccaggttcgggacacggctccacggcagacgctaacccacgagaggataaagcaatcaggacaagagaaagcagctacggcgactgacacgacaccgaaacaagtatcacgacgcgagacaagcaatga

SEQ ID NO: 48014 - DNA, 1058 bp, Homo Sapiens
ggaaaagtttggtcgaggagtgatagcgggactcgttgacattggggaaactttgcaatgccccgaagacttaactcccgatgaggttgtggaactagaaaatcaagctgtactgaccaacctgaagcagaagtacctgactgtgatttcaaaccccaggtggttactggagcccatacctaggaaaggaggcaaggatgtattccaggtagacatcccagagcacctgatccctttggggcatgaagtgtgacaagtgtgggctcctgaaaggaatgttccagagaaaccagctaaatcatgacaccttcaatttgccatcatgacgcagacctgtatacattaggttaaatctgaatttccactgctttggagagtcccacccactaagcactgtgcatgtaaacaggttcctttgctcagatgaaggaagtagggggtggggctttccttgtgtgatgcctccttaggcacacaggcaatgtctcaagtactttgaccttagggtagaaggcaaagctgccagtaaatgtctcagcattgctgctaattttggtcctgctagtttctggattgtacaaataaatgtgttgtagatgactggttagtgtttgaggctttgttctatgttttcccctgatttgttctggtcaaaactcatcaaatgtgtaactagcatccaggcgacaatacagaaagtctgggacctggcactgaatgtttgcctggtagtgactagccgttaatcaaccgactcatccaggatgaagaggacgtcagacttagagcagctgtctgtcctttcaggttactctcactcttctgaaagtgtctgtcagtttctgaagcatgtgtgttacctgcatcacacagctacttcctatcctagcaatacatccaaaatacagctctagtagagtgaggttaacttggaaatgtgatcagtagtgttgttttattttgtagtaatwtttttttttttttggtgatttagcaaagtttctagttgttatccatgaggatgatgggcatttccccccaggtattgactgcagtgg

SEQ ID NO: 48015 - DNA, 726 bp, Homo Sapiens
aatccctccttggtgagctggctgaccactatgatgggactgaggcttcaggtggtactggagcacatgcctgtaggccctgatgccattctcagatacgttcgcagggttggtgatcccccccagccacttcctgaggagccaatggaagttcagggagcagaaagagcttcccctgagcctcagcgggagaatgcttccccagcccctggaacaacagcagaagaggccatgtcccgaggtccacctcctgctcctgaggggggctcccgggatgaacaggatggagcttcagctgagacagaaccttgggcagctgcagtccccccagaatgggtccctattatccagcaggacattcagagccagcggaaggtgaaaccgcagccccctctgagtgatgcctacctcagtggtatgcctgccaagagacgcaagctccggtctgatatacaaaaacgactgcaggaagaccccaactacagtccccagcgcttccccaatgcccagcgggcctttgctgatgatccttagctctttgctctatggccttcctcatcaggggaccgtttcccccctcttccttcacagtatttaagagataaagtcggatttttctggcaaaaaaaaaaaagaaccagggccatgaaggggcgcgagtacaaccggccaggcacaaaagggggggggcgcgaaaaatcccgggcggaaaaaccgccctctgag

SEQ ID NO: 48016 - DNA, 761 bp, Homo Sapiens
ccacgcgtccgcccacgcgtccgcatagttcagctgaggaagagaatcagctgatcctcatggtctgccacgtaatcattttcttagacgtttgctccaccagatttaaccaaatgtaactcccacattgagtttatctatattgaaaatcatttacattggcctatatttggaagagagatagtcttttgtttttaataagtttcttactataaattttaaacaaattggttagttatttggatattttattaaactagtaacacaggtactacacattttattatggactcctctgaggaggagtttttaattgtatttgctagaaaatcaggatgtaataaagatttgtataaaaaaactaaaatatggaaaagagcttcagccttcatatacaaatcatatatgcagacagcctagttgattatctagcatacttagggttctcattttgtagtttcttccctctttgtgactattccttagccttatagatttctagtactgcccaggaaatctaatttcaatacatttatcctaggtttcatgaaagtttttaaagattgggataaatatgtacttatttactaacgtattatctttttcaaaccagatttatgtgcaaaggttaaacatgtaactgttactaagcagtctataaagttgtcatttacaattactgattcaatttgaaatgtagaataaaattttaataaaatgtatccttataaaatatttttaaaataaaaaaaaaaaaaaag

SEQ ID NO: 48017 - DNA, 513 bp, Homo Sapiens
gtatcggccattatggccggggagcagctgcggctgcaggggcaacgacgagaagaagatgttgaagtgtgtggtggtgggggacggtgccgtggggaaaacctgcctgctgatgagctacgccaacgacgccttcccagaggaatacgtgcccactgtgtttgaccactatgcagttactgtgactgtgggaggcaagcaacacttgctcggactgtatgacaccgcgggacaggaggactacaaccagctgaggccactctcctaccccaacacggatgtgtttttgatctgcttctctgtcgtaaaccctgcctcttaccacaatgtccaggaggaatgggtccccgagctcaaggactgcatgcctcacgtgccttatgtcctcatagggacccagattgatctccgtgatgacccaaaaaccttggcccgtttgctgtatatgaaagagaaacctctcacttacgagcatggtgtgaagctcgcaaaagcgatcggagcacagtgcta

SEQ ID NO: 48018 - DNA, 563 bp, Homo Sapiens
gagcacatgcaaccttttgaaaatggatgggtgataatgaaagaccattccagagaagaaacaccatggtgcaaaggctcaagaggcatactggaagtacaatgaagagagcaatctaactgaaatgggaaaaaaagaaacaaagagtaaaaagtaagatttgatgagaaagatggaatcgatttttaaatttttttatctacacaacaaaatttattatcttaaccatttttgagtgaataattcgttagtattaagtatatttacctcgtgcggccagtctccagaattcttttcatcttgcaaaacaaaccccgaacccattaaacaatttctcattctccattttccagctagccttggtaacctccattctaggtctgtctctgtgaatttgactgtgtaccccgtgtaagtggtatcatacagtatttgtatttttgtgactggcatatttcacatatcataatctccttgtggtttatccatcttgtagcatgtgtcagaatttccttcccttttaagactaaataatattccattgtgtgtaaaaaaaaataaat

SEQ ID NO: 48019 - DNA, 629 bp, Homo Sapiens
gggaagaatggagtcactgacctctccatgcccaggattggatgtggtcttgatcgtctgcaatgggaaaatgtatctgcgatgatcgaggaggtatttgaggcaacagacatcaaaattactgtgtacacactctgaaccagtgaacattttggatgtttccgtgttctcctgtgtcatctctactgggccataggaccgggcaaacctaccttaaaataggcagaggaaagtttcatgagaagtagtgtgtttaacaagacagactttggttgctgtattcaagtatttggattatgactgtggaggagggcttgcttaagatatgtggttgtgtttttttgtggaaaagtaaggagttaggtggcttgataataggcagggaaaccagattgtcgggactatgacctttttctccagtatgctacctgatttgtttggctggccactaggtggcagcattggttctacttctctgctttttaagagaaatttcaggaaggatgatcattccagttagtttggcattttttgtcgtttgtgcacataacttggtgttatccttatgtcatcagattcctcctagggggagagtttttgttttaattacaaaattaaattctacattg

SEQ ID NO: 48020 - DNA, 758 bp, Homo Sapiens
  misc_feature (698)..(698): n is a, c, g, or t
  misc_feature (725)..(725): n is a, c, g, or t
  misc_feature (731)..(739): n is a, c, g, or t
ctaggagcgaggctgggtggcgaatcggcacgaggaagatggcgctagcggttggagcaggggctctgctgcgacctttacggtagtgaggttagggacgatgggagagcagctttgttcctgaagtgccgtcgaggattaggatcgagtttcttcgatcgtgagggcaattattagtggcctctagccccccagatggcatcttgaggagagagaatccacgctacgagaactaacatagtggacatcgcagttgtccgtagccgatttgcgggttacggagttgttgcaagtaaagaaggggaaatccgagcgttctcgcgttggatttcctccacgtgtgaagtgggaatggtagtgatatctcgtgctatctctgtcaagggcaagaaggagaaggaatttatttgaggccctacgacgtggtgcggtggctcacgcctgtaatcccaacactttgggaggccgaggcaggcggatcatctgagatcgagagttcgagaccagcttgaccaacatggagaaaccccgtctctactaaaagtacaaaattagccaggcatggtggcacatgcccgtaatcccagctactcgggaggctgaggcaggagagtagcttgagcccaggaggcggaggttgtggtgagccgagatcgcgccattgcacagcctgggcaacgagcgaaactccatctcanaaaataaataaaaattttttttaaaangaaaannnnnnnnnaaaaaaaaaaaaaaaaaaa

SEQ ID NO: 48021 - DNA, 493 bp, Homo Sapiens
ggcctcagtgtgcccatctgtaaaggggcagctgacagtttgtggcatcttgccaagggtccctgtgtgtgtgtatgtgtgtgcatgtgtgcgtgtctccatgtgcgtccatatttaacatgtaaaaatgtcccccccgctccgtcccccaaacatgttgtacatttcaccatggccccctcatcatagcaataacattcccactgccaggggttcttgagccagccaggccctgccagtggggaaggaggccaagcagtgcctgcctatgaaatttcaacttttcctttcatacgtctttattacccaagtcttctcccgtccattccagtcaaatctgggctcactcaccccagcgagctctcaaatccctctccaactgcctaaggccctttgtgtaaggtgtcttaatactgtcctttttttttttttaacagtgttttgtagatttcagatgactatgcagaggcctgttaaaaaaaaaaaaacgcgg

SEQ ID NO: 48022 - DNA, 575 bp, Homo Sapiens
gctgtactactgtctcaagatttaaattttaatgcagagtactttattggtgtgaggcacacaggtaagaagaaatgtcaacattaaatgtatgacttacttggtacaaaaattttttaaaaagggaactaccttgacattgtgtattaaatgtttacctaagactataatctcaagtatgatgtttgtttaacatatacctctcaaaatttatcaccactcaatgacactgcatcaaaattgactataaaactaattcaagaaatatttatatatattttttaatatacaaaacaatatttagcctgatggaatggctttccttttcaaacattattttctaagtttctatacaaatgaaatctttacctctgcatattaatgagccttgccataattactgtagagtggcttttcaaagatatttcgttgcactaaaactgtggtagtaaactcagtgaacatgatgtgtggaagagcataattagctggtcaatactttttgtccaaaatacctgcaagagtaataaaatacatacctttcaaacatgcataattactagtcttcccatttc

SEQ ID NO: 48023 - DNA, 365 bp, Homo Sapiens
gcccttctactttctttctcacccaccctgtaccctcttctgtgtgtctttgctatccccctttcctcccaccacccatgtgcatgagcaaatgtgcaacaaaaccctgggactttgcagtcaaatgaagctgagcttcccacatcccgttcttcggtttgccatgagacgatgtggggtttccactgtgtgtctgtcatcacctctttgtctttttttcctaaccctgatctcatacttgtatagagtaataacaacagttgtacttccaccaaaggcatgtggcatatttaccaatgtcatgtattctgaacaaaggcaaaaaatacaaattcctaccattaaaaaaaaaaaaaaaaaaggac

SEQ ID NO: 48024 - DNA, 784 bp, Homo Sapiens
  misc_feature (690)..(691): n is a, c, g, or t
  misc_feature (738)..(738): n is a, c, g, or t
  misc_feature (746)..(746): n is a, c, g, or t
  misc_feature (751)..(752): n is a, c, g, or t
  misc_feature (766)..(767): n is a, c, g, or t
agaggtaatccttttggaattgctagagttcttaatagtactgtagagctggctcgaacttgcatagggaccccatactacttgtcacctgaaatctgtgaaaacaaaccttacaataataaaagtgacatttgggctctggggtgtgtcctttatgagctgtgtacacttaaacatgcttttgaagctggcagtatgaaaaacctggtactgaagataatatctggatcttttccacctgtgtctttgcattattcctatgatctccgcagtttggtgcctcagttatttaaaagaaatcctagggatagaccatcagtcaactccatattggagaaaggttttatagccaaacgcattgaaaagtttctctctcctcagcttattgcagaagaattttgtctaaaaacattttcgaagtttggatcacagcctataccagctaaaagaccagcttcaggacaaaactcgatttctgttatgcctgctcagaaaattacaaagcctgccgctaaatatggaatacctttagcatataagaaatatggagataaaaaattacacgaaaagaaaccactgcaaaaacataaacaggcccatcaaactccagagaagagagtgaatactggagaagaaaggaggaaaatatctgaggaagcagcaagaaagagaaggctggaatttttgaannagaaagaaacaaaggatcagatatcagtttatgaagctgacaatganaggcaganaagannagtgaaagatatanngcaggaacagatgagat

SEQ ID NO: 48025 - DNA, 865 bp, Homo Sapiens
cttgccctttctccctctctccagcacactcccctctaagaaagtaaaagcaaagccttcttaatggcaacactttgggcctgttctgttgctcctgccttatttctctttcaaccctgtacatgactcgtgttcaccatccccttgatcagtgtccatccgcgctaatttgcatcatgaactgaacagtgtgtgagtggtcacctactaaacccagctctgggggcagagctgtcttccccatctctggtgctcctaacacctgtgagatggtcctgtcgagaggactaggaaccgataggaggagagtccttctcggcagagctcactgcaaacaactggaattgaggttgcacactgtgatttttacaccgaaaagccaaaaggagctggccatccagggcctagggagaccagccttcctcagctatgcttgccgaaaccagcatgatgcttcaaagagccctgctccacccctcatggcatggatccttttcctggtgtggactctgaagggtcagtcttcggggaagagaggtggggtggggctactagcatcccaatttagaaaatagaggagtttgtagccagcagcctgtaaactggaaacactggtctcagccaacctcctcagggcgccctggcttctccccaaggagatgaggagcggtgatgccagcaccgggatgcgcagagcactggaagggctggtgcagatctacttcccatgcagaagagaagtcacatcttccagggaatcgcaatgttgtggcgtctgacttgtatgtcacatttgtgtaaaatggtatattcttttaaaataatggttgataactgggaatattgaatggaatgctttggagaa

SEQ ID NO: 48026 - DNA, 551 bp, Homo Sapiens
  misc_feature (491)..(491): n is a, c, g, or t
aaatttatcacactgactttaaagaaatgatctgatataacttgcatgctttctgaacaggccattgtatccattctgaactttgttgccctaaaatgtgttgctgcactggaaagaaagaactagcttgagttggcttgatggatgaacaattatcctcttactttcattacaatcctcttactttattccagagatacctttttcttttaatattggaggatctacttagcaaacttttttcaaagaaaatactttaaataaattcaccacaaccaaactttatgtaagacaatttcaaggtgtttcaaaaacacataactaccaatgtttaatttcacagggaaccagttaagagcacatttaaggatctggcaacccaccttactaaacaaattagtctttctattaatttgagatctgaaacaacctgtcattactctgatatcctgaacgtttaaggattatggaagaagactaaagtgtttganatcattcatatttgaaatttttatcattagcttaaaaattactctcagtattgttaaaaa

SEQ ID NO: 48027 - DNA, 652 bp, Homo Sapiens
gtctgtctgtcatctatctgccctatcataaaaatctttctccctaacattaaaatactgatccccgcccccaacttatctacctctattgtctaacacctatagtaggtgtgatcatgggataaaattcaactgaaaatgctatgataacattttatcgtttgctttaaaaatgtgctttgttttcaaataatctttacatagtgaactttggtggcgttagtgatatgtttatgcctatttcttttttttacacaaattccttggcatattttttcataaagaacaaaaaataaaatcaaaatttatttttaattcatgcttattgggatttaattattcagagcttaaaatatttgttatgtttatacactgtaaagctatctgttttatgcatttgttttgtctaaatgtatttatgaaagaaatacattagattatatttatgtttactcatttttccacctggattttttttaatggttgttacaaaattagattttttaatgggtaataatgttggtattttcatgttttttttcttagtattaaaattttgtgggtctttttaaaatttttccctattctgttaaaaattacacacctctagctaatgttcagtgttgtgctaaataccaaatttttcaacagt

SEQ ID NO: 48028 - DNA, 1119 bp, Homo Sapiens
  misc_feature (648)..(777): n is a, c, g, or t
  misc_feature (787)..(788): n is a, c, g, or t
  misc_feature (790)..(790): n is a, c, g, or t
gaattccctggatcagcggcgaatgccaggcagctgttttctggctgagcaaacagcacctttctcattgagcttcctctactgacctctgtcccccttgggatttcatcttctgaccgaaccctgatgttcagtggcagagacagcccatagccagaactgtgggtagaccagggttggggtgtgcggtttgggacagcccaaaccccagccgctgtgtcaaggcctaggacgccgtgctgccatcaaaagggggttccaggtttccatcagtggcctaaagaagggacttcttgttgtactgaggagtgcggaattaaagagatttgactccctttagtattgggggcagtccgttccccagacactgtggcctctgaagtggaaactgaaagctgcatacctgggaaagaactttctagcaataggcaatggccttcagtggaagagggagggctggaggtgtgcccagtacttggatgttcatctgtccacaacagctttttgtttttttaaaaaagctaaaatggaaatggattttatcataaaggatgacatcgttttcttctacaattaatacatattcattgtataaaacccaaaaagcagctaaaaaataaagcgggaaaggaactactggtaaaaaannnnnnnnnnnnnnnnnnnnnnnnnnnnnnnnnnnnnnnnnnnnnnnnnnnnnnnnnnnnnnnnnnnnnnnnnnnnnnnnnnnnnnnnnnnnnnnnnnnnnnnnnnnnnnnnnnnnnnnnnnnnnnnnnnaaaagggggnngngtcactttaaatactctcctcgggggggcgcccattttttaccgccacaccttttttttttgtgaaaaaggggggcccctctttatgggggttctttattaataggggggggcgcgccgcgcggcgttttttcaaccaccgcggtggggggtagaaaaatccccccctggggggtatattttggggggagacaaccccctttctctctgggggggggggcccattttggcccaccccccccctccccaagagaattttttcgcgcgccccgcggaggaaaaatatttttattttttttacggcgaacgatgtttggggcaccccacacc

SEQ ID NO: 48029 - DNA, 650 bp, Homo Sapiens
gtactttgcacagcatgagcaaggggctgctgcgggcgcagccgacatcagcaccctagaccagaagctgcgtctggtctacttccgacttccaccagctaatcttggcttttctccaagtctacgacgacgagctgggcgagtgctgccagcgcccaggccctgacctccacccgtgcggccccatcatccaggccacgcaccagaatctgacttcctacagccaactgctgcaagtggtcatggcagttgctgacacctctgcgaaggccgtggagaccgtgaagaagcagcaaggcgagcagatctgctggggtggcagcagctccgtcatgagtctagctaccaagatgaatgaactaatggagaaatagaaagtcttcagtgatggcctacgccaaagcacaggatggggcgggcaggaagccctctcccaagatcgagttggccgaggatggatgattgtggcagcagaagccgttgcagccccacgttgtgctctaggcagggacctttggcccctttggggagggagagacagacgggcggtttgacttggacacaaagaaagccttggtttctaaaaaaaaaaaaaaaaaaaacactagcgtgcggccgcaagcttattccctttagtgagggttaatttt

SEQ ID NO: 48030 - DNA, 625 bp, Homo Sapiens
  misc_feature (8)..(8): n is a, c, g, or t
  misc_feature (569)..(569): n is a, c, g, or t
  misc_feature (613)..(613): n is a, c, g, or t
  misc_feature (625)..(625): n is a, c, g, or t
atttattntatgaacatgtgtgattaaacaacctattttacatatttctgtaattctgaggagtgggctgggggtaggaagaaatggcaccacttaaaattcagggcttatatgaagaggtgttttaaggttagcacatgcacaaaggaacgagttggtttaaaaagataaatcactgcaaagaatgaaattggcttattcacatcaaaactagataagatgctaaaaaaaaaagatatgaaacagaactaacctatagtttcctgaaatcagtacagtttaatttataagaagctagaaagtaatgcaccttgattgttttaggaatgatttatgtgttgcaattttaatttatttaaagcatgtctactgtgtttgtcctaagagaaatatttcaacaaaacgtgctctgtgtttaagatatgtttaggcagtagttagcaactctgaaagtagaaactggaaatgtttattgtgaggcttgttgcagaatttccattttgtgagttactacttagtttcatgtcagcctaaaattgtaaattccctgtagatcttcaccccattgnggtgtcatcaatgaatccaaagcaggtgccattatttttttaantaaacacttgan

SEQ ID NO: 48031 - DNA, 454 bp, Homo Sapiens
  misc_feature (442)..(442): n is a, c, g, or t
gatcctctggtaccactggatgaggggccgggacatactgactgcccctttgaccccacaagaatctatgatacagccttggctctctggatcccttctttgctcatgtctgcaggggaggctgctctatctggttactgctgtgtggctgcactcactctacgtggagttgggccctgcaggaaggacggacttcaggggcagctagaggaaatgacagagcttgaatctcctaaatgtaaaaggcaggaaaatgagcagctactggatcaaaatcaagaaatccgggcatcacagagaagttgggtttaggacagcaggtgctgttccgagactcagtcctaaagggttttttttcccactaagcaaggggccctgacctcgggatgagataacaaattgtaataaagtaacttctcttttcttctaaaaaaaaaaaaanaaaaaaaaaaaa

SEQ ID NO: 48032 - DNA, 695 bp, Homo Sapiens
cccacgcgtccgaatttttgtatttttagtagagatgggatttcaccatgttggccaggctggtctcgaactactgacctcgtgatccacctgccacggcctcccaaagtgctgggattacaggcgtgagccaccatgctcggcctaaaaaacaattttcttgaagaatccgattttgtgcatagtaatgacacagcaccattcctgagaaataggaaatatatgtgtgtggtatgaaaagcccatattctgttcttgtcacctgaatctaggcttcctctttggatgtgaacgcgggaatgaacagtggctgttttccacccaaaggggcgtggagaccttttggaaacgggctttctcctttccattttgcagccgggggcgggtggaaaccttccttcgaagggtagtgccttggggagcagcagacctgctctgagtccagcttagctttccaaaattctgtgtggaacttactggagatgtttttatatatttgaaaataatggcctgtatttctcacgctatacttaaaaaaaataactaaccttttaaacaaagatattcaaactcacccttgtgctgaaagcactcacatttctgtgttcattcctgaaagggcgttttagagtccccgtttctacgttctatgtggcaccctcttgccgagggaacatccagaatccctccacttc

SEQ ID NO: 48033 - DNA, 728 bp, Homo Sapiens
  misc_feature (649)..(649): n is a, c, g, or t
  misc_feature (666)..(666): n is a, c, g, or t
aaaacatctccgtcttgcttttttcccctttagctcataaatgaatagtgctggaagatatctcaggagcattctccctgagatgatgtcttcagtaatgatcgcacgtattggtgttgattccatccttgaagttactttcctttatctttcacagtggtgtttcttcactagaggttttgctgtctgattaacttctctgccaaataaatggacttttgcttcataggtacacaaacatttctaaaactttttttggaaaatatatttctttcttaaaaaaacaaatagtgcatgcacatttttaaaaaaataaataaaaaataatctaccccaaaatgaccagttaagatttactttcagacaactctgtgcatatttacatatgcttatatacaactatgtacacctttgcatagatgagatcacactctatgtactgctttgtaacttgcttctttcacttaatcctgagaacatttgtacatgaccatagatatagatttgtattgtttttaatggctgtatagttttgcattatactgaatcttgatgtttaagagctatgtatattgaggacattatttctttgtcttgtgttgcaaattttttaccatgttattattagtcttttaaccttatttatagnttttttggtataaaagntaagttttatgatgtaaacttaatctctttgattttataattcctggttttccccgacgtgc

SEQ ID NO: 48034 - DNA, 715 bp, Homo Sapiens
  misc_feature (695)..(695): n is a, c, g, or t
cgacagaggattagcctgcggaaaccggcctttttatagccaacaagagcaaaagcacactgcaatgtccaaacgaattgcaggcgttttctgctccctgaagcctgggaattaatttatatactcagtcccttttcccttggctggccattgaagtagttgaaccacaggattggactgtccagaatcattagccagagttcactgtgagtggacgtcttttagttctgcttcaacgctataaccaacctttaccaaaagcaacaacaaaacaaaaaactgcagaaaccaatgagttctgttcacaaaggatggctcctcatgtcatcacaccggcaaggaatggacgagcctctgatttttctcttcttggctgactttacaaggttggatgcagtccatgaggatcatgcagcaaagacagaaagtgctggagaagcccaacctgcagggcctcacctttagctggtttgtgtggttccacttcatgtagctgttggaacaccagtctctctaatgtgctctatgggatagctgttaccttccactaatttatgtctaatacctataaacctaaagtatctttttaaaaattttattccgtctttttggaggaaatttttgtgcatgccagatatagtgtcaagcattgggattgctaagatgaacgtaacattgtccctcacacccattangtcacaatctagtagatgag

SEQ ID NO: 48035 - DNA, 781 bp, Homo Sapiens
ccagctagataaagaaagctttcttacatggttatagagccctcaggcagactgaattctaaatctgtgaaggatctaaggagacacatgcaccggaaatttccataagccagttgcagttttcaggctaatacagaaaaagatgaacaaacgtccagcaagatactttaatcctctattttgctcttccttgtccattgctgctgttaatgtattgctgacctctttcacagttggctctaaagaatcaaaagaaaaaaactttttatttcttttgctattaaaactactgttcattttgggggctgggggaagtgagcctgtttggatgatggatgccattccttttgcccagttaaatgttcaccaatcattttaactaaatactcagacttagaagtcagatgcttcatgtcacagcatttagtttgttcaacagttgtttcttcagcttcctttgtccagtggaaaaacatgatttactggtctgacaagccaaaaatgttatatctgatattaaatacttaatgctgatttgaagagatagctgaaaccaaggctgaagactgttttactttcagtattttcttttcctcctagtgctatcattagtcacataatgaccttgattttattttaggagcttataaggcatgagacaatttccatataaatatattaattattgccacatactctaatatagattttggtggataattttgtgggtgtgcattttgttctgttttgttgggttttttgttttttttgtttttggcag

SEQ ID NO: 48036 - DNA, 904 bp, Homo Sapiens
  misc_feature (792)..(792): n is a, c, g, or t
  misc_feature (795)..(833): n is a, c, g, or t
cggagtgctctgggagcgggctccacagcctccttgtgggctccagccccttgtcagccgcagcctctcttgagggggactccctgtcccctgaggcccagctgggccaggactccatcctttcagatgcccctgcaggcctggggctccttctgggaagtatggggcctagggcttggtccccctcttctgaggccctctcctgtatcccgacctggaagctttgatgggtcatgggccatgccataccccctgtggcaatggagtgtgtggatgctcacctgtgccatctgtcctcctgtctgtgccaggaggcacctgagttctctgctgttatcctgccccaagggcctgggccgagcctctacctgaagcaactctgctcttcctgtcagtctcaaagcacaaggaggttcagcccaggaggaagccagctgcaatgtggagacacgtcctcctccccaacccacctcatgccaccgccaaccccctgccccaggagcgggcctgagccacgtcccctaggagcagctggagatggccaaaagagtgagctcaggactactggatcccatgcccaggtgtccagcagacctcaaggcagaagggtcacctaacccaggagtccacagactgatgtgacctcaggttcccacatcagtggccacagggcagggcccacctggtagaagtgttctggatatggccaggggtgggtggtgtggctaagtgggcctgaacagagggaacctagggcccttggccaatgtgatttaagctgccatcttgaanaannnnnnnnnnnnnnnnnnnnnnnnnnnnnnnnnnnnnnnccttcaagggcttctttgtccggtggggggagaaaagagggtaatggaaatggggcccttgggccacaaac

SEQ ID NO: 48037 - DNA, 442 bp, Homo Sapiens
tagtcttttctgaagaaccgtgtatcagtgttagatgtgcatcccgttttgtcattccctcagactttgaatacagtcattactctctggaagagaaatgtaagtatattttttgttatctacagtatggtttaacatgtattaataatacacatatgcagactcactaaagtatccccagtaattagtaaattccaaatttaagtcagtacagttctgtatttgtaaattctgtctttcaaaaagttgttcgtgtttttaaaagttgatgtccaaaggaaaggagcttcttttaagtacttttggtgtatgttgaatatttatttgctatgatattctagaagaaaatatcaaacatgttaaatataagaacatgttaaaatttaaatttgctatttcaaaagttactgaagatgtcttggaataacaattgtcatagctg

SEQ ID NO: 48038 - DNA, 967 bp, Homo Sapiens
ctaaattgtggcttgaaggactgcactaaaacccactaaaaagatgcgaaaacctgatgagggcaaaccagttaaacctaacaccctgccttgtctgggctcatcacctctccctatcccagactaactttactgtgaaatcctaccacattccatgtctgaatttttggattcggggtggattttcgttgtccgtggaagaacacatggatctctctggctttctcacccaagttggccacttacgctaatcctggaagtatgatcacttttgaacctgccccttaaccttgacgaggatacaaaagtgaaagcatcatcccccaaaggatcactgcacagtcctactacagtatttttaagtagccctctaaatacttaattttaagcaaaatcccttggccgcacttttaaggtttttttatatgtgtatagttaccaacctaaaaataaaaaatccgaacagcatacttgaagaatgtaatactcaaactctcagtgcttccttatggtttctaataggattttttattattgttattattattattgggtttttttggacagggttgggagggtcttttatttttcctttgaaatacagaagtgatgtttttaaatgaaaaaaaacaaaaaaaaaaaaaaacaaaaaagcaacaaaaaaaaaaggggggggcgcgccaaaaaattccccacgggggggccccagatctcgcgcgagacccacgggtttctgtggcacacagcgggcgcccaatatggggacggaccgaataaaacagaccagcagcacagggagcgccgctgttataaacaaacgccgcggacggggcggaaaccacctgcggcacgcggggacacaccatggggagagagagacaccccaactcccgcggggggcggcgcccaagtggggcgcacaacacccccacacggaattataacaccgcccagggggaagaacacc

SEQ ID NO: 48039 - DNA, 825 bp, Homo Sapiens
  misc_feature (787)..(787): n is a, c, g, or t
ccatcatcccgcttctctccggcctgagcatctcagggagaccaggggccgagccgctgagcaggtgttggtcctcaggagctccaaccccggacggcagatgccttcctcagtctcgagcctcagtctcccgtctgggactaaaacgtgaactctgtaattctatgtgttactagcaaccggaaaagcccactgtgtttttaaaccacttccactttccaggaggctggatggcttccagggtcactccttgccctgggtggctcccaggctcctggaacttctgcctccacctcgctggggagcccccagggctgctgtggccacagccctgcctgggcctgtctctcaagggcacccagcttgctcggcctcctacatgtctcccgttggggaggcaagaggctgaggggcttccgagcccctgagagcggacatctcctcccgcaggcctttactccgcactccccactggcagccgctggtgtctcttcacacagaggcacaacctggacccaggcagcctctttcctccctccccaatctcttccatttttctacagatttttttttttttggtcatactagagacaggggtctcgctgaactcctggcctccagtgatcctccatcctcggcctcccaaagtgctggaatcacaggggtgagccaccgcgcccaccctctctcttcctcatgcactctgcttcttcgtttcttcgaacatcagctaactgtatcaggcttctggactctgggaccacgtctgcaccggctctgatcattnctaggcccttggttctaaggttgattaagtccatacac

SEQ ID NO: 48040 - DNA, 773 bp, Homo Sapiens
ggaacgaaagttgtgttttgctctaagtatgctagggaatcctcagattactttgctagatgaaccatctacaggtatggatcccaaagccaaacagcacatgtggcgagcaattcgaactgcatttaaaaacagaaagcgggctgctattctgaccactcactatatggaggaggcagaggctgtctgtgatcgagtagctatcatggtgtctgggcagttaagatgtatcggaacagtacaacatctaaagagtaaatttggaaaaggctactttttggaaattaaattgaaggactggatagaaaacctagaagtagaccgccttcaaagagaaattcagtatattttcccaaatgcaagccgtcaggaaagtttttcttctattttggcttataaaattcctaaggaagatgttcagtccctttcacaatctttttttaagctggaagaagctaaacatgcttttgccattgaagaatatagcttttctcaagcaacattggaacaggtttttgtagaactcactaaagaacaagaggaggaagataatagttgtggaactttaaacagcacactttggtgggaacgaacacaagaagatagagtagtattttgaatttgtattgttcgggctgcttactgggacttctttctttttcacttaattttactttggtttaaaagtttttttattggaatggtaactggaggacccagaacgcacttgaaatttttctaagctccctaattgaaatgctgggggttgggga

SEQ ID NO: 48041 - DNA, 655 bp, Homo Sapiens
  misc_feature (588)..(588): n is a, c, g, or t
aaaaatatttttacacactacctctctctctttttttttttaaagttttaacatcagaactttggggggaaaaactacttcagggcttgacttttggtacaaattttaactgtaaaatacagatttatctggtacgcattcatggaaatggaaatcaaagctgctatggctttttattttaattatcctgttaagggtatctatcaagggtattttcaagtagatctctgtttcttaaattatgggtgaaataattgattactagatatatggtaaaaccaatagatccgggttatacgataaaatatcagctcatgggtaggctgaatcaattatttcaaggtgcaccttattaacaaaagtatcagtggatccaacataaaattttatagtactaaagtgtcaagcctaactgtgaattggtctgtatcttaagtaaatttatgataatgttctcgagctatcaacaaaatatatgtactttggtgagctatgaattttctatattaaattttacatggctataacatgatttttacatgaatgatacttgggtttataatatcaaatgtcagtatttactacaanttttattataaaggtgttccttatcactaaagtggacttcgatttaaaaatcaataggttggtgaaa

SEQ ID NO: 48042 - DNA, 564 bp, Homo Sapiens
cggcacgaggcttgactcaagattgactctacagactcagaagatgatgctaacagtgttagttttatttttgtactgcaatttttagtttaaaatatgttggatgcactcgtcaaataattatgtatactgtctgttgctgcctggtgattcataaccaccagcttaatttctgtgaatactgtatatttaacttatgaaaaccaagaaatgtaaagataacaggaaaataagttttgattgcaatgtttttaaaataagctagttttctgaggtgttttcacacgtctttttatagttacttcatcttagatttttgaagggatatgacttcctactaaggatttagtttaccacaacaattctgactacaataagacattttgaggaggatatttggctactgtaaacatggctggtggaaaatcacgattgtggcttgatgtggcaagccgaaaccacttggctctggaaatctaagttcatactggtttaattaagctctctcctgacaacccccagaattaaatgaaccatgattgtgaagagtaatttggtacaatg

SEQ ID NO: 48043 - DNA, 567 bp, Homo Sapiens
tgtgtatgggcaaaaaactcgaggactgtatttgtgactaattgtataacaggttattttagtttctgttctgtggaaagtgtaaagcattccaacaaagggttttaatgtagatttttttttttgcaccccatgctgttgattgctaaatgtaacagtctgatcgtgacgctgaataaatgtcttttttttaatgtgctgtgtaaagttagtctactcttaagccatcttggtaaatttccccaacagtgtgaagttagaattccttcagggtgatgccaggttctatttggaatttatatacaacctgcttgggtggagaagccattgtcttcggaaaccttggtgtagttgaactgatagttactgttgtgacctgaagttcaccattaaaagggattacccaagcaaaatcatggaatggttataaaagtgattgttggcacatcctatgcaatatatctaaattgaataatggtaccagataaaattatagatgggaatgaagcttgtgtatccattatcatgtgtaatcaataaacgatttaattctcttgaaaaaaaaaa

SEQ ID NO: 48044 - DNA, 425 bp, Homo Sapiens
ggctcctgtttggggtaaaaatagcagagtcagttgctgaggacaatgaccttccttataacatttagtttcatacccatattaggtcttgtcttgaggaccctttatatgtgcttgtttactagtggccttccagccatagcattcttacctttttttcctattctaagaattaaaaaaaaaaattatagagccagcaagggaggaggcaggaaacagaaatcgaatttcatcattccagtatagttgtccctttttttgtatttctgacttggttttataattatatttacttactaattattgttttttaacattctttattgtggcttactcttcatacttagaattgaaattgttggacatcacatgtatattcacattataaatacatcattcttccactgttagacctttagattgct

SEQ ID NO: 48045 - DNA, 653 bp, Homo Sapiens
cgttgtagcagtaattgcaagaagttcttgagctgaattcctgttgtgacaacttcctataattacagtagataactttttcttttagtcgtatataacttttctataacttgtgatggacaagagatatgcttatccaataaaataagcttaaatattagatgctcttgggtcaaaatgtccttttaccaaattgacctttttatgagttctttgggtaaatactttaaagctttttatattttaaagaatacttgtaaaagcatatcacatcttaaaccagtggtgcacatgtggatttacagctcatggactctactgttcagctttaatttataaaacatatcacacatttaatgttatacagtatttacatatagtggaacatagggataactcagttttatgtaaatttttgttaagtgttgtagcctgcccagagtgacttctattttttcttctttgtctccaggtggtgaagcagtattttccaatttgaagattcatttgaaggtggctcctgccacctgctaatagcagttcaaactaaattttttgtatcaagtccctgaatggaagtatgacgttgggtccctctgaagtttaattctgagttctcattaaaagaaatttgctttaaaaaaaaaaaaaaa

SEQ ID NO: 48046 - DNA, 989 bp, Homo Sapiens
ggaccggtccggattcccgggattcgtcgaccacgcgtccgttctgtaaatgcatcacaaatgtgaaagataaggtaggcctgaattctggggaatgacaatggtgaaggaaaggcgagacaggtgcaaaagacactgcagaactcaggctcaaaatctcatccttaactccttccctcatcccaccatgttgaatcagatgtcaatagcaattttatatggcattttttaagcttgcaaaaagttataaacagaaaatgttcattttatcactccatcacagacgaaaaacatgaaattaagctaggaaacatgctcaggtgattagagtagatagaacatagactaaaaaccagtcaacttataaaaaaaaatcccatgatgtggacaaaaaaaaagaacttgtggctcctcactccaactcctgtgactctctcaccttacccccactgccttcaagttttttgtagaaagagaaattttgtatggattgagtttaagatgatgccagaatatcaaggtagaattattaaacacacaaaagctaaggtttggtactctgaaaaaaggtcagaattggtgatagaaaattagaagttacccatccatagaagggtaataaagccatgagagtgaaggaaaccagtgagagagaatattgagaaaaagtactgaagggaccgagaagggagaagccaaggaggaaagcaaatcaccatttattgagcatccggttaaactgtatgggcagctgctccacatttactatccccatttatttcttttccatttcccaagggagcccaatttttaacctcccccttgaaaaaactgggcttttggaagacctcccaaaaggccgcaaaaaaaaaacccaccatttctaaaacccagctttggaccccccgatttattctgtggggacataaacaccattcccgggaagaggggtaaaaggggcgggtaacagaaaaacccctgggggaaaa

SEQ ID NO: 48047 - DNA, 605 bp, Homo Sapiens
ccgaacagcgccgacacctcatggaaactgattgcaaatgtgctacttctcacttctgtgtggcccgaggaggctgggttaatgctgggcttggtaccttaagcaccctttctcccttccccatcttcattctcagaattacacctgtctgaagcaggcattttccaatgccctagatgggaatataagtgtaaggagatgtgaagcatttgcctgtgtgtcagaacattcactgaggatcctcataggcacttctagaaaccaaatccttgaagatgactaaccagaaatgcccgtcatagcactgtttacagttgcaaaaactgaagccaattgaaatgtccatcaggaggggattaaatgaattatggtacagttacaccgttgaatattttacagccattgaagatgatatatagctatattcattgacaaggaaaactcatattttttagtgaaaaaagcaggttatagaattgcatgatattcacatttatataaaactttatatatgggaaggatgttgattgaattgttaataactatggtcacctctagagatggaagtttgcattacctttaatttttaataccattttgtattg

SEQ ID NO: 48048 - DNA, 689 bp, Homo Sapiens
attaaaatgttgaattttactaacaataaaagttgttcaaaggaaaactataaggttcttgtttcaactctgtcataggaagaacaggacagtgagctggcacagagttagggaaattgactgtgtctcatattggctagtgagagtgatctgttggaattgtatatcaaaattttaatgtacatacattttgtctagcaattctactattgggtatttatatagtacatataaatataaatgtatatgtttagtaaatatatacttatagttagtaaatatattttatatctatttagtaaatatactaaatgtcaggcctctgagcccaagctaagccatcatatcccctgtgacctgcatgtacatacgtccagatggcctgaagcaagtgaagaatcacaaaagaagtgaaaatggcctgttcctgccttaactgatgacattaccttgtgaaattccttctcctggctcatcctggctcaaaagctcccccactaagcaacttgtgacacccacctctgcccgcagagaacaaccccctttgactgtaattttcctttaccaacccaaatcctgtaaaatggtcccaacctatctcccttcactgactgtcttttcggactcagcagcctgcacccaggtgattaaaaggttaatggtcacaaaaaaaaaaaaaaaaaaaaagg

SEQ ID NO: 48049 - DNA, 696 bp, Homo Sapiens
tcagactttactggtagggttacttcatctcatgaaatgacagaactgtcttgttacaaagtctggctactttgctgaagagaccacatgaagaggccctgaaactacgtagagagggagaggcacctgctgaaccctgtcttcttgacatccaccaagataccagacatttgagtgaaattttggatccaccagaccagccaccagctaaatgccagtgagcgacttggtaacctgaactgatgccatgtagaatggaagaattgaccagctgagcccctgcccaaatttctgacccacaaaaacatgagatataataaaatggttgttgttttaagccactaaactttcttttattatcatactaaatatttctttttacataattcatactaaaggctgtgggcataatgagtatagaaatgccttccaccaacatttaatcttcattgaacttgagatatcttattctcgttaaaatattgaaagtaaggaattcctttccagtttgttcattaaaaaacagataccctagaccaggtgaggtggcccatgcctgtaaatccagcactttgggaggccaagtaaggacgattgcttgaggccagaagttcgagaccagcctgggcaacatggtgagaccctgtctctaccaaaaaactttaaaaataacctgggcataatggggcatgcctg

SEQ ID NO: 48050 - DNA, 577 bp, Homo Sapiens
gcacgagccccactcaacccccagtgcttgacatgaatgcatgtgtgcttcctaggactagaggccggtgctgtctctaccattgccctcactttaaggggcacacgagcagatggtagcaagccctggagagcagcactcgggcaagtgaggtggctctggcactgcccctggacttttatgtttgtagcttgagctggttttaattggaagctctgtgatttacataatcacttacaatctctgtaaataaggaactatttatgaggaattgtaaatttcctctctcccccttcttaccctgtctgtgatcttgtctgtgatgcagtaatgatattccactctaggttcccatgatcagtggtgaaatatagtgattttcacctgtgcttccattctgaagttctggaaagaagtactggatggactgaagtccaggacaacgttccaaagaaaggcagagtccaggtaggcttggaggaccaagccctggatgagcactggagggcagaggcctcagtgtccagcactgtgccctgcacatggaaagcccctacgtttgtggaatgaatgaata

SEQ ID NO: 48051 - DNA, 628 bp, Homo Sapiens
atacctatggaaacaaagatcctacagcagcatcaagagctgcacaaattctggacagagccttgaaaacactggccgagttaccagaggaatatagggacttctatgcacgacgaatggtcctacacattcaagacaaagcctacagcaagaactctgagtaaataatgaagtgaatgcaatgcacattaacactttagtaaggtataacgatataaattaaagattttgttaaaataggaaagatacatcagatttacagattatgtaagtacgaaggggtgtttgtgtggattctacttgatacagattgttataattaaagaatgctgtgctgggaccactctttaacattcagatgctgaccactaaaagtccaacttaaaatgacttaaaaacagtaagaaaatatattgattcacaatacatgaaatctattgacagaatgtgctgcagtgtttctgatccaatgattcagtaatgtcatcaagaaccttgggaacccgcctccacaccccacccccttttcaaccacaacattggcatcatcctaaggctggctaccctcgtggtcatgggatgattgccagtagcagttggagccttgtgcatcttcatttacatgcag

SEQ ID NO: 48052 - DNA, 363 bp, Homo Sapiens
aagttcaaatatgcagggacaaggaggttgctgactgtactgacaggctctaagtcattttctccaaaaactatctattcaattatcaggggctggtcttgaggaaggaaaaaaaaaaaaaacgttcccagaattcagtttccaaaatctctttttaaagggtttacacacacacacacacacacacacacacacacacacacacacacagatcattaaaaagtgtatgctctttaagaagaaaagtaaaatatctcaaaggacggtttcaccaccgtcctttattgaatcaatttttctacatttcagagcaagtgtagattctgagggactcctatttgccaaaaagacaaaactagcaaa

SEQ ID NO: 48053 - DNA, 526 bp, Homo Sapiens
  misc_feature (497)..(497): n is a, c, g, or t
gcaataaataccagacacgtacaaaatccagctatgaatatagagggcttatgattcagattgttatctatcaactataagcccactgttaatattctattaactttaattctctttcaaagctaaattccacactaccacattaaaaaaattagaaagtagccacgtatggtgcgtcatgtctataatcccagcactttgggaggttggggtgggaggattgcttgaacccaagaggtcaaggctgcagtgagccatgttcacaccgctgcactcaagcttgggtgacagaacaagaccccgtctcaaaaaaaattttttttttaataaaacaaaatttgtttgaaaacttttaaaaattcaaatgatttttacaagttttaaataagctctccccaaacttgctttatgccttcttattgcttttatgatatatatatgcttggctaactatatttgctttttgctaacaatgctctggggtctttttatgcatntgcatttgctctttcatctctgcttggat

SEQ ID NO: 48054 - DNA, 730 bp, Homo Sapiens
ctttgggacggcgtccaacccgcattcatgtcaggagtgagtcgcacgtggctttgtggtcatggcgacttaatccgcctggacggtggctccgtctccctgggcttagacgaccttggcacttctggagataagcccatggctcccaggttgtgttcatgtgacgtttccttgtggtaggttctgggtctgcgttttgtctaggagtgtcacaggatggacactgcctcctggcaggggctgcccaatgcagttagcctcctgctggtgttctctcttgttgcttggtgaaggtggccctggtcagcttctccactgcccagtgaacgacccctttgtaatgaatgagtggggaggtagtgtgaagcgatgccaatatcccatccctgtcaaactgcctttactttttccttccttccttgctcccacctgtgtggatcctggtcccttcttgtattcagggctgtggtctgttatgacatttactctcaggctcaggtcctgcttgtttggcccgtgggagccccttcttctgccttttgtgttttttttgttatgtacctacagttctttagctgtttctttactttctggtgcaaaaagatgttcaagccttattttatacttgcctgcccctttctctttcatttattggaatgagcttgcactctaaaaaaaaccgtccttttgaatggaaagtagccttagggaaccaggatgtgggtgccaa

SEQ ID NO: 48055 - DNA, 565 bp, Homo Sapiens
tttgttcctccttgacaaaagtagctctgtgtggataatatgattttattactacagttccagtcacttggttatatttatcttagcatgagcctttcacaccaagatttctatattttgtaacataggtgaaatatttaaaacatcaaaaactgtaaatctagatttttaaaaaatccaactgcaatgtcttttcctttgattgagatgatttgtgtaaactcaccagtcttgctttggagtgagcagaagagaatgactattttacgtggagcatcattgtgtgactgttgacctggacagtcccaagggctatgcacatggactccattggcacagggaggtttgacctcttccctgctactatccctcctcccaactgtacagatttgtttgttgtagtttatgtacttcttgatactgtcaaaaaattatctggaaatggttttattttgtgaagtgaacaatactttgtaatttatgatagtgtaaatggaaggcacagcatcacatgtattaaattcttctgtctattattctggaaaaaaaaaaaaaataaacgcgg

SEQ ID NO: 48056 - DNA, 814 bp, Homo Sapiens
  misc_feature (691)..(691): n is a, c, g, or t
  misc_feature (771)..(771): n is a, c, g, or t
aaaggtaatcccgactcttcttggtcttggagtttgagagtacagaattacagggaatgaagagaggtataagtagatattttaatggaaatgaagtataaattaataacttgacttacccctccataagttactgctaactggagatacccttgtatgcccaacctgtaaaggaaaaagttctatttctatatttataggacattcttctcagtcaaggaacagtaagaaatatgtaggtttcaatcagttgctctcaaccctgactgcattttagaatcatttggagagtttttaaaaatatccatgcctgaatcttgattcccattttcatgtaatttgagacaagacctggtcatcagtattttttttaaagttctccaggtaatttgaatgtgcaggaaggattcagaatcactggtttaatttgttattgaaaacagtaccagtattaaatgtgtttcctcttccttcttttctgtatgtatgtgtggtttttgattttttgttgttgttgttgttttgtggccaccctttgcactagaccatcccttttattggtggtattggcctatattcccattgacaaatgcaatttttaattatttatttaatataggagtattttactgtttaatatttaaacaatgtttaatgtatttcattattaactagtattatagtttgtttntttccatgtctcataactttactacattgttttagcacacacagtatcatataaacactattctatgagaaatcctattntagcaaagatatatttgtcgctgtaagaacatcgtgctagagg

SEQ ID NO: 48057 - DNA, 572 bp, Homo Sapiens
agtagagcccctttaagctagccaggcccaagatagggaagcactgctggtttacatttctgctctttctaattcagttgtctattgcatgcagacatcccctgcccgacttctccattatggaaggctaaggccatccttccttgtccagtttctctacctacacactaacatgccttttccccatggagtgaactctgccagttgtctttggacattttctgcagatgcaggctcagttctgctcttttgttcccacccacttctagatcttcctccatttaatcccttattcttataaggagtctaatttttgtgtattgtccttgattagggcagctgacagctttacaccaaagctgaagtctctcacttaatcctaagcaaggggctagggagaactaagatatccttcccatatcaagggatataggttactagaagggtggaggtctcttaacaggctcactcacctttcagagtttaaattatggtcaggcttaagaagctctctcttgtgactgagtgtattgcatagacatgtctgtgaaaataaaagcacccattttgct

SEQ ID NO: 48058 - DNA, 429 bp, Homo Sapiens
aaaccttagaggccatctgatgatagattcccagagctggatggatccctagggactacctaatctgactttctgtccactgcatggattcttctaaaaagtatgtcacttatttccctaccttattaagactaaataagtggaacatcatagagctctttatttataacagtcattctttgatagtcaactcttaaatggagacttgagatgcttaaatattgtactactgtgcttatcttgtaaagatttcataaaatgatagtattggttattttaaaaaggctttggcttatgctgaattatacatgtagcaccaaaatgttacaactctactaaatttccttgttctaaactattatattagctataataaatattagtcatacatgtaaaaaaaaaaaaaaaaaaaaaaaaaaaaaaaaaaaa

SEQ ID NO: 48059 - DNA, 490 bp, Homo Sapiens
tacaataatcaaagtcatagctccaagatattgacctctttctcaatctataacctttgtaggcatgcatttataccagcatgttttataaattatgagtttctatctgtgtccatgaagtcttactagttttcacttaaacttttgtgggttgttaagaagaattaaagtgattcataacttcacgcttgaacctgggaggtggaggttgcagtgagccgagatcatgccattgcactccagcctgggcaacaagagtgaaactctgtcttaaataaataaataaagtggttcataacatcagatgaagaaggaggtgagtgatatgttaaatgatcagaaacttggcattacattatttccaggaccatttccctaccaaagctgtgtatttttcatttcttcatggcactgtgctgttaatttctgttaacatttgtgctaaatggagtgtaattttacatatagtgttagaatgtagctaccttag

SEQ ID NO: 48060 - DNA, 603 bp, Homo Sapiens
atcctgagaaggagggaaatgaggggtgctgacacagtccctctgggagagctctgcctagtctggtttggcgagggcccttgatcaccttgcccctcctccctgtcttctctgattcttttccctcaaaatagtcctgagaactaattgtcacactggctcatcatgtctctgtgggtggggtgggagaaacctctgctgcacacctctgtttggaacctgggcagagcaggaggtaaggcaaaggcaggcaggcaccaagaaccagaccccttgagaaggcgctgtgggtgggtctttgttctgctgttctgcctttcctgacaggtggggttggggcacacagacattggaatatttgtactgctctcgtgccatttgagaggctgctgccccaggcaggccagcccctactcctcttggctacactcatgttgctcagactatatttcaaataaaaaatcttctcaccatgcaggtaggctcttgtattcctctccaagtgagcctggccccaccctattccacccaagggtctttcccagacttcccctgtttgtcccatctctgagggagaacaatacttcctactgtctaaggaag

SEQ ID NO: 48061 - DNA, 520 bp, Homo Sapiens
ataaaaggtctagtaaagccaaaaattaatttcatattgattttaaagtgatctagctgagtttttacactgaaagcaaagattatagcaattgtagtccatggtatttattttcagtcaaaccaaagttacatataattctgcctctgcttatacgggatattaacactaacaatacactcccttcaaagacttgcacaggccaaattgttggaatgctggttttcttgacaattccaaaccccaaaactatgataatgagttatgatgtagttgaaaatagcatagtcagatgtttgcttaaaacctagaaacttaacatgttgcttttcatgtgctgtgccaagtcttgataatactttttcccccaaccaagggacctcataacctgattatggttattgctttacaaacagttttgacagaaggtggctgctagagcttaacatacgttcccgttccatgtgatggaaccggttcttgcaactaagctcatcattgattctttgctgaagtcagc

SEQ ID NO: 48062 - DNA, 603 bp, Homo Sapiens
ttttttttttctgttatatatgtgttgtaaaagtacactacattagaagggagcttttccgttgtctttattttctgttatacatgtgttgttaaagtacatgcattcttagactaactctcagatgctttgctcttttggagctgaagaattgtttgatggtgatgtcatatatctgatagattagtttcagtggttctcatttcacttttatacgtaatttcttaactatattaagatagttgcaggcagtgtacctcaggttgactctgtacatctgaatagtgagtcactagtattttgcttcaagccttctgaaaatataaccatagttacctaagcacacagtgaatagtcacatggtagtacttgtgattagagcatgtaaaacaatgtaattgaaaagtcagcttccatattttgtaggggaaatagaacaccctactttttatctagtgtgaaatatttaatcgaatttttgttgatttatattatgttacctgtgctgaattaggtttggtacttgtgttttgtttgacatattagtaagttgcttttgcttctttctgtcaacttattttttacataaacctcgtgccgaat

SEQ ID NO: 48063 - DNA, 610 bp, Homo Sapiens
ttttttttttttttttttcattgcaaacaagctttaatgcaaatagtttagaaaagaaaggaccagtcttcactttctgcattatccccacattttattcattcatccagattacttcttcagtgcctcaggagtattcttctacaccagctgctgttaaaatgtacaatgaactctagtcccaaggaatacagaagtgctcttattaccagttttcccacttgtggccgcctttgcaaagatccatattctaatttaagtccccaacctctgaatttggttttaagtttacctagtgactgactactctctttataaaaaagaccttatacttaatgatcatttccaaaggagaccactccttaacttttactgcaaacccaacaagatgagacacttaaacccagacagatgtaacaaaggatttttgttgtctaagtcccaaagtattatatagaaagttcctgcttttatgggtaaacttattaccttaatatgttctgtggtttgctgttaaccaagattctcccatttaaaatgccacagaccgaccctcaaggcagatccgaaagcctagtagttagttgcactgggttgttttgacaagcta

SEQ ID NO: 48064 - DNA, 903 bp, Homo Sapiens
tttgtacatagttaggttcatttgttagtttgtattcctttggcttcccccatatcctcgttgactttttctttctttgtaacttacatatgttatgaaatttatatgaggatatataattttcataaatgtttatggtttacatgtattagttgttaagatcaccctgggattgactggccaagtcatttggtggaagatagcaataaataatacatcataaaagactttaatgtaaaaataaagccatgaaagtaccaagaaataaatcttctcattttaattacatcagcttgtctgtgatcatgtagcctaaggtaggccagagttaattttgtgttatctatacacgttattgaagcgaattataaaatgttttagcatgttaattacttgtaaattaatatctacatataaaaatgtgagcatatattctatttagtatattaatccttcataaacaagtaatgcaagttagtattaatgatatcttaagacttaacattccttttttagttgtgtcgaataaatgaacatctaagagttcatgatgatgcttaaggaaagaaggctcatgtttaccttggaagttgtaaggcactgatcataaaaatgggaataaaaggaaagaatcgggcaacaaaaaacaccaacaaccacaagggggggggcaaaaattacccgaggggccaagtttggttacccagtttttgccaaaggggccaagaggagggtaaaagaagaaggggggtacagtctgaggaacgtcttggtttgggagactttcgggggatataggaacaccaattagtcaggaaacattaatgtagggaccgttttgcgattttctaatataacttggtatgtgaaaagatatagagacattagataagaagtcttatc

SEQ ID NO: 48065 - DNA, 548 bp, Homo Sapiens
agaatttcagaagagtttggatctcaaagattgtccttcactctcagaaacaggcaagtttcttaaaagcccttatagtcgtgtttttattttaaaaatcgtagcactttatttttgaagtttaaaaagcccataaacttaatgagtctttataatcagacacatggaaatatagaaaaccaaagactgatcttagaatatagagtagagagacatgtttgttattctccactagtgactttagtattttgttatgtgatgttttttaggtgcaccttttctcatgactccttttactttatctaatgtcttcctctttaaagtgtgacccagagaccagtagcatcagcatcacctgagacctgtgaacactgaagctccagctcagacatgttggggaccattttaataagatacctagctgattttttgcacagcaaactttgaaaacccctggtctaaggggtagtatttgtatcacttatggaatataatctcagggaaattaaatctgctcaattgacaaaaaaaaaaaaaaaaaaacacgg

SEQ ID NO: 48066 - DNA, 570 bp, Homo Sapiens
ctttgcgtgcgggcgccccttctgattgaccctgatgagctgtagctctgatggcccctccttcgggaatgattagggtgacggctggccggggctcgttcgagtggcgcccggccggtggtgacccgaacaggagagcgggacggcgaccattctctcgggaggggcccatctggagaaagtcctctcgcttggtcaaactaggagggcgatagcaccggccttactgcgacgatgacaaagtacaacacaccgtctggcgcgaaggagatgctcgagaaccctttgctgttgttatttttcgcgtgtcctccgaaaccaagggaaatgcggctctgtgggttctgttaacgtcagcatttaataagtgaactctaaatgcattgccccttatggtggccgctggcctcctgagttgactcagctcttgcaacgtagctagttgataaccctcgaaatatagcgaattgagatgtgctatattgtaaaatacgggacttagtacgaaaaaactgatgtaaaaattatctcaatactttttaatactgattacatgttggaatataatgt

SEQ ID NO: 48067 - DNA, 633 bp, Homo Sapiens
ggcgacgacgtgcaagaccaagagacccaggagaagcggacggggtgcgatggaccccgcggcatccccggctccccgccctcctctgtccctgcgccgtccgtgggggggcactggggcgtattagggcccgttcacttctccgcctcgagactctgccccctcagcctggcccgcccttcctaagttatcggcctgcgagccggagagacaatggagagaactgcagaggccgagtggcgaccaggccccaagcggaaggccattttccctgcccttcctcagttgtccggggcgggggtggggggtgctgcgaggaatggagaaaccaggccctttagaggatcccagagagggaagagaaccagggcccttttctcttttagaattttcttttaatcagcccaccttttgactccccgcccgccccaagtccattatttttttctgccttccgggtcccatccttagagctcgagtcgttccttcccctcctggattccgggtagcagaggcagcgccgcaggaggcgggtgcccgtttgtcccaggcctgggcgtggtggaggaaggggtgctggaacaataaacggcactatccaaatagtcaaatagatctcaagacacaaaaact

SEQ ID NO: 48068 - DNA, 726 bp, Homo Sapiens
  misc_feature (652)..(652): n is a, c, g, or t
  misc_feature (681)..(681): n is a, c, g, or t
ggctcagaaaactcattgtggggaaattctcttttgtgttcagtttaacctagaaaggtcctccttgaaaaaccaacattttaggaaagttcttttttcaggatggagtatattaaaattaagccaggctttgacgtgaattatcacttttctttattattttgttttctattttggtttatagctatttctggttcagttctgaacttcagcacttaatcatccttatcaaccaggcttttggtagcctaaaccgctatgctgttgtttttttaatttaaagatgtataagccaaaatttggatgggagtgagacataactgatttatatgaattttaacagagttgtatttgtgtgtgtttaataaaatatatatttattcagtactttcctcagtattttatgggcaaagtaaaaataacaatgcatagtgaaagggcatatattaccagcagtaataattcaaaatcctgaaaatgtttcattttttttgtttttgttatgcagaataaacaaggcagaaatgctctttgaaccactgcttttgctgtttaattcatttgataacctactttctaagacttgaaactattagttatttttcctttctgcttttcattctgtatcatgtctccttaaggaggaaaacanaacaaaacaagaaaactattcttcctganaatattcatttgtcagtttggtatgagtgtgtggtaacacaatgc

SEQ ID NO: 48069 - DNA, 641 bp, Homo Sapiens
ccacgcgtccggaagagccagcaggagcagcgtggtcattgctgggtgctattacagttgcttgtagtgagtgctgttttccaggagatggagccagttgggtgtggcagatctactgaatatcaaatgatgctcttcttcccatgtagaccttcagcaaaagccggtacttggaagccacaggctcaccttctctatctatccaataattattaatgaagagacctccataagggagcagctggctgttatcgataaatgtaccaattattaaataattagtctccaagccattcagtgatgtcttcagcatcactataggactgtctagtgtcactttttacttccttctgggtggaggctttccgactcccaatcatgaaggcaagttaatctttccagttagtgacttttgccccatagttggggtaagcacttcctagattgagaaaaagcagctacagtcaatcctgctctgtttgcctcatttggtgatcagtcagtcacacataagttccttgtattctaaatttcatgcacttctcccagatgctatagggttttctctcactgttgccaatggatgtcatccagacagtgggctcatatcttacggttttgtgcaatcattgtcgtattgt

SEQ ID NO: 48070 - DNA, 468 bp, Homo Sapiens
gtggaaaccagagttattttaagtgacagacaaattacggttgagttctgtggcttcttcacttgaagtgctaacatcagaatcaaacttaaagcttccactatttatgtctttgagaagtatgtagtacctcggtattaacagacctgctgtgatgcagttacactttcacgtatttttgaagtatgtcaagctacacgggtctaagatatgattattttggataaaatgttactttggtcaagagaacttttatccagatgacattacaggttcaagtgggttaaggagacctcctgtacatctacagtgtttccttttaaattgtccagaaaaaaggtgtgttcttcataagcttcagtgcaggatttttcaaagacgagctgttgtgcaatttgctgtatttaatgcatgttctgaaaggattcacttttgactttatatgacagttgatcaagaacaggtact

SEQ ID NO: 48071 - DNA, 589 bp, Homo Sapiens
cacgcgtccggtaagacgtagttctggtgatagaagttgaagctgcagcataatgagagatgaaagagaaactgctcttctggtgattttaaccctagggatgtagctactgggacaggaggaagtgagggacccagtgctgcagggtccctgttgtcacatatgtcaatcctactttaaagtcaaataatggattctggctgataaagcctatcagaattatggtgttgatacgaaagtgtcacatagccaccaaaatgtgttctctactttcttgctttgctctgattagctaagtcttggtcacatggctttatagcactgggaaaaccaggatctggtcttttatagggtaggaagtgagccctatcttttgtgtagatttgtggcggggagtttcccaagcatgggaaatgggctcagatgatgtggttataaaatgtgaatgtccattaaaaggcagtcagtgttggctactctaagccttcaaattgttgcttttccccttcaacagggaccaaggggagatactggaaacctctgagcttcagctgttggtttttgggttttgtttttgttttattgagat

SEQ ID NO: 48072 - DNA, 778 bp, Homo Sapiens
gatccttaaatattcttacttaatgttaaattaacattctgtgtagggaggggaggcttattcaattcttctgacctcagaactggcagaaggtcagatgtgactacacgaactctaggtgaaaaatcaggtagggttcaaattaagtagaactgcccttgccggaatagtgatcttcaaaaaacccttgcttttaggggagggaagcggggaaggaaaggaatgagggaggaaatattcctttctagcattcattttgcttagatcactccattgtgagtttgaccattttggagtcaaatgagcagacttccaaggagttgaccagtttgtgactagtctggtcacctttccagttacaggatcatattaactgtgtaaatgaattcatgggtagatgatttgtgcagatctgaatttaagaacatttcctttttctgtgggaatcacaagagtttatccactaaaaaaagatatgtaaaaaagatactttccagcacataaaggctggaattttacaacctgatgtatatattagacagttctaggatgttagttcccttcattccagagctatgcttgtgatacagccccttttcttataaagtcagttagaaggacttccttaacaatgactattataatgtcttacttaaaatacagttttgtattctgtcaatgcaaatataagacagtttgagccttaatcatgtaacaaaatattttgtagattacatattgatttttcaaaaattaaaaatgtatttcaaagtattct

SEQ ID NO: 48073 - DNA, 669 bp, Homo Sapiens
  misc_feature (588)..(588): n is a, c, g, or t
  misc_feature (593)..(593): n is a, c, g, or t
ggtattagaaaggtttttgcaaataagaatatgaaaaatactgtttcttctatccaactctcttatgaaaaggaactctgtattttctattagccataaataatctgtccactgtattttacaggtcttcatacttttacttaattttctttatctgtatggcaaaccactgcaatcctgaatgacatggaaagcatcacaatcttttgccctttgcttgaattcctggaatgcatacatataagctaaacagatgtctgcagttataaatgtcataagtagaggtacaatctcaccctgctccttagaaacatttccatataaatcgctaaaataatttcacatttttgttagtttaatatatacatgagtttatttctgatataaataataaatacagagagtgagcatatcagagaggcaaattcttaaagaatgatttttaaaatcagctctaggaagagctcaagatcaattggtcatagaacagcatttgacgcctagaactatgaccacctcatggtcagagatgagaatgtagcctttgtgaccagattatattatttttaaatgaagaagcactcattnaatanaacatattttaaaaaacatataagaaacaagtcaactgaatcttttatcatagaaatgaaaggaaaaataaactgg

SEQ ID NO: 48074 - DNA, 685 bp, Homo Sapiens
gtatacacaggaataaactttatgacatttatgtatttttaaaaaactttgtatcgttataaaaaggctagtcattctttcaggagaacatctaggatcatagatgaaaaatcaagccccgatttagaactgtcttctccaggatggtctctaaggaaatttacatttggttctttcctactcagaactactcagaaacaactatatatttcaggttatttgagcacagtgaaagcagagtactatggttgtccaacacaggcctctcagatacaaggggaacacaattacatattgggctagattttgcccagttcaaaatagtatttgttatcaacttactttgttacttgtatcatgaattttaaaaccctaccactttaagaagacagggatgggttattcttttttggcaggtaggctatataactatgtgattttgaaatttaactgctctggattagggagcagtgaatcaaggcagacttatgaaatctgtattatatttgtaacagaatataaggaaatttaacataattgatgagctcaaatcctgaaacaatgaaagaatccaaattatttcagaattatctaggttacatattgactgtatcactgatggttgccaagttttttgtgtgtccaataaacacattgcaaaaaacacaccaccacaccacttttg

SEQ ID NO: 48075 - DNA, 556 bp, Homo Sapiens
taaaaaagggtgactaccccttataagcaaagggaaaaccttggagtgtggggctgggctgggagaaggaatggaatcatatacaaggtcagtttgtggattgtaatcccatttacagatgagattacttaaaaataaactccctaagaataagagcaacactccaagcttggcctggccaacactcggtaggcagaatgatcacctccgttgtttcaggtactctgtgtttatttatgcaacagttcatgtaaaatggagacgaggccagaagaatccttgagcagacagagccagttgggcctcctaagtgaccttaaccttgcttgatttgcaagcatgtctgaaactttatttgtggtatttcttgtaaatgcctatgttaaagaaacacagaacttaagctcaaccaatcagaagcagccaacaaaaacgtaattagtaactaggacttcctcatgggatagaccaaataaggcaactgtataactgtgtaactgtataactgtaaccaatgaaatattatctttgcttttatctatttgtcctaaaaagc

SEQ ID NO: 48076 - DNA, 744 bp, Homo Sapiens
  misc_feature (694)..(694): n is a, c, g, or t
cttagaacatgttctagaaatagtggtaccttgctgctattatacttagtaacttataccccaatataataataagtattaaatacagattgtgtatgcattctttgtgtgtatatgccaactgtactacttaacctcactgatgagcaattagaaaaatacacaaattgtcatagtgaaaataagtcttggtcaattcagatgatacgtgaacctgataaatgctctaatagatatgctattttgtcctgtattgcttgttttacagtatggtgcatgttgtttgctaagtaaaatgataataataaagtataccaattttaaggttagaattaaaattttgcacatatgcttcttgatattctgaaatgtattctgtggcttaattatcttattcatacacatttcacttggctttttacccctaggaaataattgtccaagtatatatctcgtcttctttcttgtaactttgattaaactgcttacttcaacttacaacattgtaaagccagaatacctcattttaacagtgaaaaaaaatatgatgacctgatgtgttctcttgtatttgatttgaactacctaaataggcttaactgtaataataaatatacaattttggcaggcattttttcctttgtttggatgaacattttgttattggtccacttctaattttgtcttaaagagntataaactcagtgtcaataaaacatcttggtatataaaaaaaaaaaaaaa

SEQ ID NO: 48077 - DNA, 1987 bp, Homo Sapiens
gacggccagtgcaagctaaaattaaccctcactaaagggaataagcttgcggccgcctggagctctcggcctcggcttcgacgacggcaacttctcgctgctcatccgcgcggtggaggagacggacgcggggctgtacacctgcaacctgcaccatcactactgccacctctacgagagcctggccgtccgcctggaggtcaccgacggccccccggccacccccgcctactgggacggcgagaaggaggtgctggcggtggcgcgcggcgcacccgcgcttctgacctgcgtgaaccgcgggcacgtgtggaccgaccggcacgtggaggaggctcaacaggtggtgcactgggaccggcagccgcccggggtcccgcacgaccgcgcggaccgcctgctggacctctacgcgtcgggcgagcgccgcgcctacgggcccctttttctgcgcgaccgcgtggctgtgggcgcggatgcctttgagcgcggtgacttctcactgcgtatcgagccgctggaggtcgccgacgagggcacctactcctgccacctgcaccaccattactgtggcctgcacgaacgccgcgtcttccacctgacggtcgccgaaccccacgcggagccgcccccccggggctctccgggcaacggctccagccacagcggcgccccaggcccagaccccacactggcgcgcggccacaacgtcatcaatgtcatcgtccccgagagccgagcccacttcttccagcagctgggctacgtgctggccacgctgctgctcttcatcctgctactggtcactgtcctcctggccgcccgcaggcgccgcggaggctacgaatactcggaccagaagtcgggaaagtcaaaggggaaggatgttaacttggcggagttcgctgtggctgcaggggaccagatgctttacaggagtgaggacatccagctagattacaaaaacaacatcctgaaggagagggcggagctggcccacagccccctgcctgccaagtacatcgacctagacaaagggttccggaaggagaactgcaaatagggaggccctgggctcctggctgggccagcagctgcacctctcctgtctgtgctcctcggggcatctcctgatgctccggggctcaccccccttccagcggctggtcccgctttcctggaatttggcctgggcgtatgcagaggccgcctccacacccctcccccaggggcttggtggcagcatagcccccacccctgcggcctttgctcacgggtggccctgcccacccctggcacaaccaaaatcccactgatgcccatcatgccctcagacccttctgggctctgcccgctgggggcctgaagacattcctggaggacactcccatcagaacctggcagccccaaaactggggtcagcctcagggcaggagtcccactcctccagggctctgctcgtccggggctgggagatgttcctggaggaggacactcccatcagaacttggcagccttgaagttggggtcagcctcggcaggagtcccactcctcctggggtgctgcctgccaccaagagctcccccacctgtaccaccatgtgggactccaggcaccatctgttctccccagggacctgctgacttgaatgccagcccttgctcctctgtgttgctttgggccacctggggctgcaccccctgccctttctctgccccatccctaccctagccttgctctcagccaccttgatagtcactgggctccctgtgacttctgaccctgacacccctcccttggactctgcctgggctggagtctagggctggggctacatttggcttctgtactggctgaggacaggggagggagtgaagttggtttggggtggcctgtgttgccactctcagcaccccacatttgcatctgctggtggacctgccaccatcacaataaagtccccatctgatttttaaaaaaaaaaaa

SEQ ID NO: 48078 - DNA, 492 bp, Homo Sapiens
caaaatgaccttaaatcacattgattaagatattttaaaagttagcagtgaaccaaaagtagtttcagattagcagaaataaagagctttaagttttaaaagttgagattgaatatttaatgaaagtttattaattctttttccaggaatagcagtaaggtcagtttttttccctaaaataaaaagttttaataaacagaaaattatagcaacagtacttaggagaatagttgaagattgtattaattttaattataatagttatttgtcataggctattgatgattagaatttcattagttttgtccactataattttaaaaatagttgtgtcaaatacaaattctggtaaactgttaggttttaacaccagacagtattcaaaggaaattaatgtttgcaaacataaatccatagtcttcatttctttatattgtcacctttgtaaaagtgtttaaaatttgtattgtttgttttgtatatctttgggca

SEQ ID NO: 48079 - DNA, 716 bp, Homo Sapiens
tctggcagaaaaattatgaaatttattgtttccattgatttgatggaattatccttaaacttggattctaagaagtatgaaagaatatcttggtctttcaaagaaaagaagccattgamatttgattttcttttggcctggcataaaacaggttcagaagaatcgacaatgatgtcatatttttccaagtaccaaattcaggagcatcagccaaaagtagcactgagcacgttgagagatctccagtgcccagtgctgcagagcasggagctggagggaacgccagaggtgtcctgccgggctctggggctcttcgactggctcggcgccgtcttcagtaatgtcgacctaaataatgagcctaataatttcatatcaacctattgctgtcctgagccaagcacagtggtggcaaaagcttatttgtgtacaatcactggcttcatacttccagagaagatctgtctcctattgggacatctctgtcactactttgatgaaccggagttagctccatgggttacactgtccgttcaaggctttgcggacagccctgtttcttgggaaaaaaawraacatggttttcgaaaaggaggagaacatttatatwactttgtgatttttaataatcaggactattggcttcagatggctgttggggcaaatgatcactgtccaccataaaaaataaaaattaaaaatcgtgtttwcttaca

SEQ ID NO: 48080 - DNA, 659 bp, Homo Sapiens
  misc_feature (601)..(601): n is a, c, g, or t
ggacctcaactgtttttttcaagagctctcatgatattttgagccttgacaacagttctatataaattcacttgtaaatgctgctgttgtgtaattctaaatattttctaagataatttgaaagcaagggaaatagtggccccttaatgagtatttttttattggggtggggaaaggggcaaaaagaatgatcttagtgtctttacctttctcatattaactcacctctttattctgtggtcttttctgaatagaaatgtatgccctaggaagaaatcatgctgggttttgcttttagagataaaaggtggtggatttattttgcctgcagtaaagattctcagggtgtcagagcagcatattgtcaaatcctgcttctgttttatgtttcagtgtattcactttcattttcttacttactagaccatttctgcagtttgcccaaacctctactgtttgggacagtaagcccaatacctcatttttaaaaagaagttttcatggcatcagtgttaataaagtacatttttaactgagtcttaatctctatttgaagaaaaaagtagagaccaaaagtaatggtcaaatgtaaatcccccanggatcatggaaaatggtttccccaaattaaattaagggtagggaggggtttaaaaaac

SEQ ID NO: 48081 - DNA, 558 bp, Homo Sapiens
ctactcctagggataagcccccggtcccctcatccctggccagtgtccctgacccccatctactccttcctggggacttctcagccaccaggctgggcctggactttcaactgcaggcagcctggaccttgaggctgaacttgaggagatccagcagcaactactgcactaccagaccaccaagcagaacctctggtcctgtcggcggcaagcgagcagcctgcgcaggtggctggagctgaacagagaggagccaggcctgaggaccaggaagtagagcagcaggtgcagaaagagctggaacaggtggaaatgcagatccagctgctggcagaggagctccaggctcagcgccagcccattggcgcctgcgttgcccgcatccaggccctgcggcaggccctgtgctagcgtgttcgcaccaggaacgcaggtgctgggctgtcggggaggcctcaggccacctccaggaacagaacacagttttaagttgattttttttatttcaaaatgctttgcaattaaatgaactatactgttcagaaaagaaaaaaacaa

SEQ ID NO: 48082 - DNA, 931 bp, Homo Sapiens
atgtgtccagctgcagggggagcctcaggaaaaccggctgctgctactcctgtgaggaggactcctgtcaagtccgcatcaacacgaccatcctgtggcaccagggctgcgagaccgaggtcaacatcaccttctgcgagggctcctgccccggagcgtccaagtactcagcagaggcccaggccatgcagcaccagtgcacctgctgccaggagaggcgggtccacgaggagacggtgcccttgcactgtcctaacggctcagccatcctgcacacctacacccacgtggatgagtgtggctgcacgcccttctgtgtccctgcgcccatggctcccccacacacccgtggcttcccggcccaggaggccactgctgtctgagaacgttctgcctccatccccatgctctgtccacctggagccaggatgtgcattgtctgatcatgaaaaccttgggcctcctctgcggagccccccggcctgtgtgtggcaccccgcgctccgtgctcctgctgcccaccccgtgggtgaaaccggccccagaagggtgaggggccagcaggacccctttcgggagggcgccactcaggagtcctaccctgggagagcctgtggcccaccttggccttgcccctccctgatgtcactgggacgccctggaacaaactaagcatgtgcgggcctatgtgtccctgccacggccggagcgcccgcgcagcacggattccagctggccacctccggccgctggggcagacaggctgggtccaggaagggcaacttgcctgccagaaacttgccaagggaaggggggccgcctgtccctggccggctgcaggggaaactcagggcttagggcgccacgggccatgctctaaagaggggggaaagaatactcgaaaggccccctttggtttaactcgcgctaa

SEQ ID NO: 48083 - DNA, 650 bp, Homo Sapiens
  misc_feature (54)..(54): n is a, c, g, or t
  misc_feature (98)..(98): n is a, c, g, or t
gatcatccttttacgagctgggcaggtggggagtggcgtggttttgatggagtnaggagatttggttgaatgaacgctaagatggccagacgcacctnttcgatctcaactctgcagcctgggattccagagctgcaaacaaccactgaattcgttctgtaaacctgttgtcatttgacgtttccaggcaggcatcaacatttacattgtaattcaatagacgctactactacaaaggagctttattcttccagcttaatatggttgctgcgggaacactgcaggatgaaactgactttttttgtggtaatgtttctcctggttgggaacaacgcaaattagcaaaggcgtaatttataaccgctgctaccaaagagtgaagtatttgtggaagttctgactggaatctagctcgtacatatggattgtggaaataaaggaggacgtggaaagcttgccatattttatttcaagttaatactaaagctgccagacttaatacaactttcttttaatctttatggatcacatattttctgaaaattacatggtaaaacaaggtttggtttgttccatgtgtccattttcaacaataaatttcaaaattgtatttttaaaaaacaaaaaaaaaaaaaaaaaaaaaaaaaaaa

SEQ ID NO: 48084 - DNA, 702 bp, Homo Sapiens
  misc_feature (573)..(574): n is a, c, g, or t
  misc_feature (580)..(590): n is a, c, g, or t
aacgacaggagcatcccaggaaggggttcccagaagtcagaatccaagatggatgggaagcacaaaatgcaagaggaaaatgttaaactaaaaaagcccctggaagaaagccacaggctgcaaccccaccctatggatgaacaggatcagctgctgctctctgaaaagccacagttgtgtcagctatgccaggaagacggcagcctaacaaagaatgtgtgtaagaactgcagcggaaccttctgtgatgcctgttcaacaaatgaactgcctcttccttcaagtatcaagcttgagcgagtttgcaatccctgtcacaagcatctgatgaagcaatattctaccagcccatcataagactggaggccaagacctggaccaaaacgtttatgcaggctcctctgtacctgtgttttagctgtcaggatctcatagagcccagttcttagagtcaactaaagagttgataggaatttactaggtccagggagaaaaggcagtggttggggttactggaaattttgctcattttctctaatgactgtatgaataaaagtgaacttacttgaaaannaaaatnnnnnnnnnnnaactcgagggggggcccggtacccaattcgccctatagtgagtcgttttacaattcactggccgtcgtttttacaacgtcgggactgggaaaacccggcggttacccaactg

SEQ ID NO: 48085 - DNA, 622 bp, Homo Sapiens
ctccctctcacacacacacacacacacacacacacacacacacacacccgttttaccattttctcagtgctttttctgctttcattcctttgattttagttagaagcacaagccatgatggatgtgggactcttctcaattgctctttaaattgtcactttttaaatcctattaaatgaagtgtcgattcctgacaaatacattaaaagtgttttattcctagaagagttgggaaaagaaattattttcagcaagagtaggatgtttgttaaactgattccttggcaaaaaagagaaaaaaagcttttgaattgtgcaaaaaattgcccagtattatgctgtcgccccagttgtcaaactgctgtgcagatggctccagcccagtcaacttcaccttctttttaatttagaagataacaaaattgtaatcacttatcctttccagagccaagggggaaaaggaaggtataatctacaataaaaagcgagcgttctgtgtactgaggccacttggtgataaagagatggagcgctcccctcacagacttcaattaagaacctccctttggacagggaagaaaggtgtcaaagaggaaaagaaaattaaatttgcttccttcca

SEQ ID NO: 48086 - DNA, 575 bp, Homo Sapiens
  misc_feature (489)..(489): n is a, c, g, or t
aaaaatgaggcagatcagatgcccctgagctgcccctttttttctgattcccaactgcaatgtcctcagtcagtgttgtccctctgcccggctccccagctctttgccaacctcttcacactccccttgagctgagcatcagtcgcctgtgacgtggccaccttctgtcctgctcccactcccgacccatgctggaccccggaggacctcctgccccgcccccaccacacacccatatcccccaccattccaatttgttctttcccgtggggaattttttttcccagcgtctccatcccttcgtacatatccacacacacacaaattggtctgatcttttttccattggttaaacatttaactccatgccagaccttgttttaacccctctcacatcatgttctttttttttttgcgagttattttgcattaaccaactttgtcagtgacagatgcgtatctgagggtgtcacacacgaccttcagcanggaagacttctgggccatggagggccgtctaatacatggacttataaactgactgcatgagcaatgaaaaggccaaattattctga

SEQ ID NO: 48087 - DNA, 721 bp, Homo Sapiens
aagatgactgccatcttattcctgaacttcctcattcaggacccccgtggaaacacagtgagcatccttatcagaggccctggcccaggctggcccctttgctttgtttggagaggctggctgagtttcagcccctagtgctggagacccccttgttggagaggcttcctgtttatgcctcacaagaagaaaaaccacagggctctgggaggggaagaagcatgcactcccgctttggctggagtcccagcgcttgtcgccaccctcctccttgcctgtagtcttgacagcatccgtatgtacgtgtcctggcatttcccctccctctccctgatgactgatacccaccgggtctgacattccaagtaaccagtatgtaactggtagtttgatcccaatagccatagcgactccaggtgggagtgagggagcccagccccctgtcctggaagataccttagagtatgtgaccgcgctccagacccttgcttctctctcctgcagaggatgagtttctagggtgctaagtacctatcagaacagtgtggaggggcgggtccctcatacaggtgtgtgcttagccaaatacagtaactgtgactggcccagggatgttctctcctctattttcaaagatgaaaggaggttttaaaaaccatgtttgattcctaaccttttgctacctgaataaagcagagtctatttcaaaaaaaaaaaaaaa

SEQ ID NO: 48088 - DNA, 992 bp, Homo Sapiens
cacgttaaaaggctatttgcccgcatcctcctctatcctgtttcgaggtagagagcttggcacttctgttacaagctgagagtctggaggtgctgagtttaacgtggctgtgcagctgatttcaaggcatgagctgaacagcgttgacacagccgtgacttacaattaaaccctttcaattacagtacagattctgtgtgctacttgatgagatgttacccaaggccagtttggacttactgctttttgtccctcatattaaattatcaaatgatgccgatgaaatgcttgaaaatgattctgctctcaaagttatgcttccctagaaaggtgtcatgtcgggcacttgtgttgggtgactatgacatcccagcagtgctggtcaggtctcagagttgctttcacctagagctgatgcttccacaaggggacatttgtgttactttgctccagggtctgtcataaaaacaatggtaactacttcatccctaggaagcccaagacttcagggcactgttagctgatggtaaataagggacacgatattcacgggaatagtttactgctcccccactagtaattctcatggggccacttttttaactctttctaaattaacacctcttctcagcatagagcagaggatgcagtcatttctctgttgaatctatgtagtatctatgttcgaatgtctttatatgaaaaggaattcgaatctaactctggaaagcgcctctggaatgtcgttgatactagggctattaggggccgggattggtctctataagcgaggctcatgtccgtccaagttcgccaacttgtgggacgcttgctaaccttattttccgtttaactcttttttcttttgaggatacaccaagggggtgtgggtctcgcgttttcccaaaatgacagctcttttgagtgtccgcggaacccgggtccgtaaaaaggggcacgcccgctctagtatgcgcggcggagcatataaa

SEQ ID NO: 48089 - DNA, 544 bp, Homo Sapiens
ccgtcaatgctagaagaacccttggaaaacatgctggcccagccctctagttttacaaataagggagtgcacagccctgagaggttacatggcctgcccaagatcacgcagtcaatggcagagtaaagagcatagcctaggcctccccactcctctagtaatgctctttcatcttctccaacctggctctaagccttgtccatcctgagccccatatctagcccaacctagtccctgaaaacaagaagtggcccttagaaatctctctccagtcccactatcagaggccaactgctgtcttccagtctccttcagcctgtgctcctctccctccctgactgacaggcagaaggtactgtgcctctggatatccccacagtgccctgagctgcatctcttgctgactgctttaatacatcacagtgacattgtgtgtgtctctgccaccagactattgctccttgatgctctgggtcacctgcatctagcatggcatatatctagtgctcaataaatgtgtattgtacagaaaaaaaaaaaaaaa

SEQ ID NO: 48090 - DNA, 457 bp, Homo Sapiens
  misc_feature (16)..(16): n is a, c, g, or t
tctgcttacagcgggnaccttacatatcaaatctaaattccaacatactgctccatatgctgttgaagaagggagccaacaaaattgttttttctacctgttgacgtgtcaagcactaactgatttctgttgtgtgtctaggtgacgagttctaatttaatgcaattttctgctcaataaaagacaagataattatgtcctaaaaatcaatggtccttctgatggagtttggatttcttctggcaagcacttgaagacagtggaaagttttaaagaagaggagtgaagccactggctttgactgggtgagagaaagaagcaaaggcaaaggaatgtccagctaggcagaaaactggataaaatgacgaaaagagaaactgtctacaaaagcatctatggttctggttttactcaactgtgttcttaagcactcaataaatatttgttaaaagagtga

SEQ ID NO: 48091 - DNA, 1111 bp, Homo Sapiens
  misc_feature (780)..(780): n is a, c, g, or t
tctgagagagactaagcatccatacacttttgtgtcaaaggagggttttagagaattacttttggtcaaaggtgctcctgaaaaagctattcctttgctacctagactgattcctgtgctaaaggcagctctggtccattcggatgatgaagtgtttgaaagaggattgaatgctctagttcagctaagtgtcgttgttggtccttctctaaacgaccatctgaagcatctgcttacaagcgggagccttagcatcatcaaatctaaaattccaacatactgctccatatgctgttgaagaagggagccaacaaaaattgttttttctacctgttgacgtgtcaagcactaactgtgggtactcatttattttattcttttgtaaatcacagccaccattcattatttactaggttaagatgaatagacactgaatcaaagttattcatcaacaaaaaagaacagttactaatggaaagttattaaaataagttctataagagtacaattttgaggtttattttttgtatttttattatttgtgcgaagaaccattattgagtttgcaagataagatgtatttgtattttctagtgtctttttatttataacacttttttggcaatcagtttgtagctgtgcccttatttttatagatagtttgccatttcttgggtttaatgtttacccaggctatagaagtttaaaatagtggacaaatgtttgtgaatacacttttcaaaaattgttttaaaaagagaaaaccggtcctgcctttgntgccccaaactggaagtgccagtggcataaatcctagctccccgcaagccctccaatttttggtgctcagaatgaccccttttcctcccccccctccgattaacctggggattataggggggggggcccccatgccccaccctaatttttgaaatttgcctctgcacaaaatagggaattctcctcgtgttgcccccagcgtggttccccaaatattcgggggggcggaatcctccccccgagggggactttccaaaaagggcctgttgccttccacggccgctgagcccccccacctgtcggcgaaggctcccctgagaatcacattaat

SEQ ID NO: 48092 - DNA, 882 bp, Homo Sapiens
ctcggccctcctgcgtttgcccagggtcggcccgcagtgatggaggaggaggcggagaccgaggagcagcagcgattctcttaccaacagaggctaaaggcagcagttcactatactgtgggttgtctttgcgaggaagttgcattggacaaagagatgcagttcagcaaacagaccattgcggccatttcggagctgactttccgacagtgtgaaaattttgccaaagaccttgaaatgtttgcaagacatgcgaaaagaaccacaattaacactgaagatgtgaagctcttagccaggaggagtaattcactgctaaaatacatcacagacaaaagtgaagagattgctcagattaacctagaacgaaaagcacagaagaaaaagaagtcagaggatggaagcaaaaattcaaggcagccagcagaggctggagtggtggaaagtgagaattaaagtccctcgccgcttggaaagtgcagccttctacaggtagagccacctagaaatgcatatggctgcaaaggaaactttgaagggttaaatagagatttaaaaaaataaaataaaaaggctgggctagggtgctttttgtgctgaattctccacattgttaactgccaaagctagttttagagaatgagaaagtcttaagcaaaatactcccaggtctcactccagaacataaaaatggtgtgtgatcgaatggtatatattagaaattacatctgttgtaattaaaattgtgtgagcaattaaacatggttgactttttcaagcaaaaatcagttcatcttttgatgtaattttctagggctaatggcaatctctgaaagatgaataaagctatatttatttaaaaaaaaaaaaaaaaaaaagggc

SEQ ID NO: 48093 - DNA, 889 bp, Homo Sapiens
  misc_feature (793)..(793): n is a, c, g, or t
  misc_feature (831)..(831): n is a, c, g, or t
  misc_feature (860)..(860): n is a, c, g, or t
  misc_feature (865)..(865): n is a, c, g, or t
  misc_feature (869)..(869): n is a, c, g, or t
  misc_feature (877)..(877): n is a, c, g, or t
gcctggagctggatctctctccggtcgcgcacgccgaggccagtagggagagaagatggtggttctccgcagcagcttggagctgcacaaccactccgcggcctcggccacgggctccttggacctgtccagtgacttcctcagtctggagcacatcggccggaggcggctccgctcggccggcgcggcgcagaagaaacccgcggcgaccacagccaaagcgggcgatgggtcatcagttaaggaagttgaaacctaccaccggacacgtgctttaagatctttgagaaaagatgcacagaattcttcagattctagttttgagaagaatgtggaaataacggagcaacttgctaatggcaggcattttacaaggcagttggccagacagcaggctgataaaaaaaaagaagagcacagagaagacaaagtgattccagttactcggtcattgagggctagaaacatcgttcaaagtacagaacacttacatgaagataatggtgatgttgaagtgcgtcgaagttgtaggattagaagtcgttatagtggtgtaaaccagtccatgctgtttgacaaacttataactaacactgctgaagctgtacttcaaaaaatggatgacatgaagaagatgcgtagacagcgaatgagagaacttgaagacttgggagtgtttaatgaaacagaagaaagcaatcttaatatgtacacaagaggaaaaacagaaagatatttcaaagaactgatgaagaaacaactgataatcaagaaagggcagtgtggagtcatnctgaagaggggtggaagacccaagaacatgaaagatgnatgggtggaagatgtaagaatggatgaanaatgnatgnatggatgnatggacccatgg

SEQ ID NO: 48094 - DNA, 1250 bp, Homo Sapiens
  misc_feature (197)..(197): n is a, c, g, or t
  misc_feature (205)..(205): n is a, c, g, or t
  misc_feature (207)..(207): n is a, c, g, or t
acataaaccagtgacgtttgtggctgtggaatttccatggagaaaagagagcatctgaacacctggaccatcttttgcacctggcagaccctctgcactcaccccagcgtgttctgtgaacttgagtgacaacgcgtgcttgcagggtgctttttggacgactggggaagaggtggggagggggtggtggggggaancatggacnanaacatggagcaaatgttttacaacctgaacctcagaactgtgatcctccaaggagcgcgctacttgaagaaaagaaaaaaaaaaaaaaaaagtcgaatggcttctcagggattttgttttccgtgcacatataagccatagttacagtacaggtggcagtatttagagcactcagatttcagttctgttacatgtgaaagagggatcgactgacgttcattgctgttccataactagtgcaaaatatgtatatgtttatctccacttctatactatgcccatacctttaaatttatacagcttcgaagcttctaccgttagtccacacctgcgcgccaatattcttgcatgaaaaaccgggccccaaatggggccgtgattctccttattttaggtattcgcaccgctcccgggctcccttcttctagccctataaatccttcttttcacttaccaacgcagaaccatgaccggcttgaccgccccccccagctatccctttctacggggcgcccgagttttactgcgttacccctccctccctttggtacaaccgggggcccccccgaggggatcttcgaccactccaccccgtattttacttgggccgcggcgctttgtcgcagctttcgtgatctcgggccaaacctggtcactccctgggaaatttttcggggaatgagaacctcttatttttgcgggggggctgcgccatgccgcggagatatacttccctgccgcgcggccacttttaacggctgtttgccgccaacattgtaacactctgttcacgccgccatacaggcggggcctaaccacaggcgcccgctctgtgcggtattcctcgcctcccacaactcctttgcctcgaccccacgggttcctcttattctggaacatcatttttttacccaccccgccgccccctagaggtcactccatctggcggtgggcggcatgcttctgaccccgtttatacactccaccaccgcggcccccgtttttcaatgcaactctaccgctcacatcaccacatctcgcgc

SEQ ID NO: 48095 - DNA, 1001 bp, Homo Sapiens
  misc_feature (532)..(532): n is a, c, g, or t
tccgctgaagtggagtttctgacggggaagaggcccaacgagaattccagtgctgacatctcaggtaaaacaagtcccagttctgccaagcctagcaactgtgtgatttcctgagctgcgggatggtggtgggcaggacgtgtggatgcctgcctgccctgccctgtgctgtggagagcgcaggtcgcacactgcaccagtttgcacatcagacgccaactggccttctgccctgcagcctccgtcctggcctcagggacgctggatcccaaatgagagggtccgaagcatctcagtcacacgcctccaccggactgtcggtggctgggcaggggtcagtgccacggcctccttgtttacatgaagtggaagcttgaccagtgtctgctcgcctttgtgccccaccccctccgctgattgccagatggggtgagggcccattctttaaacctttatggggtggggtgtctggggcagctgcagtggcttctcctttcccaggcttcctggtgcttctgattccccacgccantccccagccaagagattggtggaactaaaagggaagagggcagggccctgaaaaaaaaaaacaatacaccacaccaccacacagcaacacgacacaaaggaaacaagcacacaccgcatacaccaagacaaaagcaaacaggagcaacagaatccacaacgcgccagacagcagcagagacgcctaccaaacaagccacagacaacaccaaaagaagcgaaacagcagagcgcacaacgacagcagcaccaccacacgacccgcaaacacgcgggagaggcgaaagaggacaccaggcaaggcaagccagacgcacgagacacaacacgccggcgagaacgaagcccagcgacggggccgacacgagacgacacagcgcacaaacggacacaaacaaccacagaggcgcgacaaccacaccagacgaccggagacagagagagacggcagacaaaccaccgcaccgcgg

SEQ ID NO: 48096 - DNA, 724 bp, Homo Sapiens
ggagaatgaagacatggtacaagatgcgctgcagcagaacccgggcgccttcaggctagctcccgccctgcctgcccggccccaccgaggcctgagcacgttcccgggtgccgagcactgcctccgggcttcccccaagaccacgcttagcggtggcttcttcgttgctgtaattgaacgggtcgagatgccgacgtgagtgagtgggggcatgcttgggaggcgcaggatggtactggcacatctaacatctacatttctctagctcagcctcacaggccaaagcatcagcaccagaacgcacacccagcccagccccaaagagaaagaagagagcaaaaagctgcagccggtgcttgcacaccgccttgcacatagcagaggctccgggctcactccttcctggtgggaaaggaagatgcctgtcctctccgtggaagaccctgggccctcaccgcaggcagcagtttgcgttttgaaaggttattgggtcccttcctcgggctgtgttcttgctggtgagcaaaagtgttgcctgcagaaataaaatgcagaacgtactctacgatagatcacagttttttattcttaatgtcacaagcaggagaaaaatctcacattcatactaaaaattccaactagactcaacaggaatgaagtctctatttgtaatgggaaagtcccagcctcccgctgccgtccagtgcgtgtactgtacacatcc

SEQ ID NO: 48097 - DNA, 718 bp, Homo Sapiens
  misc_feature (550)..(550): n is a, c, g, or t
tggagagagagaataaagagattatttttcattatttttaaatggttgtttttgttttaatttgcacagctacacagaggaaataacttaggcactttctgtttttttaaaaaaaataataaggtctcatggcttcattcagagaccacagtaacaacagcagcccaccaatcagagaagctggttgttattaaccaagctacagattcacactttctggcctaaaccctaatgggatgaggcttttcaccccaggccatgctggtggtgattttttagcccctaaataaaacactggactatttcctgtttacttcattgattgcaactacaaaggtggactcaaagcaaagcacaatcatgccagccaacattccagaattctgctgagaactccaagtctgtgaggggagaggttttacaagccagacaggcctgggggactgcagtccccaaggagaccctgccacatgctggccctttgagtgagaatgctgcatctttctacatatcttcatgagaatactgagaattggattttccttttcanaatgcactttgctttttttgtatgttttgttatgttgagatgtttctaaagaaaagattttatgtaattataagatgaagcgtagtgaattgtacagctgttgtgataatgacctatttctatataaaataaaattgtatggcttatgtgtgaaattatttgtatctg

SEQ ID NO: 48098 - DNA, 832 bp, Homo Sapiens
taagtcattttgctgttgaaaatctgacctcatcaaatagatgtcattcctaaaactctctttagatgtcctaccctatcagcagattaaaatggaaggggtgtgtaactaaaaacataaatgttaagcattagtataaagtaacttctgtaataaattatatcgcatattttttcagataggacagctcaaccttacgatgcctacctgatgccaggtgatgcttattttcttcctaaagtaggttactggtcatatcttttttccaaatattaaatgcaccttgccagatattctcctgcagctctaaggaaaggaaatcaatttaaaaataattgtagaatctactatgagccaccaaagtataattccctaaaagtttaagaaaccctggcaattaattcagcataaacatatcctataaacagcaggagaggttcagcgttctgattttactgtggaccttttcctaagggcattcatgaatgcagcaacagttttaactatggcttacatttatttaaatttcactaaatacaaatctttgatgtcatgccagttttagatcttattaatgttcagaaatggataattcaaataatcataaagtagggtaactttttattataccaagggtctaatgcattcatatgaagacagatgttcaaaaaactgcatgaaataattttttataaattaaatctattttagaaaaaaaaaaaaaaaaaaaatgtgtggggggacgaaaatttaaacacgttggggggccagaaataaaaggtaaggcaaaaacagcagaagggttccaaaaacggggggagaaaaggggaga

SEQ ID NO: 48099 - DNA, 545 bp, Homo Sapiens
  misc_feature (511)..(511): n is a, c, g, or t
agtgagggtgttcataccaaagacggaaccatttcgcctttaaagaaaatatatccagaagcagccgctgcctcggagccctggcccgtgggtccccctctcgcctggctggttcggtctaacgccccggagagtcagagctcccaggaccctggggaggaggcggattccgggcctggctgggcttcctcttcccacctgaggactgggtgcacagttgtctttgaggggggacgcttaaggtgctttggggttctcaggccaggatacatgctggcgctgaagtgcaggcagccttgaggtcacctgggatctcggggtagccaggctgctccaagacagtggatatcgaggcagtcgtgaggcccctactccacctgggagcaggggaaggacgtggttgcctggcctgggctgcgcccagcagcttccccccaatcctgccctcccagctgtcgacccagatgggatgttcggatcggtttgtaattaaacctgggaatggccacangaaaaaaaaaaaaaaaaaaaaaaaaaaaaaaggt

SEQ ID NO: 48100 - DNA, 799 bp, Homo Sapiens
cgcggcgcggggcagcaacagtcgcaggagatgatggaggttgacaggcgggtcgagtctgaagaatccggcgatgaagaagggaagaaacacagcagtggcatcgtggccgacctcagtgaacagagcctgaaggatggggaggagcggggggaggaggacccagaagaagaacatgagctgcctgtggacatggaaaccatcaacctggacagagatgcagaggatgttgatttgaatcactatcgcatagggaagattgaaggatttgaggtactgaagaaagtgaagactctctgcctccgccaaaatttaattaaatgcattgagaatctggaggagctacagagtcttcgagagctggatctttacgacaaccagatcaagaagattgagaatctggaggcgctaacagagctggagattctagatatttcttttaatctgctgagaaacatcgaaggggttgacaagttgacacgactgaaaaaactcttcttggtcaacaataaaatcagtaaaattgagaacttaagcaacttacatcaactacagatgctagagctgggatctaaccgcatccgggcaatcgaaaatatcgacaccttaaccaacctggagagtttgtttttggggaaaaacaaaattactaaacttcagaacctggatgcgctcaccaacctgacagtcctcagtatgcagagcaaccggctgaccaagatcgagggtctgcagaacctggtgaacctgcgggagctgtaccttagccacaatggcatcgaggtcatcgagggcctgg

SEQ ID NO: 48101 - DNA, 532 bp, Homo Sapiens
ggtgtggtccgattttggcgtctatgctgggtgtgcctcactggctgcattttccagcatgcaaccaggagtgacgtaggaaaaagggatgctttcttacttgggaagctctcagggaagtgggtgtcaatttctcctccactgccgggcctaccctgcactcccaaagatttggtgcagatgggtagttccattttttaaaaatggtgcagatatggaaaatggtgacttacttcatgaccagaactatctagaatatgtgtgggggtataaacatctggcttaaccaaatatctatgtaggcagaggtaaccaggagagaagcaagactggctgcctaaaggagcccaccattttacttttcacatttaatctgccacgttgaatcaatgggaataaaacctgactcgcaggtgacgggacaggaaatcccaaagttccaccatttctatgcttaattttaacgtcccccggcttttttttgtagaaaataaaaacaagaaaatcgttccaatgtagggatgctcgtgcg

SEQ ID NO: 48102 - DNA, 960 bp, Homo Sapiens
tgttatgctgccaaaaacatctgtgttttgaaataccaattaatcagttaatttctgaagactttgtataggacttgatatatgagtcagaatctgtctgtactcattctgtacattgtaactttgaacacttatgaaaaactgtatctgttggtgtgttttgattagttagtgtagatttgtttgcgtatttgaattccgattttagtttaggaagactaaaagtagccatttttgtaaagttcatatgctattttttaatgtcatttttgtttttaatatttatacaatagtgatgttactagtaaaaaatgtttatagataacacgtagagctattaactgttcaaaagcctacatgataggcatattttgtatttcgtgttgcactcgttctgtttcatattggactttttacatcccttttttagcaaaaaaaagagacacatttgaattctctttagcataaagctgtgcattggaaactatgtgactgtatccatacggttagcaaaatactctttgccaccaaaggtaaatgaaactgtaaaatacctctggatatttgtgccaatgaacttttcttagcatattaggattaaagcaaaaataatcttttcagtatgtttcatctaggacttacaataaatgtttaaaccatgaaaacttatatttcataccctaatttttctttgaaaatattcaagatttgtagcctagtgtgatctattttgtgcgattgcttgaatgttttctgattttattgaccaacagcttgcctaccaatgatcttttcaacaattcattgaaataattatttccaaccaaccttgccttcacattcaattttcgcaatgccacctttgctggtcaccaggacaattttttggaaaccgggaggccacccattttagtggaacgattgaaaaagaggggaacgtgagggcacaattctcccttt

SEQ ID NO: 48103 - DNA, 609 bp, Homo Sapiens
gattaagacagcatgtctggtttttaaacagacatttgggagcttgcacatcctgatgagcagggactcactgtggtggccttagggaattacacgctcactttggtggttctctatgctcggaagcctctgagagtggccttggcagcttaagatggcagaggctttggagtcttcttaggactgtaagtgcccattgaggatgcatttgagtttggaaagtaggcccaagtcaaatctgatggatggattcaagaacatggactaatctgcgttgtcatttttaatcaaaatgtaatggagattgatcatctggtggggttcacaaacttttcatgagagctgtgagttctttttttgagatgcacttttgcacttgttacccaggctgagtgcagtggcgcggtctcgggtccattgctcctccatgtcccgaggtcaggcgattctcctgcctcagcctcccgagtagctgatgattgcgggcatgcgccgagcacgcctggctagtaatgtgtgtgcacgtagagatggggtttcaccagagtcggccaggctagatctacgaaggtcctgatctcgggtgatccgacttagctcgcgctcccg

SEQ ID NO: 48104 - DNA, 538 bp, Homo Sapiens
aaatgaactaatgttttctctcccctccctaccccttccttatgaacaatgctttaggtatattgaaatctttaagagcagtagagctgaagttagaactcattatgatccaccacgaaagcttatggccatgcagcggccaggtccttatgacagacctggggctggtagagggtataacagcattggcagaggagctggctttgtgaggatgaggcgtggtgcttatggtggaggctatggaggctatgatgattacaatggctataatgatggctatggatttgggtcagatagatttggaagaggtaaggtaagaattgaatttctcagttgaaggatgcttacactcttgtccatctagacctcaattactgtttttcaggaatgtctgatcacagatacggggatggtggctctactttccagagcacaacaggacactgtgtacacatgcggggattaccttacagagctactgagaatgacatttataattttttttcaccgctcaaccctgtgagagtacacattgaaa

SEQ ID NO: 48105 - DNA, 756 bp, Homo Sapiens
gtttttatatgaaatgttgtaaatgtatacctttttaaaaacttgaagttccaataacttaaagcattgaaatataaaatgaggtaaaaggtgttttgaatttagtaaaactgttatttaatgcttaaaacttaattgaattgtataattctcaacattaagttgcatagatatgtgttcttaagttgttgaattcttaatgcatcctgtgttcagcaagttttttttaatatatactgtaccatgggtgtgttaagaatagttatactttataataatggaacttcatattattgcaatgcatatttaaagagtacttgttgaaagcataccattcacctaaagttaaaaattctggtttatttaaagctataagaagaatcatttctgggcttgtgatgttaatattgcccccctactggggttatttgtccttgggttgaagggttggaaatcgtgccaaatgggataacattgccggtggacttccaggggaggagtacgggggaggccttcgtgcagtttgcttcacaggaaatagctgaaaaggctctaaagaaacacaaggaaagaatagggcacaggtggggatggatgggttggttgggatatgtcacttttcttatggtaaacaattaaatccatattctctctgcttaaaagaagaaattaatgttttgtagtcctaggtaattgatgttttgccatgatttccaaacttgtgtcagtcccacgttacacgcaaactaaatttta

SEQ ID NO: 48106 - DNA, 660 bp, Homo Sapiens
gtctgagaatgagtaagaagaggaagactaggtgaaacaataactcagtatagagtgaatgtctataacttagagtactagagaaggaagcaccaattcaatggaagagaacagtctcaagagaccgaactacatctgagaatttagtatacaataaaggttggatttcagatcaatagggataatactggcatttcccaataaatgatgttgagataatcagcagctgtttggaaagaaagaaaactgaggctcttcctcactgtttctaccaaaatcaatgtatatgtactttaccagtatatatacagacttctttctagtatgaaatataaactgttaatagtggttacttttaaggagagagactaaggttgggttgggggaagagaaagaaatcggtattattttatccttctatactgtgtgctttttttattattttcatgtatttcatttcttcaaaatgtaagaaatgttaaaaatgtatgtgcaaaacaatacaggccactgtactgtgatataatcagatttacattctgacaatgtagatttttttaaatcatgcattaaaacaaatcctgtttcttttattggcaaaaaaaaaaaaaaaaaaaaaaaaaaaaattttgggggggagggctgaaaaagttttaaaaa

SEQ ID NO: 48107 - DNA, 613 bp, Homo Sapiens
tcaccacctccttgcgcttcccgggccagctcaacgctgacctgcgcaagctggccgtcaacatggtgcccttcccgcgcctgcacttcttcatgcccggcttcgcccccctcacagcccggggcagccagcagtaccgggccctgaccgtgcccgagctcacccagcagatgttcgatgccaagaacatgatggccgcctgcgacccgcgccacggccgctacctgacggtggccaccgtgttccggggccgcatgtccatgaaggaggtggacgagcagatgctggccatccagagcaagaacagcagctacttcgtggagtggatccccaacaacgtgaaggtggccgtgtgtgacatcccgccccgcggcctcaagatgtcctccaccttcatcgggaacagcacggccatccaggagctgttcaagcgcatctccgagcagttcacggccatgttccggcgcaaggccttcctgcactggtacacgggcgagggcatggacgagatggagttcaccgaggccgagagcaacatgaacgacctggtgtccgagtaccagcagtaccaggacgccacggccgaggaagagggcgagatgtacgaagacga

SEQ ID NO: 48108 - DNA, 702 bp, Homo Sapiens
gacagataaagatgtatgatttctaaggctttaaaaattattcataaaacagtgggcaatagataaaggaaattctggagaaaatgaaggtatttaaagggtagtttcaaagctatatatattttgaaggatatattctttatgaacaaatatattgtaaaaatttatactaaggtcatctggtaactgtgggattaatatggtcgaaaacaaatgttatggagaagctgtcccaagcaaactaaattacctgtacttttttcccatttcaagggaagaggcaaccacatgaagcaatacttcttacacatgcctaagaacgttcattgaaaaaataaatttttaaaaggcatgtgtttcctatgccaccaatacttttgaaaaattgtgaaccttacccaaaaccatttatcatgtccattaagtatatttgggtatataattaggaagatatttacatgttccatctccacagtggaaaaacttattgaggctaccaaagtgtgccaagaaatgtaagtccttagagtaattagaaatgctgttttcctcaaaagcatgagaaactagcatttttcatttcttatttactccctttctatatcaatgcaattcacaacccaattttaatacatccctatatctcaagcatttctatcttgtacttttttcagaaaataaacccaaaaataatcctttggt

SEQ ID NO: 48109 - DNA, 605 bp, Homo Sapiens
  misc_feature (577)..(577): n is a, c, g, or t
acctctctcccctgcgtcgccacctctgtaattgatgtacataccgcaaaccgtgtgtgaacctgtcaactctctgtcgtctttggagcgatacagttgtgttgttaatctggtttattatttttcttcagtgtttggtttttctttttctttttgtttggttcgtcggtttgtttttgtttttgtttttttccccctttctcctcccctcctcctttttatgaaacttgaaaacttgaaggactgctgtgtatttgtaaataacaaaactattgtgcactctgtgcttgtaaatgtccctcgtccaaaccgctactcctggagcccgtctggcagaggatgtggtctgtttttgatgtcccccctcccgcccccctggtgtgaacgtgtgggaccagaccctgtcctgggggtgcgcccaagtcactttaaccacaaaacgccatcgtcgtcagggtaagctctgctctctacaaagactcgcgagccgggccaaggggccttgtcttggctgggtttgtcagaggtcaaaccggctcttttaaacggcctaccagtttttaaattgcattgccgnttctttctttatgaaaaaaaaaaaaaaa

SEQ ID NO: 48110 - DNA, 754 bp, Homo Sapiens
gcctctccctttgtgttctatacattgtgaatcttcccgtctgaagaacgcccagcctgcccagacaaagccccgccttccccaaagcagaggggctgtctgtgtctccagaaaggggacatcgggggggaggggggctcagaaaggagaagggctgtgatctccggtcccttcccccatcatccttccttagactgatgctttgactgaatcatcactagctatggcattaaaaggcctctcttctcatctggtgccaaaggttccgttgcagctttttacaaccatccggtgtggtttggaggatttgttttttttttttcccaacagaaaagaacagccattagaagaaggctcccattttctgatgttccgccccactgtgaagagtgtgctcgttttaaattcatgttgattcttgtaagcactggactgtcttcatcaagtatttccctacagaactcctcaagaaaacagagatcatttggctagagattgtctgagtgactccaagctactcactgtattggacgggagtagtaatttattttaaagataaagtgactaagtggggaaatttataaagctaaatattatatattttatttttcatacatgtttgaagtgcaaatctgtggatattccatttgtaggaccaagtcgacatgcccatcctgacattgtatgctacgagaactcttctgatgatggaatttcgattaaagtgcactgaaagatgaaaaaaaaaaaaaaa

SEQ ID NO: 48111 - DNA, 624 bp, Homo Sapiens
ttttcttctgggaaatgcaatgcaggtgaacttgtaagtgttgaatcctccctctcctcactgttcaatcagactgaggcctacttcctttctgataagaaatatggaactgccattgctcagtaggaaaatgtcctttctacaagcattcatatttcaataaaaatctgcactttgtgagttgagccccctcaaagagacctacagaccctgccatgagcatctccatccacactcatcatttcccattttcaccacttctgctcctgtgcaaaccagtactatccttttctgggggatcctaggcagaagcgatgtcaggacaaaggcagagaaggcactgccaggtcctgcatgccagtaaaactactcatgtcagctgttctgcaggatcccatgagaaggtgagtcaccagaaaatgcagtttccacatcctgatgatttcatctccctaccccaactgatcaatttctccaattttccagcctctcaccctccacaatccccttaaaaactgtagcccagaactctctggaatgatgaatttgaaggtttgctcctgtctcctcactcagaagcctgtaatcattaaactctttctctgatgcaaaaaaaaaaaaaaa

SEQ ID NO: 48112 - DNA, 595 bp, Homo Sapiens
ttgattttcttctttcttctgggaaatgcaatgcaggtgaacttgtaagtgttgaatcctccctctcctcactgttcaatcagactgaggcctacttcctttctgataagaaatatggaactgccattgctcagtaggaaaatgtcctttctacaagcattcatatttcaataaaaatctgcactttgtgagttgagccccctcaaagagacctacagaccctgccatgagcatctccatccacactcatcatttcccattttcaccacttctgctcctgtgcaaaccagtactatccttttctgggggatcctaggcagaagcgatggcaggacaaaggcagagaaggcactgccaggtcctgcatgccagtaaaactactcatgtcagctgttctgcaggatcccatgagaaggtgagtcaccagaaaatgcagtttccacatcctgatgatttcatctccctaccccaactgatcaatttctccaatttttcagcctctcaccctccacaatcccccttaaaactgtagcccagaactctctgggatgatgaatttggaggttttgctcctgtcttctcactcagaaaccca

SEQ ID NO: 48113 - DNA, 735 bp, Homo Sapiens
acgagaaccagaagatacgaaaagtgcagattctgatckagatgtttttaatgagaaaccttctaaagaagaagtcatggcagctactcaagctgaaggacctaaacgagtttcggacagtgccattatccacaccagcatgggagacattcacaccaaactttttcctgttgagtgccctaagacagtggaaaacttctgtgttcacagcagaaatggttattataatgggcatacatttcaccgtataattaagggctttatgattcagactggagatccaacaggtactggtatgggaggagaaagcatatggggaggagaatttgaagatgaatttcattcaacattacgacatgacaggccgtacacactcagcatggctaacgcgggatcaaatactaatggatcccagtttttcataacggtagtaccaacgccttggcttgataataagcatacagtatttggacgagtgactaaaggaatggaagttgtacagaggatctccaacgtcaaagtcaatcccaaaacagataagccctatgaggatgtcagcatcataaatattactgtcaagtaaaataagatttgttttaatgtacttgcaaataaaaatacaatattaaacagattattttacattaggaagcttaggacttgctgaatatacagatcatgtttcaaagatacagtatttttgtattttttattaaaggctattttttaaaatta

SEQ ID NO: 48114 - DNA, 710 bp, Homo Sapiens
ccacctttaaattcctgcaatttatgctgcaaccaacatcttagtgtttgctctctccgggaagaggccaggtgggggagaacatacggtccagagcctgagatcgcctggctggggtgcaggcaagcaggaacccagtctagatagaatgcagtgttctctaaagctatggatggtttcagtgaaatgtctgtgtctgacaatcgtcacgcaagagtacttactgtcttcccttgtacatacattgtctgtatttagcttttcctagtattgtgaggtttcaaataggggttccatgtaaatactctttctgctactgaaatgccggcccccttgagtatgcatcacccccacagatggttttgcctttctctatgctaacactttttgagccactgacgtgcagatcggtggttagtttcttgggcttttattttgcaattttatatatatacacatattatatatatatatatatttatgggttggttttgtatagttttctgtttgaatctctgagcaccaaagctgccctttgattttcacgagaactttccaaagccacttcctgagccctcctgctgctttggtgtctgacggtgatgctgcggtggcatctctgcccgtgaatttctgtatgtgtgtgctgttacctcacctgcagacatgaccctagtaaatctaacgtgcttggcaaaaaaaaaaaaaaa

SEQ ID NO: 48115 - DNA, 755 bp, Homo Sapiens
gttggttgtttgcttactgtcagtcctgggtcaatcaaaggttgtaagggtgagaatttttatgcactgctatatcgcaagtgcttaaaacagagactggcccagatgaggcattcttcaaatgtttgttgaaatgaatggacaaactcttaggataaatcctaatttgtggcaactgttatttgattttagaaggcaaactgattttattttagagaggggaaggggaggggaggctcattagcctcttggtagaaagaggactatttctgcaaatgaataggtttccaccttaagtagtgacagtccttaacttcttattatggagtgagtcttgaccgctttccaagttcaatagaagttcaagattgcctctcagtgattagggaaattgaagcttttaaagctcctggtctcagtaattcctcagaataaacctctttaaaagggatattgatggaaatgtacaatttaccagtaattgaggttttatctgaggggatggagatgatgaaatggttccttcttggaaggttgttggcattttggctttattttttcaccaaataaagtgaaaaccattttaaaacgattgacaacgattatttagtgccatgtggaactacacatagatattaattggtgggtgggttttctgcctgctttaacggacatgtttctggtcgtggggtccttttttagctgtaaaaatcttcggacctaaaagcatgcaattaatcagcgttggctcaatc

SEQ ID NO: 48116 - DNA, 270 bp, Homo Sapiens
tcctctggggctctacctctccacacttccccagaagggaaaagggcaccctggattactctttggaaatcactccttggtgggcagcatcctgaggcttccccagaaccaggcctctgctctggccctcttgcatctggaacgccaggtgggtttttctggcataggagcccacttgcattttcatagttttatttgataaaattccatcttacattctgtgtattaaaaaaataatatttctggaaaaaaaaaaaaaaaaaaaaaaaa

SEQ ID NO: 48117 - DNA, 700 bp, Homo Sapiens
  misc_feature (2)..(2): n is a, c, g, or t
  misc_feature (4)..(4): n is a, c, g, or t
  misc_feature (6)..(6): n is a, c, g, or t
  misc_feature (12)..(15): n is a, c, g, or t
  misc_feature (47)..(47): n is a, c, g, or t
  misc_feature (620)..(620): n is a, c, g, or t
  misc_feature (647)..(647): n is a, c, g, or t
gngntntgtctnnnnggattccctttgactgttgcccctactggttnttctttttagacatcagaaatgttaaagttgattcccaatatttgttgtacttttttgtagcaaacgttaaaaatcacgagttaccatgtatagaatgtggactgtcatgttgatatcattgtacagtgataagccatttttatctgtatacatttcaccaatttattaacaggttgaatatttgtttctttttagaacattttatttatactgtgaagactttgttataccttatttgctacaacatagatcatatcattgctactttgacttagcatttgcatcataaacataattatgatgtttttttcatgctcccttccaggggctcagtcacttgaagaaactgttgctaaccaagctcttgactctgtttcccttaatgatacaagtctctgtaccagcgctttatgttaattaccaaaactctcctgcatcagagcatgatatctataataggagatctgcaataaaatgattaggctgtaaaatttggagacacaatttttcattacaatgcaatttgcatgtgcacatgtgcgcacataactttatatggtagttcttttttncaaactcccaactcttaaaagtattgnagtctggtgggtgcctcaactggtggtaactttttttttttaaaattacaact

SEQ ID NO: 48118 - DNA, 528 bp, Homo Sapiens
aagttacaaggaaatggaactagagaaacctcacaaagggataaaggaggtaattaaaggttaaagccagatagcctcgagctcaaaggagaaatattggaggccagataggaaagtgccttcctactcagggggttatggatccagggtggctaaagaatagaagtagagttccacccagggccagagggaacaatctgggattcagacacagcagtggtgccaacgtgaatctacctcgtgctagagtctgagtagcctagtctatcacccaacacagataagactggacaggggctcccaggaaccaacatctaagaagggagtttggagaggggctaaaagaaagcaggttaagccccaaatgtaactgaatgatgaccagggataactatttactagtgcttttatgatttattgtaactctgtaactttcccagtatttgttaattttttaacttctgtttctcctgtacttacgagcagtaaaagttgttcaaaacaaaaaaaaaaaaaaaaaaaacgcgg

SEQ ID NO: 48119 - DNA, 635 bp, Homo Sapiens
  misc_feature (538)..(538): n is a, c, g, or t
  misc_feature (616)..(616): n is a, c, g, or t
cggaacgaggggcccatgggccttatttggtgaaccctgttctatgagatcacctaggcttcagccttaaacagtggaagccatcccctgaatgacaagtcacaagggtatcaaagaaagacccctgaattttcatggaaaaagctattcagacccctgcttggaaagctaaggcacactgccacgaagcagcaaggacgccttacaagtctcagtgcaacagagatggacacctgggctgggctggacaatgtttaaggttccttttagtccatgactcaagtgatactgttttaggctatcaggtagtaaacacgatcttagacatccccatctttgtaagcagaacagtacggcacttcaccacatctgcttcccaccatgcttctaagcagctgtcttccccctgctaatgttacaaccaaagcagccaccccacctcctctcgtgttgagcctcacgaccgctgacccagctggaaagccagcgccctgccgcgtcaccctgactctgctcagagccagcattccagccacanagagggcctccttcctttcctctttcataaaaatgttttttgaagagttagagtatattttaggctttttatctttantaaaatttcatgtgcatga

SEQ ID NO: 48120 - DNA, 802 bp, Homo Sapiens
aagcctttctcacccagaaagccaaggtcggcgaactcaaagacgatgacttcgaaaggatctcagagctgggcgcgggcaacggcggggtggtcaccaaagtccagcacagaccctcgggcctcatcatggccaggaagctgatccaccttgagatcaagccggccatccggaaccagatcatccgcgagctgcaggtcctgcacgaatgcaactcgccgtacatcgtgggcttctacggggccttctacagtgacggggagatcagcatttgcatggaacacatggacggcggctccctggaccaggtgctgaaagaggccaagaggattcccgaggagatcctggggaaagtcagcatcgcggttctccggggcttggcgtacctccgagagaagcaccagatcatgcaccgagatgtgaagccctccaacatcctcgtgaactctagaggggagatcaagctgtgtgacttcggggtgagcggccagctcatagactccatggccaactccttcgtgggcacgcgctcctacatggctccggagcggttgcagggcacacattactcggtgcagtcggacatctggagcatgggcctgtccctggtggagctggccgtcggaaggtaccccatccccccgcccgacgccaaagagctggaggccatctttggccggcccgtggtcgacggggaagaaggagagcctcacagcatctcgcctcggccgaggccccccgggcgccccgtcagcggtcacgggatggatagccggcctgccatggccatctttgaactcct

SEQ ID NO: 48121 - DNA, 578 bp, Homo Sapiens
tgcacgaaacataccggtaagtggggcaagactgttatcgagtaccggtcacagaagacctcacgcctccccatcattgacattgcacccatggacataggagggcccgagcaggaattcggtgtggacatagggccggtctgcttcttgtaaaaacctgaacccagaaacaacacaatccgttgcaaacccaaaggacccaagtactttccaatctcagtcactctaggactctgcactgaatggctgacctgacctgatgtccattcatcccaccctctcacagttcggacttttctcccctctctttctaagagacctgaactgggcagactgcaaaataaaatctcggtgttctatttatttattgtcttcctgtaagaccttcgggtcaaggcagaggcaggaaactaactggtgtgagtcaaatgccccctgagtgactgcccccagcccaggccagaagacctcccttcaggtgccgggcgcaggaactgtgtgtgtcctacacaatggtgctattctgtgtcaaacacctctgtattttttaaaacatcaattgatattaaaaaaaaaaa

SEQ ID NO: 48122 - DNA, 700 bp, Homo Sapiens
  misc_feature (573)..(573): n is a, c, g, or t
  misc_feature (582)..(582): n is a, c, g, or t
  misc_feature (622)..(622): n is a, c, g, or t
  misc_feature (653)..(653): n is a, c, g, or t
  misc_feature (683)..(683): n is a, c, g, or t
  misc_feature (691)..(691): n is a, c, g, or t
ttaaaactcagagaactccaataataatggtttaaaaacatcaggggcttcctgtatctcctgtcaggaagccgaggaataagcaggctggggctggtgggcgtcaacatcccagttttgttctatctttctgtcccacctgcactgggatgtggcttctacactcgaatttgcttcttggtttcaagacagtggtttctttccatagctgagcagattattttgagaggtgggtgatatgtgagagagaaatctggaaccttcttctgggtagatacaggataagatagatacagggtaaaatgttgagcactttgtacatgctttgagagcataatctttgtcatctgtttttttcccctagacaatatcaggttaccgtcaacattaatccatttaaaaggacatggactgttgccattaatacttttggattccatataacccttaacacaataacttctagaaaatgtgtgtgccgtagacacaaagaagggaacaatagacaccagggtatacttgagggtggagggtggcaggagggtgaagattgaaaagctgcctattgcgtgntatgctggnttcctgggtgacaaaattacctgtacaccacaccccctgngacacacaacttactcatgtaacaaacctgngcatgtaccccttgaacctgaaataaaaantggaaagnaaaaaaaaa

SEQ ID NO: 48123 - DNA, 631 bp, Homo Sapiens
ggtttgctgctggttttaggggccaaagtaaatgggtggattctggaacctcaggcctagactaggttgcctttgtgggggcgatgaagcagagtcccctggtcaagtctctcggctcctttaatgtaggattgagagctgggcaaacaggtcccactggggactgtgactcttggagattaaaggacagggcattgatggaaggtaagggccaggagaagaggcctttctgctgtgtcccctcacggccttgccctcgaattctgcaggccctgggctcccctgacacctgtcatatttatggaccagacactggggcagcatcaggcacagtctgtctgggtgcaacttcttcagctgtctggccgcaccttaaaaactatttattcaccaaaagccccaggcatttcagaaggtggcactcaggtcaccctgaaaagcccccagggcttgcaattctggaaaatattttgactagctgcttggctggatgtacaaagaaataggcattattttattgctgtaatattgtatgatactttaactgtacaataatgttgtcacttactgtaaatgtactatggttttattaacaataaacactcattaacaatgaaaaaaaaaaaaaaaa

SEQ ID NO: 48124 - DNA, 913 bp, Homo Sapiens
  misc_feature (593)..(593): n is a, c, g, or t
  misc_feature (608)..(608): n is a, c, g, or t
gggccgcgccgcctccgtccgcccctcccccggggcttcgccccggacctgccccccgcccgtttgccagcgctcaggcaggagctctggactgggcgcgccgccgccctggagtgagggaagcccagtggaagggggtcccgggagccggctgcgatggacgccgtcttggaacccttcccggccgacaggctgttccccggatccagcttcctggacttgggggatctgaacgagtcggacttcctcaacaatgcgcactttcctgagcacctggaccactttacggagaacatggaggacttctccaatgacctgttcagcagcttctttgatgaccctgtgctggatgagaagagccctctattggacatggaactggactcccctacgccaggcatccaggcggagcacagctactccctgagcggcgactcagcgccccagagcccccttgtgcccatcaagatggaggacaccacccaagatgcagagcatggagcatgggcgctgggacacaaactgtgctccatcatggtgaagcaggagcagagcccggagctgcccgtggaccctctggctgccccctcggncatggctgccgcggncgccatggccaccaccccgctgctgggcctcagccccttggtcaggctgcccatcccccaccaggccccgggagagatgattcaactgcccacggattcaagccaaaccctctggaagcggaacccagttcctccaagtgacacccggaggaactggtgccagatgcctccgacgcccccccatagaccatgggcagggacagcgaacgggttcccagaagtcccccgctttctttgccccccctacgggccctgttcaagggccatggggggcgcttcctccagggccaatctcccaccctccc

SEQ ID NO: 48125 - DNA, 692 bp, Homo Sapiens
  misc_feature (684)..(684): n is a, c, g, or t
attaagtcattgctaatgttttaagccataatacagacagccttatactctatgatgggagaagggaaagtagtttgtccgatggtgctactctgtataaacattactgatgctatctatagtagggcaagaaaagtaaaaagagttttgattattcaggcagcatttttaaaaacctgtgaatttgtatcagttctcatctaaacatttggacacaagtataaaatgaaaacatatgcacaagttatggtttttaagttatctgctcttttttttggtttcactgtacctttgtactcttctattagtgggaataatcagacatgaactgtgacttcacatgtacagtcatacctcacttaatgatggagatgcactctgagaaatgtctaattaggttatttcatcgttgtgggaacatcatagagtgtacttacacaaacctagatagtgtagcctgctacacatgtaggacatgtatatagcctattgctcctaggctacagcatgttgctgttctgaatcatgtaggcaattgtaacacaatggcaagtgtctgtttattcaaacatctaaacacagaaaagatactacaacaataacaatatggtataaaagattttgtaaaaaatctggtcaggtgcagtggttcacgcctgtaatcctagcactttgggaggctgnctcagcag

SEQ ID NO: 48126 - DNA, 985 bp, Homo Sapiens
atgataaattgacccctttttataaatggagggaaaaaatgaacagatttcagagattaaatgaaaaaaagcagatgttttaagtgcaattaacactgaaagagacctgttaaaccattcagaaaaagcttaagaaatgcgatatgacttccttttgtaatgctgctgatcccagtagactatgacttttgataattagcagaatttaactactgagtagttgattattttcacattttaattgctaatcactggctatataagtgtttttaagcaaaggtatttttgaagtggtgtagaacccttccaagctttcctgctcagtgttctaccagacttaccctggggcctggcttaaaagcaggattgaagaaaagggactgggggaaggaaacttattggaaaacttgatgcgaatgagtttctgcttggcacagtctctgcctgcttgctctcctttgctgatggattgcatttatcaaactattcatgctagcatttttccaacgagggaacttattccgcacgggcctactgtaggaccattgtctcgtgtaattaggaattttccatttgaaggattgctaaattgtcacagtagtaggaagtatagggaaacctctcagctgtggcactgttgtagctttggagtgcagagtgtaactctggggacaatcagatttcacatattctgtcatcttggcataagccattaaaagcttggagattactgtatttggcattaaaaaaaatgtcacttaggtcagcactcccagacgtagcacagaaaaacccttttgacacaaaccatgtgttctgatttttggttcaraaatattgaaactgtgagttgttttttttttaacaactgggaaaaaaaaaaaaaaaaatatagttagaaaatgggaagtccmtaggtctatttcttmyctatgttkggtttgtttyakttwattytagrgcttctctgawcgctaatgtcctt

SEQ ID NO: 48127 - DNA, 652 bp, Homo Sapiens
  misc_feature (582)..(582): n is a, c, g, or t
cgtgagtctggagaaacagctacggccatcccagccctggccaaggggaaaatgccggaagactccagggtgggaggaagcgcgtcccaaggcccaggatctgcgaggcgacttggggaaaacgcaggatccacctctgatgttcagtgaagactaccagaaaagtctgctagagcagtaccatctgggtctggatcaaaaactcagaaaatacgtggttggagagctcatctggaattttgccgatttcatgactaaccagtgtcagcccaagactaccccgtcggtcattctgttcctgccgtcctgtgaggagccccaagccaacaaggccacactggtgtgtctcatgaataactttatccgggaatcttgatggtgacctggaaggcagatggtaccctcatcacccagagcgtggagaagaccacgccctccaaacagagcaacagcaagtacatggccagcagctacctgagcctgacgcccgagcagtggaggtcccgcagaagctacagctgccaggttatgcaagaagggagcaccgtggagaagtcagtggcccctgcagaatgttcatangttccagcccccaccccacccacaggggcctggagctgcaggatcccaggggaggggtctctctctgcat

SEQ ID NO: 48128 - DNA, 504 bp, Homo Sapiens
cggccgccaactttttttttctcattaattataaataaatttttgttaagtatagtatttaaaagtaagtttaaaggttcaatttgaactgaaatttccccagagagctttgaattcccataagtgattacagcttttactcccgacttgtttttagtaaatgttaataagacaattggtttacaaacacatataaattaaaaaaaacaactgtccatcgttttaggaagaactgaaggaactaaaaatgatatttgcttggaaattaagttagttgaactctttgaaccacagtagaaaccgctttgtgtggcctgtgagattataagctttttgtttcagctttgaagatgaaaagtgatttaatctcttaatctcatgctttgattgaattttagctctgttccttaaaatatgcaaaaggaaatgtaagtgcatttctagtcacctcatgccactacaagctatttatttaaaagtgaaactttttgtatattattgtga

SEQ ID NO: 48129 - DNA, 696 bp, Homo Sapiens
  misc_feature (677)..(677): n is a, c, g, or t
cccagaggtgatgcctgaggaggaggatcagcagcaagtcattgaaggttggcatgattccagctcccaagagagtgtgtctcatccaggagccaaaagtccatgaaccagttcgaattgcctatgacaggcctcggggtcgtcccatgtccaaaaagaagaaacccaaggacttggacttcgcccagcagaagctgaccgataagaacctgggcttccagatgctgcagaagatgggctggaaggagggccatggcctgggctccctcggaaagggcatcagggagccggtcagcgtgggaaccccctcggaaggggaagggttgggtgctgacgggcaggagcacaaagaagacacattcgatgtgttccgacagaggatgatgcagatgtacagacacaagcgggccaacaaatagttccagggtcacccccgagaggacaacaggcatctggaagtgctctctcgccactctgggtgctttactgtctctggcttgtttccatcactggaaatcacttagagaattgtagtttttttggtccttgataaagcctagaaaacatttgtgatgttacaaaatggaagttttcttttgtttctgttttttaagatctaagaagttgtgaatgttgttaatcatttagccgttgcaataaatgtagaggaaatgcanaaaaaaaaaaaaaaaatgg

SEQ ID NO: 48130 - DNA, 615 bp, Homo Sapiens
agaaaatggagttggcacacagtggatcactttgatatttttaatagtccaagtctggattttatttattcctgagccaacaattttgaacagcatattttccatgtttctgactgtaacaaaacattttcctcattgttccattgtaaatattcctcttgttggaactctttttaatcctgagatttaaacctgtacctttcaattgtctgtgacctttcaatttcactttcaatagttgaagaacttggctttgtaaatctctcagaagcttgaaaatatcttgtctctaccccctcagcccatttcatttgccaataattattttgtaagtagggttgaaatgaactcagctggccttgtgaaatgtttaaacttgcacaaacaactacatttttgttcaacaaatagcagtttactcagccaaaatcactttggatattgccattacaaatactgttaaacttcagaaatcatgtctgtaaattagatgagccataataaaggacaattgggttgatgcttgaaaaaaaaaaaataaaaactcgagggggggccccggacccaatttcgcccctaatgtgagtcgtattacaattcactggcccgtcgttt

SEQ ID NO: 48131 - DNA, 603 bp, Homo Sapiens
gtagtgagaataatacggaattacttggtttgaagtagttaaaaattggatatggttatatctgagctgtagtcatattatctcaagaaaaataatacgaggatttaacataagatttgttctattaatgcccaaatttggctttcctctactatcccccatagagaaccactaacaagtggatgtctaatattcctctggtgagttgaaggcaggagaagttgagaatcattagtttcaatgagtatccaggtgacctatcctggccctctactcagaaaccggcaatttgtcttcactctgagattcattaaattgctgttgtataactgatggttattatgaacactgacctgtgagacatatggaagataaggtttggtcttacaggaaatcttgaggagagtcaaaagagaaatgggagatgtctcttgagaggtgatcagagaagtttatgctcactgtctgatgcaaatgtctggtctatttgttagtaaataacagggaaatcattttcactttttgttaaatataaggtatttacaagcataccttgtagttattgtgggttcagtttcagaccactgcaataaagtgaatatc

SEQ ID NO: 48132 - DNA, 653 bp, Homo Sapiens
ggagacaatttgtaactttgtaatttttttatatcatgttgtgatttccataaatatgtgcagttactcttgataatacttgtcttattcatttcaggttgctataacaaagtaccatagactgggtggcttataaacgacagaaatttatttcttacagctctggagctggaagtctgagatcagattaccagcatggttgggttctggtgagagccgtcttggttgcagactgccatcttcttgtatcctcacatggccaaaagaggacaagagaactctctggagtctgtttgataagagcatgaatcccattacatcttcacatggctcctcccaaagaccccacctcctaatatcatcacatgtcatcacatagggggttagaatttcaacatagaaattttgggagaacacaaacattcagtcagttgcaatacttaaggcaaattcatcttgcttataactctggtgcatgtgcattaaaatactattgcattgtaactgagtttgtacctattttctgctttctgattatttcctttgttcatgaaaataaatgactggtattacaaggtcacctaaataaataggtttgtgtacgtctgcgactagagagaaatactacagtgattaaaaaaaaaaaaaaaaaa

SEQ ID NO: 48133 - DNA, 743 bp, Homo Sapiens
  misc_feature (669)..(669): n is a, c, g, or t
gcggcctacagattgaccttattatttttgaaaatatgttaagggttttttcatagagagagaaagaatggatttttttttaactgggaacctcctgattcttacggaaaattatccttctataagaagataccagagagatttattcaaggtaatttgataacctaaaatcaattctccattttttatcatatgtgggatttgttgctaagtcgtgttcaacaatagcttttatgttcctaacatatctgaaagcttatttatgaatggatatactggattattgatatactgattttttttttaatggggacatttgccattttcttcccagaaatatgtaatcccctggctgactaggactgttaaacatagtgtggactggatgatgccttcgacaaaccagagaagccaagttggggggagctggtgcctggagtgggccctgtgcacctcacctggcggaggctgggggggctctgtcagcaggaccctagaggagactctcattcgattttaaagaagcacaacgggtcattttcctttgtatgttcctagcgcagaactgtttctaaaacaacttgaagtatagttttgttatctaagcaatttttgttttaagtaagtacgtgtactagaatgcgaagccgttatggttcaggtttttancaactggtacagtattgtatctgtctcatctgttgcactgtatttcaatcatctgtaattaaaatgatcatatg

SEQ ID NO: 48134 - DNA, 871 bp, Homo Sapiens
gtgcggatagcttgaggaaggaacactacaaggcctgttagagaagaaagggtagaatcccggagaatgttttccccacagtgctgataaggagagaccactatcccatctactgctacagctctggagacagagctctcccacctgtcatatagaacacaaggaccaatctgcagagaaagagcatccaaacctgatccagtggacactggggaaaaactcaccacagctgagtgtggaaaaacaaggccaacacacacatctctgcacagatacatctcccataaagaaactaaagtgttaatttacagggcactgttgcagacccacttcagctggaagctaggaacatggacaaggagcctctctaccaccaagggagagagaggaatgtgctcttgtcctggcattgcatccacaggaggggcaggaaattctttgaaggtcagtaaccccataccccaattaacagtgcttaagtgtgaggctccctcagaacatcagagatatcctcactccctcacccctgccaccaggctaagaagcatggagcaaaaaaaaaaaaaaaaaaaaaagacagaacaaaaacgcggggaaaaacgccggggccacaaggcgccgagaacaccccaaggtatctaaggacaagggagacgtggaaaacaaagtcacgcgggggaaacagaagatagagcccccaggttaggccccggggccggagaacgggacgccagggcaaagaaacagaagcagcgcaacagcgaaacacggaaacctcacagagagaacaaagacaaaaataccacggcacacaagaaccccgagaaacaggagggggaaatcaagagaggaccacacacacaaggccaag

SEQ ID NO: 48135 - DNA, 813 bp, Homo Sapiens
ccagaaggaaagggcagtgcaggggaggcctgagcccgacttagccagccctggctgttgtattaccaaagcagggtccatgtttgctgccttaaccctgtctcctctctgttactcagagggcctcatctcagacaaggcccagcctgctttttctcagccctgactttctaatgggctttcccccctaggtcagtcttgctggatttgtgcttttcttttgtggtttctctggccctgagaatagcatggggcttgtaaacctttgggctagatccctcctttcattgctgttgtctctgctcttccctctcctggctgtggttatttattattagtggtgtggcactgggagctgctcctaaggaagcagggagcaaatcccacctttaccccaccttcctgggaaaggcctccaaagcaaaggatctggaccagtttccctgctgtgctgtggcccaggccagagcctgtgggcaggcaggcagggcatagcgacagtgtgggacctgcccccagcttctgccacgctttatgcccttgcctctctggacgctctgcaccaaccccaggctactgagccaccttccctcctcatgccttccctgagctttggtgcatctcatctggactatgggttgtactgtgaccatcccaacacctcaccctctgtctacaaggaaatgggaggtggagcctcctggctgagaaattgttttgcaaatggatctatttttgtatgaaaaaaaaaatttttttaaagaaaactgttccttccccctttcccctccataatgtaagaagctttggtgg

SEQ ID NO: 48136 - DNA, 683 bp, Homo Sapiens
  misc_feature (583)..(587): n is a, c, g, or t
  misc_feature (589)..(589): n is a, c, g, or t
  misc_feature (591)..(591): n is a, c, g, or t
  misc_feature (597)..(597): n is a, c, g, or t
  misc_feature (612)..(612): n is a, c, g, or t
gggacactcgcttctggaacgtctgaggttatcaataagctcctagtccagacgccatgggtcatttcacagaggaggacaaggctactatcacaagcctgtggggcaaggtgaatgtggaagatgctggaggagaaaccctgggaaggctcctggttgtctacccatggacccagaggttctttgacagctttggcaacctgtcctctgcctctgccatcatgggcaaccccaaagtcaaggcacatggcaagaaggtgctgacttccttgggagatgccataaagcacctggatgatctcaagggcacctttgcccagctgagtgaactgcactgtgacaagctgcatgtggatcctgagaacttcaagcttcctgggaaatgtgctggtgaccgttttggcaatccatttcggcaaagaattcacccctgaggtgcaggcttcctggcagaagatggtgactggagtgggcagtgccctgtcctccagataccactgagctcactgcccatgatgcagagcttttcaggataggctttattctgcaagccaatcaaataataaaatctatttctggcccnnnnnananaaacanaaaaaaaaaaaaaanacccccttggcggggccggcccctcggggccccctcaaagaaaagacttttttttaaaaaccaattttcga

SEQ ID NO: 48137 - DNA, 809 bp, Homo Sapiens
  misc_feature (729)..(783): n is a, c, g, or t
  misc_feature (785)..(795): n is a, c, g, or t
tttcccagacagcagggatttatttaaatagctgtattgtttagaatcttaatatggtataaattagcatatgtattcacaatattcattcagacatcattcccagacagcagggatttatttaaatgttagctgtctgagtttttaaatagctaatacgaccgggtacagtggttcatgcctgtaatcccagaacttcgggaggccgagacaggcagatcacgaggtcaacagattgagaccatcctggcaaacatggtgaaaccccatctctagtaaaaatacaaaaattagctgggcgtggcggtgcgcaactgtagtcccagctactcgggaggctgaggcaggagaatctcttgaacctggcaagtgtaggttgcagtgagctgagattgagcaactgtactccagcttggcgacagagcaagaccccctctcaaaaataaataaaataaagtaaaataaatataaataattgtggccgggtgcaatggctcatgcctgtaatcccagcactttgggaggctgagatgggaggatcacttgaagccaggagtttaaaaccagaatgatcaacagagtgagacccctgtctatatatttttttaatttaaaaaataaaagaataaaattgtgtagctcagtatagtatcaagattaatctgcctactcacatttctacactttataaaaatgtaataaaagaaaattatctttctaaaaagcctnnnnnnnnnnnnnnnnnnnnnnnnnnnnnnnnnnnnnnnnnnnnnnnnnnnnnnnannnnnnnnnnnaaagggcgggcccc

SEQ ID NO: 48138 - DNA, 623 bp, Homo Sapiens
ttaggcttagtacgaggctggggttgaatcggccgaggagggagccagcggtccccagttctgtgcttcccgcgcctacgagagcagccgcgcagatgagctgtccgtgcccgcgggggcgcgcgtgcgcgtgttggaaacgtcagaccgcggctggtggctatgcaggtacggcgaccgggcgggcctactccccgcggtgctgctgcggccggaagggctgggcgctctcctgagcgggacggggttccgtggaggagacgacccggcgggtgaggcccggggcttccctgaaccctcccaggccaccgcccctccccccaccgtgcccacccgaccttcgccgggcgccatccagagccgctgctgcaccgtcacacgcagggccctggagcggcgcccacggcgccaggccgccctcgagggtgcgtggactctgtgccgcaccccacgacggagcagtgagcgcgaggatcccgatgaggggatggaccgcgccatcccagggctggggaggagcggggagggcggatctccctggccagcagggatgggagggggccatttgctgttcctctgaggtaaaggctgttctggcatgaacccccaaaaaaaaacaaaaa

SEQ ID NO: 48139 - DNA, 545 bp, Homo Sapiens
tggccgggacctttcacatttccaaactatgtgcataaaatagaataaatgcagtatagaactatgctaaccaaaattaataggttaagggtattttattttaaatcctgtagtaattggggaaatgagaagattattattttatacatgagttcattaagatcagaaatacaaaatgtcctgtattttgcagttttgttaagtcttccattcgttttaggattagtctgcaagtcaaagaaagtcttgttaccttaaattatatgaaaactgtcattttaaatcttttaatatttacagttttcaaaaaccttacttggaaattgctttgaaacaaacaagctaacctttgaaacttaggaaaaaatcttgaaagttaggaaaaatatttgagaaatatgacgagcacaatctgtgtgttacacacatttagtttttatactgcatatgtggtaaatgtgtcacattttccagtaaaatgtatcagaaatcaatgccttctgaatttcaaaatgattcttagaaataagatattgtacaactct

SEQ ID NO: 48140 - DNA, 825 bp, Homo Sapiens
  misc_feature (802)..(805): n is a, c, g, or t
  misc_feature (807)..(825): n is a, c, g, or t
gaaaaagtataagatgctctttccctgaacctcaagggtcccgcccctctcactttcaggtctctggacctctgactgacactgtgcctgcccaggtccctgtatgcactgccacagtgccctgggccccatgtccacccctgtcctgcccttctctgggatagggctggccttcctctgcctctgcctggctgcatccatggtcgatctcaagtgccttggcatgaactccactctcctgcagccttcaatcaaggaatgatggggatgtgtacataccccaccccaccccttggcagggtgatgctgaggtgtggatttttaacagttcccagactttcccaggaggcttgggtttgggtgcccacagtgggagctggtgtgatatcataccttcgccggccgcctttccttcctgttctctgtgcccctactcccactctagagctgccccgtttctctgttttcgtgaaagagctgaccctgtgctgcctcccactctcccaatgcccctgccactcctgtgagcctgctgctggtgaggtcggtgctgacctctgtgttgctggataatgagtcatctatctctggaggagaagaaaggcaggtcctccacagccctgataaaatctccaagtctcccagtttcgggtccctctcctgggatgcagacccactgcctgcccagctggtacgatccacatgccctcttcttgggaataggggcatgggaaagtgactaaagatactgttctggctgctgtgttcactgtgagtaataaactgtccatttctccgaaannnnannnnnnnnnnnnnnnnnnn

SEQ ID NO: 48141 - DNA, 757 bp, Homo Sapiens
atattttaaaacaaaatggaaaaatgtccaatacaatattctctttctggaggcttcctacaagtgaaagcagattttgtcattttatttggcctttgcttgtctttgatatatttctttatgtgtttttcaaatacatactgttgtagatttattgtcttgtatttgcaagtatgccggttgagagaactaaaatggttatagtattgtttatcagaaagaggaagtgtacttaagattattttatttatttagatgaaaggcttctacataaatgcactgaaataaatgctagtaatttcttgtatcccacttctttttttgcttctcatggaaatgtttgtacttttttatcattgtcttttatgaaatataatgttctaaagaaaaaaaaaaaaaaaaaaaaaaaaaaaaaacaaaaaaaaacaaaaaaaaaaaaaaaaaaaaaaaaacaaaaaaaaaacagaacagcacaaaaacaaagcacaacaaaaaaaaaacacacagggggcgacacgacgcagcaaggacacgacgagaaaaaagagcagagggcacgcagcccacaagagagaaacgaagaaggaaaaacagacgagaacagagaaaagagcacgagcaaaaaaaatgggatgagaacacacacgaagaaaaacaaccgggggcgacaaacgagcgagtgaacaaacaacaggagggaaagggagacaagagaggcaccaaaagaaggagagagaagaggaccaaaaaaacgccg

SEQ ID NO: 48142 - DNA, 658 bp, Homo Sapiens
atgaagttccgaaccagtggcatgcattatacttttctctgttttgcatcatttcacttgtttagattataaaagcatgtgggtttttatatatgaactttgctgttgattaagaagcacaatgttaataaatgatgtggtgatcaataaggtttatcttaaagaatgtaaagactttaggtttttgaaagttattttggagaaatgggacttaatctataatagttactatgtatttggtctacattttccaaataatatctttaacttgtacatttgaaaagtgttcagagtggccctcctaccatccttccttccactccagccaactcttcctgctaaactgtattccagtttccaagtttactaattgacttgggcctgttcaaataatacttcacagaaaccaaatgccaaacggaggaaataagtaagccctcccagtttctccaagataaagcttttttttttttgctattaatattaaatataggtctcattcatacagtgtatgagtaggatcatttggacaattgtccacaaagaccaatttttaaaacattttcttgtgttatagttaaatagtctagtaatgttttgtcctttattttcaatatttgataaacattttgatgttcaaaacttagctaatagatgc

SEQ ID NO: 48143 - DNA, 664 bp, Homo Sapiens
cacgaggaagagggacgatctacagcatgtcaaagacagcaggtattttgtgatgaagagttgctaagtgaaaccaagaatacttcatctgattctctaacaaagttcaataaagggaatgtgtttttattggatgccacaaaagaaggaaatgtcggccgcttccttaatcatagttgttgcccaaatctcttggtacagaatgtttttgtagaaacacacaacaggaattttccattggtggcattcttcaccaacaggtatgtgaaagcaagaacagagctaacatgggattatggctatgaagctgggactgtgcctgagaaggaaatcttctgccaatgtggggttaataaatgtagaaaaaaaatattataaatatgtaactaacgcctgtttgtgaaattagcttatcaggctgaaattaaagccatgcaaaagaaggtctaggtccatcaaggaaattcccctccgttttcctttgtcatggggtttatgttttatttcagattttatttgtgtgacttagaaattccaggaacacaattaggatattttcatacacatagggtatcttgttcactgctgtgctactttacatgagtaggatggaagtgtatattttatatgaaataccactgtacaatttataatttatttacaa

SEQ ID NO: 48144 - DNA, 673 bp, Homo Sapiens
  misc_feature (662)..(662): n is a, c, g, or t
cacgaggattaaaagttgttataggtaaaataagttcagataaaatagtggtggtatttaaaataatattgctgaagtgcagattgaaatactttttaaacaactgaagttctgagtttttatagggaatttcatgtaacaagactggtttagaaacgtaaagttgcgcagtcaacataaataaatacagaatgccatgtttcccacttctaagtaaagacagtgggcagcttctgtttctccttctatcaaggcttcaccctatcttaaaggtctgtggtgcctcccacgtgggacctgtctgctggtatgtgttaaacagcagaccggcccttctaccagatcttgatgcctctgattttctcctgcctacaagaaaatacaggcaaggttagtcaggtctggctatatttccactgttgtttcatttaataagatggcatctcctcttgagatatgttcttcttaccttttaagaagatactatttaagaagtgaactattcagtctttgtatactgaatgctttttccctaaaaaatgttaatcaagaatattgaatatttatggcactcttgatgctgcatttgaaagctgaaggaattactttagatagataggaattgctacctttattctggaaaggttttgtttctgcctcanagcattttgaa

SEQ ID NO: 48145 - DNA, 567 bp, Homo Sapiens
tgaataagagggtgagatatttcttaacaacaacaacaacaaaaaaaacaggttgttttgaatgtgatgagccagccaggagatagaatactacctgcccttagggttgggggctgtccccacaagacttgatacttcagaaaccctttttattgacccacaagcagatatttgaattacttcttactttattgctccaggattctggatgggctgcatttactgtgtgaaggataaaaatcattagcctggattctgatttctataaattgccattaaaagctttttttcccctaagaactgaaatgtgctcaccagccaaaacattttaacttgtaaattttgagggcagttaaccaaacctgtgactaatcatatctcctcctaccccccatttccaaggacatttgttactcagatacttgttatactaatacttgaacttgtaccttatggtatttgctatcttttaactagtcatgatattcttatactttagttacacttttggaatttgatacaaggttgagtggggtgtgtgggtgtatgtatgagtgaaacagttct

SEQ ID NO: 48146 - DNA, 958 bp, Homo Sapiens
gttgacaacttatatttttatgagatggagaaaaaagattaagttgatataacaacaaagtggactttttttcttccttatcctgcacgaaatattgcccttgtttcctctactttcctcttggtgttttctctttttttcaaacagaaacaggccaattccattttcttgagcaagaaagcttagtgtgttacttcatcaaggccagctaatactgtgttaaaccgggctgaacaatgagaaaacttgggagatggaggaatggggaaatggcagtgggataggtagggaaggattactcttaattgttttaaaagccataggaaagtcttccttgtacgtggctgtaaatttataagaactattgtgtcacataaaccaacaagaatgaacctttgctgcttcagataatttgatttttccagcaaggaaattaataagttactgattcttcagcatagaaacaactgagaagaattaatgcaatgtttcttcactagaaaacccaacccttcatttcttttcattgctccaaaacccagttttcaactaatggttttctcattaaactaaatgtttagaaaagttgtctagagtttttcttttttcttttacatagtcctcctgatccagtataagactatttagtacacgtgcatttgtatgggtactatcttaaagtaagttgcattgcatgtaggagatacgggtacctgcggcacacaattagctttttcctaaataaggtacagtgaaatggacccacaatctattagccatgttcctaaccttgggggtccagcgttgagacgtggatcctagacttttcccgaaagcgtttacaacattccccacttcacataacaggcaagagccccgtatacctctaacaactcgcattcttcgtcagcaatttctggataccattccagtcccatccgtcctacacaacctacgg

SEQ ID NO: 48147 - DNA, 639 bp, Homo Sapiens
ccgggctttatctactggatgagttccgctgggagatggaacatagcacgtttctctctggcctggtactggctacccttctctcgcaagtgagccccttcaagatacctatagaggaacttgaggacagagtgtttgtgaattgcaataccagcatcacatgggtagagggaacggtgggaacactgctctcagacattacaagactggacctgggaaaacgcatcctggacccacgaggaatatataggtgtaatgggacagatatatacaaggacaaagaatctaccgtgcaagttcattatcgaatgtgccagagctgtgtggagctggatccagccaccgtggctggcatcattgtcactgatgtcattgccactctgctccttgctttgggagtcttctgctttgctggacatgagactggaaggctgtctggggctgccgacacacaagctctgttgaggaatgaccaggtctatcagcccctccgagatcgagatgatgctcagtacagccaccttggaggaaactgggctcggaacaagtgaacctgagactggtggcttctagaagcagccattaccaactgtaccttcccttcttgctcagccaataaatatatcctctttcactcag

SEQ ID NO: 48148 - DNA, 943 bp, Homo Sapiens
tggcccatcaacagacgttgatatgcaactgcatggcatgtgctgttttggttgaaatcaaatacattccgtttgatggacagctgtcagctttctcaaactgtgaagatgacccaaagtttccaactcctttacagtattaccgggactatgaactaaaaggtgggactgaggatgtgtatagagtgagcgtgtgattgtagacagaggggtgaagaaggaggaggaagaggcagagaaggaggagaccagggctgggaaagaaacttctcaagcaatgaagactggactcaggacatttggggactgtgtacaatgagttatggagactcgagggttcatgcagtcagtgttataccaaacccagtgttaggagaaaggacacagcgtaatggagaaaggggaagtagtagaattcagaaacaaaaatgcgcatctctttctttgtttgtcaaatgaaaattttaactggaattgtctgatatttaagagaaacattcaggacctcatcattatgtgggggctttgttctccacagggtcaggtaagagatggccttcttggctgccacaatcagaaatcacgcaggcattttgggtaggcggcctccagttttcctttgagtcgcgaacgctgtgcgtttgtcagaatgaagtatacaagtcaatgtttttccccctttttatataataattatataacttatgcatttatacactacgagttgatctcggccagccaaagacacacgacaaaagagacaatcgatataatgtggccttgaattttaactctgtatgcttaatgtttacaatatgaagttattagttcttagaatgcagaatgtatgtaataaaataagcttggcctagcatggcaaatcagatttatacaggagtctgcatttgcactttttttagtgactaaagttgcttaatgaaaa

SEQ ID NO: 48149 - DNA, 616 bp, Homo Sapiens
  misc_feature (582)..(582): n is a, c, g, or t
  misc_feature (607)..(607): n is a, c, g, or t
aaaaaagtaactttaaaaactcagaaaagccactgaactgtattttgtgaccttatgattagttttatctttcaactgatttttattgttacttttactcaatatcaacagtacttcaatagatatttattagttatgttcaatctaatgacttaaaacagttgaaaaggaggaaaatcaactccagtccacacatacagtcatgttacattaagatgtcatgttgtatgtcacacagtttctagattgatttctcttgtgtataagttataacatcaaaaatgccaaagggtatataaaataagctacaataatattcaacagaacttaacctggaccttatgttgtaataatttattcatattagctgtagtcttctgtatttatattttcagtatttattatgaatgacatggaaattcgtgtatttattgtggctttttattgcagtgtgtatatatatataacaaataagcatttttaagtcttatccttaagtttcttttattagtggcacttgtattatgctgtactttttattacatattgtacaatatcttgtccatttgtttgcagcagagntaaaccggtttctaagttgtaaaanaaaaaaaaa

SEQ ID NO: 48150 - DNA, 675 bp, Homo Sapiens
tctgcagtgtcgtaactaaagttactggcttggtcttatttgcacagtttttgcgtcttgtttgcttcttgcatctgattaactagaatatttctctttcccccttttaatttgtgatgtcacttgaccccatttatgtgtaggagcactacaccattggtttccaatactgcacacataagatacatacttgtgtgcagaaagtatcttcctccaggcttgtaatacccttcacatggaagattaatgagggaaatctttatattctgtataaaaacaaaagcaaatttatatactaaaatcatttgtctaaaaatttaagttgttttcaaataaaaattaaaatgcatttctgatatgcactgattgtgttgcctccagctttttttgctctctatgagtgactacttaagtcacttgttgagagggattatttactaattatatacttctcattcctgtaactccattccctttaaacagtggtgatatcaaatatacttccatccattgaatggggtatttttaacaacaacaaaagtgatatactaaaaaatgtattgcttaaggcttattgaatcattttgaagcactttgtgtatttgaaaactgctttataatctcatttattaaaaaggactttcaaagataaaataccaaaaaaaaaaaaaaaag

SEQ ID NO: 48151 - DNA, 583 bp, Homo Sapiens
atttactgattacatttcttttcccttagggataaagaaatggagaagagctttgaagtagtaagacacaaaaatagaggtagggatgaggtttcaaaaaaccaggcccttaaacttcagctagacaaccaatatgctgtgcttgaaaatcagaaaagcagccactcacaatacaattaaggaatgggctttgctaacccttctgaggtaactagactgcagctaaccaccaccaacagccattcatcatctgatctctgctggatctacagacaccgatgcagaccactcgatttcatgaccggccctattgcactatggaagttaaagtgtcacgactgctctatgcatattgggtttaggggaattttcattgttacataaatgtgtgaactagtttcaacagtgttctttcatatttactctgcaaatacaaaaaaccaaaacctgcagccagtggtcatttcagaatctttttatgttcagatactgagccttcataagggttgactacctcagatttgctgcactcattgtggacttcatgtggatcacaacttctggataagaagattacactatt

SEQ ID NO: 48152 - DNA, 427 bp, Homo Sapiens
tttttttaaaggagagaaaatgcttaggttgcaaatgaggagtattgaacatggtgatgtaaaaaacttctgcaaaacttgttctgtagctcctgggtcaggtctatgccattttttcttatatctgctcacacagtacagaaatgactaaaattttgggtctgggctgttatatcactttgtgttaagttatttgtagtagctaatgtgctaacttatatatgtgttctttctgttttttggattttaccttttgttttggcataacttatctatatttttgtttacattattttaaaaatatcagtaactgtaataatataaaattgaagttgtattgttgacaatacctctagtttttaaggtcatctgtcacataatttaagtgcaccagttcctaatgtataaagttctctctctctctctc

SEQ ID NO: 48153 - DNA, 670 bp, Homo Sapiens
gttttaaattatgtaaaatgtttacttattctgagcttagagagaatggggagggtatttttaaattttattgttttatttctttaagtttttctttttcttttaagattataggtattaggtttgtttttgtttttccacttatcttgagttcactttgatgttaaatctattgctacttcagttgtaaaaccagccaaaagtttctggatgaaggtcaagtttgaccttttaggagttattgtacataaaggcttcatccacgaaccatccagcgcacagaagcaagtgcaaaaatgacacaagcacaactctccagacgtggctccttctcctttctcagtgcagactctcactgaaagctgctattttcatcctccttgtggttgcttttcttgtttctcttccattgtacatgtgggttatataccatatgttaaatatgcaataaagtgtttacaggatgtccttctgaagggtagtcctttgtaaagctgtacagactttgcagtttaagcacaatgtgcacatgttagttttatatacagcaaaacttgattttttgcagatggaaaggtattttgtttctatacaaagtaaatggattgtttgtgcttaatgtaaagccgctttataaaactgtaaaataaagtttttttcttaaaaaaaa

SEQ ID NO: 48154 - DNA, 804 bp, Homo Sapiens
ggaaagaattggagcaaaaagaggttgattacagcggcctcagggttcaggcaatgcaaataagcagtgaaaaggaagaagacgataatgaaaagagacaagatccaggtgataactgggaagaaggtggaggtggtggtggaggtatggaaaaatcttcaggtccctggaataaaacagctccagtacaagcacctcctgctccagtaattgttacagaaaccccagaaccagcgatgactagtggtgtgtataggcctcctggggccaggttaaccacaacaaggaaaacaccacaaggaccaccagaaatctacagtgatacacagttcccatccctgcagtcaactgccaagcatgtagaaagccggaacaggtacttaaaatgaatgctacctggaattaaatgactacatatggcacatctacatcttactttagggacatgaattttttaaaataaataaaatgggaagaaatgtaaatgacatcagatggaaatgtgttttttggggtggcttttagaataaatcccagccttttcaccactttgagagcacagctggcttgaatttaaacctccacgtggacttgctcctctgctctgtcttaaaaaatgtgtaagggaccttgggagggcagtgattcaccacactcgagtttctttacctgatctaatcagatccactcccacaaaatcgatgtgaggagaaatcattgactaatgagtagaatttacttgaatgagaaaattgttacccttgtgcataaagagagagatgtattatctattacttgctaaaa

SEQ ID NO: 48155 - DNA, 887 bp, Homo Sapiens
tgtggtgtcattttggcatttgaaaacacaacctatttaaatagagcaaaagagcacttctgtttgcatgaataacatttaagctggttccatctgaggatacatactctgggtttccatttcacccacactgccacagcagcacataaaagcggtcagtctaatcatgccaggaagcagcacagacacagcatagcaggagtcctccccattcaaagaactcagtctgataatctgcctccaccagccaatggcaaccaagaccaaagccagctagccctcaggaaggtgatgtctgatggaccagtcaagccagaaggaggtgagcagaaaggccctgttcaaagcacacagcaagaacatccccaaatttaaagctctcatccttaatttttagagattgtctgataaaatatgtttatccaccttttaatgtgcttttgtgggcatggcatttcaggacttcatcatcaccatgtaagtcccaagatcagtcccgtaatatattgactacagtgatttgtatttttctatgcactgggcatcttttgacttttgttgggaaatagattaacaatattcatattgcagaatggaatgcatgctactaacctaatctgttcaagcatgactataaatatgtttcattgtgataaaagtttaaattgctcacagttcaagttagcctaccagttggaatgtggatcagtgtttgttgcctattatttcaagtgtaacttttaaaaatttagtggattttgaaaattcttagaggaaagtaaaggaaaaattgttaatgcactcatttacctttacatggtgaaagttctctcttgatcctacaaacagacattttccactcgtgtttccatagttgttaagtgtat

SEQ ID NO: 48156 - DNA, 659 bp, Homo Sapiens
ttctttttgcacttaagggaaaaaatattctcaagggaaaatactttttgaaatttatcaccattttagtgtttacatttcaataaatagttcacttcaggtttgggattgagattagttgcaatatatttagaagctcctacatgacagcacagatcactgccatctgctgaactgctaaagtgcttggtgccatgttgagaaaacttacccaagaatggataaatatgggtgaaacattactgagaatgcctcacgttagcaaatactatgaaaattcttgtttatatatcaaactgatttattttacaaaaaaaaaaattcaccccaagatttatttagtttcccaagtgtatctgattaggatttaatttagagtaaacttttctggggacacctgattgcatgaactgaagtatacaataacacaaatattacagtaaacataaatggtgtcattaacaaaattattcctaatgcagatttattctttcaggaaatgcactttatttggaatactagtttatcatgaaacaatgacttacctacctcacagggttgttgtgaggattaagatgtttgttaaaatcttgactaccttgaacatgctaataaaaaaacatttttctacctcttttatttgcaaaaaaaaaaaaaaa

SEQ ID NO: 48157 - DNA, 855 bp, Homo Sapiens
gggatggtgggatgtgtgtgctactggcatccagtaaatagaagccaggggtgccgctaaacatcctataatgcacagggcagtaccccacaacgaaaaataatctggcccaaaatgtcagttgtactgagtttgagaaaccccagcctaatgaaaccctaggtgttgggctctggaatgggactttgtcccttctaattattatctctttccagcctcattcagctattcttactgacataccagtctttagctggtgctatggtctgttctttagttctagtttgtatcccctcaaaagccattatgttgaaatcctaatccccaaggtgatggcattaagaagtgggcctttgggaagtgattagatcaggagtgcagagccctcatgattaggattagtgcccttatttaaaaaggccccagagagctaactcacccttccaccatatgaggacgtggcaagaagatgacatgtatgagaaccaaaaaacagctgtcgccaaacaccgactctgtcgttgccttgatcttgaacttccagcctccagaactatgagaaataaaattctgttgtttgtaagctaaaggcagcggaattaacaaaaataaaaggggcggcccgctctaagaaatatcccctccaagggggcccaaagctttacgccggaaaccccgccttttctttgggaccaaagggggggccccatataggtggaagtccctaattaaaaaggctttagggcaactgggcccgtccgttttttaaaaaacgttccaggaaacgggggaaaaaaactgggctaagactttggggaattccttttgggggaaagggaaacccctttaactttt

SEQ ID NO: 48158 - DNA, 587 bp, Homo Sapiens
tctcgaactcctgacctcaggtgatccacctgtcttggcctcccaaagtgctgggattacaggtgtgagccaccacgcccagccaaaccttcttttattagtgaactatcaattaactagaacttaattgtcacccagcaaataggcttgccggttaaaggtttaactgatttccatatactttcctatctttcaaaaaaaggtgaaagaaaattttttaagattttttaagttgcccattataatgttctatcaataacatttcatagatatctgcattttttgctttctgtgcacttcattttaaatagttaacttattttctgtcatcacagaaaatagtataaatgagtttaatagaaatccacaggtgccagtaaaagattagaagattgttcagactgctaaattgcaggctatttggaggtaaagtactccttgcacagtaattccacctcttcaaagcgtccttgttcgtgagaaatatttgccagcactgcactacttagagacaatgaagtatcttgtctacagcttgtcaaaagagctaccatgaaaaaaaaaaaaagatctttaattaagcggcc

SEQ ID NO: 48159 - DNA, 706 bp, Homo Sapiens
caactagtatctataatattccagagataaattctgggtaattccaacataggtgaggaattagtatagagcagagagagatgagaatgtccagaactactattcttgaggatgagaaaggtgaacaattgtaagtttatgtaatttatggggaaaaataaaaatagagatcctaataagttaatggaacaactaacagaaacggaaaattgaatgtataactttgaaacatactacgtcagttaggaaaggcttgctggcaggtaagaaaaatctgcaaattagcgtattaagcaagatggaggcttacatctttctgaaaagaatttctgacgtaggcagtcaatccattgctgacgtagcagctccatggcaatattaaacccagctgacctaccccttcctttttaggacatttctcagatatcatacatcaaacctcctttgtatctcattggctaatcatatgacaatacctggctttcaggaaggctgggatgtactgtatagcaggactgcatcatgtccagctaaaaactggggttctcaaactaaggaaggaggggaaaatagctagcaggaggcgactagcaaactgccacacctgcaaaaggaaaattaatggaaggcaaaaatgaaggggggaaaaaataagaagtatggtaattagaaagcatgttagaacatgtggaaaaaaaaaaaaaaa

SEQ ID NO: 48160 - DNA, 951 bp, Homo Sapiens
  misc_feature (528)..(528): n is a, c, g, or t
  misc_feature (558)..(558): n is a, c, g, or t
  misc_feature (560)..(560): n is a, c, g, or t
  misc_feature (562)..(562): n is a, c, g, or t
  misc_feature (564)..(564): n is a, c, g, or t
  misc_feature (566)..(575): n is a, c, g, or t
  misc_feature (577)..(579): n is a, c, g, or t
  misc_feature (581)..(583): n is a, c, g, or t
  misc_feature (585)..(590): n is a, c, g, or t
  misc_feature (592)..(593): n is a, c, g, or t
  misc_feature (595)..(595): n is a, c, g, or t
  misc_feature (605)..(611): n is a, c, g, or t
  misc_feature (614)..(619): n is a, c, g, or t
  misc_feature (623)..(625): n is a, c, g, or t
  misc_feature (630)..(631): n is a, c, g, or t
  misc_feature (635)..(636): n is a, c, g, or t
  misc_feature (638)..(639): n is a, c, g, or t
  misc_feature (641)..(641): n is a, c, g, or t
  misc_feature (656)..(661): n is a, c, g, or t
  misc_feature (666)..(675): n is a, c, g, or t
  misc_feature (685)..(685): n is a, c, g, or t
  misc_feature (687)..(698): n is a, c, g, or t
  misc_feature (701)..(701): n is a, c, g, or t
  misc_feature (705)..(705): n is a, c, g, or t
  misc_feature (707)..(707): n is a, c, g, or t
  misc_feature (712)..(712): n is a, c, g, or t
  misc_feature (715)..(716): n is a, c, g, or t
  misc_feature (725)..(725): n is a, c, g, or t
  misc_feature (732)..(733): n is a, c, g, or t
  misc_feature (738)..(739): n is a, c, g, or t
  misc_feature (741)..(743): n is a, c, g, or t
  misc_feature (746)..(746): n is a, c, g, or t
  misc_feature (761)..(762): n is a, c, g, or t
  misc_feature (768)..(769): n is a, c, g, or t
  misc_feature (771)..(771): n is a, c, g, or t
  misc_feature (773)..(773): n is a, c, g, or t
  misc_feature (779)..(780): n is a, c, g, or t
  misc_feature (782)..(782): n is a, c, g, or t
  misc_feature (800)..(800): n is a, c, g, or t
  misc_feature (802)..(805): n is a, c, g, or t
  misc_feature (821)..(824): n is a, c, g, or t
  misc_feature (826)..(831): n is a, c, g, or t
  misc_feature (840)..(840): n is a, c, g, or t
  misc_feature (847)..(848): n is a, c, g, or t
  misc_feature (852)..(852): n is a, c, g, or t
  misc_feature (854)..(868): n is a, c, g, or t
  misc_feature (881)..(881): n is a, c, g, or t
  misc_feature (884)..(884): n is a, c, g, or t
  misc_feature (893)..(894): n is a, c, g, or t
  misc_feature (897)..(897): n is a, c, g, or t
  misc_feature (901)..(901): n is a, c, g, or t
  misc_feature (903)..(903): n is a, c, g, or t
  misc_feature (911)..(911): n is a, c, g, or t
  misc_feature (917)..(920): n is a, c, g, or t
  misc_feature (928)..(928): n is a, c, g, or t
  misc_feature (934)..(934): n is a, c, g, or t
  misc_feature (941)..(941): n is a, c, g, or t
gacaagctagtttttaaaatcttcttccttttaaccagtttaggatgatctaggatagctaagttacctacatggtgactgttcggtctaattcagaaacagaagtactaaaagaatactaaaaagtttttacccattatctctatccctgttttctttttgcaattctcagctgcagggagcaagaaaatacacagcagataggaaatgtttgtttgcatcctggctttctcaactgcactttacgtccttgaatattctagatatttactccttcaagaagtcaggagtatatccaggcctacctatcatccttgccatccccattaaccctcatttttcagtatgtgttttacatttatggttatttttcagtctatagtatctgttcactcattgctctatcacatctgagtttctccgtctttctttccactagattgtaagctccttaagggcaaggtcggcatataagcaaagttctgtaaacaccgtgaaggtaccatgagttctatgggtactcaatanatgcttgtgataatggaaaaaaaaaaaaananananannnnnnnnnnannnannnannnnnnannanaaaaaaaaannnnnnnaannnnnnaaannnaaaannaaannannanaaaaaaaaaaaaaannnnnnaaaannnnnnnnnnaaaaaaaaanannnnnnnnnnnnaanaaananaaaanaannaaaaaaaanaaaaaannaaaannannnaanaaaaaaaaaaaaaannaaaaannanangggaannanaaaaatttaaaaaaaaanannnnaaaaaaaaaaaaaaannnnannnnnnaaaaaaaanaaaaaannaaanannnnnnnnnnnnnnnaaaaaaaaaaaanaanaaaaaaaannaanaaananaaaaaaanaaaaannnnaaaaaaanaaaaanaaaaaanaaaaaaaaaa

SEQ ID NO: 48161 - DNA, 781 bp, Homo Sapiens
  misc_feature (724)..(724): n is a, c, g, or t
ctggaccggtccggattcccgggaatcgtcgaccacgcgtccgggcagacactttaccaaatcctacaatttgctcatccatgagaggacccacacggacgagaggccgtacacgtgtgacatctgccacaaggccttccggaggcaagatcacctgcgggatcacagatacatccattccaaagaaaaacccttcaaatgtcaggagtgtgggaaaggattttgtcagtctagaactctagcagttcacaaaactttacacatgcagacatcaagccctacagctgcgagcagtgcggcaaagtgttcaggcgaaactgtgatctgcggcggcacagcctgactcacaccccgcggcaggacttctagagaagcccaggatctgtcccgtgccgccgctgctcccctccccagacacctctccacgtctcctacccagggggtcgcatccctagcccttcactgaccccagctcttcccttgctgcagccgcacctgcagctccagggagttaactcttcttctgggggactgagaactgtagaaagccacacactactacatcccttcacaaagagtatatgctagtttcttgtagatattcacagctcattttagagctctgtacataatgttgtgggtctttgttttgttgttttgtttgctttgggatcttgttggatgcacttagatatggaaaatggaagccaaattttatctttanagactgtattttcaaaataaaacttttttcttgtttgtttcaaaaaaaaaaaaaaag

SEQ ID NO: 48162 - DNA, 755 bp, Homo Sapiens
tgcgctatgccgatcgggtgtccgcactaagttcggcatcaatatggtgacctcccgggagcgggggaccaccaggttgcctaaggaggggtgaaccggcccaggtcggaaacggagcaggtcaaaactcccagctaatctttgtatttttagtacagacggggtttcaccatgttggccagtccggtctcgaacttctgacctgaggtgatctgccgcccaccttggcctcacaaagtgctgagattacaggcttgagccaccacgcctggcctagttagcattttaaagaaacacaaagccataacaaaaaccatcattgtttgtattccacactgttaatgaatgtaaagaggttagaaatgtagtgtttgattaatgatgtttatttttactgtatttaatatgagtaatttttcatcatctttcaagaggaataatgtttattgatcaaaggtgagaaatgatagttaagacaccaattccatgtccagatctttgactgtatcatgcattgtacaattgatttcatattttatgaaatgccttaattttcctactataacataaagacaatgatgaataaagtttatgtgtatgattaaaaaaaaataaaaaaaaaaaaactcgaggggggggcccggtaccaatttggcctaatgtgagtcgattaacaattaactggcccgcgttttacaacgtcgggactgggaaaaccctggggttcccaaattaaatgcccttggagaaaaatc

SEQ ID NO: 48163 - DNA, 859 bp, Homo Sapiens
ggcatgttctttatggaatactacaatgtgttgtcacaggattgttattcagatgtcaatcatttttatttatatatttctgggtaaaacttattagtggtgtgaggagtgcagaatatggaagcttacctaaattctttttctgccagccaacattttaaaagacaaatgatgcatcctttctcaatgctgctaattctttaaattttacatgtcccaatttattccatttgagatttattttaatgttttcaacccctgtgtaacatgtatcatgaggagaaagcactatcattgatcatcactatggattaaaatataggaatattttacagggcagtatgggtgggggtgggagacatattggaatcgtgttttctgggataaaatttttaaaaagaattaatcattagccctgagtattttagtcatttgtgcctatagaaaacaacatgctcttttatgtggactttcttcttttaagtgaggtttaatttatatacaatacaataacagatttttaagtattcatttgagatgtttgacaacctgtatatatacatgtaaccatcactggaatcagatatagaatattcccccttaatattgtccggttaacacattgggaatatttttccagtctgtggtttacctacttatttcataatgaatgtttactgtgatgaagaattacttaccttttactttaatgataatatttctgggtcctctaataaatttacgaactctgagttttaagattctctaaaaattttgggagaactttgaccaagtataaacttggcttgaacgctccaacacccaatagggcgggctggcaacattggcctaaaaaccc

SEQ ID NO: 48164 - DNA, 620 bp, Homo Sapiens
  misc_feature (574)..(574): n is a, c, g, or t
gacggttactctggttactggggccgcgccgcgctggcgagagccgccgcccgcgagggatgctggtgaggaagccgtcgggagccgccgccgccatctgagggaggtaccctggaaaccaccttttatcggtggggaagtgcagtcgcggtgggcggctctgggggccagcgaaacgggaggcctctaaatctttaggttggggctgcattgccctggagccgcactcttgagtccgaggccatcttttgttggagaaggcgtcggcgttggcgttttcccgaggttgggctgtacagtgtctccgtccgcggaaaaagaagcctctgaacccgcgccggcccgcagcccccgtgccttccggccgctgctcgccgtcgccagaggctaggccacgtttcccccagtgccgaggtgtttctgtgaccctccctccactcccattcccttctgaaagggcacctgctcttggtgagaaaagaaattatagcacgaagagccagtatcagaagagtatccatcacccgcagcaaccgctcagggaacaccatcaagaaagttccagcaggcgatnttttactgctttctacgccctataccttggcttcacatacttttcc

SEQ ID NO: 48165 - DNA, 660 bp, Homo Sapiens
tctagcgaggtgacagcgtagaaccagggtcctggagcggcgcagccggagtggggccgtgagatcttattcagggcttctcagcctgaacccccaaccagattaatttctccacagctggaattccaagtgcttggggataatgatacctctgacctttcttccttttgggaagtacttgagtgtgcagctgcatgaggcctcagcaggagagagattttaggtccaagaagctataccagtaggacaaggcaggaaaatactacactttcaggatcaagcccctctgactctcatttggaaactggatgtttgctaagcacctgcttcttaaggatgccgagggatttaatgatactcccagaaacctggagagattaatggggcctatggagaagtgctctgaactcagtgttgggacttgaataaaattaaccattgtcatgttttcagaacaactaagctgttttatatttcatgtgcatgaaagccctagaactaagttgtgttatttccagaaatgaaatagatcccacagttagatgatgtggccattaggaagtaccaaatttataaaaatcactggaggtctgtctgagcagtacctaataaaatatagtatactgaaagtgaaaaaaaaaaaaaaactctccagcgctg

SEQ ID NO: 48166 - DNA, 912 bp, Homo Sapiens
ccgggatcccttctccacggccacagtcccagcccccccactccagtccttccccaaggatgcagcctcagccttctccacaccacgtttccccacagacaagttccccacatcctggactggtagctgcccaggccaaccccatggaacaagggcattttgccagcccggaccagaattcaatgctttctcagcttgctagcaatccaggcatggcaaacctccatggtgcaagcgccacggacctgggactcagcaccgataactcagacttgaattcaaacctctcacagagtacactagacatacactagagacaccttgtagtattttgggagcaaaaaaattattttctcttaacaagactttttgtactgaaaacaatttttttgaatctttcgtagcctaaaagacaattttccttggaacacataagaactgtgcagtagccgtttgtggtttaaagcaaacatgcaagatgaacctgagggatgatagaatacaaagaatatatttttgttatggctggttaccaccagcctttcttcccctttgtgtgtgtggttcaagtgtgcactgggaggaggctgaggcctgtgaagccaaacaatatgctcctgccttgcacctccaataggttttattattttttttaaattaatgaacatatgtaatattaatagttattatttactggtgcagatggttgacatttttccctattttcctcactttatggaagagttaaaacatttctaaaccagaggacaaaaggggttaatgttactttaaaattacattctatatatatataaatatatataaatatatattaaaataccagttttttttctctgggtgcaaagatgttcattcttttaaaaaatgtttaaaaaaaaaaaaaactgcctt

SEQ ID NO: 48167 - DNA, 673 bp, Homo Sapiens
  misc_feature (584)..(584): n is a, c, g, or t
cacgaggtatagactcaaaatgaaaacatcagcttactggtttgtagttcataccagtcatacattccaaaacatgttttgagtcttactctgtgcctgaccttgtgcttgataacagggatataatgggaagcaacactccagtggtcagatgctcacagtcttatggaggagcccaaataatatctggggaagttaaagtccatataatgactgataagagtacaatacaggtgccatgggaacacgtgacatcactgaagactgcctggaaggggccgcgcgtgtgttcatgcctatacgataaacatgatacataatgaaaatgcttatctttaggagaaaggagagcctagagtagcaggatcaaggatgaaagctggacttcaaatatgccttgttagtgtaaatgtgactgtggaactgtatgagtattttaagattatggagtaaagtaagttttaaaaagcagtccctaatcatcaaaagtaaaaaactcttgatgtagtcatataaccacactaagaactcttccaggtgacttcaaaacataggacagtacatctctagtagaatatgccctngagaatgaaaagaatgtaacagtgttagtattttgaataaacatgttattactagactgttgcttttattttgagatggttgtgtgtgt

SEQ ID NO: 48168 - DNA, 724 bp, Homo Sapiens
  misc_feature (639)..(639): n is a, c, g, or t
ttttttttttttttttttacatttttgaagaccttcttttattacattacataatgaacagacattttaaatggtgacgcagacattataattttaagtcagacacaatatatgcatattaaaattctgtatactttgataaagtaaaaaataaagctatataaattgatctttagatttttctgcaaaagtagaatcacactttcatgacacttctaacatatcccatcaaggctgcttatagacacaacatcagaaagattttcattccagttcacccacctttagcttaaaaaaaaaagattgcatttgccaactgatatttttcctgtttttaaagttacaaatgggtaacttcctaaagaaatgtaggatgcaaggacctgcatatcaagctgttagacactgagttgtcaaataaataatactaacattaaataagagtggttgtattattcagtactagtcagtgcaaaacacatgagctgagtggtttgaagaacaaggctggaggtttcccgcgacagcaccggacccctggccaaggctcaactcaggggagtccccacagcctgtctaaacatttgtttaaacgctcagcaagccgagcggatggtcaaccctgttggagacgctggncgcatctggcctcctcccctcgagacgggtgtggctgcttgttcgccctgtctgctcagacacaggctgggttgactggggcttt

SEQ ID NO: 48169 - DNA, 518 bp, Homo Sapiens
tttttcacagtaacttaaatggaaaaatgctgagttagcttaagtttctgtaacaaacattaagcaaataaaattttctataacagaaataagccatagctttgagatgaaggcttatatacgtgtaaaccattgtaaccaagaaaaaaaaaaaaaaaagtcagagtcacagtgaaaatacttaacaaactagccaggatttaattcagtgatgacagggaacagaggaagtcttgtgagaaaggatcttgcctctgcctagtatctttcacagataggcttcaagtggtttgatttgcagatacaccctttcttggcctttatttcggcaaagatgtgatgggtaggtaaatgccgtgttctttccctagcacgtatgtcagtttctcatccactctttgttcttgctattgaaagttgtagcttctggctacaacagagatagttgaagaatatggagttcgccataatttatcattaaatgtggataatttgagattaaagaaaaaaaaaaaaaa

SEQ ID NO: 48170 - DNA, 407 bp, Homo Sapiens
ccatcctgcacttccgagccgcccggccacccttcgtcatctgcgtgaagctggacctcacagggggcgcctttgaggacaacctgaggtcactgcacttgcaggagggccaggacttccttcacttcagctgacggacccatggcagctgctcccagtgcatcccaggccagcaggagctttgtgagctgcaggcatggcgatggtgcgcctgttccacacccagcaggcgcaaccagagtctcgtgtgtgccgaccacaggagccaagccttttccactgtgtggactcatgtggccaaggctaggcctggtcacccaggaccctcaccacgtgaccccagccaatcgggacagttcaaggaggaggagacccctattacacaggttggaataaaatatttaaat

SEQ ID NO: 48171 - DNA, 653 bp, Homo Sapiens
  misc_feature (650)..(650): n is a, c, g, or t
  misc_feature (652)..(652): n is a, c, g, or t
tcaaaatagctgctcaggaactgctcctgaggaggcccctgggcctctgcctccgccgccaaccccatcttctgaggatccaggcttttcttctcctctggggatgccagatcctcatctgtatcaccagatgggccttcttctcaaacacatgcaggatgtgagagtcctcctcggtcacctgctcatggagttgagggaattatctggccaccagaagcctgggaccacaaaggctactgctgaatagaagtaaacagttcatccatgatctcacttaaccaccccaataaatctgattctttattttctcttcctgtcctgcacatatgcataagtacttttacaagttgtcccagtgttttgttagaataatgtagttaggtgagtgtaaataaatttatataaagtgagaattagagtttagctataattgtgtattctctcttaacacaacagaattctgctgtctagatcaggaatttctatctgttatatcgaccagaatgttgtgatttaaagagaactaatggaagtggattgaatacagcagtctcaactgggggcaattttgccccccagaggacattgggcaatgtttggagacattttggtcattatacttggggggttggggatggttgggattntnt

SEQ ID NO: 48172 - DNA, 700 bp, Homo Sapiens
tgttattggtgtcaaccctggggtaagtggctggctggactcacccctgctccccgtacacctgtgcctgtgactggcggtccaagctccccacacacacatcttgctggtgcctttccctgaagtcaccacccaggggctggctgtcatcagcccattcttgtcccagcagggtaccgagggaatgataaaacagaatgtgtttgaattacacacaaaaatgttccctgcagcaggtcataaactctgtgaactaatgaagctgacaaacagagctggagtacgtttcccctcacccttcctttcctcctagctcagcaaggggtgctcaggttcaggatgttgtttgttgattcaggctcaaccaggctccgcaagaaaaccttatcaggagattttattttcatgaacaggtgccagtcttcccgccagccacgtccagctggcgtcaataagcatctttggggatgtcctgcctcctccaggaccagccatgagtggctcttatggccaaaggcggtactgcaggccaagcaaacggctctgggctggaatagccctacctgagtgccctgtttgactccgccactatctgccatgtgagttgggcaaattgttgaccacctctgagccttgaaaaagtaggaggttactttgttagagcaaaataataaaatttaattttaaaaaaaaaaaaaaa

SEQ ID NO: 48173 - DNA, 1067 bp, Homo Sapiens
tagtaactgctgtagccagctcggctcccttccctgtgtatctgtgtcctgctaacagccaagagatgttgcaagggaggaaatgtgagagaccttgaacctgtcaggtttatttgttttgtttttaaaggcatgttgaagtttagttctttacccttctcctaaaatctttttttaatcagcctcaaggttaaaataaggagtgactacagtatgtaaaataaggaaaggaagcattaatggtgtgatgtgacctgcctgtttttttgtaaacaagagaataggaaatgttttcaaggtagtttcacatgtcttgcaccaagctcatgcctcttgcttttcctttttgactttatctccctcagtttttcttctgctgtggccagaaagacagtcactacagttgactattgatacaaaggtgcaacagaaatattatccctgcatttttaaatataagaagtagacattaattttaccatggtgcctccctaatgtaagtgatatttattggtggttttcaacaaaggttaactattaaagaaagaaatatttgtctttatcttccttttccccttgcctcagtcgtgttattcacccctattcttgatattttaaaggaggagattcagtagcattttcctttatattatacacatgtgtctatcccatttcaaggctcaagtcttacccccacctctcgctcccaataggaaataaagaccatttctgccccttagttgttttacatgcaagataagtgctttccttctcccctggactgaagacttgtttgaatttctacatctagtacttgggaaatagacaatcactgtactttgagggtttaaatctttatatccagggacactgaaaagtaaatgttgctttactacaatttttttttaatttaaggtcctacccccaggcatactccaactgataatcctcagcttagatgagttaaacccgaatgggggttagtttttcccgaaaaatcctgggcagatttccataattttcctttccaagtttggatttgaaacctactttttgggaagatatgg

SEQ ID NO: 48174 - DNA, 421 bp, Homo Sapiens
  misc_feature (33)..(33): n is a, c, g, or t
agcgctggagagttttttttttttttttacagntttaaaaatttttattttttagagggaatttacttgggagtaacagcagtaatagttaacggagccagaatgcttgagtcatataattgcaaagcagagttgggagcaacagatgctaaagagtagttgctgtagttcctctttgggtcgtaggagcagttgtcatattactatatagctactgcatgaagaagagttcttagtgaggcctgggtgaacagctcttcttagtattctgtgtgaccccatttgaccttttaacaaatccctaagtaaataaatagcccctcaggaaaactaagtttttctctgctgtttttttgcttgagagagctataactgtaatagacttatatttctgaacattttagtgcttgccaatatttgg

SEQ ID NO: 48175 - DNA, 708 bp, Homo Sapiens
  misc_feature (11)..(11): n is a, c, g, or t
ttttctttatntatatttgagagattgatttaaagaaaaataatgcttgactatctgaaataatattttaaccctatcataaaatctctgcctggtagaacagctgactgtggaagggtaaaatgcagagaaccagtcattggatctcccttctctactttgttactgaaatcttgaacctgtagaacattacttatcactgtgttcctttctaatgggaaaataataataaacacttgcagagtattttttaaaagtttttagctttaaaaaaaaaaaaccctgtgccttacacaatgtgtatattgagttgatactgattatgataattagatggtattatacaatcattcattcagcaaacattcacttactgagcacctactaatgttccaggtactgattgttaaaaggtgattgagacacagcctctgtcctgagcttagtctagtaggaggtgacagatttgtaaataatagatttgaagttgctgagcaaaaaaaaaaacaaaaaaaaaaacctgtgtacctctcccccacagcaaatgtgtcacatttgcacagtgcccagcctttgcacagtgcccagcactcagctgtgcagatattatttgcactgatcccttactaatatttagtgagagaatgagatcgtgttaaagagtgtatatgtacgtgcccccaaaaggggtcagtgttacacaatagt

SEQ ID NO: 48176 - DNA, 689 bp, Homo Sapiens
  misc_feature (681)..(681): n is a, c, g, or t
ggtgctggtaaatggctgattaaaaagcaaagcagaaagccaaacaagacccaaccaactttggttattcattcgattcaaaattgtttttgggtaaatcaaaaatgaaagtacaaaaccgcaggaacgcgcatcttagctcatttgatcgctttgccttgcttgggaaatgcagtttcgtgtcacctgttgcagaagatatgtagttgatcatctagacataattgctgaagatgaacttttggaccaacttctaagtcacacagcatcattatcagatttattacacaacgacttttttgttttcactctatttctgaggaaaaagccttcccgaaatccgtaatgaatttctccatggtaacccctcttctgttttcacacagaaaagtttctctagactgttgctaagatgcattttgttaaataccccccccccccccacaaaggctgctttgtattaaatacgtagttggaatttactaaattgtgaaattaacgtaaccgaagcaacaaccggcaagacttttcctttataattttgcaaatctagattaattaaattagaatctgtttttaaaagcattaaaaaaataaagtttatgagaaaaacaaaaaaaaaaaaaaaaaaaaaaaaaacatgtcggccgctcgccctcgagaagcttctagacatcgttngcgcgcgc

SEQ ID NO: 48177 - DNA, 623 bp, Homo Sapiens
ctcctgaacagtactatttcgtgtgaatctcctccaagccttcttttcattttatatctcatgctgtaattcttggaaagtatgctgtagctcaagtgcagaattctcatcagttttatctttatatctctcctaaacactttacctgatgaagagcctggcatacacataaatatatattgaatgaatcagtgatggattgaaaagagaaatgatggatctcctaaattttaacttttataaaatattttgatacattcatgaccttactttagcaagcaatgaacgtgatgtaaactattgttgatatagtttttatattggaagtgtaagtagtttgtggcatgggattgtgacatatcctaggtttcctcatcttctttttattgaaatgtaattcacaagccataaaatttgcccctttaaagtaaatgatgcagtggattttagtatatttacagagttgtgcaatcatcaccactatctaattccagaacatttccatctacctagaaactccataccagtgagctgccactctaatcctcctcttcccccagcctctagaaacaataatccattttctgtctctatgatttgcctgttctagatattttataaaa

SEQ ID NO: 48178 - DNA, 803 bp, Homo Sapiens
cgagccatggaggaggaggcatcgtccccggggctgggctgcagcaagccgcacctggagaagctgaccctgggcatcacgcgcatcctaggactgtgaagatgatgagataccacaccttgattatgttacattaaatggcaaaagcaagattatccagaatcttccccaggtgtgactgaggtgaccatcatagaaaagcctcctgctgaacgtcatatgatttcttcctgggaacaaaagaataactgtgtgatgcctgaagatgtgaagaacttttacctgatgaccaatggcttccacatgacatggagtgtgaagctggatgagcacatcattccactgggaagcatggcaattaacagcatctcaaaactgactcagctcacccagtcttccatgtattcacttcctaatgcacccactctggcagacctggaggacgatacacatgaagccagtgatgatcagccagagaagcctcactttgactctcgcagtgtgatatttgagctggattcatgcaatggcagtgggaaagtttgccttgtctacaaaagtgggaaaccagcattagcagaagacactgagatctggttcctggacagagcgttatactggcattttctcacagacacctttactgcctattaccgcctgctcatcacccacctgggcctgccccagtggcaatatgccttcaccagctatggcattagcccacaggccaaggtaagggaggaacacctgccattgtaaactatggtatattccaaaatctactgaggaaatggttacattgc

SEQ ID NO: 48179 - DNA, 814 bp, Homo Sapiens
  misc_feature (647)..(647): n is a, c, g, or t
  misc_feature (668)..(668): n is a, c, g, or t
  misc_feature (698)..(698): n is a, c, g, or t
  misc_feature (724)..(724): n is a, c, g, or t
  misc_feature (749)..(749): n is a, c, g, or t
gcaaagtaagcgcgtgggacagcagagccttgtttgccattaaagtaatatcacaagtctgttaaggttggagaatcaagtgaacatgctgaaaagttatggggaatgtagtctcatagctgggggagctgggggccttgtcaattggttcccccagtctggagagcaatctgagagtaagtagtgacactgtgtgtgctgagtgtgtctgtgggggtgtttttggataaaattaacatttgaatttgtgaactgagtgaagcagagtgcccttcataatgtgggtgggcctcattcaattagttcaaggcccgcataggaaccacctcctgcctgactgaaccgggacctacgtcttttcttgccttcagacttgaatggacacatcagctctttgtgggtctcaagtctactggctttcaatcagctcttctgcttgacagctgcaggtcttgggactgcccagcccccataaccctgtgagtgcattcctgataataaccctctttctcttgtcctcccccaccccacatcattggttctgtttctctggagaaccataatacatcatttactaatcaggaaatagattcagagacattaataactcatccaacctcacagttaactgtagagttgggcttganattccaaggtcgattttcttnagcaatacaccatgctacatatatgtatgntaaaataaaaacgcttgtgaactganaaaaaaaaaaaaaaaaaagacgcgngcgcaagcttatccctttagtgagggttattttagcttggactggcgtcgtttacacgtcgtgac

SEQ ID NO: 48180 - DNA, 561 bp, Homo Sapiens
gcacgagggaggaattctaaaacatgggggaaggggaggtagagcactgatgggtgaaaaagtgaggccaacacacagggcaagtggtgtcgatggagtcgaagcgctgaaggaatagggcggctttccttccagcgagcatcattcggctgttaccaaaacaaacatcttaatctgcacctttctccactggccatcttgtccttgggtcagtgggacatgggcacctcgggaggcccgggccctgcccagctacagttccacccctcagcttgaggaccaatgactgaggtctatgccagttcctgatcccatctcactctctggacctaccaggtgactgctgctgggtgactcccctgaggcggctatacccttaagccagccccactacttccttccctgcctcccagctcagtatttaaacatcatctcccttctctttctcgcataactccccacccctttctccccgatccacccaggcctttctgtaaataaaagctcccaagttgggtacaaaccaggatattggagttactctatcctggagttaactag

SEQ ID NO: 48181 - DNA, 660 bp, Homo Sapiens
tcgaactcctgagctcaagcatctgtccgactcagcctagcacagtgttgggattacaggcgtgagccaccgcacccagcccctacttgaatttttatgtcattattgactcttcaccactctctccttgagactcacttatccctttgctctctatttttcctgctttgttattcttcatttttcttctcttgctctgaatcccttaaatgctgaggctgctcaagtttcatccctagtcctattttctcattctatatgcacactcatttttcatttaacagacttcactggcttcaggcaccatttgttttattattcatattttcaacccccatatctctctagtgctgtagacctttatttctacttactagttatattcacctaacatcccatagatatgccaatgtcaatgtgcctaaaacaaaattgtctctacctcccgctccttcaaatctattctgtcttctctaatcctataattactctccctcaagtcatcatcatcacttttctgggttactgtaatagccttcaggctaatttgctcactgtcaatcttgctgtctctcatttcagaatatgttctgcttgcaggtgacagtaaactagttaaacaaatatttaatattagcttaagcaaaaaaaaaaaaaaag

SEQ ID NO: 48182 - DNA, 705 bp, Homo Sapiens
tccgggaaagggccgaatgcgatcaaacctaatccgcgagacttgctaaggttctgtgctacaaattgatgtttagataaacttcagtgaaatgactcttcaggaattggtgcataaggctgcctcctgttatatggacagagtagctgtatgttttgatgaatgcaacaaccagcttccagtttactacacctacaagactgtggttaatgctgcttctgaattatcaaattttctgctgttacactgtgactttcaaggaattcgggaaattggtctctactgccaacctgggatagacttaccctcttggattttaggaattctccaagtcccggctgcttatgtacctatcgagccagattcaccaccgtcattatcaactcattttatgaaaaaatgtaatctaaagtatatccttgttgaaaaaaaacaaattaataaatttaaatcttttcatgaaacattattgaactatgatacatttacagtggaacataatgacctagtgctcttcagacttcactggaaaaatactgaggtgaacttgatgctaaatgatggaaaagagaaatatgaaaaagaaaaaataaaaagcataagttctgagcatgtcaatgaagaaaaagcagaagaacacatggatctgaggctaaagcattgcttagcctatgttctacatacatcagggactacaggggatac

SEQ ID NO: 48183 - DNA, 583 bp, Homo Sapiens
ggctggtacggtcggagtgtaagggatatcatgccaacatggtgctcattgtcactgaactgaagccaccctggagcccttaatggttacagaaatgtggaccaggctttatttaccactatacatcatcgggtattagaaaatgtagtctggctgagacgatgagttatcttctacattctagaaagtgatggaagaagtcatttgataagaggccatgggagagtggtctggaagttgtaggacctaaaatagtttgttctcacccagtgtatttaaatggccttctggacttgttaattgccctcagccagcactttaggacatctggttggatggctctgatgtggggggctgctgctctgaccattcattttgcctctaatgaatctttcacaaattggtcagatccatgaggtcttttactcttctttgtgccttgtatgataggtgctaataaacatttattaaatgtaccagtaaaatggcctttgtaccaaaaaaaaaaaaaaaaaaaaaaaaaaaaaaaaaaaaaaaaaaaaaaaaaaaaaaaaaaaaaaaaaaaacaaaaaaaaaaaaaaat

SEQ ID NO: 48184 - DNA, 711 bp, Homo Sapiens
ggggtaattttctgcaagtgacttctaacttaacagtagaagtttaaaactgttcaaagaccaaagcacaacatttatctagtgtttgatcctagtataaaagaatggcaataattatgtgaacaggaattacatgcccttagaatgtgcattttttaacctattaaatttgccaatcttgcaaactattgtttacttgtattgcataattagatactcatattaacatattgaattcagaaaaagttagcaagccaagatgacattctctgtagcactattttaaattataatgaatgatcacataaaactctttagtatttatctaaagtaattattactctacttcatttgtttatctaaatcagtgatcattgatgtttgaactttttggcttaaatgtttattttgtttatactacttgctagagtaaaataaatttaatacatgaaaaactctacacaatttaaaataggttataatttgtcaatacttatgttttaaaatatttttagaaggaggagtgctgtatattattaaaacaattttctgaaattgtttaatattatctttgattttaaaatgacatatatgtggatttacaatgaatcaaattgtccctaaaagatgtcagataagaaatgcaagtgcttttgcaagtctaatacttaaatgtttcttttatgtacaaccaaaaatttaaataaaatt

SEQ ID NO: 48185 - DNA, 373 bp, Homo Sapiens
tgcttcttcgcttctctcttggaaagtccagtctctcctcggcttgcaatggaccccaactgctcctgcgccgctggtgtctcctgcacctgcgctggttcctgcaagtgcaaagagtgcaaatgcacctcctgcaagaagagctgctgctcctgctgccccgtgggctgtagcaagtgtgcccagggctgtgtttgcaaaggggcgtcagagaagtgcagctgctgcgactgatgccaggacaacctttctcccagatgtaaacagagagacatgtacaaacctggattttttttttataccaccttgacccatttgctacattccttttcctgtgaaatatgtgagtgataattaaacactttagacctga

SEQ ID NO: 48186 - DNA, 1150 bp, Homo Sapiens
  misc_feature (742)..(742): n is a, c, g, or t
  misc_feature (787)..(787): n is a, c, g, or t
ctgggtggaattctcggacgaggcctaggcctcccaagtgctgggattgcaggagtgagccaccgtgcccagccttgccctgctttctaggagatggagttttctgaatttttctgtatttaggttttctgtactattttttgtccacttgatgcaaacttcttcagctgtgtagaaactttatgaatagatgagtgcttgagtgtctccagtctctaaagtggctgcttttattctttcttcaaagttaataacatgttgcaagatttttggacaaaatattatggtgtgtcataggaaaagcaccatgaattatatttaggtatagcaagtcagatcctttgaagtgactctgtctctgttcttagaagggttcttggaattggctgtggtttgaatctttctactgtcagaggagacccattaaaagccagaatctgcataaagctttctttacttcaaacactgaagctgtaggcgagccatcccgtatcgactttatactcaaagaaggaaaagccagattgcagtgagtgggtaggacagctcagatccaaatgaaagtagggtctcaagtaacccaagggtggccgggtacggtggctcacgcctgtggtcctagcagtttgggaggcagaggcgggcagattgcctgagctcaggagtttgagaccagcctgggcagcatggtgaaaccctgtctctactaaaatacaaaagaaattagccagggtgtggcggncataccccctgaagtcaccgcctactttgggagggcaaaggccangaaaaatttgcttgaacctcggggaagtgggaaggttccaattggagcctaagggttgcaccccttgtacttcaagaacttccaaaccctgggggaacaaaaagtgaaactcctctcctctaccggtataactcccaccactttataccccgcccccgaaggggaagggaagccacccctcccaagctcgttaacccgtttaaccctgccctccctttcccctcgaaatcacagggagcaaccgaaaatccccataagaatgtcgcactcctagaccacatacactatcaccaaatacacctcttgtagaggctaagaatcgctccatcccgacccgcccacccggaccataaatatcacccc

SEQ ID NO: 48187 - DNA, 531 bp, Homo Sapiens
gcacgagctcacccaaggccgagttcccataattggggttggtggtgtgagcagcgggcaggacgcgctggagaagatccgggcaggggcctccctggtgcagctgtacacggccctcaccttctgggggccacccgttgtgggcaaagtcaagcgggaactggaggcccttctgaaagagcagggctttggcggagtcacagatgccattggagcagatcatcggaggtgaggacagcgtctgacgggaagcctgatctggaaccttcccaaggactcaggcaagcctttgtggctggatcatgagaggagggactccatcttgagccatgtcccccagccatggcatggctgcactgtaaacgccaatcggggggtcaccaggatcaaccgcaggctttcttcagtcccttggtcagaccataaactgcatttttgattctttgtggattcaaaccctaggatccatcagtcttgcaaggacattgaatattaggaggaaaaagtcatggaaaaaataaagccatttag

SEQ ID NO: 48188 - DNA, 659 bp, Homo Sapiens
  misc_feature (453)..(453): n is a, c, g, or t
  misc_feature (542)..(542): n is a, c, g, or t
  misc_feature (553)..(555): n is a, c, g, or t
  misc_feature (578)..(578): n is a, c, g, or t
ggtgacagctgtgcaggctgtgcgtgcccttgccacaggacagtttgctgtgttctacaagggggacgagtgcctgggcagcgggaagatcctgcggctggggccgtctgcctacacgctccagaagggccagcgcagagctgggatggccactgagagccccagtgacagcccagaagatggtccaggcctgagtcccttgctctgacagagatggatctgctagaaggaacctggagagcaggacccatggctgggcggctggtgagcagtccaggtgcccaagggccagcttgctgctgcccaaagcagaggaagccgggctggctgagggtccgaaaagcctgcaggggcccggcgagccccaggaagagcctcagctccaggctggggctctggctgctggagcatctgctggctggtggggtggcccgagttccccttcaccgtccncagggagggtttcccacctcagagtacaccgaggggacctgcagagggggctgtcgggacagcgtggaataaacattatttcaaggaanaaaaaaaaaannnaaagggcccttttcccaaattcnccctattgaccgggcttaaaattacaattgccgaccttttaaaacctctggttttgcgaaaattattgggtatcccactgt

SEQ ID NO: 48189 - DNA, 598 bp, Homo Sapiens
gaaaaaaaagaatggaacagttgatgtccataacccaggaggagactgagagcctgcggcgacgtgacgttgcctccgccatgcagcagatgctgactgagagctgtaagaaccggctcatccagatggcctacgaatctcagaggcagaacttggtccagcaggcctgttccagcatggccgaaatggatgaacgattccagcagattctgtcgtggcagcaaatggatcagaacaaagccatcagccagatcctgcaggagagcgcgatgcagaaggctgcgttcgaggcactccaggtgaagaaagacctgatgcatcggcagatcaggagccagattaagttaatagaaactgagttattgcagcagctgctcaaagagaagcagcagcgagaggaagagctccgggaaatcctgacggagttagaagccaaaagtgaaaccaggcaggaaaattactggctgattcagtatcaacggcttttgaaccagaagcccttgtccttgaagctgcaagaagaggggatggagcgccagctggtggccctcctggaggagctgtcggctgagcactacctgcccatctttgcgcacca

SEQ ID NO: 48190 - DNA, 634 bp, Homo Sapiens
  misc_feature (467)..(467): n is a, c, g, or t
  misc_feature (506)..(506): n is a, c, g, or t
  misc_feature (544)..(544): n is a, c, g, or t
cggcaccaggttcactgctacttcacttcactggctaagattcctgggtagacttcactgggctcctggtctctatttccattaagactcctttgccttgctatagcagcctgaaaaattccaagaattttaaaaagttatttttcatcttcagagaggacacattacttgatgtagagtggaggcagtcacttctgcacattctgtgctgctgaggcaatttctgctattcgttcctctgaacttccttgggtttgtttagcttctataaaattattcatttttccagagagtaaaagtgctactgcttctataatttggacttccctacttaaactattttaaactactcaaaactatattctgctttacaagagccttattttacttcattgctctgtttgggttcctgttttgcaagggcaaaaactgaataaaaattatagcattctattttccagccacanatgtggtcctcagctctttctattatataatcccatgcntctgagagctagaatttatggttaagtgaaaaactttngtatttaattgaatttaagctgtcatcaatggtgaaattcactgtttaccaataagaaataaaaatcatgctcaattaaaaaaaaaaaaa

SEQ ID NO: 48191 - DNA, 698 bp, Homo Sapiens
aataaactgaaggctgaatcagaaaagatgaaaatagagctgaaaaagactcatgctgctgagacagagatgacactggaaaaggccaacagcaagctgaagcagattgagaaggaatacactcagaagcttgccaaatcttcacagatcatagcagaacttcagacaaccatttcctctctgaaagaagagaacagccagcagcagcttgctgcagaaaggcggctccaggatgttagacaaaagtttgaagatgagaagaagcagctgattagagataatgaccaagcaatcaaggttttacaagatgaattagaaaaccgttctaatcaggtgcgatgtgcagagaaaaaattacaacacaaagaattggagtcacaggaacagataacttacatacgacaagaatatgaaacaaaattgaaaggattgatgccagcatccctaagacaagaacttgaagacaccatttcctccctaaaatcacaggttaattttctgcaaaagagagcttccatccttcaggaagaactgactacatatcaaggcagaaggtaactgcacgagagaatgcaacggatgcaatttccaggctgtgctgtggacttcttccagcaggtttgaagatttggatattgtaaactgtgagatcagtggcattttttaaatccttaaatgtaattaagatcataaaaaca

SEQ ID NO: 48192 - DNA, 422 bp, Homo Sapiens
aaagcaccctaaacagccatttccattttaatagttggatgcggattgtacccttcaatctgaaagtcttcagctttgaagtcatcaattttctcaacttttcgaagaatcctgagctttgggaaaggtctgggttctcgctgaagctaaaaacaaaataaggccattattttgccataattgtacgacctgttgtaattgctcctcatgtccgtgaaacaagtacacaggatgtgaccaacaaagttctattttacaggagtatgatcctgtcgataccttgccgtagttatgtaacatgattggagcgcaaccagctgttctcttgcacagatcgagagtgaggggtattttgtgacattacacagcatcaggagcctggtgcctcatcaggtgtaagttcttataaccactcttggcaa

SEQ ID NO: 48193 - DNA, 558 bp, Homo Sapiens
gcacgaggtttttcttgaaaattattttccactgagtttaattttttgtaaaagttacacagcattctcttgtcattctttatatctccctttttgtagttatgttccttaatttctgtaactttctgaaaccagggttaatttgttttgaaattgtccaacgtgtgctttgaaaaaaagaagggatgttttctgtgtcaaatgaaggtaatcatagatcaaatttgcttattgtcttgttcaaatcctagaaaaccattagcatttttctttgcttgtaatatgagaatctaacactcatacagaatattgaaaggttaccctacaattgtaaatttgaaattctccttctaattctgtcagttatttattgacatagtagtggttctgtagtcaagtgcatataaggttttgaatgttacatcttatttttggatttttattttatcattatggagtatagcaaagttctattttgttctttttcaaatgtacttggttttgattatcccttggtccttgattgttttattaatctattttttatttcattaaact

SEQ ID NO: 48194 - DNA, 751 bp, Homo Sapiens
  misc_feature (748)..(748): n is a, c, g, or t
aatcttccctgtgctaggttgaaaatataaataaattacttgttttgtaaacttttgtaaagaatattttggtagaaatacttcaaacatattctttgggttatatttatacatatgtgaaataaatatactatcaaaaggttatattttatacaaaaagtaaattgctaccttttgtatgctaatatgcaaagttttgtataatatgatggtttatttttagctctacacttaaaccataggtggttgagtgggaacttttgaaaactatcaagaggcttgttagacaaatttatattctgaaacctcaataagaaagcattccaggtttcaatccttgttttttgccctgctcccaaattcttttttaaacccatagttcttgtgtcttatttgattcttctgctgtgcacattgtattggtccttgttgcatgtagtctactgtgtgttttccgattttataaggcagcatttctccatacaaaaagaaaaaaaatgatgtacatataaacgcttttattgtatggctcctccatgttactgtatatatctgccagcacttcccagttacactcctgtgagtcagcttatttttaccctaacataaatagtatgttttgtagtagttatcaaatttaagagataaagcattcagaatgtttggattctcttctatcttaaagtgaatttcataattaatgtctatttatttcagctattccattaaaatccaggattctttgggnaaa

SEQ ID NO: 48195 - DNA, 600 bp, Homo Sapiens
ctagtgtttttctataaacttgaatgttaattgtacaggtgtattttacaatttttgtttaattaaaaaaatgttactatattaataatcaacctggtcaaaacctttcaggtttcttcgtttgagtcagtcgccttgattcagaatgtcacgagccttatgatatcatgctgaggcgccttgcaaatccgacaattaagatcctcctagaccttgaggtgatcagcataagaggccagatcccctcgagtcatctacacctagcttcaccttattctttaaagggcagaaaatttgagacggtgatcgccgtaacagtaaatttggcttacaattggggcccccctccggtttagaaagaggaacaccagattgaccacattcccaactagaaaaatcttcttgcgtcaatcaagcctcacctggctcatttggctgtcagtttgatcgtcgttagattgaagaaaacatctagatgcagcgatcggctatagatacttctagatcgtctagatctactagaccatgggccaaagagggtcgacctgcaaacttgcaaggtttattttaaatacacattacagtgttttatattatgta

SEQ ID NO: 48196 - DNA, 552 bp, Homo Sapiens
cataatatctcagcaccagaaacaaaaattaagattatcaaagcattttgaatagtgcactgccatgtgtcctgtctgtgaatgaagaagaattaccattctctctttgtaggcatgctgtatgtaattgacacaagggaacagtatttgcatttgtactgtcttagaatattatttatttttttgtatttgtaaatctgtggacaaaagagggtttcctcactccttttactcactgggctcatgacagtgaaggagatgctccatctgcttctccccctttctcttgctgtagtccaatgtgctatgagcatcagcttactttgtcacttagagcaagcaaaacccagtgcaagagtctcgttcagctctaaataggtttgctttcttttagttacagtgcccattttgaaattgcctatacagtcttagtgaccatttaaaccggacgaactaggtgtttaattttcactcttcatgttcaattagcagttcaaattaaagaagatggttattggagaacttttttgaatggttttgtattaaattgct

SEQ ID NO: 48197 - DNA, 933 bp, Homo Sapiens
  misc_feature (36)..(36): n is a, c, g, or t
  misc_feature (633)..(633): n is a, c, g, or t
  misc_feature (747)..(747): n is a, c, g, or t
  misc_feature (848)..(848): n is a, c, g, or t
gtgtgcagttgtgccatggctgtacccaccctgggntattcactggaactgccctagggaccctgacagatgatgagatgcgcaggctcaacatacccgtactacaggatgatggctttctcttcctctgggtcacaggcagggccatggagttggggagagaatgtctaaatctctgggggtatgaacgggtagatgaaattatttgggtgaagacaaatcaactgcaacgcatcattcggacaggccgtacaggtcactggttgaaccatgggaaggaacactgcttggtgagcagcagtggggcccaattcaataggtggagcacaaagaagaatcatttgatttcttactgagaaaaagttcaaaggtgtggtttcataaggtaatctgttatctgtggtgagcaggttggtgtcaaaggaaatccccaaggcttcaaccagggtctggattgtgatgtgatcgtagctgaggtatgtgcttcccaggcctccaaagcttccacatttttgttggtatcagttattcatgttgggtgtattctcatcccagatttttctcatttagatcataaacataatagaaagggctagaattgcaatcttgtgtaacttaaaaagcagctagttnttatttcctaggttcgttccaccagtcataaaccagatgaaatctatggcatgattgaaagactatctcctggcactcgcaagattgagttatttggacgaccacacaatgtgncacccaactggatcacccttggaaacccactggatgggatccacctactagacccagatgtggttgcacgggtcaagccaaagttccccagatggtatcantctctaaacctaagaatttataggagcacttttcttacagagctaagaattcattaccatggctctgttaggtaaacctgaagag

SEQ ID NO: 48198 - DNA, 867 bp, Homo Sapiens
caaacttggcctagggcctatgtagaggccctagggtctacttgtggtggaggagggaagtatttgtagaatgtgtaggcttgagaagtaaataaagccaaaaaagcatcacttgcttacatttttaaatgagtcacaaaacaatctttctaatgcggccggtaaagaagttttaaaggtctaaggtttctctacagaaattacatgcttctcaggtctttgtttagtaaaataatacagataattatgctttgaatgcatttattattaaagctaaccgttttaatttgtgtcagaaataatttgtgcctatggtaggattaaaattgtattctttagttaaagcaaagcaatctgtttttcattgatttgataaatatgtgaatgcctaatatgttctgcatatgtaaaaatgcagaaacatgctcatttgaattactaataattattttagtatgctgagaggctttgaattcactgtaccactccttcctagagtcattcaaaacagaaaaaattagttttaagtatagattcatgtctttctgttttaaaaagttgagctaatacttttcacaagagacgaaataacatgagccactataattattggctcagttccacccacatttccatattttgggtgtacttctcaaaactttttgacttggcacttttaaccttttttctctgtctcgattttttaccaggtttcctaaggcattgaattgaccgaacagaagaaagcagagcagatgatccggggccgcatttgttctcccccaatctagaaattttcgttcctattgtcctagccagtgtgttgggcccaccacttacttgtggtcaagaactactccgtataac

SEQ ID NO: 48199 - DNA, 590 bp, Homo Sapiens
gcacgagattttttttaattattgttattataattataattattattattattgacatgaggaaacctagcactggcagagggcaccttctctgcttttaatctttcaggtttgactcctggcactggttttgatacttggaattttgaggttcagggaattcagagaatttggtagcacagtgtattgggagaaagggaaatttcgggtgacagattgatcaccctggctgacatgtttctggaagtgggtgggtgggtttgattgagaacactttgggctcctgcagtgatggtgggaaagaaaaattctttccaaagctgcacttctcttaataattctctcccctcaaaagaaagattatgataaagaataatttggagtaataagtaacaagatagaattagaaaaatgttgaatttctgaatgaccattcagaggtgtggctttttccacgtctttttctcctgcaatgaactgctcccacgtcctgcactgcaataccagtcgaatgaacactttgtgaaacaaatcgtaagtatgtacgcacgcatatcaaactatgctctgaggataaagcaagttctaat

SEQ ID NO: 48200 - DNA, 635 bp, Homo Sapiens
  misc_feature (216)..(216): n is a, c, g, or t
caaatttgaagctgcagaaacgttagaagaagctgctatgaggtctcgtaaacagggtcttgacaatgttcacaaacagagggtggcagaagtgctcaatgaccctgagaacatggagaagcgcaggagccgtgagagcctcaacgtggacgtggtcaagtacgagagtggccctgacggmggggaggaagtgagtatgagcgtagagtggaacgngggcgtctctggccgagcctctttttgtggaaaacgacagcagcagcagtggcctggaagacgccaccgctaactgaccccaacctggccccgctccaggatgggactgccgagtgtggcccggagctggcccgggacagccagggcggcagggagggcccctggccgggagccgcagcgctcactcatttctcctgcgtctgtgtgcataggacatgatactaataaccacacggctggcgtgaccttggggctggggctgggcctaagctggtgccctggtgcggcgtggtctctcccaggagacctggggcatgagctgggcccacggctcccttcccatgtgtaacttcctcacgttgtgtgcgataacgtattttattgtacatttttttaaattaaaagtttatatgccttat

SEQ ID NO: 48201 - DNA, 712 bp, Homo Sapiens
  misc_feature (542)..(542): n is a, c, g, or t
aaggagcctccctgtagcgctgttggctccctccttcctgtggagtcttcacagcagtccctccccaccatgaggccagagaggctaacagctttgctgtcacccaacagaaatgctttaagtactgaccactgctggagggaaaggctaccgtctaaacacttgggatgttttctgacagcctctgaaacttctacgaactgctgaggcataggatcctctcctaaaatttctcccagatcttaacgtcagggctgtctggccctttcatgagtatgtgggttatagtctctggcaggcacttgtgaagagtgtgactgattgacacttttttgccttggttgctgggaagctcagatctcccctctgcatgtcccttgcttaggacctcccatggtgtacttggagttgggacctcacctggctctcccttatctttccggctgccattttttcccctttctaactttctttcccatacacttatttgaaatattatctcacggtaacgaaataaagtgtctgtcacctcctgctgtgtngtcatcttgcatgagctatctaagttctctgttcttcagtttctgcatctgtaaaaacgatgaccatgacagagccaacctcgctttgaggatcacatgagttaataaaggcctggcacaccggttagcactcaataaatgttagttatgattctacaaacaaaaaaaaa

SEQ ID NO: 48202 - DNA, 595 bp, Homo Sapiens
ggagaaggagcctccctgtagcgctgttggctccctccttcctgtggagtctccacagcagtccctccccaccatgaggccagagaggctaacagctttgctgtcacccaacagaaatgctttaagtactgaccactgctggagggaaaggctaccgctaacacttgggatgttttctgacagcctctgaaacttctacgaactgctgaggcataggatcctctcctaaaatttctcccagatcttaacgtcagggctgtctggccctttcatgagtatgtgggttatagtctctggcaggcacttgtgaagagtgtgactgattgacacttttttgccttggttgctgggaagctcagatctcccctctgcatgtcccttgcttaggacctcccatggtgtacttggagttgggacctcacctggctctcccttatctttccggctgccattttttcccctttctaactttctttcccatacacttatttgaaatattatctcacggtaacgaaataaagtgtctgtcacctcctgctgtgttgtcatcttgcatgagctatctaagttctctgttcttcagtttctgcatctg

SEQ ID NO: 48203 - DNA, 598 bp, Homo Sapiens
catcatcatcatgctaatacgactcactatagaaattgtttgactatgtagtggaccatgtatatatgataaattatctattttaaacacagctggggtatgagttgtgccctctatatagctgtgtgaacttggctaaatttcttatcccctaatgacctcagactccatgtttgtgtaaagacgacttaacttcccatagaattcttgagggtaaaatgggataatgaatcttgccagttctagcaactgtaaattgctacacaaatgctctgtgttgacattcatgctaaagccagtctgcattttcaaaatgaaaatttcttcactatttaaggctttcattgcaataattttaaaaaccaaatatttgtccaccaacttagccctacagtaatgttcccaaagactcatgagagtttatggtttattggaaagggtccaaattggaagcagatattgattttctgggagcaaactggtctgcctttacaaagtggaagttcaccctctctggataacacctgtgtctcattcctccctctctgccagatctcgaaggcactgaataaaccatgcagcttttgaggaagaaaga

SEQ ID NO: 48204 - DNA, 645 bp, Homo Sapiens
gctggagctatgataaaacatgcagccacaggctctccactgccttcaccaaggtgctgccttttaaagactggattgaaagaaatatgaaatgaaccatgctcatgcactccttgagaagtgtttctgtatatccgtctgtacgtgtgtcattgcgtgaagcagtgtgggcctgaagtgtgatttggcctgtgaacttggctgtgccagggcttctgacttcagggacaaaactcagtgaagggtgagtagacctccattgctggtaggctgatgccgcgtccactactaggacagccaattggaagatgccagggcttgcaagaagtaagtttcttcaaagaagaccatatacaaaacctctccactccactgacctggtggtcttccccaactttcagttatacgaatgccatcagcttgaccagggaagatctgggcttcatgaggccccttttgaggctctcaagttctagagagctgcctgtgggacagcccagggcagcagagctgggatgtggtgcatgcctttgtgtacatggccacagtacagtctggtccttttccttccccatctcttgtacacattttaataaaataagggttggcttctgaactacaaaaaaaaaaaaaaaaaaaacgcgg

SEQ ID NO: 48205 - DNA, 579 bp, Homo Sapiens
gtagctagcagtaaagatacactgaatgaatgaatgagtcaaccatccttggcctctggagctaattgagaaggctagggggagttccgctgtagggagaaggatgttgcatccctttgtagattgtgtagcattcaaaacctgctgaacactcaccctcaatgtatattctctgttctggcctgcttcaaggtcagttacactacttcctgggatgggcctttctctggcttaagcttggttgtccctggctttcccaaggatcacagcccaaaagacacagtggggaaaatttatggcctattcgagaagagtgagcagcctaatcaagccaagccttgatttggggttctcacttcactggtattttccctctgtccctaattgggttttctatagttactagttttccaggcctccaagggagattctgaggcttgatgtgttctgactgtgtcttggctttgtgatgctgagtgccagaaatactctgtactataaaaactaccatcgttctttgaaacaacaaagaggaataaagaacttaattctggtgaaaaaaaaaaaaaaaaaaaaagg

SEQ ID NO: 48206 - DNA, 720 bp, Homo Sapiens
gcagagatgtattatggtgatactccaaggtggcatagccattcatttacaacttccagatttgagctgcctggagggaatccatatcagctctgcataagattatatacaaagctgtcactcacaaaaggctggatgtgctttcatccaactggaaggctttattcttccaagttcattcatactcaaagaggccagtactttgccatccttgcacttctgttatcagggcccaaataacagtggcaagctaccaactaagttgtattttaataaagattccatgggttgaacaagccacgttgcagaaaaagagcttcccctaacctgggttgttgcagagtaaatcccacgacataagctggtatcagtggttcgggggaaatagttccattctatgactcttgtctcctcctccaggaggactgttctaactagtaatcttggccctattcattacatcctctgcttgtcattctgctaatttatgaagatagtttattatagtctgtacttcagttctcatcttgtaaataatgcttaacataaacttgtacttacactgaaatccaaaatagtcatgtttctgcagtattctgtagccaacttaaacctgtgctttcatgtttaagaaatgagaaattgtgccaaagatagcagaagagtagataagtgctcagtattgacgacctacatctgaaatctacaacataattgata

SEQ ID NO: 48207 - DNA, 835 bp, Homo Sapiens
tattttaaatggaagtgtcttgtcctaactaacaaggcaggaaaagaaccatcagagctggaaaatggacgaaatgtaacctcagagaaacaactacaggaccactcacccaagtgtaagtgactggggcaggacacctcagctgtgggtatgaaagtactgttctgttcacaaggttttgtttgagttttatgtttttcttttaaacatttctctggttcgatgggttgactgtctacagccactgttaaacatttctgaatatgcaagagaaagtcaagtgacatttgtatcttcttcagcattcgcagaccttctatagattccagcaaagggggaaaatgtatccactatctaacacttaggtagagaagggagggggtttaagcttagtgagggcaaaattactccattccaccttccgagaccagttagggttttgagagaggtttctgctcaacctgggatctggagggagagctttgatgttggtaaatctgccttgaattcattggtttaacttgcatcaaaataccatgtgagtgtgctcattctcatatatcccctaccaccatcaccaccattctgctgttcagtgtctcttgagagagcctctttgcatgttttccagaatctgtgtgtgtttttcctttcttctcctttgttctttttgctcaaaggtgtgaccagtcattgccccctctggggctttcattctccaggagaaacatcccagaaccagcactgtttagcctgatacctttctaatgtccatgtcaattttcaataaaaattcaaagaaatgctaaaaaaaaaaaaaaaaaaaaaaaagggg

SEQ ID NO: 48208 - DNA, 721 bp, Homo Sapiens
gagccgaaactcagagtccttcaaggcctatagccaggtgatggaggacgaggagaaggcagtggagatcttgggcaacacggaagctgctcatcctccatcccccatccgctgctgctggctccgcctccgctgcttggcagctactagcattatctgtggctgctcttgcctgggagtcatggctctggtgtttgccatcaaggcggaagagcggcataaagcaggccggtccgaggaggcagtgcgctggggggcccgggcccggaaactcatcctggccagctttgctgtctggcttgctgtcctcattctgggtcccctgctgctgtggttgctctcctacgccatcgctcaggctgagtgaccctggatggcctctgctgagagccagccgagacctcctggatcctgcaatgcggcattgctaaggtcctgtgacagcagtggttggaaggatcctggttggaaggatggggactctctcaaggggctttggaagagctcttctagccctttataaaaggagggcagcagctgagactgatgagaggagggcagcctgctctgttctttcagggccccccacccccatctcccctaccctagcccaccctagggcctctacccagcgggaggggttgaagaccaggcctggttttattagaattcattttgtaataaaagccttttttagtggtgaaaaaaaaaaaaaaaaaaa

SEQ ID NO: 48209 - DNA, 572 bp, Homo Sapiens
tttttttgttttgtttttgtagaatatgttattttcatgcaattctgtaagtctaagatcgtcatctacagttctgctcttaagaacacaagttttatgacacgctcagcttaagaaaccaaaagtgtctaaagtactttatgttaccaaccaaatttggctgctgcactcattaagaatgcaacttaaaaaattttggttaacaaaaagagtaatttgattatacaagatcttgtatactgaataatttataataatctaccactgtctaaaagtgtaagaatcaaaacagccatctaatttagtttcagaattatagatgaatacagataattataggtgacccaattccaactaaaaaatccagagttgacaactccagatatgtagccatgcttgtgtctttctagtcacagctcaacctacccttcagtttgaagcagtgtggtgccatggtgaagactactgattttagagctttgaatctcggttcttattactatgtgacctgtgtgaccttgggcaaggtactcaatttctctacaataatggacataacagtactacttctc

SEQ ID NO: 48210 - DNA, 1023 bp, Homo Sapiens
tggagcaaaagttctcctctgtgaggcaaggatttcaggagcgaggatttcaggactgaggcagcctgtgaagctgtgtaaccgagacacgcttttccttaggtatgccgagcagacagctggaggatcccggggcagggacacctagcccggtgcgtctgcatgccctggcagggttccagcagcgagccctgtgccacgcgctcactttcccttccctgcagcggctcgtctactccatgtgctccctctgccaggaggagaatgaagacatggtaccagatgcgctgcagcagaacccgggcgccttcaggctagctcccgccctgcctgcccggccccaccgaggcctgagcacgttcccgggtgccgagcactgcctccgggcttcccccaagaccacgcttagcggtggcttcttcgttgctgtaattgaacgggtcgagatgccgacgtgagtgagtgggggcatgcttgggaggcgcaggatggtactggcacatctaacatctacacttctctagctcagcctcacaggccaaagcatcagcaccagaacgcacacccagcccagccccaaagagaaagaagagacagcaaagagccgcagccggtgcttgcacaccgccttgcacatagcagaggctccaggctgactccttcctggtgggaaaggaagatgcctgtcctctccgtggaggaccctgggccctcaccgcaggcagcagtttgcattttgaaaggttattggggtcccctcctcgggctgtgttcttgctggtgagcaaaagtgtttgctgcaaaaataaaatgcagaacgtacctctacgatagatcccaggttttttattcttaatggcaccagcaggagaaaaatctcccaatcatcctaaaaattccaactagactccacaggaatggaattccctatttttaatgggaaagtcccagcctcccccgtgcggcccagggggggtactgtacaatatccacattcatttttcattaggggttcccgggacc

SEQ ID NO: 48211 - DNA, 478 bp, Homo Sapiens
ccagactctaatacgactcactatagggaaagctggtacgcctgcaggtaccggtccggaattcccgggtcgacccacgcgtccgagcaggtattttttcactccagactgagaatattggtgggatattgataaggggtactgaatggtaataaacatgtgctctagctctgtgctagtcagcttatttcagaactctagtttgattcagtttcttgcctctgactcaaaatggagggagagtgatttttacataagagaacacacccacatatccttttggcagcagctacctgccagagatgttgaagaagagtagccaacctttacacagcagatattgtgtgccagtcatagtcctaagtataataccttacatgtataaacttcttataaggttggtgctctgtaccgaattgaatagtatcccccaaaattcatgttgtcccagaacctatgaaagtgatcttactttgag

SEQ ID NO: 48212 - DNA, 598 bp, Homo Sapiens
ttaccagcaggacaccagattggcacagtcagtcccttgttccaaaaattggaaaatgaccagattgaaagtttaaggcagcgctttggagggggccaggtgagaaagctaaaggctgtgccctcgctccacaacagccacagcatcacttccctaatttccctaagtagtcctcacccatcactctttccatcttttggccctgccgcttcctcacttacagtttttctttcctgtcttaactagaagagaccttcgacttaaaggtaaccactttccctctgagatgctgtataaaactggaggttaggggatatttatggttgctggtgataactttgttgttctccaggcaaaaacgtccccgaagccagcagttgtagagactgttacaacagccaagccacagcagatacaagcgctgatggatgaagtgacaaaacaaggaaacattgtccgaaaactgaaagcacaaaaggcagacaagaacgaggttgctgcggaggtggcgaaactcttggatctaaagaaacagttggctgtagctgaggggaaaccccctgaagcccctaaaggcaagaagaaaaagtaaaagacc

SEQ ID NO: 48213 - DNA, 534 bp, Homo Sapiens
cattcctacctgaactgtgaggaacagagtgtatagtacaaatgtaattaggcattgcctcctggcgaggttcttgatgcatgacttcaatgctggctgctgactgaggtgaccactgtcagtattgtactttggcatatgttgtttttaggaaaataatggaatgcattcttagattaacttactgtttttgagttggaaaaaataaaagatgaggtattataagtatgccaaatatttatacactacaaaagattaaaaaaggagagggagaaaaaaaaaggccagttatgattttaatagcgtctaatttttttttgactcgaattttgtggacactagtcaattgcataatttaacatggaggagctttcatttaaaagaagttctcagctactatattctgccattaaaattaaccatgcctgttaattttacattgcttgaagatataagtaagctgccgtcaatattgttttaagattttcttatagtttatgtttaaatggaaaagttacatatataatctatggt

SEQ ID NO: 48214 - DNA, 650 bp, Homo Sapiens
ctgacctgggaggtggctgggaaggtccccacagggggcgtggaggaagggctgctggagcggcacagcaacggctcccagagccagcacagccgtctgaccctgcccaggtccttgtggaacgcggggacctccgtcacctgcacactgaaccatcccagcctcccaccccagaggttgatggcgctgagagaacccgctgcgcaggcacccgtcaagctttccctgaacctgctggcctcgtctgaccctcccgaggcggcctcgtggctcctgtgtgaggtgtctggcttctcgccccccaacatcctcctgatgtggctggaggaccagcgtgaggtgaacacttctgggtttgcccccgcacgcccccctccacagcccgggagcaccacgttctgggcctggagtgtgctgcgtgtcccagccccgcccagccctcagccagccacctacacgtgtgtggtcagccacgaggactcccggactctgctcaacgccagccggagcctagaagtcagctatgtaacagaccatggccccatgaaatgatcccggaccagatccgtccacacccgccactcagcagctctggccgagctcacagtacaaccacaataaactcttgttgaatgaaaaaaaaaaaaaaa

SEQ ID NO: 48215 - DNA, 626 bp, Homo Sapiens
gtcttatcctcgtcttacagcgtatggtttcaagataaaattgataccaggagtttcaattactgaaaattacttggaaatagaaggaatggctaattgtctcccattctatggagtagcagatttaaaagaaattcttaatgctatattaaacagaaatgcaaaggaagtttatgaatgtagacctcgcaaagtgataagttatttagagggagaagcagtgcgtctatccagacaattacccatgtacttatcaaaagaggacatccaagacattatctacagaatgaagcaccagtttggaaatgaaattaaagagtgtgttcatggtcgcccattttttcatcatttaacctatcttccagaaactacatgattaaatatgtttaagaagattagttaccattgaaattggttctgtcataaaacagcatgagtctggttttaaattatctttgtattatgtgtcacatggttattttttaaatgaggattcactgacttgtttttatattgaaaaaagtttcacgtattgtagaaaaacgtaaataactaatatagactattaaaaaaaattcaactggccgtcgttttacaacgtcgtgacttggcccttgcgtcccctt

SEQ ID NO: 48216 - DNA, 811 bp, Homo Sapiens
gtggatgtggagatcgccacctaccgcaagctgctggagggcgaggagtgcaggctgaatggcgaaggcgttggacaagtcaacatctctgtagtgcagtccaccgtctccagtggctatggcggtgccagcggtgtcggcagtggcttaggcctgggtggaggaagcagctactcctatggcagtggtcttggcgttggaggcggctttagttccagcagcggcagagccactgggggtggcctcagctctgttggaggcggcagttccaccatcaagtacaccaccacctcctcctccagcaggaagagctacaagcactgaagtgctgccgccagctctcagtcccacagctctcaggcccctctctggcagcagagccctctcctcaggttgcttgtcctcccctggcctccagtctcccctgccctcccgggtagagctgggatgccctcacttttcttctcatcaatacctgttccactgagctcctgttgcttaccatcaagtcaacagttatcagcactcagacatgcgaatgtcctttttagttcccgtattattacaggtatctgagtctgccataattctgagaagaaaatgacctatatccccataagaactgaaactcagtctaggtccagctgcagatgaggagtcctctcttttaattgctaaccatcctgcccattatagctacactcaggagttctcatctgacaagtcagttgtcctgatcttctcttgcagtgtccctgaatggcaagtgatgtaccttctgatgcagtctgcattcctgcactgctttctc

SEQ ID NO: 48217 - DNA, 554 bp, Homo Sapiens
ggagccaggccagagtctggcccagaggacagcgagaagcacctgttgatgctggggccactggaggaagctccatccctctactctcagcccgcaccaggcggccagctcagagcaccaggcgtggcgcaagcagggtggtcgtgggcagccagtcccgccctgctgcctggactgtgcccagcgggatgtgggcccgagcaggccagagaggccgagggcctggggtctctgcggcagccacagcccgtggtgagtagcagccttagctgtcctggagataccggggcctcgtggagtctaggcaggctggggcactgtggctgtggccgtggccaggtgagaagccccattcgcgcaggaaagactggccacctgggaacccacgcctccacggagggacttgccggccacaggctgtgggctgcccaagaggactgtgcaggcagggctgcctgctgattggcagctccggatcaggcccggtgcctgcagacctggtgctccctcggcaggctgggtgccgcagccgcctgctggctttctggcagctc

SEQ ID NO: 48218 - DNA, 687 bp, Homo Sapiens
ttggagggaaactgggtgaagggtatatggggtctctccttttttcatacaactccatgtgaatttacaattatctcaaaagtgaaagttaaatattttttaattgctgacagctttcataaaactatagaattatatgtaggaatattaatgttaaattttagtgtaaaattttaacatatagttctgcgagcactttgaataatggactatgcacaagagagggtcgtattggaagtataaagatggttcaaaatgaggaaatctgttaattcaatactaccatattaaaaaaagaacatatgatcctttccataaatactgaaagggatattaacttcaacatccatttctagcatttaaaaaagaaatcttagcatgggcatcatagtgagacccagtctgtatcagaaattaagaagttatctgggcatgttggcatgtgccagctacttgcaaggctgatctgggaggattgcttgagcccaggaggtcgacgcttcagtgaactgtgatcgtgctactgtaccccagcctatgcaacagagtgagaccttgtctcaaaaaaaaaaaaaaaaaaaaaaagtttcttaaatttatgatatgtatgtgtgtgtatatacttttatttatgcacacacatacatatacaagtacacatatgttaaaagccagcatatgtttaat

SEQ ID NO: 48219 - DNA, 940 bp, Homo Sapiens
  misc_feature (9)..(9): n is a, c, g, or t
  misc_feature (91)..(91): n is a, c, g, or t
  misc_feature (301)..(301): n is a, c, g, or t
  misc_feature (512)..(512): n is a, c, g, or t
  misc_feature (600)..(600): n is a, c, g, or t
gcatattgngcattggatctatttaagcctagaagtataacagataatcagttccttaagtgtaaatatgttcttaaatgtttggcctttntatctgttattcaaatgtattagtaattctcatattttgcaaacagatccttttgtgtatattataaaatatataccaaatctagttttccttttgctgtggaagatgtctttatataatattgagacttcccttgcaaatgagagacgggactctggtcacgtatagtgtgtaggcctagccccatgtattacgaactcataaactcanaaatccaaggattaaacattgtatgtctccttcatttatgcaagtcatgctttcattctacatgtacgtaaaactacaagtatgacaaaaaatacaactttccattggaattttgttcaatcaagtaatgttttaacaactttaaatcatcacttaatttgattgtattacctatcacagaaccaataaccctttctttttctgcactaanaacatgaatattctttactgtgcaaatgtatgaagcacacaatgcatataattattgaaatataacatactgtataatggatcgtaanaaatgtgaaatatacctctacattaatacatactacgtactaatgtacttaatatctgacgaaacacataattagattacccgttcttaaaattggatactcttaacttaggtctatattccttgcacgtctaactttaaagaaccattccttacaataacataggatctactaatctcaattcctttcaatattcttaatatccttgtattattgccattactctcttcaaatctgttactttaactaaggcactcccgaatataaaactgtatcttttgcacactaaagtgtattaagtcactagcttgtacatactctaccctatttactttctacg

SEQ ID NO: 48220 - DNA, 780 bp, Homo Sapiens
  misc_feature (10)..(10): n is a, c, g, or t
  misc_feature (22)..(22): n is a, c, g, or t
  misc_feature (454)..(454): n is a, c, g, or t
  misc_feature (467)..(467): n is a, c, g, or t
  misc_feature (476)..(476): n is a, c, g, or t
  misc_feature (589)..(589): n is a, c, g, or t
  misc_feature (653)..(653): n is a, c, g, or t
  misc_feature (669)..(669): n is a, c, g, or t
  misc_feature (709)..(709): n is a, c, g, or t
  misc_feature (716)..(716): n is a, c, g, or t
  misc_feature (731)..(731): n is a, c, g, or t
  misc_feature (745)..(745): n is a, c, g, or t
  misc_feature (765)..(765): n is a, c, g, or t
  misc_feature (768)..(768): n is a, c, g, or t
  misc_feature (778)..(778): n is a, c, g, or t
gggaggaaancccatggaagtnctagcttcatggcacgctgcagcaatcccaagctaccaggagcctcttttgaacccacttccctaagtctttgctcttcaccagagaatggaaattgttcatcctggtgaactgtggccaagttctgctccctaagtatttacttggagtagggaggttaaagggaagaaattcagggggagagaagcaaaagagaacacttccaactccctcccccatctcccaatgctccccaccttccttatcactgctctactgaagggtgtataaatcctgctcttggttagaattctccttattaacagtgttatatacatataaatatatatataaatatattccttttttcagccctgtagacatgaactgatcttcccttgaagatacaaacacatggccattttttgtttgggattttttgtttttcaaggnttttcatttttgnttattaggnggatttttttccctgggtactagctctgtgaaggagataaaaagcgcaatgtgtgttaaaaaaaaaaattaaaattaaaatgaaaaaaagctttttttcttttctttttaaanggatttaaaatctggttctctcttctgtactttacacgtatgaatgctctgctcttttgggacntaaacaaaatggaaanaacgtgaaaaggaaaaaaaaaaaaaaaaaagcggccgttntaagganccaagcttacgtacncgggcatgcgaggnataagtttttttatggggcnccnaaatcaattncc

SEQ ID NO: 48221 - DNA, 755 bp, Homo Sapiens
gagagttcgtatatgactccagtcctggcgctggatgctgctgctgttccagcttcctaggtgtggaaactgaaggaccaagagattaaacagtggtgcaaaagtggtaagaattcagcattctcctcgacaagtggacgagcatctactgtgctttcacagcggctatcactattgccagcagcaagactgtcagctcggcgccctcgtctggttggatgggaaactgcagttgctaagggagctgggtttgaatctctgaggacaaatgggaattctcactgatttctaggactaccctggggcaggcaccctgcacagcaatacacactgaacaatgtcgagtttctgctgaatagacttcctacgttgctctggaattcgaagttggcctaactgaggtctccagttacagaaaacactggctctgtatcctgggctttgagaaaacttatcaggctgtcacacttaccatcccttcagtctgcttgtcaggttccttaaggacgcatatctcaaatgtatggcatctacctctacctgggtcacaaccaagtgggtttctactagatcggtgttccttgacagccaacaagggagctgacactgccctcctaagttctgatcttgctcctgttcaactggaacttgatggatcccatgtggtttcccccatcctgacgctgtggtcagacactctccctaagcttggtcttccctccaaatcctgcttaaacacactcagaaggttgaaa

SEQ ID NO: 48222 - DNA, 476 bp, Homo Sapiens
acgctcgctgaggctgctgtcgccggtgcctgtggacagcagctgcccctgccctcccatctgttcccaggacaagtggaccccatgtttccatgtggaaggatgcatctctggggtgaacgaggggaacaatagactggggcttgctccagctgcatttgcatggcatgccccagtgtactatggcagcagagaatggaggaacactgggtctgcagtgctgaagggtttggggagtggagagcaagggtgctctttcggggctggacagcccgtcttgtgacagtgactcccagtgagccccagaaatgacaagcgtgtcttggcagagccagcacacaagtggatgtgaagtgcccgtcttgacctcctcatcaggctgctgcaggcctctggcgggcagggcactgggagaggccctgagaatgtccttttggtttggagaaggcagtgtgaggctgcacagtcaattcatc

SEQ ID NO: 48223 - DNA, 715 bp, Homo Sapiens
  misc_feature (643)..(643): n is a, c, g, or t
  misc_feature (696)..(696): n is a, c, g, or t
gggcaggtgagtgtggagccgcccagggcaccgtgctgtgcgatagctcaggcatcgggtgcttctgccaaacccttcagcagctggtttggggccaaacgtccttcctgtgtgagagaaggcagagcctaggcagcattccaaaccccatccagatgggaggctgagtgcagagcaaacggagcccagcactccagagccgtgtcccttcactgccatgatcacatcacaaacagcgaggcttggagaggacttaagagctccttcaatgccatcttccatccactgcgtgagccagaatagaaaaaaaggaataagaagaggtcggttaagctctctattaagttgagaaaatgggaacttcaggtgatcatgtgagatattcaagttaaaaaaattatttaaaaagcacattcttattattaaaattttagaaagtacagagaaggaaattttaataacctacacctagaacactaagatactggtaacgtagaaaaatgtgtagttaatgccttgatggattcttttctatttttttctctagcaatatttatgtctatccacagaaagcgtacactcatgtatttgcatggctaatatattttatgtaaagttctatatatttctcaacatttcactntatatttcttttataacatttttccagtgaaataaatttttccaacagtaaanaaaaaaaaaaaaaaaaaaa

SEQ ID NO: 48224 - DNA, 523 bp, Homo Sapiens
  misc_feature (494)..(494): n is a, c, g, or t
caattaaaagaccattaacttaaagtggtgttaaatgctttgtaaagctgagatctaaatggggacaaggcaggtggaggggaggccagtgtacatgtaaatgcccacagcccagcattgggtttccctcccaaggccccagcaccaacctctgagcccaagaccttgcctgaaaacaagcagataccgattgcttcatcctatttatggacatgtaggtctagttgcattttcactggggggaggggggaaggtgaattatggtaacttttaatgatctattcaggcagtagagctcttaaggaaaaaaaaaacccactttctctcaagcatgtatttaggggttgttctcaattgtgctgctgattacctgtcttatgtaactacttgagaccatctgcaagagacatgatttagtgtgtctgtaattcaatcttcgctgtgtgtggtagaagcagtagtcacttttgtaagccagtctcttcatgcctaanagacactaccagtcacctttgattcgcga

SEQ ID NO: 48225 - DNA, 616 bp, Homo Sapiens
gatcactaagcttgcattttggcagaaagaaaaaaaatcagttgtgatttaaaacgtttgttgagattttcaaacatagaaataaagctgtagcatattcactaaacaatgttttatatgaggatagggacctttaaatatgtgttttatagaatatctcacacatttgtaatggataacgtgcattaaaatggagttcttattatagaataacctggttaaacagatattaaagctgcttttgggtaaaacaggtttccaccagtattttccctgagctagaggagaagtcttagattttaagagtaatacaacccatctatcttattagtcttgtgccaataagagaagtaaatatcaaacattaaaatggtcactttacaatttcagtatgtctgtaccttgtatcttagcttgagtatgattgtcttatcaaagtagtgttctaactttaatgtattgtatgtttgttattatattaaagtgtgattattattcattggaataaaaagggggggcccggtacccaattcgccctatagtgagtcgtattacaattcactggccgtcgttttacaacgtcgtgactgggctggcgtaatagcgaagaggccct

SEQ ID NO: 48226 - DNA, 865 bp, Homo Sapiens
tatgacgcacccacgcgtccggaagaaaagctataagtataatgtaattattttataggtatactattaaattatagaacaaataaagataatctaggattatatgtgatcccggtgtgacgtgccataaaagtggaatttttgacttgttgcagtgagctgtgaagcagcactatgcgttcagagagtttttgttcaaccatggtgagttcaacctctagcttatgtcacatgatctcctttggggtctggaatcttctaagagaaatagaatcaggcatccaaggagcagaagtgatggaggtggccctcaatcctggtctttggaagcttccaagcctcttccacatcccctgccagctgaagacagagtattctcactgtgctggctgaaggagaaacactaaacaaggaaaccttgagaaactgcagcaatggaagtccactgttagtctctccgttagcaccaggacacacttgttctgagtttgttcattttcacatttactcctcatgagttccaacatttcttaatttaaatatttcttagtttatagcatctccatttttctattaattgacttaatctgcatttaagaaaactcgtaatcaatacaaaataaatccacaatcaaactgcacatggttgatccatgtgtaggttcaaggaattaactcacttctaggacatattcatcttagttatccatgggcagaattttctctgctaagtattttaatcctgttctgaattgccgatgattcaagtataagccgcacaggttgcttggggcattgaagttttcccaaagtttttggggcccggttagcgcgcgcacaaagcaaccgggacttcgaacggcca

SEQ ID NO: 48227 - DNA, 541 bp, Homo Sapiens
gggtcaggaatctacaggacttggctcgtatttacattcgacgcacacttagaaatttcataaatgatgagatgcaggccaaggggattcctcaaagggctccacccaaaaggaaaagaaagagagttaaacagagaattaacacttacgtatttgtgggtaatcagcttattcctcagcctctagacagtgaagaggatgaaaaaatggaagaggataacaaagaagaggaggaaaaagatcacaatgaagcaatgaagccagaggagccacctcaaaatttactgagagaaaaaatcatgaagctgcccctccctgaatctttaaaagcttacttgacatattttagagacaaataacttagatcaagaagaaaaatgcctactgataattcctttagtcttgaaaatgtagcatttgttaggagttaaaagagagaattatttctttcatcagagcaaattatagtggaaaaaaaaaatcacttgtttctgtcagtaacacaaatgatgtattcagtgaataaaagaatcccttttat

SEQ ID NO: 48228 - DNA, 942 bp, Homo Sapiens
  misc_feature (622)..(622): n is a, c, g, or t
  misc_feature (651)..(653): n is a, c, g, or t
  misc_feature (655)..(656): n is a, c, g, or t
  misc_feature (658)..(661): n is a, c, g, or t
  misc_feature (663)..(668): n is a, c, g, or t
  misc_feature (670)..(670): n is a, c, g, or t
  misc_feature (672)..(674): n is a, c, g, or t
  misc_feature (676)..(676): n is a, c, g, or t
  misc_feature (680)..(680): n is a, c, g, or t
  misc_feature (688)..(688): n is a, c, g, or t
  misc_feature (699)..(699): n is a, c, g, or t
ctgaatggtcaaatacagcaataaaggcagaagaattaagatttttctttgttccattgtacagtgtaaataactaagttgttaactgtcaagtccagttatgtattctgtaagttgtgttctagtctttgactaaaatttatcatctcttataatgggacttaatctttctctaaaagcatataagagcttgtcaatagagcaatcaatcaaaaagattttgtgattcataacattgaagttagtctggttaagagttttggtttagacttcatttatattttccttactaatatctaatatttaatgaataatgatcaattttttataaagttattaatatgatcagggaaacctttgggacttctgacaggcatctggtgaagagacaattcaagccttagtgactatttagaatagccagtgatcactagctaattctcatatccatgcctttttgtcctgtttacagtcttaaaagaggtaaaacagcaaatatttttttaagggaactataaccttaggattcctgaaaagaatttcaaaaaaaaaataaagacactgttgccaatgtgacccaaaacttaagaacatactaatggcatatatttgttacaattanaaaataaatttactacttaatcctaaaannnannannnnannnnnnanannnanaaanaaaaaaanaaaaaaaaaanaaaaaaaaaaaaaaaaaaggggggggccggctctaaaagtatcccctcgagggggcccaaggtttaccgggtaccccagcttttcttgggaccaaagggggcccccataaaggggagcccgaatttatataagcttagggccccgggcccggtccttttttaaccaaccgctccgggagactggggaaaaaaactggcttacccttgggggaaacctttttggtgggaaagggagaacccttt

SEQ ID NO: 48229 - DNA, 616 bp, Homo Sapiens
ccggccatacaacaggactatgtgatggtttttggctgtgtccataggaagtcacaacaggcaagggaaagaaaccagaacccagtcatggagttaagaagtgagtcagagaggagatgggtagggacagtgaggtaaggcctctttctaaggaagtttggctgaaggatagactagctggacatatgctggctgtgtggggtagagggaggaatgatggagggtaggagagccttgagcctgcgagaagagtctcctagaatagagaagctgaggttaaagttgtggaagacagtggggataactgagtgacagataatcaggagaagaaaaggagatccagaatcatgacagagagatgacctttgccaagagcacagccatctttcactgtcacagagaggtaggacaaaacgattggtgttcaagaattggtttgtagcacaatattttaactatgtcctttaaaaagtttctccacagacactacccaaagcagtccttcactacagtggcagacagacctgaaaattttcatctgaagcagcagagtgaactgcagagtcagagatagaatctcactatgttgaccaggctggtcttgaactcttggcac

SEQ ID NO: 48230 - DNA, 560 bp, Homo Sapiens
tttgtcattctaacccatccttcccatccttattttttttttttttttgagaattgctaaatggaaagctagcctagaagcaccaagtaaatatattcaaggaatataagttgtttaaacattagaaaaatttttgcactcattttttagctgtattaggaatgtcaataatcctgtagcaaattttcacagagaactttaagaaattcttgcattggtcgatttcaatttgaaagctttttggtttgtttgctttttaaattttcatgttctaggaaactatgattctggttgttcaggattgttattattatagttgtgtaaaattattttattttgtgtgtattgtgcacagcttgggggggggcgggaaatgcactaattgtgctcttccttataaatggtacatattactgacacagacaaataaagtttctaattgtttctgatttaatcactaggtgatacagcatattctgtatgaaatgttttctcctttctcattgtcatctacttcattttttgttttcatgttttgaagaaataaaaaccaaaatggt

SEQ ID NO: 48231 - DNA, 548 bp, Homo Sapiens
  misc_feature (516)..(533): n is a, c, g, or t
  misc_feature (535)..(540): n is a, c, g, or t
ggggagaatgttttctcccaaatttcctctgacccatgggaatgaaaatacttaaatactgtaaagcatatctattaataattcccccaattttttaaactaacaaaatggaatgttaactgaatggaattaaacatagcaattgtcaagccatcaaaattatatatcgaaccacttaggcatgttacggggtaaagtcctcacccctgcatttgagaaatattttattatttttattttaaggcaaaacagtgtttactgtgatgggcagaacagccttttgtatctaggagtccatttgagttctttccaatatttccatatcgttcataaatgtgtctgggggcttccttgtttggaaaatatggatatcgctttgttttcctttgaaagtaattatatcttaagaacatagtatcatgaatggagtagacagggaggctgcagaagccatttctctttgtagataaaaagcattatctatgattgttgtataataaattgatttttaccaannnnnnnnnnnnnnnnnnannnnnnaaacatgt

SEQ ID NO: 48232 - DNA, 722 bp, Homo Sapiens
gtcttgcattagattctcaaaagggatatgggacccaggaagttaagaacagtcctaaaatctctttggcttctttgtcctgatatgcaccggcattttcacagtaggaactagggtttctgtccagtttttttggttctttaaggaattaatgttattctgggtacaactgcttacatacatagcacatatagatgacatttttacaggccgtcttgttagactgacatacatggaggatagtgccacccgcctcacaagaacatcaggtaagctcaggcacagagtgcccaggaatctgtaaggcttcgcccacgcacaagtcagggctgccagtcacctgggttgtcttcactttatttggctgcgtctaatgacaccttccaacttttgaccccacccctggactgttgtgtaaacattgtatttctccatctgtaatgaaaaagctaacacatctctaactccagagacattttccagaacatgctgttctcaggcactagtgaggcggtaccattattcctcatttgttatccaaatgttggccatgtgaccacaccaaaagctcatcctgggccactgagactggtaattgaatcagaatatagtgaaatattcattctcatatatacccagccatcttacatctttggcttttttcagcagatccttgtggcactcagaacatccattttgcactgtgtatttttttcccttct

SEQ ID NO: 48233 - DNA, 582 bp, Homo Sapiens
  misc_feature (570)..(570): n is a, c, g, or t
aatttctcatctttctgttcccactgcccttaagagtgatttgcatatttaactcaataagcatctactgaaatgagttgatctgttgatgtaagtctgctcaatatggtcttgctctcagaatatgtttcttgcctttttgatgctttagaaggctttcaaggtaagtcaagcagggaacctggtgggtagatgagggaattttcaaacacacaactgtctgatttaggatcctacatggacttggtatatagtgtcacttacttgtaaatcagatttttaaaattggaagcaactctgtgatcatctagtccatctagtctacacccttccttttacaaatgaagaatccaagagccagaagctcccagacatcctgactcaatgtcctatatttgttgtatagcctcctttgtggaagttatgtatgcatttgacttcacttaatctaagacatctattttccttgaactcttgataggtctgctggtttcctcaagggaatccaatctagctggattttaatctctttgaattgtgtcctcagctataaaagttttaagctgaggntttaatgggctg

SEQ ID NO: 48234 - DNA, 1175 bp, Homo Sapiens
  misc_feature (13)..(13): n is a, c, g, or t
gagcgaggcctgngtggcgattcggacgagggaaaaaatgccttaactataaaaagcggagaaatggaaacatatcactcaagggggatgctgtggaaacctggcttattcttctaaagccaccagcaaattgtgcctaagcgaaatattttttttaaggaaaataaaaacattagttacaagattttttttttcttaatgtagatgaaaattagcaaggatgctgcctttggtctctggtttttttaagctttttttgcatatgttttgtaagcaacaaatttttttgtataaaagtcccgtgtctctcgctatttctgctgctgttcctagactgagcattgcatttcttgatcaaccagatgattaaacgttgtattaaaaagaccccgtgtaaacctgagcccccccgtccccccccccccccggaagccactgcacacagacagaacggggacaggcggcggggtcttttgtttttttgatgttgggggttctcttggttttgtcatgtggaaagtgatgcgtgggcgttccctgatgaaggcaccttggggcttccctgccgcatcctctcccctcaggaaagggactgaactgggcttgggggaagggacctcaccaaggtgggtctgacccctccccagtgactctgcccaacaactgggggcccccagggctaccctaaacaaagcccctccccaggccccccctaagctgcctcctcccttggggctgggcgtcccaaccccgctgcaaaaaccagccagggggtcccccctccggcccatcttgtggccccagtgtcccagaacccaggccctctcctccagggtccccctttttctggggcctttttgccctgaaggggtaaccaaactttcttccccatcttggctttgggggacctgcctctgggggttttaaaactgtgcaagccccccccaacccttggaaaatcccatcccgtttctcccacaaaacctaaggcccctgggtacccatgtggccaccccacagcgcgcgccctctgactacattcgagggcactttataagggacattcacagagccccctccccttcactttgagggcacctgttgcaccccactcgcccattacctatgtatcaaccccccccccctacaaattaaaacgcctctatcacacccca

SEQ ID NO: 48235 - DNA, 748 bp, Homo Sapiens
ccggcatgcagaggaagcgcagcgtggggcaacggccagtgcctggtgtgggccgacccaagccccagcctcggacacatggtcccaggtgccgggccctataccagtacgtgggccaagatgtggacgagctgagcttcaacgtgaacgaggtcattgagatcctcatggaagatccctcgggctggtggaagggccggcttcacggccaggagggccttttcccaggaaactacgtggagaagatctgagctgggccctgggatactgccttctctttcgcccgcctatctgcctgccggcctggtggggagccaggccctgccaatgagagcctcgtttacctgggctgcaatagcctaaaagtccagtcctttggcctccagtcctgcccaggccctgggtcaccaggtcactgctgcagcccccgcccctgggccctggtcttcctccaacatcacacctgctgcccattctccatttctgtgtgtgtcaaaggggactaacagcagaatctacctcccaactgccatgtgattaagaaatgggtcttgagtcctgtgctgttggcaaagtgccaggcacagttggggaggggggggtccttaacaagcgtgactttgctcattctgtcatcactaaggcaataaacctttgccaggtgaaacaaaaataaaaaaaagaaaaaaaaaaaggggggggggcctaaaagtttccccgggggggcccaaagtttaggggttacccg

SEQ ID NO: 48236 - DNA, 784 bp, Homo Sapiens
cggacgcgtgggcggacgcgtgggcggacgcgtggggaaaaagctaaaaagaatggaaattgtatgacaataactcaagtctttctccaaagtgcatgcagtcttttgcgatacctcattcagccgagtatttgtgctcttcctcattcagtataaggcagctttcagtttgcttagaaggcaacattggaatgttagagttcatcagaaacatagaattttaaactgtgagttccactgaatacattttaatgtctgtaggaagaatcaaaacacctatttaaagatggcaatgtataataatcattttaaaagtatttgattaaacctgataattttccagaaatgaaaaaaaaaatcagctctaaaaccaaagctgattttagaaaatttgaaaatgtaaatcagccctatccataatatagtttctctaaaactttattttaaagagtcattttaaaataatataactattaaaaaatgtaactgctatcttaatgttctgaaataatttaaaacattttaaaatatgaatactgtagtataaaagaaagaaatggtgggaacgaaaagcagagaaagaaatgccaattccagtccaaagtttcatttgccaagttttcttagaatgaattttaccagtttatgaattattgtaaacagaatgtgtcatggaaatactgaaagatttttccctagagtggccttattgactgctggtgtgatgccactgtaatgtaataaattattacattgtttccatgcgtaaaaaaaaaaaaaaaaa

SEQ ID NO: 48237 - DNA, 350 bp, Homo Sapiens
  misc_feature (350)..(350): n is a, c, g, or t
ggagagataattcattaggcccgagagctgctccagagtgggattagaacccgtgtagtacatagtcacattaaactgagatcggctaattaatcgctcttctccgtgtaactgagcgatcgcgctccttccccgaggaattgcaatttcatggttcctaatgatggtgcgattacattatgtggatcacttaggctgtgggtgtcaggagcggtacttggagcctctctcggtggggatgggagaagtcacttctaaaaccggggagatggaggaaagcagttagaatgtctgttactaatttttgttaacgtgctgctgtttcctacatctcattcagttattcccgn

SEQ ID NO: 48238 - DNA, 645 bp, Homo Sapiens
tgaattttacacaactacttaacgacaagggagatgtttagacctgttgtgtatacttcagagtacttttcatgagttcttccacagtgaacccttggattacctagtggctttttctagccagatttgcattaatccttactgagattggatggttttctttcctctattggcgccattcttcagatattaaagttaaaccatccactccctcaccttcagccttcagtgaatgtgctttctagttgtcaggaatgctgaagaattaacactttgactcctaaatgtgatactggtttgtagattcccttagagcagaaaggagaggggcacatattaatttgtatcgcttttgcttctctttggtcttttgtgtcttagaatttggaagtggttcatttctgttgctggtatgaggatttcgaatacttagtaatcgaaaaccatatcctgtaatttaataaaaaaaactaaggaagaaaaaaccctccaattttcccaaatgcaatcagtgtaactaggggctgtgtttctgcattaaaataaatgtttcagggtttgtggtcctgatcaaggtcctcattaaaaaattggagttcaccctaggtgcttttcccctctgtgactggcagataacacatactt

SEQ ID NO: 48239 - DNA, 789 bp, Homo Sapiens
ctcaggagccctggaggagtgctatgtcacagaaattgaccaagataagtatgctgtgcgcttcatccctcgggagaatggcgtttacctgattgacgtcaagttcaacggcacccacatccctggaagccccttcaagatccgagttggggagcctgggcatggaggggacccaggcttggtgtctgcttacggagcaggtctggaaggcggtgtcacagggaacccagctgagttcgtcgtgaacacgagcaatgcgggagctggtgccctgtcggtgaccattgacggcccctccaaggtgaagatggattgccaggagtgccctgagggctaccgcgtcacctatacccccatggcacctggcagctacctcatctccatcaagtacggcggcccctaccacattgggggcagccccttcaaggccaaagtcacaggcccccgtctcgtcagcaaccacagcctccacgagacatcatcagtgtttgtagactctctgaccaaggccacctgtgccccccagcatggggccccgggtcctgggcctgctgacgccagcaaggtggtggccaagggcctggggctgagcaaggcctacgtaggccagaagagcagcttcacagtagactgcagcaaagcaggcaacaacatgctgctggtgggggttcatggcccaaggaccccctgcgaggagatcctggtgaagcacgtgggcagccggctctacagcgtgtcctacctgctcaaggacaagggggagtacacactggtggtcaaatgggggga

SEQ ID NO: 48240 - DNA, 506 bp, Homo Sapiens
tatgacgtcgcatgcacgcgtacgtaagcttggatcctctagagcggccgcctactactactaaattcgcgggcgcgttgacactaatgttagggaatcctaagaaatattaaagaattgggaaaagaggaacctggaaggtagagtagtaaacaggaaagggaggaaaaacaggaggtggtaataaagtagtgttaatgaatccaagagggagcagtcaccatcttcaaatgtgatattgaaattagctgggatgtccagttgtttaatccattaaattgtggaaacagtctttctagtgcttaattataggaatcattgatcatattaataaactttcagttgaagcatcagcagataattattccaaaaccctctggcaaagaaatgtagatgcttttatagtctaccattgaacacagttttacgtgacacttggcaaaacttggagatggatggcactattttgtaagagaatatgaaacactgctttgaagttgtcatta

SEQ ID NO: 48241 - DNA, 652 bp, Homo Sapiens
cagacactcctggatctcaaaatgaccttttctaaataagcacaagatttatttttgtcctagcactgttgataacactctgaaatatgttattgaactggaattgtttctttatgcttgcattccaaaaccaactgaaacagattgtagtttcactttaaattctaggcctgttctatattatgtgaaggaattctctgtaacgctgatactatgttgctaatttgtgtacttacaggcactttagaaaatgtttagactgcaacatgcactataacattgaactcagtcacatgaagtggttaacacttgcacactgactgacagatatgaaagctgtatactttggacccagtaatatgctcattggagcaagggttgggctgtgtggatggataaactgctttcttgggtttacatggaaacctggtaccactcctacttttggaaagttggtataaaagctattaggtagaagcttaattccactaaatgtagaatttagttttcttctctaaccaagattttagaagtttcaagtttcaaatatgcttataacttttccaagaaatgatgattacagtgcttttgtggttacaactgtttggtatattaaaaaataagggtttactatcacaaaaaaaaaaaaaaa

SEQ ID NO: 48242 - DNA, 604 bp, Homo Sapiens
  misc_feature (109)..(109): n is a, c, g, or t
  misc_feature (406)..(406): n is a, c, g, or t
  misc_feature (526)..(526): n is a, c, g, or t
  misc_feature (572)..(572): n is a, c, g, or t
  misc_feature (580)..(580): n is a, c, g, or t
  misc_feature (597)..(597): n is a, c, g, or t
ttttacataaggcaaataaggcttttgtacaaagcctgaataccttctgttccaatggtgtccaaatggttattatattgtgaaaaacctggccttggtcacaatgcanacaaaagtacagatgaaagtgctttttggacagtttgcaaattgtgttaaagctacggattttttttaaagtgttcagcatcttaacgtgtattaaagctatggatttttttttaaagtcttcagcatcctaattcaccctttctaacttaagaaaaacatgacttaagacactgcttctaagtttggttgttctttatagtgtggatacccagttatctgtgagcgtatgggggtgggcttgagggtcaggtgaggaaggagtgtgtgtgtgtgtgtgtgtgtgtgtgtgtgattngcatgtgtatgatgtgtgtgcgtcggaccgcttctaggctactaagtgtcaatggaaaagaaaatgtattcaaaatacttaaatcaaaactagaagatgggggaaaaaaagatttattcnatacaaagccctgtctggaccactttagagagactcctattttttnacccctcnataaatatttgatggcnctgaaat

SEQ ID NO: 48243 - DNA, 861 bp, Homo Sapiens
cttagcaaaagatgacttcgtgaaggttcgagcaaggataaggggactcattcatttaatgactgtctcgactgttgtgaggactgcatctcaacagccagcatctgggggtcccgacctgatagtttgtgtgtgggcattgccgggttgctcgctcatggtaatgactcttccccgaggttctttctgtccaggcagaacaggcatttttgcattctgaataggtatattctcgtacttttggtttgaatgtggatgtgggttaataacgacccgaatctatttgatcttccaggtcaccttgggctctgtttgtcagatcctgttatccatagcctttagagaggaccttctgcttttagcttattttgttgctaactttttacaaacaaagggctaattttaaaatgtcagtgttgtcagtggtcagaaaccgtgtgtttgagcgggtgttgagtggcaggtggctctgctgacctggtggctggtgtgtcgggaggatttaacctgtgtgagggattggcctagaaacaacctgttgagatagtcttgccccataacctgtctcacaccgtagtgtacggccccctcccgcaaagctttgacaaagagtgggtggccaagcagaccaagaggatgctggacatgaaggtgaaccccatccagggcttagcctccaagtgggactacgaaaagaacgagtggaagaagtgagagatgctggcctgcgcctgcacctgcgcctggctctgtcaccgccatgcaactccatgcccatttactggaaacctgttatgccaaacagttgtaccactgctaataaatgaccaggtttaccctgaaaaaaaaaaaaaaaagggc

SEQ ID NO: 48244 - DNA, 499 bp, Homo Sapiens
attttgatcagcgttttgtaggggaggaccatatacccctattcccatggtcgctggctgggttttccatatatctgctgtcatttattcgttttccccttaaaagcaaaatcaatgtaaaaggctatgtttacgttttactcattgtccagcttagactcaaagtctagttcggtgggagggggaccttagcatcctctcagagatggtcagggctgagcaggaggaggcagagacagaggggcagctcagcctggtccattgagacccactctaaacagacatcatatttggaacaagaagatgcttcgagacaggaatgggccccactgtcatgcagaaacagactgggggaatggcagtttccctgagtcttggtttcttttatgttttctcttgtgccaccaccaaactgcagaggacctgctgtgacctaaagggcattcctttagcagataagaccttgaaaactgcaaaacacctgggaccagggagcttt

SEQ ID NO: 48245 - DNA, 869 bp, Homo Sapiens
aattctatgattctctggatttaaatgcattattcatatttcttgaagcttagatacagtctaattcatagcaaccatatctgctttatcctaggtgagggtagcagtccacaatggaatagaagaaaatcccattataacaaatgacaaattatatatcatgaatccttctgtctgactaactcaataactttctataaaagccaatggaattcaaataggagctaggagacaacaagttatatatgacagtggaggtcgtattccttttatattgctgagaaaactagttaaatgatcagattcttgctgttaagaaacaatttcgtttaatgggatctgtacaactgattttaaaaaaatgctacaaaaagccccaaagcatataatctctactccttacagtctctagaattaaatgtactcatttagacaacatattaaatgcatattttagccactttagagaaacctcataggcacagagtttccaagattaattttaagaatatcttcacgaacttgaccctcctactccacattgcaacatttccatcagacagcatttcaattccagtattatgtatattgcaaattaaacattttaaaatatttttttccaagtttatttctcaaaataaaatgtctttggttctaaaaaaaagaaagggagaaaaaaaattggggggcggcacagaggccccagaagaggtctctgcaaaccactctggtggggggcggggggcccaaagagtcagcgagacacggccaaaaggggctcccaggagaacacgcgggcagcgacaaagggcggggatcctccacagataaaaagcgccgggggagacacgagcgcttggaaaaaaccg

SEQ ID NO: 48246 - DNA, 903 bp, Homo Sapiens
tcaattgaacctgggaggcagaggttgcagtgagccgagatggcgccattgcactccagcctgggtgacaaaagcaaaagtccatcttaagaaatatatatatatattatatatattcttagttctaagatttcctttaattctatgattctctggatttaaatgcattattcatatttcttgaagcttagatacagtctaattcatagcaaccatatctgctttatcctaggtgagggtagcagtccacaatggaatagaagaaaatcccattataacaaatgacaaattatatatcatgaatccttctgtctgactaactcaataactttctataaaagccaatggaattcaaataggagctaggagacaacaagttatatatgacagtggaggttgtattccttttatattgctgagaaaactagttaaatgatcagattcttgctgttaagaaacaatttcgtttaatgggatctgtacaactgattttaaaaaaatgctacaaaaagccccaaagcatataatctctactccttacagtctctagaattaaatgtactcatttagacaacatattaaatgcatattttagccactttagagaaacctcataggcacagagtttcccaagattaattttaagaatatcttcacgaacttgaccctcctactccacattgcaacatttccatcagacagcatttcaattccgggattatgtatattgccaattaaaacattttaaaatattttttttcccatttattttctccaaaataaaaatgggcttttggttccggaacaaaaaacaacaaaaaaggggggggccccgctccacacagtaattccccctcaaagggggccccaagccctctaacccgttaaccccaggctttttcc

SEQ ID NO: 48247 - DNA, 574 bp, Homo Sapiens
ttatttcttcacatatttcgtctctctgttgaaagattttatccttatttgactcttcactttttttactttcaccagaaatttgacgttcctttaaaattaaaggtcattgaatgtcttttgaacacctttttctcaactgaagtcttcctgaatgcctcccctttctgatgaaaggatcctgagtgctgctgttgctctgccctgttcccatgtgcccactcccttccgtacacattttgcaagactatactctttattttagtcaaattaatttaaaattgctccctgggtttctgctctctcatggccctgtccctcaaaaacttctgtttactttttctagctgttttcatctaatttgtttaaaatgtatgatggatccataatatatgaaggatgtaatgaaaaggaggttgcagtgttttatataatatgatcgagcacctccgtgatgaaacatttagcaattggctagtccttcacagccagagtggaagtttgtgctgtggacaggtctttttactcccttccagttctcctccaaaactggagaaaaaaaaaaaaaaaaaag

SEQ ID NO: 48248 - DNA, 402 bp, Homo Sapiens
  misc_feature (296)..(296): n is a, c, g, or t
aaagttagatttgttttaagatggtattgacttatacagaagtgaggcaggagaatagggtctggagacagggaacttaaggccaattcgtgctgacttcctacaagaaaaaacaccaaggtctgggagcagggaacctaaagccagttaacgtgaacttcctacaactaaaccaaaaggaaaaacctcatctacacccgagtagcaaaggatcgaaggcgactgtcactacaaccctcccccttgtaccagttctctgatagaaaaggacagtgccttggagtggccgtggcaangcacagaccatgccttcatctgcatggggtaccaattcgcctcagccttttgattaagccaaggacaaaatcctttcattcagataaggggtagctgatagggaac

SEQ ID NO: 48249 - DNA, 643 bp, Homo Sapiens
gtagacagcttcatattccttcctgcagcggctcgtctactccacgtgctccctctgccaggaggagaatgaagacgtggtgcgagatgcgctgcagcagaacccgggcgccttcaggctagctcccgccctgcctgcctggccccaccgaggcctgagcacgttcccgggtgccgagcactgcctccgggcctcccctgagaccacactcagcagtggcttcttcgttgctgtaattgaacgggtcgaggtgccaagctcagcctcacaggccaaagcatcagcaccagaacgcacacccagcccagccccaaagagaaagaagagacagcaaagagccgcagccggtgcttgcacaccgccttgcacatagcagaggctccgggctgactccttcctggtgggaaaggaagatgcctgtcctctccgtggaggaccctgggccctcaccgcaggaagcagtttgggttttgaaaggttattgggtcccttccttgggctgtgttcttgctggtgagcaaagtgttgcctgcaaaaataaaatgcagaacgtactctacgatagatcacagttttttattcttaatgtcacaagcaggagaaaaatctcacattcatactaaaagtccaactagactcacag

SEQ ID NO: 48250 - DNA, 917 bp, Homo Sapiens
ggggccgggcgcggtggctcacgcctgtaatcctatcctttaggaggccgaggtgggcggattgcctgagttcaggagttcgagaccagcctgggcgacacggtgaaaccccgtccctactaaaatacaaaaaattagccgggcgtggcggcacsgcctgtaatcccagctactcaggaggctgaggcaggagaatggcttgaactcgggtgggggaggttgcaatgagccgagatcgcgccgctgcactccagcctgggcgacagagcgagactctgtctctgaaaaaaaacaaaacaaaacgagaaggctttcaaaattactctgcggtacactaatttaacagattagatcactttccaggctttaagttggcctttgttctaccctttttttagtgtatgataaaagttgtgttggttcgttgatcagcatgcaatgaactctggctcttgttaatcaggtgactacagttttgtccttacatttgtatgtatgtcatgagtggttttgtatgggcaggaggtaaacaacgcacatttaaatatacttaatgatttatcattccaacgttttctggttgttttagtctttcatttgtctcttgaacaatctgaaacatccctattctaaggctaaaaaatttcctttacaaacttaggttaaacattcctaatctgaaatccaaaatgctctaaaattcgaatttttttgagtgctgacgtgaccccacaaatggaaaattccacacttgccctcatgtgacactgggtgamagttaagtcacaatcaagcctggkgtggggggsacctgttgtkccagccamtcgggagggtkagcaggaggattcttwacccagsagtttcagtcagccckgacraaatscaaaccckkttktaaaaaaaaaaaaaaaaaa

SEQ ID NO: 48251 - DNA, 734 bp, Homo Sapiens
  misc_feature (348)..(348): n is a, c, g, or t
  misc_feature (356)..(356): n is a, c, g, or t
  misc_feature (486)..(486): n is a, c, g, or t
  misc_feature (554)..(554): n is a, c, g, or t
  misc_feature (582)..(582): n is a, c, g, or t
  misc_feature (617)..(617): n is a, c, g, or t
  misc_feature (647)..(647): n is a, c, g, or t
  misc_feature (658)..(658): n is a, c, g, or t
  misc_feature (698)..(698): n is a, c, g, or t
aggaatgggcggacttgagagtgtcctccgcttctgaaaatgatcaagaaaaatggtaagaatgtacacctcaagggtggatggtaaaggtcagcctttaagcctcaatggcggtgtggttgtaggtggggtgggggtggaggccccgaagacaggcagactaccacagtagccccgatggaagcagtgagaatgaactggaaggagcggctgtgggagcgacaacgtgatgagaataaacccggcttggctctgccctgtgcacacacaggtgagctgtgtgctcccggatgtgtcagctggtatatgcgtctgtcagaaggcagctggggagcactgttagctcanagactaanaggcagacccaggaagcccttctttgcattggtcagggtttgctgcattttcccaagcccaggaaatggaacccagttcttcttctttctgtgtaaaataataagcatcacaataggctgtgctcatganaacgcattttgtttccacagaaatgttttttctcactctgtcctgattttgatttctgttaaactcantaaacacattaccaaattttaaaataangtgacttgttttccccaactcacagttcaccaaangtatttcatctgtttgttctgaaaatgcanctgctgtctanatttatgtgtgctctgacaagaaatgttttgtgtaacaantaaaaatcatttcctttgatgaaaaaaaaaaaaaaa

SEQ ID NO: 48252 - DNA, 555 bp, Homo Sapiens
ttttttttttttttttttagctcatcagctattgttagtgttagtgtattttatgtgtggtccaagacaattcttcttccattgtggaccagggaagccaaaagattggacacccctgtctagggcaaggattccaaaagtatgttctgtataaaacttgcatagagattccaggaacacttgttcaaatgcaaattcctggtccagatctcaaagatcagtctctgcacgtttggacatttttaacaagcaaccctcatgatttttatgatccttaagtttgacaattctagggccttggtcttcaaaatgacacatgcatacccttgagaacacaccaacattttcccatgggggtaaggatacatgcatagctctatggaaaccaacttaaagatgtccaatttccatatgtgttgtcctaaaatatgtgctctgatgaggcctcttcagatctaccatttctctttacctcccttttcacaacagccatactccctatcctccaaaaaaaaaaaaaaaaaaaaagcctacagccgcggccgccctcttgcc

SEQ ID NO: 48253 - DNA, 749 bp, Homo Sapiens
aggttttcatgatcgaccgctacctgcagcgccacgtgaagctcatccacacagaggtgcggaactatatctgtgacgaatgtggacaaaccttcaagcagcggaagcaccttctcgtccaccaaatgcgacattcgggagccaagcctttgcagtgtgaggtctgtgggttccagtgcaggcagcgggcatccctcaagtaccacatgaccaaacacaaggctgagactgagctggactttgcctgtgaccagtgtggccggcggtttgagaaggcccacaacctcaatgtacacatgtccatggtgcacccgctgacacagacccaggacaaggccctgcccctggaggcggaaccaccacctgggccaccgagcccctctgtgaccacagagggccaggcggtgaagcccgaacccacctgaggacggcagtgaggatgagcacctctagcagcctggactccgcagtggctgtgtcagcctcacccttcgtgtgcacccgcatgggagggtcggagggtgctgcccgcccttggtgctggaggcgggcttggtgtccggctcaagtagccttcctctgctctgggaccagtggtttattttcccgcaaacgctgagtgacttggggccggacagttcataaataattgattcctttccccactaaagcagtcgaggagattgtaatccactttttagtgcaacaagagctccatgttatgcttgttataaattatttacacggga

SEQ ID NO: 48254 - DNA, 627 bp, Homo Sapiens
cctcccattatttctagttgttagtcttgttcctaatgcacttgtccacatcgtatgtcattacaagttcttccccttctttaaccagagggcatagaattggggcttagtgtgtcctaaacaagctaaaagattccacctgtagaatcataaaatgagagtctcacacagtttcatgctactttttgtctcttcagcaaggaacggttgctgggattgtcagtgaccaggcatgtctggatagcttcacacatacacataatgcccggttcacctcagcccacacatgttctagaagtagccacttgccaagtgtcagtgttcagtctaaacagcaaatgggttaaccacatgaacagcactggcccatgtgagaatggtgtgaaggcctcctttgtaccattttccatttctctaactcacatgtgtagtctcagcactgcagaggacagatttgtttgtgccctctgagactggttggttggttggttggtttatttttgttttatgaatcctaaaatttgtctttggcctgtaaaaaaaaaaaaaaaaaaactcggaggggggcccggtaccccaattcccccctataggtgagtcgtttacaaattaaactggccggccttt

SEQ ID NO: 48255 - DNA, 544 bp, Homo Sapiens
  misc_feature (543)..(543): n is a, c, g, or t
tggtggaattcccttgccttagttgcttttgtagggtggacagcaggactgcatgagaatagctgtgcttctggaccctatggtgaaagctctagtgaactgcaattaggcccagggtcccggaggaagaaggggagagaaaaaggggggtagttttccaaaagataagtaggggacaaaaaagtccacggggcctatgagcggtgagactcctgccctgattgtggcaaagcacctggagatgatagaacttcctagggaaaaggctgcatggagtccccagggatgctgggccctggtcaccaaggctccctgggaaggtctcttgtacctggggcacacagaccaacacttctgaatttgcaagcttaagagcatgtatgagcagaacctgtgcagaccaaggcttagagggctcacctcaatgttttggcactgtgtgagaccccaggacccttttcgtgattctggagaggggacaaaccattatttaacaacaaaccaggtagcaggatagagactcattctcatctatttttgggnt

SEQ ID NO: 48256 - DNA, 485 bp, Homo Sapiens
  misc_feature (30)..(30): n is a, c, g, or t
ggtggtttgagttttgtagggccatcaccntggaaagtcaatgtgactagacacaaagtagcccagaggctacttttcttcctacagcttattatagttgtaggttctatgacctcacttcatgggttccaggcaattccgctgaaaggtttgtctcctgaaattttttaagtttgttttcctgacacatgtaatcagatgtgtagcaaccgagggaaacgaagcctaacattctccattgtggaaatacacacaggaggttacacttcacagcgtggatctttccagcttacacatgtgggatgacatcacagaaaccacaaaagcagcaaattaaactgtaggagagtcaatactcctgacgagtctcggggggggcatttttatgccttcttaactttatgagaattctcaggctgaactataggccattgttcccaggcaaatcaatacatcaatgcatcctcaaaaaaaaaaaaaaaaaa

SEQ ID NO: 48257 - DNA, 727 bp, Homo Sapiens
gggacaaccgagagcgtagccaccaccaggatggcagtgataatgaggaagaagtgagcaagagatatgggggcttcatgagaggcttaaagagaagcccccaactggaagatgaagccaaagagctgcagaagcgatatgggggcttcatgagaagagtaggtcgcccagagtggtggatggactaccagaaacggtatggaggtttcctgaagcgctttgccgaggctctgccctccgacgaagaaggcgaaagttactccaaagaagttcctgaaatggaaaaaagatacggaggatttatgagattttaatatcttttcccactagtggccccaggccccagcaagcctccctccatcctccagtgggaaactgttgatggtgttttattgtcatgtgttgcttgccttgtatagttgacttcattgtctggataactatacaacctgaaaactgtcatttcaggttctgtgctctttttgggagtctttaagctcagtattagtctattgcagctatctcgttttcatgctaaaatagtttttgttatcttgtctcttatttttgacaaacatcaataaatgcttacttgtatatagagataataaacctattaccccaagctgccataaaaaaaaaaaaaaaaaaaacaacaaaaaaaaaagcacaaaaaggggggggggcgccaaagaaattccccgggggggggccaagttaggggtcc

SEQ ID NO: 48258 - DNA, 467 bp, Homo Sapiens
gatgttggagcggccgcagaatcaagattttttttttttttttacaaaatgagttcctcaaattgaccaatagctgctgctttcatattttggataagggtctgtggtcccggcgtgtgctcacgtgtgtatgcacgtgtgtgtgtccattagacacggctgatgtgtgtgcaaagtatccatgcggagttgatgctttgggaattggctcatgaaggttcttctcaagggtgcgagctcatccccctctctccttccttcttattgactgggagactgtgctctcgacagattcttcttgtgtcagaagtctagcctcaggtttctaccctcccttcacattggtggccaagggaggagcatttcatttggagtgattatgaatcttttcaagaccaaaccaagctaggacattaaaaaaaaaaaaagaaaaagaaagaaaaaacaaaatggaaaaaaaaaaaaaa

SEQ ID NO: 48259 - DNA, 796 bp, Homo Sapiens
  misc_feature (15)..(15): n is a, c, g, or t
aattaaaccgaaatnagtacataaaggtaacaaaaaatttccaaaatgcattaatttaaggaacatacacctcatgacccatgagccaaaaaataaatcacggcaaaattgcaaaaatattttgaaatgaattttaaagaaaatacttagcatttaaatacttagcatattaaagctctaagtacatatgttagaaattttaccgaaaggttggctatcagtgtttccagaagccagggaaaaagtttatacaatttgatcgctgaggcagggaaacaaagtgagacctccgatcgccctgcctttctgaggtgagcactctggatcccatcgcaggagatcagagtcttgctgagttgaggagaggaagattggagttgatactgagatagcttgaattttcaggacaaagtatcaacaaggaggaaggtagacaaaaaaatccagaaatctatgtagagaccccattgtgtacattgcggaacactaagcctaacaattctcaaaattagcgtgagattgggaaatatctaatttccatccagccacagtggagagtcctgactgaaaaccaggcattcgctaaagatcccagaaaggttgtgtgttacatacgtagggctaaactatcctgactaaaaactacactacacttgctcctcacccccacaaaaagcttaaaaacaagcctcaatagtataaagctgatctgtaagtaactaaactacctgcagaacaaagtccaaatttattagttccagtactccaaaaaaacacatgtaaaaaaaaaaaaaaa

SEQ ID NO: 48260 - DNA, 548 bp, Homo Sapiens
attgatgcattctcagattatgccaacttcaagtaagcggcaacaagggtccgtggaccaggaggattgcctttaatattttgtaatattctgttttgttaatataccccaaattgtgtatatatcttataactgttttagaaattggtacataggcttctattacctattaggtggaaattttatatgtaaatgtgttagcactgatagtcctttttccaatgttttattggggaattaaatagtgtgatgtttggattgatatcgtgaaatcctcagccgagaaattgggctggattgtgctttggttaatacatctttccctaaagaagataaacacaaaatccattccaggtagctcggcaccaactaagaaaaaaagcacaaagttctcagagctctcgaggaaagtggttgtccccgtaccaccatgcactgtaaatatccctcccctctctccctggtcccctcccccatccccaccactgatatcatggggagtaataggaccagagcggtaatctctggcaccacactagggactatca

SEQ ID NO: 48261 - DNA, 611 bp, Homo Sapiens
aaagaagaggccaaacttcaaatccacttcttcactaacttctctttctgtggcaccaacattcagcccaaatataactctgggacccacctatttaaccactgtcaattcttcagactctgacaatgggaccacaagaacagcaagcaccaattctataggcattacaatttcaccaaatggaacgtggcttccagataaccagttcacggatgccagaacagaaccctgggaggggaattccagcaccgcagcaaccactccagaaactttccctccttcagatgagacaccaattattgcggtgatggtggccctgtcctctctgctagtgatcgtgtttattatcatagttttgtacatgttaaggtttaagaaatacaagcaagctgggagccattccaattctttccgcttatccaacggccgcactgaggatgtggagccccagagtgtgccacttctggccagatccccaagcaccaacaggaaatacccacccctgcccgtggacaagctggaagaggaaattaaccggagaatggcagacgacaataagctcttcagggaggaattcaacgctctccctgcatgtcctatccaggccacct

SEQ ID NO: 48262 - DNA, 870 bp, Homo Sapiens
caccctacctccagggcatagtcagtctgggctgagatccccatgatcagatatttgatggaaagtcctgaaaggccaatgagttggatggcaagaatgcaggcagaagctgctggataaaataggctacagccacctcagatgctttcagtgctctgtctgaggatgtgtatatgcatatgcaaactcgacccccgttcctgcccagataatggctcaataactctgaggctggttgctcagcctctgagggcaatacaggcatttaaaaaattaaaatgaccaggcacagtggctcacgcctgtaatctcggcactttgggagactgaggtgggagcatcgcttgagaccaggagtttgggaccaggctgggcaacacggggagaccccctctctacaaaaacatttttaaaaaattagctgggcgtggtgatgcgtgcctgtggtcccagttacttgggaggctgacgtgggtggctcacttgagcacaggagtttgaggctgcagtgacctatgaccacatcactgtacgccagcccgggtgagagagggagaccccgtctctaaaaataaaatgtaaaatcactgaaaaaatgagtgttcggtgaaacaagtgggattttctgggccagcaagtcttccaaactgtatatgatgcatcctgtctccatgtgtaatatattttaatgataaatgtatttttaacagtgaaaaaaaaaaaaaaaaaaacgttaaacctttgagggtgggcccagcataggggggggagggtctttttaccctggtgtagaagcctaaccttcaccacctatatcccagaaggggggagctttttttcagaaaaagggggccaccagtgggggggaac

SEQ ID NO: 48263 - DNA, 355 bp, Homo Sapiens
tatccatgtaaccaaaaaccacctgtacccccaaaactattgaaatcttaaaatagtaataattaacaaagtaaaacaagatcacaccctggaacaattggaggattgcttgctgccctgcatcttaaggcgtattctagcagcaaagcttgtgatgcactgacttggggcaagtaaaactgatgctgaggacaaagggagaagatgttcctcgcccagggaaatgaaaacttttcttattcaccttgcttgtgcttaaacacttatgttcatctagtgtagaatacatggctacttgtttgtaatttttttattggtggaattaaagtaatttttccttaaaaaaaaaaaaaaa

SEQ ID NO: 48264 - DNA, 634 bp, Homo Sapiens
gggtagatcaattgaggtcagaagttcaagaccagcctggccaacgtggcaaaacctcgtctttactaaaaatacaaaaattagccaggtgtggtggcacacacctgtagtcccagctactcaggaggctgaggcaggagaatcgcttgaacccaggaggcagaggttgcagtgagctgagattgcaccactgcagtccagcctgagcaacagagcgagagtcagtctcaaaagaaagaaaaatattatgttctaattaccttgaaagaggaaagaaaggcttgaattgatcaataccagtttgaataagatacttatgtgaacaagcattctcaacattattattaaagtaaaactactcagtttacagaatgggatctgaaactacagctttttgctattaaaccaaatacttgtgatctactttgtttgagcaaaacagcattatttgttatgttaatgatggttaatttccattttattggttttatgtttattttaatttgtaaatgttttagcatttattattgtatgtgaactatatttacctattttatgttgataaaaatataaaaaatattaaaataagtatatattaagttaaaaaaaaaaaaaattcactggccgtccgttt

SEQ ID NO: 48265 - DNA, 810 bp, Homo Sapiens
ttctctctgaactattttattaatatagtactattttaaattatgaaatgtagaggaaaccattatccttagctttttcctaccctctccagtcacctccttcattgagaagggcatattaggcatccatctggataaatgacccctgagcaaggtgttagcccacctacccacattctactctgaacctggcataaactgaaaaaaaaaaaaagaggactaaaaaccttggtgtagttggggtcagtgggcctattcctgttcccccagattctttggggggataagttctagagagtgtttaaagtatatttggcatggtttaatccttgttttaaatttttccattggataagactcgcatacagttgggtttggtgatatttctgggtctcttggtttctggtggttttagagaacacccaggactggtaaaggtatactcagcaatatggttttagaacagactggttttcttttggcatcactaatcttttcctaacatgcagcatttacgtgtttaaaaagctaaagtccaccaggcacagtggctcatgcgtgtgatcccagaatgctgggattacaggctgagccacggggcccagcccaaaagctgattagttcttactcattggtgggtagctctctgtggggaagtgcatgagcctactgttgggactccactggatcagaaccaatgtgtgagtatagaaggctgttagacacctctctgtgggtctctgggcggcacggttggctttggccaagtggagttctcggagaagctgtttgttgtacgggcttctatgg

SEQ ID NO: 48266 - DNA, 964 bp, Homo Sapiens
  misc_feature (800)..(800): n is a, c, g, or t
  misc_feature (802)..(802): n is a, c, g, or t
  misc_feature (858)..(858): n is a, c, g, or t
ccacgcgtccgcaagaaccccgagtcgaggatcgtggtgccggaaatcaagctgcacccctgggtcacgaggcatggggcggagccgttgccgtcggaggatgagaactgcacgctggtcgaagtgactgaagaggaggtcgagaactcagtcaaacacattcccagcttggcaaccgtgatcctggtgaagaccatgatacgtaaacgctcctttgggaacccattcgagggcagccggcgggaggaacgctcactgtcagcgcctggaaacttgctcacgaagcaaggcagcgaagacaacctccagggcaccgacccgccccccgtgggggaggaggaagtgctcttgtgagaggcagtccctgcgtggaaagttgctgggcccccgcccccggctcccccgcacgcatgcatccactgcggccggaggaggccatggagcccgagtagctgcctggatcgctcgacctcgcatgcgcgccgcgtcgcctctggggggctgctgcaccgcgtttccatagcagcatgtcctacggaaacccagcacgtgtgtagagcctcgatcgtcatctctggttatttgttttttcctttgttgttttaaaggggacaaaaaaaaaaaaaggacttgactccatgacgtcgaccgtggccgctggctggctggacaggcgggtgtgaggagttgcagacccaaacccacgtgcattttgggacaattgctttttaaaacgtttttatgccaaaaatccttcattgtgattttcagaaccacgtcagatataccagtgactgtgntntgtgggggtttgacaactggtggaaggcgagcagaaaaactccggcgctgaagggnccattggaggtggttgctgcatttgaaaaagggattagggggggctaaattgtggctcctagggccaaacgggaaacatggcacttttccagagccgtgggtctca

SEQ ID NO: 48267 - DNA, 785 bp, Homo Sapiens
ggagacctccacagaacccttccagcaagctgttttctaaagcaaacaagagaaggaaagtctgagcagttttgattagatttcccagaagtcaaagcaaggaaaaatgaaaaagcttcatttctcacgttcttaaaagagagcacagatgttgcatcatctggttagataccctgagaataaaatctggatttttgtgagaggaaagattctgggtgctcatgaaaaaagaaacaaaacaaaacttgggagcctcttgagagtgtacagcatcagcccttgccaactcttgtttatatgcatttaactttcagttaaccatgggaataattcatgaaaatccaatctacaaacaaaggccatcctaacgttcatgttattcttttccctaagaatctttcacaagagctataatcaagtagaattatgcttcgatttgaattctaattcaattgaaaataaaaaatgagggccggacgcgggggctcatgcctgcatcccaccgctttgggaggctgaggcggacggatcacgaggtcaggagatcgagaccattctggctaacacggtgaacccccttcctactaaaattcaaaaaattacccgggcgtggtggcaggcgcctttattcccctcttctcggggggctggggcgggaaaatggcgtaacccccgagggcgatgtctcatgaacccaaatactgcttctgcccttccaccggggcgaaaaagaggagactctgcgcataataatagccaattaaggcggtgcgggcccttccttt

SEQ ID NO: 48268 - DNA, 400 bp, Homo Sapiens
aattaaggggctggcaacatagctgggaagttgactgcatgggttgtcatatctaaaagagatttcaaagatggaaacaggagcatgggcgaagttgagatctcagccccctcattttactgttcccctacttgtgaaattcattttagttcttcagggcccatctgaaatgccagcttctctctgaaggttttcctttagaccttggctggaagatatctctttctctttggaaactctataacttgtggtttgcaagtattttatggctttgtattcccccttatgtgtaagatccttgaagattgttttgcatatctttgtatctcctccaccacctgagactctctgctgtgtgtaggatctctgctgaagaaatcataatggaactgaatctgta

SEQ ID NO: 48269 - DNA, 510 bp, Homo Sapiens
tggccgggctggggatgtagataggaaagaatgtctgctgcaagagtgtatgaagggggattgtcatttacaaaaaaaaaagtacctcatggatggaaggattcatgaatagataatggacataggaaaggaggtcaatggaggacacataacagacatgctatccaccatttatttgtgattttgtaagagggttctcttctttgtcttgttcagatattttcatgtgtgtgttttagtgagaatctgagtttttaatcagtaaagtctgatgttttgataacttgatgttttgatggtagactcttgagttcatcttgtccaaatcttctagcattttcaaggatgaagcctctgtgggatctttgggcttggggctgaatttctcaggcataaatacctaatggccttgtctaagagggaatagatctgttctgagtgtccccaaaaaagttgtcctaggaactgatgtggagaagttacagggagactgatttccattccttattg

SEQ ID NO: 48270 - DNA, 817 bp, Homo Sapiens
  misc_feature (761)..(761): n is a, c, g, or t
  misc_feature (797)..(797): n is a, c, g, or t
  misc_feature (810)..(810): n is a, c, g, or t
tcggactctgtgtcctcaaacagccctttccactttgtaccttgttgtgccagatcatacctctagggaattgttgagaaagcctgattgctgtttaaaggtacaatggaagtcttgagtttgagaagtaatgttgactttgcccttccttctccctagtgctgtgatgggctgtttcctgatttggtttcatatgctcctcacaacaaccctgtgaggtggtccgttggcagaagctggtatgactggcagttgtctcgctagaggaaccttctacttcataccataattaaacggcttctaaaataatatgatgtctttaaattttaagtctggcattatttgtattagctgtttttttaactttattattaaagaatttctaaccataatatttagagaaagagtggtagagttaacctcgttacccaatactttcttccctttccttttataaaaacactgcatacggttttttgtttttttgtttttttgttttttttttaagagacagggttgccctgtcacccaggctggcctcaaggaatcttcctgcctcagcctcctgagctgggactgtaggtacaagccaccatgcctggctcacaatacagtttttttatctgaagcactcagtttacttttttgctcttttatgtcaaatgaatataaagttgatatcatcctctgaccaattaaaacattcttttcagatattggtaacccgtggcctggcaagaccccgtcctggctatccaaangcactttaacagcagctttttctctagcggtaccgngagtaagaacccntagctga

SEQ ID NO: 48271 - DNA, 363 bp, Homo Sapiens
gattttctattcagttttgtctcaaatagtaagttattgtgaacaatttaataacggccctcctgttctagtttgcctaatattttagttaagatttagtgttttaacctatttttttaagtttattttttgtattagattttatttgaataagttatgtgggtttagtaattgacctatttattcattgcttcactaattcatccagattagttttaagtgtgtatatgtatttgctcaccagatcattttcttgggaccttgaactgtgaatgttttgtcctaaccatttaatattttctaggdacttgctgaagttcttgactatttaccagctttaactttggggctctaagtttcttt

SEQ ID NO: 48272 - DNA, 296 bp, Homo Sapiens
gtggaattcctaccccaggtttctaactttgtaacttgcttctgatgtgggtccctaacctataatctcagcttccctaccctggactgaagggtctgcccatccccccaccaccctccatcctgggggccctcgcacaaatctggggtgggaggggctaggctgaccccatcctcctctccctccaggagcccccagcatgtcctgacctgtgcacggggatgtggggacaactcctacccttctttccccacatgccccactaaaccatctgacaacattaatgaataaaatgg

SEQ ID NO: 48273 - DNA, 581 bp, Homo Sapiens
gttgttatgaagaattaataataagatatgtaaaaccagcagcaccaatagtgcctgacaaaatataactgctcaataaataacagtgaattattataacaacagctaatggtattctattggaacacatggtctgtttcttttccaattctgagtgatctcaacagcctcacggcacattgaaaataaaagtcaacttcctcaccttccccataggccatggactttcccatctctacccacttgtgcagtttctcctctttcctctctcctcctcagttactaaagcaatcttccttcaaacacttctattttccattacatcacttcattcaggttggtgatcagctgcaacttcctcagaaagaccactgctgcttccagtgaccctggctttgtcttgctttgtattagattactcagctccctggtattattgttgtctttatcgcttattagaatgtaacccttaatgggcaagaaattgtcagtcttgttcatttatcatcgtataaaaaatgtttctagcacacagaaagtgaccaataaatatttctggaatcaaaaaaaaaaaaaaaaaa

SEQ ID NO: 48274 - DNA, 761 bp, Homo Sapiens
tttatgcaatacgttctcaacaagtatatcctccggcaaactgaacaaggaccaagtctgttctgcctacagctctgcttcctcatagctgctttccagaacgtgactcttgcaaattatcaagaaaggggaactaatctaagggatccagatcaaacagcctcatgaagacttattttatgtttctaatataaagatagaagttttcagaaaagccctgctacacagaggatcagagcaggggtgggcctgctgggctgcagctgggattctgagcatcctttcccggaggcacggaaagtgagtgagtgagcccagtgaggaagaagttgaagctttgatatgagtaaacaagtatctctacctgaaatgattaaagactggaccaaagagcatgtgaaaaaatgggtaaatgaagaccttaagattaatgagcaatacgggcaaattctgctcagtgaagaagtaacaggattagtcctgcaggaacttagactgagaaggaccttgtaccaaatggggctaccatggggtccagcacttttgataaaacgttcatacaacaaatggaatacgtaagttccctgaaagtgacaatcatgatccgggacacttagataattcaaaagcgtccaaaacagaacaccagaaaaatcgagaaacacagcaaaaggaagaagaaaattcactgtcatctactattgattatgtcccgagcagatcggctttcaccaggaggatctctctggcacagaaatgga

SEQ ID NO: 48275 - DNA, 647 bp, Homo Sapiens
  misc_feature (1)..(1): n is a, c, g, or t
  misc_feature (4)..(4): n is a, c, g, or t
  misc_feature (13)..(13): n is a, c, g, or t
  misc_feature (16)..(16): n is a, c, g, or t
  misc_feature (21)..(21): n is a, c, g, or t
  misc_feature (50)..(50): n is a, c, g, or t
  misc_feature (632)..(632): n is a, c, g, or t
nttnggccctcgnggnccagnaattcggaacgaggggcattagataaccnatatacacatcttctgtacataaaaggggagaatgggaggcacaaaaaggagtcattgattttatttgctgttccaaaatccaggaaatgttggagtttcttttatcaggcctcaaagcagaagaataattctccgtggttcttggctctaccctctagactcttggttttgtcttctgagtcttcctttttcatcaaagctagagtgtgtttttacctgagttcttttctcaggctgcttctttccagtagaattttaggggaactagtggtctctattttgtactgtttctgtcctttttgatccaagatggcagtgtttctactgatacagaagattttgtgggcctcctgtgattctccttgggatttactccattagacaaaagccacactcataaatatcttctttatgagacctaagcttcttacagactctgtttttcggttgaaaggatctgtgaaacataatcttctgaacagccttttgtatgactgaatagcacaatcagccctccgtatccacaggttccacatcccagattcaaccaactgtggactgaaaatacttgagagcctggngtggtggctcatgcc

SEQ ID NO: 48276 - DNA, 678 bp, Homo Sapiens
ggcatgtgccagcatgcccggctaatttttttctttttttgagacagagtctcgctctgtcacccaggctggagttcagtggtgcgacctcggcttactgcaacctccacctcccgggttcaagtgattctcctgcctcagcctcttgagtagctgggactacaggcgcacaccaccacgccaggctaattttgtatttttagtagagacaaggtttcaccatgttgaccaggctggtcttgaactccttgacctcaggtaatctgcctaccttggcctcccaaagtgctgggatcacaggcgtgagctatcacacctggccccagaagtgtttcaacatggaaattttccttagcccttctgtggttgtcatggcttaatgtgtgtctttccagaactttgaatgtttgcatacttgtggatgtacctttcaaatatgtttgtcttgtgtatcatatataaatggtattgtggtcaattgctccacaaaaaagaaaaagaatcaaatacaaaaccaaaaaccgtttgttcggcgcgctttgggcccccggaaaaagtttttctacacacttccgttgggccgcgggggccccatatgggttactgtgtgacgtgggccaaaacggtgtccccagggaaaaccgggccaagaatagggctgggtttctcccaattaaa

SEQ ID NO: 48277 - DNA, 520 bp, Homo Sapiens
cggaataactgtctactgtttactagcatataaaataagtatgatcattattattgaactctatcagctatgaagctaaattttaaagtcaactgctcttcctactgactcaaatagtttattttttaaaaatacttatataatacatgcagagacaagatacacaatgattataagtattaatctccataagagaaaatatttatgaactatatttctcattgcactctgtaataaaaagcagttagttgttacttacctaagagttaccacttccgtagcctataacatcaaaacgtagtttttgcatgttttcaattttataaatatatattttatcagacatcatgaattattttgtgtcttgcttatttcactcaattttttaagatctgtacattattgcatgtggcagtagtgtattttcattttgcatactattccattttaagaatatattgctgtttatcctattgatggatatttgtattttttatacttttgtgtaataataaaaata

SEQ ID NO: 48278 - DNA, 437 bp, Homo Sapiens
cctatcatcaactgtccagtggactggaccttgctcgggttcaagtagagggcataggttaaaaggtaaaagtgcacttattgactcagacaggacactcagcgtcagtctgtttgcaaaggactagcaaacttaaatgaaaaaaaaaattctatctgtgtttccccgataaataatctacctcacaggggaaaaaattagtacaagagaggcgtggggcagggagtcaatggtgaatgtcaaagcaggctccaaagctggaccccaagctgtcttcaacaatgaccacgactgtcttcagtgttaaaatccatcacctaaagggccgcagtgtcgcagggtttgaggagccacatgttctcatgctgccacctgcaggggtggatccatttcaagtatttaggcaaatgtgtctctgaactaaagtgtgatcttat

SEQ ID NO: 48279 - DNA, 559 bp, Homo Sapiens
  misc_feature (548)..(548): n is a, c, g, or t
aattcgcggccgcgtcgacgctgcgagaagacgacagaagggccattctactaattttaaagaacatcttggaattttacactcttggaatcatagtcgtagaatcctttttttgagacagagtctcactctgtcgcccaggctggagtgcagtggccagatctcagctcactgaaacctcagcctcccaagttcaagtgattctcgtacctcagcctcctgagtagctggaattccaggctgtactcactgctttgctcatatccccgctcattaccagggacaggccagcacccctggcattgcatctcacatatccactgatggatggagaacagactgaaattcagtgccttagagaccacacactccaaccccctcattgtgcagatgggaaaactgagagccatagaagggaagtggcttgcccaaagccacacttactgttttccccacactgtaccacaaactttcaccattcttcaggtttggaaaaatactaataaactgatcaacactaaaaaaaaaaaagcggccgctcggttgtngcgcggccggg

SEQ ID NO: 48280 - DNA, 766 bp, Homo Sapiens
ctgcactccagcctgggtgacagagtaagactctgtctcaaaaaaaaaaaaaaaaaaaaaagaaatttagatttctgtggtaaatataaatgagtttcattttaagtaaactcattttgtgggatttgagatttaaaaatgaaattaattttgcacattctagtcatggttgggctctaaggcaatgttgtaaagctgtaattgtttgccttatgggaagaagtgaaaaggaattaaaatttatggtgtgtctactatgaaccaggcatgatgctgagagtttaactgtgtaatttttggcctaaatagccctgtgaagtagatattattccaactttacaggttagaaaatttgaggcacagagaggtgaaatatttgcctaaagtgaaacggcaaatttggcaatttggacttggattcaagtgtttataactaaagcccagctccttgcatcataccctggtacctaaaagacataaaaacttactttaggtgcaatgtgaatgaaaatgacgctatgacccaagcttgttgtctatgtgctccttgagaaatagttctcgttgatagatgcgggcattactcaaaagcccttgctatctttgccatgcattactctaaccacttgacatgtattaatttaatccttaccgattcctgagcgatgtgctatcatcattcccaatcttcaaaaaaaaacacttcctatctctctacctcctctcttctccttctctaccctctccgactcttcctcgaccatta

SEQ ID NO: 48281 - DNA, 620 bp, Homo Sapiens
  misc_feature (528)..(528): n is a, c, g, or t
cgagcagacagctggaggagcccggggcagggacacctagcccggtgcgtctgcatgccctggcagggttccagcagcgagccctgtgccacgcgctcactttcccttccctgcagcggctcgtctactccatgtgctccctctgccaggaggagaatgaagacatggtacaagatgcgctgcagcagaacccgggcgccttcaggctagctcccgccctgcctgcccggccccaccgaggcctgagcacgttcccgggtgccgagcactgcctccgggcttcccccaagaccacgcttagcggtggcttcttcgttgctgtaattgaacgggtcgagatgccgacctcagcctcacaggccaaagcatcagcaccagaacgcacacccagcccagccccaaagagaaagaagagagcaaaaagctgcagccggtgcttgcacaccgccttgcacatagcagaggctccgggctcactccttcctggtgggaaaggaagatgcctgtcctctccgtggaagaccctgngccctcaccgcaagcagcagtttgcgttttgaaaggttattgggtcccttcctcgggctgtgttcttgctggtgagcaaaagtgttgcctgc

SEQ ID NO: 48282 - DNA, 651 bp, Homo Sapiens
gcggcacctgagggagtaccaggagctcctcaacgtcaagatggccctggacatcgagatcgccacctaccgcaagctgctggagggcgaggagagccggatctccgtgcccgtccattcttttgcctccttaaatataaagacgactgtgcctgaggtggagcctccccaggacagccacagccggaagacggttctgatcaagaccattgagacccggaatggggaggtggtgacagagtcccagaaggagcagcgcagtgagctggacaagtcttctgcccacagttactgaaccccttggtccggagccttgactctgccctaggcctgctcaaagcccaaaccctaagaccactcctgaattgtctcctctccctctgcatgtgtctaaaaggtggtaccaggcatccctttcctggcttatggccaagccctacccggccagcagtcgctgggcctctccctgccctgacacttgatgtgacctatgtgcttcccttttcatgtcccgataagaagccaatgatcccccctcagggacaatctactccagccacgatgagaagtgggtgagccagggtctgagtttcacatttgaaccaaataaaatgctgtcaagagaaaaaaaaaaaaaaaaaaaaatcttga

SEQ ID NO: 48283 - DNA, 821 bp, Homo Sapiens
ggactccagcctgacagagtgagactccatctcaaacacacacacacacacacacacacacacaccacacacacacacacaggttcctcaccataagctttggggaaaattcttggcttttttgctgggggagagagcagtgcccagggaagattggctgatctcagagctggagggtttatgcgggactggccagccccttcagctgagtgggacagcaacacagtgggtggtaaggggcttcataagatgtacaagatgagggagaggcccctccagccaaccctgtgtctaaagagtcaggtaacgaagaactttccagagacagctgtgagtccgtctggcttaaggggttgtacaggtgtctgagaatggggcctgaaggtgcagggcctgcaggctgccctgtttggaaggttcctgtccttctgtcttggtagaaaatggcagctagccttgtaaagggcctccttgtgtaacgagatagaccatgtagccccagatgcccccatggcttcacttccctcttgggggtctctcaatatatgtctagtgccaccactattggtgggaaagtttccttctggaataaccttggggtggggggatggggttttattttaataaaaaaagaatgtctcaaccgacaaaacaacaaaggccaaaacgccatagagacaacagaacaacgacacgaaccaagaaaactgggggggccgccccggccctaaaaaacctttctaaaaaccatcttttggcgccccgggcccccctaggaaacagaaaaatgggcacaaaccctgtccccaaaggaaaatcga

SEQ ID NO: 48284 - DNA, 606 bp, Homo Sapiens
ctcagcctcctgagtagttgggattacaggtgctcaccactatacccggctaatttttgtatttttagtagagatggggtttcgtcatgttggccaggttggtcttaaactcctgacctcaagtgatccgcccaccttggccttccaaaatgctgggattacaggcttgagccaccaggcctttctttgttcttaggagtatagtcagactaacttctagtagttatatttctaataattgaggatgtaagtaaggatcaaatcttaaatcagtataatgcattgtcattccagagataaatcctagacccttcttggcctccttctgacataattctaatcctacagtctcagagatgctgttgtatcctgccccccaaccccatgatagtgatagtggtttttgccttgaaggaattgctttgtatttagcttttccccctctagatttctagttccttttcagtattggattggatttgagatttgattaacctagtactcaggttcagatgctcgcctctttgcaattttaacactcattcgacaataaagtcagtaaaaaacaaaaaaaaaaaaaaataaaccaaaataacatcaaaccaa

SEQ ID NO: 48285 - DNA, 591 bp, Homo Sapiens
ggctgaggcagagagagaatcgcttgaacccaggaggcggaggttgcagtgagctgagatcgcgcgactgcactccagcctgggcgacagagggaaactctgtctcaacaaaaaaataaataaaataaaaaataaaaaaagaatatggaagcaaatggagaaagggaggaaactgaggtcaggcaaaccttccagcaatccgttctgcccagagaacatactgacgacagagaacacactgagcgttatctgcttctagttagagcattgccgattgccttcataattcataatgtgctgtgctcctctgagggtctatctgtatttctcttcaaagaattccctttttaaattcttgcagctgggttttaagacacaataatggggcaaattaagttttataaacttggagatttttatacagtaaataaaaaaataatatgtactagtcacccctgaaactgcattcttagaactcgactcttgttttatttaaatacgtgcgtagatatctgtgaagattttcatgtacctatttaccttgtcactaataaaattaaaactgaaaaaaaaaaaaaaaaaaaaaaaaaa

SEQ ID NO: 48286 - DNA, 831 bp, Homo Sapiens
cagttttgccttgaatatttgtgatgaaatctacgatgatcttcaagattctcttaattttgctaatattcagctgatcagaatttgtttttaaaatgtctggctggtgggtacttcccactgacaactgcttattgcttacagtatgtctgccttgtcaatgaatgaggttcagggtgcttcctagggatcagagtcagtaccatttttctctttcatctacagctgatcagatgtttattttacttacattaaatgaatgatggagatccaaagtgaatattatagaatattattctaggatcaacatcttttgctttgaaaaatcaacatctcttggcttttcctcagccaacccagcaaacagagattatcagactctgttgattttttactttcatttggcattggcctttttcttactgaaattaaaaaggctaatgatttgcctggtttctgtctctgacctttgcaggtctattttcttaatttttagatactatatatctgaaactttttttaatgtgtcaactttttaatggatagaaaatagacacgaatagtgattatgtgttcatttttcaattttccagaataactgaagtgaagtgatggactccgatttggagagtagtaagacgtgaaaggaatacacttgtgtttaagcaccatggccttgatgattcactgttgggggagaagaaacaagaaaagtaactggttgtcacctatgagacccttacgtgattgtaagttaagtttttattcaaagcagctgtaatttagttaataaaataattatgatctatggttggttgcccaatggaaatc

SEQ ID NO: 48287 - DNA, 468 bp, Homo Sapiens
tattaatattacttcactactatgtgtttagtacagcgattggattaacctccttcgtcattgccatattggttattcaggtgatagcctatatcctcgctgtggttggactgagtctctgtattgcggcgtgtataccaatgcatggccctcttctgatttcaggtttgagtatcttagctctagcacaattacttggactagtttatatgaaatttgtggcttccaatcagaagactatacaacctcctaggaataactgaagtgaagtgatggactccgatttggagagtagtaagacgtgaaaggaatacacttgtgtttaagcaccatggccttgatgattcactgttggggagaagaaacaagaaaagtaactggttgtcacctatgagacccttacgtgattgttagttaagtttttattcaaagcagctgtaatttagttaataaaataattatgatcta

SEQ ID NO: 48288 - DNA, 869 bp, Homo Sapiens
tgatcacggaacatcattgtgtgcagaagaatactgtacctagtactaagttcttttcatctttgatttttctttagcttcatcagtccttccttcctaatctctaatcccctgaagcctaacacagttcctaatgtgttttgccttaacctcttttctcttcccacattggtacttctggttggggctctctttacttactgcttaggcacatagtcaccttctctggactccctgcttccatgctttctccttcagtccattccgcaaactcttgtgatcttccaaaattagctctgattagctttcacttcctgtagaagcaagaacaagctcctctgcttggtacttagtctgtgtccatgtgatccaaaattaccttcctattgcatttcctactcctttgctacgtgtattggacctctggccaaattacaaaagatgtactctttgttctctaaaaccacactaaagttttctgacttctttcacactctttatgataatcctctgcctgaaaggctattgccacctgtcaaaatcttcattattctttgcctctttcctgagcctcttgcttgaatgtgatttctttctccctgagacccataaggttcatcttatgggaccttaatttgtcttgcatggacatttgtgattctcattttctcaccattaaattaccttggagggtagggctgtggtttactcctgtctaaacccctgaagcctaacacagttcctggcacacaacaggtgttcaacagatattgtgctcattcaataaatatttactcgctttgtttaatggattccacccctgccttcctaggtgacctttggacaaattctcgaacccattcaccaac

SEQ ID NO: 48289 - DNA, 797 bp, Homo Sapiens
agaagccaaattctatgaggaagttcacgatcttgaaaggaagtatgctgttctctatcagcctctatttgataagcgatttgaaattattaatgcaatttatgaacctacggaagaagaatgtgaatggaaaccagatgaagaagatgagatttcggaggaattgaaagaaaaggccaagattgaagatgagaaaaaggatgaagaaaaagaagaccccaaaggaattcctgaattttggttaactgtttttaagaatgttgacttgctcagtgatatggttcaggaacacgatgaacctattctgaagcacttgaaagatattaaagtgaagttctcagatgctggccagcctatgagttttgtcttagaatttcactttgaacccaatgaatattttacaaatgaagtgctgacaaagacatacaggatgaggtcagaaccagatgattctgatcccttttcttttgatggaccagaaattatgggttgtacagggtgccagatagattggaaaaaaggaaagaatgtcactttgaaaactattaagaagaagcagaaacacaagggacgtgggacagttcgtactgtgactaaaacagtttccaatgactctttctttaacttttttgcccctcctgaagttcctgagagtggagatctggatgatgatgctgaagctatccttgctgcagacttcgaaattggtcactttttacgtgagcgtataatcccaagatcagtgttatattttactggagaagctattgaagatgatgatgatgattatgatgaag

SEQ ID NO: 48290 - DNA, 637 bp, Homo Sapiens
caattactatgtgtctgcctacagaatcctgtacagtgatgatgggcagaaatggactgtgtacagagagcctggtgtggagcaagataagatatttcaaggaaacaaagattatcaccaggatgtgcgtaataactttttgccaccaattattgcacgttttattagagtgaatcctacccaatggcagcagaaaattgccatgaaaatggagctgctcggatgtcagtttattcctaaaggtcgtcctccaaaacttactcaacctccacctcctcggaacagcaatgacctcaaaaacactacagcccctccaaaaatagccaaaggtcgtgccccaaaatttacgcaaccactacaacctcgcagtagcaatgaatttcctgcacagacagaacaaacaactgccagtcctgatatcagaaatactaccgtaactccaaatgtaaccaaagatgtagcgctggctgcagttcttgtccctgtgctggtcatggtcctcactactctcattctcatattagtgtgtgcttggcactggagaaacagaaagaaaaaaactgaaggcacctatgacttaccttactgggaccgggcaggttggtggaaaggaatgaagcagtttcttcctgcaaaa

SEQ ID NO: 48291 - DNA, 935 bp, Homo Sapiens
ggcagtcttctgcagcattcttctaatacctttcctttttcaaacctatactgtgttggtgaattctttttaccaacccacgagttgaccacttcccaatgccggggatctgacacctcacctggcaatgacctccacagccgtttccctctgtaggatcttccagccttattctcaacagttcatttttagttcacattcttgaccgaatctcagtagctcagttaatctttttatgtctgctctgctcttgggtcatatgttccgtgaggtttcttaggggtgggggatgaggagttaaaggtggcatcttcaatcgcaggtcaaagcagactttaataaatggtgctgagccaactggaaagccccttggagaaagttgaagttagacctgtacttcacaccatatgcaagaatgaactccatctggatccaggatccaaatgtaagaaaatgaagccatataaatacagaaggaaacgtggtggaaatatccagtggcaacaaaatattgacacatttgactacatgaagataactaaaaatgcttagtaaaaacaaaaaaaaaaaacgaaaacacaacagaaaaaaaaaaaaaaaacaacagaacataaagagaaaaaacgcacacacacggaagaagggaacaagaagaatgagaaagcaaaaagacacagaggcaaagcggaaatataacagtggaaggagaaaaaaaggagagacgagcaaagcgagaaggagaggaacgcgaaagagggaggcagaaaaagaaggagaagagcgttgagaagggggagaaagggaaagaaaggaagagaaggagacgagagagagaacgaagaggagaagccagcaacggatgtagaagcaggcgggacagagagaacaagggagaaatgcgcgaccgggggggaaagcagaaaaaaaaggaaaaa

SEQ ID NO: 48292 - DNA, 604 bp, Homo Sapiens
cggactatgacttagttgcgttacaccctttcttgacaaacctaacttgcgcagaaaacaagatgagattggcatggctttatttgttttttttgttttgttttggttttttttttttttggcttgactcaggatttaaaaactggaacggtgaaggtgacagcagtcggttggagcgagcatcccccaaagttcacaatgtggccgaggactttgattgcacattgttgtttttttaatagtcattccaaatatgagatgcgttgttacaggaagtcccttgccatcctaaaagccaccccacttctctctaaggagaatggcccagtcctctcccaagtccacacaggggaggtgatagcattgctttcgtgtaaattatgtaatgcaaaatttttttaatcttcgccttaatacttttttattttgttttattttgaatgatgagccttcgtgcccccccttcccccttttttgtcccccaacttgagatgtatgaaggcttttggtctccctgggagtgggtggaggcagccagggcttacctgtacactgacttgagaccagttgaataaaagtgcacaccttaaaaaaaaaaaaaaag

SEQ ID NO: 48293 - DNA, 474 bp, Homo Sapiens
tcatctcaaaaaaaaaataataaagtaaaataaaataaaaatcctactctagggcacctgggaaccaaccagtggtgcctttggaaatcttggtttatgcttcctctctgacagtaggaaaaagctattgtgggagtttctcctgccatgtagagtgatggaagagcagaattgtggaggagcagggttgctttgttttgtctttgttgtactcagctggaaagctgtttaaggaaagaatctggttatgacctcctttctgcaattggaaatgaacgccacagggaaaagaagatataagacacagaatgctccttgcctggctaaaatggaagaggacaaaggaagcagaatactttctgggcttttggcttttgctaccctcctctggcagacccctgtccaagacgctggctgtgttgtgtgccaggctagagcttgtacctactgtaaaatctgtgtgtgatgtctgtt

SEQ ID NO: 48294 - DNA, 616 bp, Homo Sapiens; identical to SEQ ID NO: 35366

SEQ ID NO: 48295 - DNA, 587 bp, Homo Sapiens
  misc_feature (518)..(518): n is a, c, g, or t
gctcccaagagcttccagagctctgacccacagcctccaagtcaggtggggtggagtcccagagctgcacagggtttggcccaagtttctaagggaggcacttcctcccctcgcccatcagtgccagcccctgctggctggtgcctgagcccctcagacagccccctgccccgcaggcctgccttctcagggacttctgcggggcctgaggcaagccatggagtgagacccaggagccggacacttctcaggaaatggcttttcccaacccccagcccccacccggtggttcttcctgttctgtgactgtgtatagtgccaccacagcttatggcatctcattgaggacaaagaaaactgcacaataaaaccaagcctctggaatctgtcctcgtgtccacctggccttcgctcctccagcagtgcctgcctgcccccgcttcgctggggtctccacgggtgaggctggggaacgccacctcttcctcttccctgacttctccccaaccacttagtancaacgctaccccaggggctaatgactgcacactgggcttcttttcagaatgaccctaacaagacacatt

SEQ ID NO: 48296 - DNA, 776 bp, Homo Sapiens
ggtggacaccccacgggaggagtggcatctggggctcttggccctcccacctggagcctgttacccgttagagagctgagacccttatttaaaactcacctcccaatcaccccaaacaaatggaagagaagagaaaggacatggcgtattttgtatttaaaagtaattgtattaattatttaaagtgtggaaagcaaaataacaaaaaagagaaacgccaacaaaaatcagcagatgttgaagacaggggtctcgggggtgggctccggcacccacatcctggagtcaggactttcctcagtgactgtgtgtgggggggtttcagggctgaaccccacctccctcccaccttcctcccacctcacctgtcgcacccactgtgaaagttggaatatgtggtctccctggcctcagggctctgactctgccagggtggggctctctaacccacaggtgttggctgcctggcccatgtgcccactgtctcttccacttggtctgggtttggcaggcactgcctgctacttgagggccaggatgctcccccagggaagaaacggaatagtgtggggtgtgtgcagggctgcatcccgcagatggctggaatattaaaattcttctatattggctggtaaattgccatggccctgagccactgagtatgttcattgccacccctgtccctcccctgggcacccctcactttccctgatcctgcaattaaagggttaatgtgtggcatatggaagggactcccaggaccctgtgcccagctt

SEQ ID NO: 48297 - DNA, 692 bp, Homo Sapiens
ggagatctctggatcatgaccatccttttccttgaatacaaaggcaatatacatcttgaagtcaaactggtcagctagagattcttttttctttctaagctgagcacgtagtctgttcagagcttgtttcttccgggagttgggtcccccattttgaaatacaggtggtactaaagccttggaaattgtcactaaactatgggcactttttcttaagactcaagtacaacagaaacaagtcattttttttcctgctaatatgattgattagcgaaaatcacgactataacccaaaaactgcaccttctgtcaatattagcagactgtcatattacagggtcaagaaacaaaagctgctgtccagtcatgtttggacaataacgtttggggtcagacgggaaaaagggaggaaagaaaggaaagaaagaggagaaaataactaactttctggaaaacacatttggcttaactgccaaaataaaggctttgcggagaaatgaaaagcctataatcaggatttaggtgtgcaataaaacacagctgacacagaccaatccctaaaatccatccggattttcccccctttttagaaaagggattacggaacagggagggggaaagtgtgattcctggcttttccaaaaaagtaaaaaataacataacatagtaagtaataaataactgactaaagg

SEQ ID NO: 48298 - DNA, 581 bp, Homo Sapiens
ggaccacacttccccctccctgttccttaatcccttttctaaaaggggggaaatccggatggattttagggattggtctggtgtcagctgtgttttattgcacacctaaatcctgattataggcttttcatttctccgcaaagcctttattttggcagttaagccaaatgtgttttccagaaagttagttattttctcctctttctttcctttctttcctccctttttcccgtctgaccccaaacgttattgtccaaacatgactggacagcagcttttgtttcttgaccctgtaatatgacagtctgctaatattgacagaaggtgcagtttttgggttatagtcgtgattttcgctaatcaatcatattagcaggaaaaaaaatgacttgtttctgttgtacttgagtcttaagaaaaagtgcccatagtttagtgacaatttccaaaggctttagtaccacctgtatttcaaaatgggggacccaaactcccggaagaaacaagctctgaacagactacgtgctcagcttagaaagaaaaaagaatctctagctgaccagtttgacttcaagatgtat

SEQ ID NO: 48299 - DNA, 558 bp, Homo Sapiens
tttcccccaataaaagagatttgggagtctgcctggttgctgcctctttttcccgcccctccctgggatgggtcccactccctgtgggctccttttggggcttgtgcttggcagttcctgtgctgtcctgtctcccagatcctgagaccctggctgagaacttggcccagcctgctgcttaaaggcaccatggggacctgggttgccctcagacccaagccattgttagcagctagccagccacaccaaccacgccagggggaggaaagggaaggactgggagagacacaaagaccagagccagcctcagggacaagagattccagttttaggcctttctccttctaagtgccccccacccccatagcctgcatgtccactcccagacgatggccaagaacagaaacacaagctggagccagtgttctggtttgacagcatgttcaacgagggaaccccaagacggacccacacaggtccacccacgctgggggctgtaatcacggagggaagtggctgcccccttaacacacctttaataaacagtctacagaccca

SEQ ID NO: 48300 - DNA, 751 bp, Homo Sapiens
  misc_feature (734)..(734): n is a, c, g, or t
tggaaggcagcagccaatgggagggggcgacttacgcccctaagatttctgctggtaccagttgtataaaatggggaggaacaaacttcagaacaaatattcagactttaccgtgccattggaaatataattccgttgcagacgctctggatggcgaataccattaaacttctggatttggtagaagttaacagttcagtccttgctgatccaaaattaacgggacaggctcttattccaggatcagtaatataccacaaacagtcacaaatactattggtttattgcaaggatggttggattggtgttcgatcagtgatgctcaagaaatcactaacagctactgacttctacaatggatatttgcacccctggtaccagaaaaattcccaagctcaaccaagccaatgcagatttcagactctcagacttccaacaaagaagaagcagaaaaaaactgttgctatgcaacaatgcattgagtagttaggaagaagatggataaaaacctattacatatttgtaatttatattaaaccttatttacaaggaattatctggactttttttttttttttttttttttgagacagagtctcactctgtcacccaggctggaatccagtggcactatctcagctcactgcaacctccgcctcccaggttcaagcaattctcctgcctcagcctcctgagtagctgggattacaggcacacgccaccacacgcagctnatttttgtatttttagt

SEQ ID NO: 48301 - DNA, 617 bp, Homo Sapiens
acaacttcttacacatgtatctctagtagctctggcaaacccaatatctgacaccactttggactcaagagactcagtaacgtattatcctgtttatttagcttggttttagctgtgttctctctggataacccacttgatgttaggaacattacttctctgcttattccatattaatactgtgttaggtattttaagaagcaagttattaaataagaaaagtcaaagtattaattcttaccttctattatcctatattagcttcaatacatccaaaccaaatggctgttaggtagatttatttttatataagcatgtttattttgatcagatgttttaacttggatttgaaaaaatacatttatgagatgttttataagatgtgtaaatatagaactgtatttattactatagtaaaggttcagtaacattaaggaccatgataatgataataaaccttgtacagtggcatattctttgatttatattgtgtttctctgcccattttctttaaattcattaactgtatatatgtaaatatatagtacttgtaaatagattccaaatttgcttttctattgggtaaaaaataaatttgtaataaaatgtgtgactat

SEQ ID NO: 48302 - DNA, 781 bp, Homo Sapiens
gcgagtatttaaggagcccaaacaccttggtcttcctgggtgggggcataattaagggaagggagtgtataaggaaggaaacctcataccctccattcccatccctggatatattgccttttcagcagcctcgggttcagtgtgcttggggtcaggagtgccaggttcccaagagcagcgtaaaacatccctgtaccccttgacagttataagcatttctgcgttaaacttgaagattccagagattccccacgacctaatgatctaagaatgcagattggattctttgatgttcaaatttctcatttacttatgaaaatccctaattatatagttttatataatgtgtatacagagtaggattgttgatgaaattgagcggttggaacaccctcatggaacactggcaacatggaatgtagagagctgatgtcttccccctcatagaggccattggcttcctttgtataaggagagggagaagtgattctggaaggagaagttggtatgtctagcttcattgcggcccctcgggctacccagcaagaggattctgcatcaaggaactggacgagccgctacccaaactgccaccatctttactctttacaaaatggacccatcgagaatgtgaaaagcttggaagtatcacttttgaaaagaaaaaatcatttggcattcagcagtggatcgaacaggcatctatggagaattatgttaggcttcagtttatcaagttgatttagaaaaagtctaaggtatggggcttggtaaagaagag

SEQ ID NO: 48303 - DNA, 479 bp, Homo Sapiens
tatccaatttagtctccaaaatcccaacatgcactcttctgtatacgtttttcagtatgcttgactggaacggccaattctacagtagtcttggaagcaacatactgcagattaaataccttagtagcctatgttcttgaatgcggacataaaggagcaatgcttttcctatcttaaaaaaacagtttatatgaatgaaacttctgttctgtttaagatattatatgttgttgagtgtagttgtcaaagcaactagcacgattccaagtaatatagaaatcaccagcttgagttgggtctgccataacagcacctaaaacgtatccactaaattagtattaaatggacaagtaaaccaaactcagagggttgaaatgaagacttgtaatacccagtgaaaagaaattattgaaactaccatctaaaattaattggaagcttaatattacctctaggaaagagtgtgggaatgaggaagg

SEQ ID NO: 48304 - DNA, 477 bp, Homo Sapiens
tgagaaggattgtgtagtttcatgtaacttttattattcatactgtaaattgtgtctctttcaaaagtagattgtttctaaaccatagtgtgtaaaaattaagcaaatgtaattttaagaggaatctcattcttggtagcctattatgtaaacatttaggtgggattccagattcagatttgaaacttaaaacctgaaaggcccattgagaaggccagtatctgcattatcattcatgtaatctctctacattatacagaagtgctccaagaatgagaaaaaaaatacattgagcaaatgaaatgttaaaatgtacatctgcaataacctcattggactcttaaaaaatattgtgttttaacgtatttcttctttctgttttaggatttgagcctccttgattttaatagagaacttctagtgtatggatttaaagatttctctttttcattcatataccattttatgagttctgta

SEQ ID NO: 48305 - DNA, 785 bp, Homo Sapiens
ggctggggagtacgaacgcaagtttgaaactcaaaggaattgggagcctaattgatttcattcttatttcaatgcagattgttggaccttcagatggaagtagttacattatagattactatggaaccagacttacaagactgagtattactaatgaaacatttagaaaaacgcaattatatccataaatattttttaaaagaaacagatttgagcctccttgattttaatagagaacttctagtgtatggatttaaagatttctctttttcattcatataccattttatgagttctgtataattttttgtggtttttgttttgttgagttaaagtatattattgtgagatttatttaataggacttcctttgaaagctgtataatagtgtttctcgggcttctgtctctatgagagatagcttattactctgatactctttaatcttttacaaaggcaagttgccacttgtcatttttgtttctgaaaaataaagtataacttattcaactggagaaaacgacagccggccattgcccttttgcacttaaatcaacccacaagaaccgcaacaatccggcaataaaaaaataacagaaaaaaatcgtggttggccccgcgcgaccccatttttccgcccccccccccgcacccccccccagattcctccccgcacttttattcccaacgcgccggtcctagtaaaaactggctgtactccccccccaaaacacgctcgcgtatttcacagcccgccgtaagcgggtcactcgctgactccgccc

SEQ ID NO: 48306 - DNA, 610 bp, Homo Sapiens
ggactttgagaattcttaaaagtataagtgggagcaaaatgtatgcaaatttatcacaaactatttaaagcaacttcttggaggcttacaaaccacaatttaacagaaactgtagatggttgaactactagtgacttttttccccttttcccagttacaattatactttcagctaacatatgccagtttcacagaactattaagtccccttattgtactttttatggcatgcccatgaaaaagcactttcttaagcctacagtatcagatcaatgggaaaacaacagaaaactaagaggagaattttcccgttaattttcttgcagaaaagtataagtctaattgcccattgccataaattttgtcttgtactcagagaagcaacatgcactggctcattttatgtgcaaagaaaagatttcactattaaaaaaattaacttggctaggtatggtgtctcacacctgtaatcccagcactttgggtggctaaggcagatagactgcttgaacccaggagttcaagaccagcctggacaacatggtgaaaccccatctctttaaaaaaaaaaaaaaaatccaaaaattagctgggcatggtggcatgcagt

SEQ ID NO: 48307 - DNA, 745 bp, Homo Sapiens
ggcggcggcggcggaggctgccatggacgacgaggaggagacgtaccggctctggaaaatccgcaagaccatcatgcagctgtgccacgaccgtggctatctggtgacccaggacgagcttgaccagaccctggaggagttcaaagcccaatttggggacaagccgagtgaggggcggccgcggcgcacggacctcaccgtgctggtggcccacaacgatgaccccaccgaccagatgtttgtgttctttccagaggagcccaaggtgggcatcaagaccatcaaggtgtactgccagcgcatgcaggaggagaacatcacacgggctctcatcgtggtgcagcagggcatgacaccctccgccaagcagtccctggtcgacatggcccccaagtacatcctggagcagtttctgcagcaggagctgctcatcaacatcacggagcacgagctagtccctgagcacgtcgtcatgaccaaggaggaggtgacagagctgctggcccgatataagctccgagagaaccagctgcccaggatccaggcgggggacccctgtggcgcgctactttgggataaagcgtgggcaggtggtgaagatcatccggcccagtgagacggctggcaggtacatcacctaccggctggtgcagtagctaccgcctgacgagccctagaggcggacacacagcgaaccccatccctgctggacaaacgcccctggcctgccagaatccggccccaa

SEQ ID NO: 48308 - DNA, 983 bp, Homo Sapiens
tatgggtagcttttttgtttgttttttgttttgtttttgtttttgtttttgtttttagttgtaggtcgcagcggggaaattttttgcgactgtacacatagctgcagcattaaaaacttaaaaaaattgttaaaaaaagaaaaaaagggaaaacatttcaaaaaaaaaaaaaagataaacagttacaccttgttttcaatgtgtggctgagtgcctcgattttttcatgtttttggtgtatttctgatttgtagaagtgtccaaacaggttgtgtgctggagttccttcaagacaaaaacaaacccagcttggtcaaggccattacctgtttcccatctgtagttattcgatgaagtcatgtacatgaccgttctgtagcaataaatgtgccatttttataaactgtttctgacacttgtttcatttcattttgcattgtccatatagctatgattctcttctgtaagtaaaacgcatctatatttcattttccaagtgttggaggtattgacagcttaacaaacaaaacatacaaaaaaaatcacaaaaacaaattgaaaagcaaagcacatgattgatcaaggaagagatgcccttaatgaaaatggaacgggatgcatgcaaaacaaaagaaaactgtctagaggattaactaattgaaggaatatattaatgtgtgtgtaacactgaagctatgcatttgaagagctttgaactgcacccagtgttttcggttggtgctgcaggttgcttaataaagtcagccttaacctttttgcaccagttggtcggcttgtttggccagaacattttaagatcttttaagtcaaaaatttaaaatgtttaatttggatcaactttgttaaaagctgaattttgttaactacagttaatttaacccttgttatttaactttttaaaatacacacggccccacacttctgggtgcccttggtgccttttaatccaaatgtaacacccg

SEQ ID NO: 48309 - DNA, 614 bp, Homo Sapiens
cctcgtgccgaattcggcacgatggagaaagaaaaattttaagacttacaagttatgtttaggtattttacatggttcagaaaacaagacatgaagcggtataaactgagaagtcttgttcccacaaccccacgtgccaggtacacataaccatttttattcacctctagcttgtgcttccaatgtttgttaggcatatgtaaataagtgaatagataagcatttctccctccttttgctgacatgagtggtggcatgttttgcccctggcttttatcccttgaccccattccagtacctagagacctgcttcatttttttagatgtgtaatacttcatgtgtgcgtgtgccttagtgattaactcgtgcactgtgcagggacatcgggctgggatcagtttgttcactgatatatacagcgctgcgggagataccctcacatgtgtatcatttggtccatgtgcaggtgtgtctggaagatagaattctaggcgtagaattgataggttaaatgtatttatagggaaaaaatcaatataaaactttgcgtgtaatgatatttgcgtgcttttttttttaatttttttacccaaatagcaaaaaaaaaaaaaaa

SEQ ID NO: 48310 - DNA, 624 bp, Homo Sapiens
ccgggctcgaaattggccaaatcgagctgtggagtttagtacatcatgtttgtcatacacagtgcaatccatcaggagacgcaatccaccatcacaaactctttatccgatcagcacgagccattcatgtgctgaaacaccaagatctgaggaagaaatcctcagaggagcccgagtcccagtggcacccgactcgctctcctgtccctcaccgacgcccctgagtcgaaataatctgctaccacctattggcacagctgaagtggaacatgtgagcactgtggggccacaaagacagatgaaaccccatggcgactctagtcgagctcaaagtgctgtggtggatgaacctaactatcagcagccacatgaaaggctccttttgcccgactttttccctaggcccaacacaactcaatcatttttggtagagtgatgtacttcctagaatggtcttgatagttggggaaagaaaaggtggggggaataatagtttggcagacttaagattttatctataggcttaacccagaataaaagttgagtttccaacaataaaaaatagatgtaaatgaaaaaactcgagggggggcccgggacccaattcaccctataatgaattgg

SEQ ID NO: 48311 - DNA, 497 bp, Homo Sapiens
gcacctataccctctggtgttgctttttaaccttcctggaatccattttctaaaaaataaagacattttcagatctgagagctacatctcaatgtctgtggttataattctggacaggataaatagctaaacttaatgtaggcaaatgcagagacatttatctgaaatgtagacctctacactgagacttttctggcatagtggctaaaacaagatctacacatgcataaaaagggacaatcaccttttcttcataaatatacagctttaggaatatttcaccattctttgtaggacatagtagtccttgtctttttttctcctgacattggaaagatgtgctaattgaaacttgacttagtaggaacattgtgccaactcaaaaccttgatttagtaaaaatctcaatgtttagatcctttgtccagtggtggtgtttatcagggaatgtattcagcttgctcagaaaaccaaaagggtattaaagccacaaaagc

SEQ ID NO: 48312 - DNA, 1012 bp, Homo Sapiens
caccgcgtccgctgttgctcagctgcagtgagccagttcaattttgcaaaggtgcagtacctctcctttttaaggggttggtttattcttttttctttttgtttggctgaattgcagtaactagccttgcctttctattctgtagaaatgacagggtcttcacaatccttcaccagtggctactaagctataattagctgaatagaaagaatgtggaagtggtctgaggcatatagagtatatgccaagaacactaccatatatggcatcagctttggttaccagagaaattttcttagtcattagaccatgtaacagtaatatatcatatgtaaatctttagatatcaatttgaaaatcctccaaaaaaaggagcaaagaatgcataagctatgtgttggcaaaagtaatttatattaaaattttgacctgcctatgtaagattaagtggtaatgtcatagtggtgggtttttaagtcttaaccaatctctaaggtttgtttctcctgcaagggatggttcatggcctctcttcccactgcaggaagattgcagaaggctgtggattaattgtagcatttcactgatcttcactccagtcactagggacaatagaaacctgcaaaacacagattcattcgtaaatattattaatagcttattaaaggaaatggtctttgttaattccagtcagataatggcattgtacagacatgggaaacaaccaatttttttgtttttcagttgttgctatgaatgattttgagcctttttttttaagcttggcaaacatcccagctaatcaaaatagtcatattcctgagaagtaggaaactaaaacttcttttcatataattggtagaaaggttgtttccccaactaccatagttaccaaggggaaaagctcaatttttgggaacggaatccaaaggaataaaaaactgtgaaagagaacctactactcttcccttcaaggggttggggtttgggttccaaattgcccccatcattt

SEQ ID NO: 48313 - DNA, 581 bp, Homo Sapiens
tccgttcatctggaaaaggggaaggatccctctccttatgccatttcttggctagggagctgtggtccacctcaaaaaaaaaggagcactctggaggacacgttttcccacctgttggctcccgtgtctgctgactgagggcattcaggagtaaatgcacaggtcggtccaggcccgtctgggtttgggatgcactgagttggaggttatgaaagctttgatcctcttcttcctctgctgggcctcgcagcattcccaagggtcacatgctctctggcatgggcagaaactgggctaatgattctttgcccacttcacccctcgtgtctctctttgttgctaagttctttccctcttggaaggacagatctgccgggctgctatttatagttgcctttggcctttcactgctctgcgatttggcaggaaataaggcgattaaccctatgtgtccacaagcctcaagccttgtttcaggtcaccctcaaatcacactctctttaggcaaaacaggaaacttcttaagtgacaaattttaatgccagacatttaaggagaggattattgttgattccatttac

SEQ ID NO: 48314 - DNA, 916 bp, Homo Sapiens
  misc_feature (684)..(684): n is a, c, g, or t
gggctatttaaatcgttacttgctagtttttgcatattttatatatatatatatttatatatatatatagtgagaagtgaagaaaatgtatggtactaagattatgccttattgataaatagataaaccaatttgaatcctcttagcatgtttaagtatgttgattgctttctaattaatgaacttctcacagaaatttcacttagtgaaaccaatgattgtagcaaactcatactggatcatttcagttaccttgaactaatagcacataatggttttttgttgttgtgtttttaatgtagcccttacctggatatacatagtctgcaatcaccaaagtataatatcttgtaaggctatattttttaaagcatattttttcttgagcattaaattatcctaaatggtaatatattgtggataagtctgggcttattggacataatacatatttgggttggtactggttgaatccttcagttaactgctttgttgctttttgcaagattttttatcttaaacatgtcaggcatcttaagtcacctttatactgttttgttcctctgagtttctttcagtatgttatacaaaatgccagacataacatgtagcagccatacttgcatggaaaactgactacacatacataaatactggcatcttattgttaaggttttcacattnaatacagcaaattaccctgactaaaatgagtttgtgatattatggcacacttcctgtacgagatcctgcctacatggttgcctattacttcaaataagctcgggtcacgtgaaaaataaacacacacaaacccaacaaaaaaaggggctaaacgggccaggccctttaaagggcatctgacaaaacgggcaacagggactgtgaattcgttaacaacaaagtttttgaaaca

SEQ ID NO: 48315 - DNA, 614 bp, Homo Sapiens
ttttaaatacttaaccacgaaatactttaaagcaggtttaaaataaactccttcattttgcctgttctattactctgttctcacactgctaataaagacatacccaagactggtaatttataaagtaaagaggtttaattgactcacagttccacatggctggggaggcctcccaatcatggcagaaggtgaatgaggagcaaagtcacatctttgtggcaggcaagagagagagcatgtgtgcaggggaattcccctttataaaaccgtccaatctcatgagacttatgcactctcatgggagcagcatgagaaagactcacctccgtgattcagttacctcccactgtgtccctgccacaacatgtgggaattgtgggagctaaaaatcaagatgagatttgggtaggaacacagtcaaaccatatctcctgtatacattcacactagcattttagttttagaactagttctatgttactatctgaattaatttttccacaattttgtaaggaaaaataatgcgttctttgaatttcatgtgtaaatgatatttttagttttgtgtcattttgtccaataaattctgaaaatctttgaaaaaaaaaaaaaaa

SEQ ID NO: 48316 - DNA, 610 bp, Homo Sapiens
cattccactgtgcagatcactcagctgtgatatgaaaagaaatattaagtaaagaagtatttggtcagattctcttcagccataatgtgtaatgtcaggcaatgaaacagaacagtagctaagagtcaagccatgcatttgagtctcagctctgctactaattattcctccactttaccttttgaaggagatccggactacaaaggaaaggtctttaacctctctgaatctcattgtgaaatgtgctcttccagttctataataagatgtacctttgatgcatcaaccaatacagcaaaattgcctttcatagctaaaatcatgtaacttgagttccacagagcactccagcatatcatttatacaattactcatatatcctttatccccatattttaacatcttcatttatttggaaacactcaactacatgccaattcaaaagtcaaccacatccccatatgtaactaatttttatctttttttttttttaaacaggtgaaggtgccgagctataaacctccagaatattattagtctgcatggttaaaagtagtcatggataactacattacctgttcttgcctaataagtttcttttaatccaatc

SEQ ID NO: 48317 - DNA, 440 bp, Homo Sapiens
ttttttttttttttttttttgagggctgtagctccttagcccttttgccgggaatcaacccattctgatgcctctgcacctcagttcctcttacaaaagcctccagatgatctaaatctagttagcaatgtcagcctgtggactgcagctgtttgggacattgtattcctttgtttgtctcttgttgttctgaaggattgtattgatcacaaagctatatgcataaagattctcattgttgtaactgttctgccattttctgagtgcaagcatggaacactgttgtgacagtcccttctcccttcttccttcttccttcacccccaaccccagaccccccttggtcacatgaaccagggaaacagcccaataagctctatctcccccagtctaatcgctgggttgcagggtggcctgtgacctgcccagcatttgcagac

SEQ ID NO: 48318 - DNA, 518 bp, Homo Sapiens
gcgtccgggccagctttgtggtagctggagaggaagggatgaaaccagctgctgttgcaaaggctgcttgtcattgatagaaggactcacgggcttggattgattaagactaaacatggagttggcaaactttcttcaagtattgagttctgttcaatgcattggacatgtgatttaagggaaaagtgtgaatgcttatagatgatgaaaacctggtgggctgcagagcccagtttagaagaagtgagttgggggttggggacagatttggtggtggtatttcccaactgtttcctcccctaaattcagaggaatgcagctatgccagaagccagagaagagccactcgtagcttctgctttggggacaactggtcagttgaaagtcccaggagttcctttgtggctttctgtatacttttgcctggttaaagtctgtggctaaaaaatagtcgaacctttcttgagaactctgtaacaaagtatgtttttgattaaaagagaaagccaactaaaaaa

SEQ ID NO: 48319 - DNA, 611 bp, Homo Sapiens
cagtgtggagcgttatgatccaagtaaggactcctgggagatggttgcatccatggcagataaaaggattcactttggcgtgggtgtcatgctaggctttatttttgtggtgggtggacataatggagtctcacatttgtccagcattgaaagatacgatcctcatcaaaatcagtggactgtgtgtagaccaatgaaagaacctagaacaggagttggtgctgctgtaatcgataactacctttatgtcgtcggtggtcactcagggtcttcctatctgaatacagtgcagaaatatgatcctatctcagatacgtggctggattcagctggcatgatatactgtcgctgcaactttgggttaactacactttgacaaatgtgaactctcggaaatagtatggtggtgaaacttgtactgcatgaacatccggatggcccagttttctgaaacccacaagctgcattgctttctttttaacttgaagtagcatgaaggctcaaaagtttcgtcgggtacttttaattgagaagtcagtttggttgctcttgattacacagtaaatcaataatcaaaaacaaacaaaacacaaacgacacaaacaaactgt

SEQ ID NO: 48320 - DNA, 709 bp, Homo Sapiens
caatgaaggttttcctcttgtcctcccctctcaaggctcagtcacctcaacttctttttgcctactagatatccaatccatcacctcgcctcccctggccctagctcaattaccctcttaaacccattcctgctcagcaaaacttcctctagttcaccattcattcatttgaacattaggaggcaatttagtgacctgttgtacctgaccatgttcttaagggggaggtctcacgtctcattcccagaaaagtctaccatatagatacatattccccgccccgccccagatttctggtgaatgaaatcacttgtatcttattaggtacatatacgcaaatccttaacctcaattctctgtcctcttcatgtcttacccagatatctcaggaagatttctcttttccttctgtttgcctccctcttcgacttacttgggagtcagcatctgaccacagtcgtgactggtaatgatgatttgtgcaaatactatcaaggaaaggacatgaattgtcttaattttagacccattaaaaaaccgcacaggcctcaatcttaaaagtcctatctaaatacccagaaatacccttcagaatttttgaagctatgcccatgtacaaaattttcttccttccctaattttaatggtatactaacaccttaggtaaataaaatatttctttactattttattgaaaaaaaaaaaaaaa

SEQ ID NO: 48321 - DNA, 581 bp, Homo Sapiens
acaagccgctttaggagcgaggttcggagccatcgctgctgcctgctgatccgcgcctagagtttgaccagccactctccagctcggctttcgcggcgccgagatgctgtcctgccgcctccagtgcgcgctggctgcgctgtccatcgtcctggccctgggctgtgtcaccggcgctccctcggaccccagactccgtcagtttctgcagaagtccctggctgctgccgcggggaagcaggaactggccaagtacttcttggcagagctgctgtctgaacccaaccagacggagaatgatgccctggaacctgaagatctgtcccaggctgctgagcaggatgaaatgaggcttgagctgcagagatctgctaactcaaacccggctatggcaccccgagaacgcaaagctggctgcaagaatttcttctggaagactttcacatcctgttagctttcttaactagtattgtccatatcagacctctgatccctcgcccccacaccccatctctcttccctaatcctccaagtcttcagcgagacccttgcattagaaactgaaaactgtaaatacaaaa

SEQ ID NO: 48322 - DNA, 878 bp, Homo Sapiens
gccgcgtggggcaagcaggtgcctcgcgtccaggcggctccgcggctggctgcctcccgagccggccgcgctcctcccagcgaggcgtggcggggaggcgtagtgaggctgggcccgtggcggttccctgaggagggccgagaaggggccgggggtgctaggggaacgggcgctgggggcagcggccccggtggatgctaagggcttcgggatcgggagagtccaccacgcctgcctgctcggctgagaatcgccatgccagctaaagggaaaaaaggaaaaggccagggcaagtctcatgggaagaaacagaagaaaccagaagtggacattctcagccccgcggccatgctgaacctctactacatcgcccacaacgtcgctgactgcctgcatctgcgaggcttccattggccgggtgctcccaaaggaaagaaagggagaagcaagtgacagcatttcacaacacatctctgttacacgacaacaggacctggggaagagaagtcaggataacacaactgttgccagcaacatagactttactccagacgacttgagatgcaaattaagtgtgcttttctgtgatggtggaagatcaggaaaatgcaccttacttcctctgttatgccagatatggttagccactttggttttttaggagctataggatgggaaaagcctgagtaattcctacacagttgtgctgaaatttaatagaactttcagaaattattataattctgggtcaggattaaactttgctctcagaaggcagttctagttgcattaatgttttcttttgccaaagagcgttgtcatttagagaagaccggcagaaacatgggttccttaggaacatcctctctgggcaccat

SEQ ID NO: 48323 - DNA, 750 bp, Homo Sapiens
gcgggcccccggcgcagcgctgcccggctcccggccctgccggcctcctcccttggcgccgcggccatggcggccagcgcgaagcggaagcaggaggagaagcacctgaagatgctgcgggacatgaccggcctcccgcacaaccgaaagtgcttcgactgcgaccagcgcggccccacctacgttaacatgacggtcggctccttcgtgtgtacctcctgctccggcagcctgcgaggattaaatccaccacacagggtgaaatctatctccatgacaacattcacacaacaggaaattgaattcttacaaaaacatggaaatgaagtctgtaaacagatttggctaggattatttgatgatagatcttcagcaattccagacttcagggatccacaaaaagtgaaagagtttctacaagaaaagtatgaaaagaaaagatggtatgtcccgccagaacaagccaaagtcgtggcatcagttcatgcatctatttcagggtcctctgccagtagcacaagcagcacacctgaggtcaaaccactgaaatctcttttaggggattctgcaccaacactgcacttaaataagggcacacctagtcagtccccagttgtaggtcgttctcaagggcagcagcaggagaagaagcaatttgaccttttaagtgatctcggctcaaacatctttgctgctccagctcctcagtcaacagctacagccaattttgctaactttgcacattttcaa

SEQ ID NO: 48324 - DNA, 869 bp, Homo Sapiens
  misc_feature (578)..(578): n is a, c, g, or t
  misc_feature (613)..(613): n is a, c, g, or t
  misc_feature (839)..(839): n is a, c, g, or t
gcttgtgtctcctccctgggcacttgaggtcaggctttgccttttgtcacattgagccacatgcctttgatacacagttgtagcaaagaagggaggtgatgaacttgctcactttcttttctgatttccctccctactcatcctgcactccccaccgaaacccagatatcttatagtctaaggcttgtagaggattaaggaaaggaattggagatgggttttacttagttcacagaaaagctttctttgggatttttcctcccccttagggcttttaagtctaggtgaagtgaaagttcacacatgtgtttgtttggttgctctgtaattagctactagtttttatccctagaccttctctgctccagtgtcttgttcatgtgtcctgaccccgtgtccttgaattcccactttgctttgggatttaagttattgtatgttgtcaacaatatttaaagatgaaaaagtcctgaaggaaacttaccaggttctttcctttggcttttttttttttttctttcgaggtactgtaaatcgttcactagggatgccaagcaggcttggttcaatggctaaanctcttattgtattaccgtgtaatgctgatctcagnctggtctccatgcccgaggccacagagacttgattaaaccggtgtaacgatttaaaaaaagcgcggttacagcgtaggcaacccgcggtcccacataccagggaaacacccacaagggagtgaaaaacgagacgaaccgagcagggagggacgcaccttaagcaagaccacacacaggcccaaataggggcgtcccaactatacgcacacacacgcgatagcacancgcgcgagagaagcgaagcacaggcacggg

SEQ ID NO: 48325 - DNA, 922 bp, Homo Sapiens
ctaaaagatgtatatttcactctaaaggaagattctttaacaataaatgtaatctcattgaagctgatttttaaagtatttttattttagagataagttgttaaatactatttcttataatagaactattttgatctgtttatatactatgcttgaatgtcaattaaattccctttctacagaaaggctttgacctcaacatgctttatttaatgtatcatgtttaaaatgacatgcttctgtctgcataccatcactgtttgttgctaaaaacataatgttccatgaacatgatgttactacagaaagtttattgatgagataactgtttgaaataactttcaattataccttatgtgagacttttatgttctgtgctgacaatgtgtactcaaatgtctataagcctgatattctacaacctcagatgtatctagtggatagtaaccattaacagatgactaatttgtttcactgtatcaaatttcagatgtttagttcaatggtaatgctgactacacattcactgtattaaatacaaaagaaaataatctttcccacgtatacaacacaaacaagaagaaaaaaacaagaaaagaaaggaagaaaaaaaagaagaaggaaaaagagaagagggaaggcaaggacaagaaaaaaaagacaaaaaagtaaagaaaaaaaaagagaaaaaaaagaaaaaagaagagagagaaaaaaaaaaaagacaaagacaaaaagaaagcaaaaaaagaaaagagaaaagacgaaagaagagaaacaaacagcaaagcaagaggagaacaaagagaagcaggacacaaaaagaaaggacaaaaaagcagaaagagaaggagagaaaaatgaaaaaaacagcatggaggcaatacaggagagaaaagaagaaaaaaaagagaataaaaag

SEQ ID NO: 48326 - DNA, 640 bp, Homo Sapiens
  misc_feature (640)..(640): n is a, c, g, or t
gagacagatttatcaccttgattacggcggtgatgggacctgatcccagcagtcacaagtcacaggggaaggtccctgaggacagacctcaggagggctattggtccaggacccacacctgctttcttcatgtttcctgatcccgccctgggtctgcagtcacacatttctggaaacttctctggggtccaagactaggaggttcctctaggaccttaaggccctggctcctttctggtatctcacaggacattttcttctcacagatagaaaaggagggagttacactcaggctgcaagcagtgacagtgcccaggctctgatgtgtccctcacagcttgtaaagtgtgagacagctgccttgtgtgggactgagaggcaagagttgttcctgcccttccctttgtgacttgaagaaccctgactttgtttctgcaaaggcacctgcatgtgtctgtgttcgtgtaggcataatgtgaggaggtggggagaccacccaccccatgtccaccatgaccctcttcccacgctgacctgtgctccctccccaatcatctttcctgttccagagaggtggggctgaggtgtctccatctctgtctcaattcatggtgcctgagctgtacttcttcttcccatn

SEQ ID NO: 48327 - DNA, 644 bp, Homo Sapiens
gctgagcgaggaggatcacttgagcctaggcattcgagcccagcctgggcaacattgcaagactctgtctcatttttttatataaaatgtttttttaaaaaaccctatgtataattatttattttttttccccaaggattattcccaaactatgtacaattaatgggttgccttgcagagttggatcaataatacctgacacacttgtatagcaagcatacactttacatagttcctcgcatctattctttgaaacccagacacattctagtattgggcactagaaactggtgataaataataacaattacatatatttcctgaagaattatgtggcattccttgttttaagcacctttgatgccttagctcaatctccattacaatactatgatataagtaccatttaatatttctttttgacagatgggaataatcgaggcctagggagattaaattacttggccaggttcatgtaagtggcagatctaggattcaaattcagccggtctgaatctagagcctattcttttagctatgatgctatactttaatacagtaatacactgttcaaatgaaactgtaacatgtcattaaatttgaacttgtcaataaacataccaagcaataaaaaaaaaaaaaaa

SEQ ID NO: 48328 - DNA, 630 bp, Homo Sapiens
gagaaagaaaaagacaccgtcctttaaagtgctgcagtatggccagacgtggtggctcacacctgcaatcccagcaccttaggaggccgaggcaggaggatccttgaggtcaggagttcgagaccagcctcgccaacatggtgaaaccccatttctactaaaaatacaaaaaattagccaagtgtggtggcatatgcctgtaatcccaactactcagaaggccgaggcaggagaattacttgaacgcaggagaatcactgcagcccaggaggcagaggttgcagtgagccgagattgcaccactgcactccagcctgggtgacagagcaagactccatctcagtaaataaataaataaataaaaagcgctgcagtagctgtggcctcaccctgaagtcagcgggcccaggcctacctcactctctcccttggcagagaagcagacgtccatagctcctctccctcacaagcgctcccagcctgcctccagctgctgctctcccctcccagtctctactcactgggatgaggttaggtcatgaggacaccaaaaactaaaaaaaaaaaaaaaaaaaaatttgtgggggcgttgggccccgaaaaaaatttttagaaacctctggtgggggg

SEQ ID NO: 48329 - DNA, 633 bp, Homo Sapiens
actgatcccaaaacatcattaggcatttttaagttggtcacgtcgcaagtccgatatcacaacttaattgtaaaaggaagaaatctgaaagttactacatttaagctctgattctatataaaatgtcaccaaaaagttgactttgaatttgttggacttttaaaaaaccagttggaaatataggttgggtttttttcttattgttttctccccagggttagaaaaattggtataagttcctaattaaaagctgaataaactttgagaaattatttctgagttgaccaataaataaaaataccactttctttaaaaaagcctagggaattgaagctctgtacatatactaatgatgcctttacaacccagtccttgataataccagattctcggtgcattgttcatgtctgtatctgcaagcctgttctgccattgcagtgtgatgaacctagaggtaactaccatgtgaacttgaactcttctaaaatagttctgtgtctcttagaccatgaccccttttcacttttgttatataggtttaatccccaagccaaggatagtacttagtatttcactacacttctattctcagtaaccaagattgcttgcaactttttttgccttggtgacttt

SEQ ID NO: 48330 - DNA, 634 bp, Homo Sapiens
catcatcatgctaatacgacctcactataggggccaaagattttcttggaaattagaagagcaaaatccaaattcaaagaaacagggcgtggggcgcacttttaaaagagaaagcgagacaggcccgtggacagtgattcccagacgggcagcggcaccatcctcacacctctgcattctgatagaagtctgaacagttgtttgtgtttttttttttttttttgacgaagaatgtttttatttttatttttttcatgcatgcattctcaagaggtcgtgccaatcagccactgaaaggaaaggcatcactatggactttctctattttaaaatggtaacaatcagaggaactataagaacacctttagaaataaaaatactgggatcaaactggcctgcaaaaccatagtcagttaattctttttttcatccttcctctgaggggaaaaacaaaaaaaaacttaaaatacaaaaaacaacattctatttatttattgaggacccatggtaaaatgcaaatagatccggtgtctaaatgcattcatatttttatgattgttttgtaaatatctttgtatatttttctgcaataaataaatataaaaaatttagagaaaaaaaaaaaaaaaaaaaa

SEQ ID NO: 48331 - DNA, 649 bp, Homo Sapiens
  misc_feature (615)..(616): n is a, c, g, or t
ggcaatcatattggaggcttcaatcatcctttgatttgtactgagtactggttgcaagctggcctgttaagtatatattgtgttgccataacaaaggcctaggaaaatttgaagaaaaaaaaacactgaactgttatttttttgtaatttatttaaaaatggacaaaatggttattagaatccaaagataatctaaaaacagttctactctttggaaatattatgtgtactcaaatttgcacttaagttggagaatgttttgagaccatttaaattgttttaaaaatagcttgatcttgatccttatgcaaaagaaactaagactttgtgtcattatttgaggtagctaaggactgatgttgaaagtgtattcagtctatagtaagctgatgtcaggtcagtaaattttgtttggggatgttggtattttcgatcaagttaaaatcttaaagcagacaaaaatagtaaacgctcctatttgtgttagattttgaacaattgtattaccctatattttctttaattagtcaaaggtaagccagattatttcattctaaatgaaaattacagcactttggccatttattttttccacaaatgctaatactacgtccnncccgagccgcgccggagccgaccgaaacatggt

SEQ ID NO: 48332 - DNA, 1018 bp, Homo Sapiens
  misc_feature (936)..(936): n is a, c, g, or t
aaaccagaagggctactggcacagttatgtaaaaggcagactgactcttctagctctgatatgcaagcctgttctcaagacaaagccaaaatatctcttggttccagcatagattcagtcagtgaagggcctcttcttagtgaggggagtctctctgaagaagagggagaccaggatggacagccccttttgaaagtagcagaaattttaaaagaaaaggaattttgtcctggagaaagaaatagttatgaacccatcaaagagtttcagaaagaagctgaaaaattcttgccactttttgggcacataggtggtacacaaagcaaaggaccatgggaagaattggcaaagggaagtccacatagcgtcattaatatttttacaaaatcctatcagttatatggaaaagggtttgaagacaagttggacagaggaacatcaacatcacggcctttgaatgccaccgcaactcctctaagtggtgtttcatatgaagatgattttgtctcctctccagggactgggacttcgacagaaaaaaaatcaactcttgaacctcatagcactttaagccctcaggaggaccattctaacagaaagtctgcctatgatccttcctctgtggatgttacctcccagcattcatcaggagcccagtctgctgcatcgtctcgttcatctacttcttctaaaggaaagaaaggaaaaaaggaaaagacagaatggttggattcattcactggaaatgttcagaactcacttcttgatgaggaaaaagcagaacgtggctcccatcaaggaaagaaatctgggaccagcagcaaactttctggtaaagattttgagcagactcttgatacagatagcactttggaggatctttctggacattctgtgagtgtctcatcagataagggaagatctcagaaaactccnacttctccccctgtcacaagtttccagaaatcattgccagtttgacgttgcaggaactttctttccagaaagatcttagtcg

SEQ ID NO: 48333 - DNA, 610 bp, Homo Sapiens
aatacagagatgacttggaggcttgaaagcaaatgctccagaggcatctcctactcctcagtaaatgctcacatgaaagttcctacatgagatttttgtaattactctggtgtatataatctataattcatgggaagctgggagcggggagacctgggtttgaagtgttgaagttttgtatactttttcatttgtttatttctctattccctccttctcataactgccacccctcaggacttaagttctccataatgggcagtaccttctcaataatttatacctacgtgatagcgtgagaaagtctatttgcattttcaacattttcttaggaagaaccgaaatgcaattcccatttttatttttaataagcaaaagcataaatcttagaaaacctatgaaaaagaaatacttttatgttatccctaatcgtcccactaaatggaatgcctatgattagcttcattaagagttttatactgtgaagattttattagaagcaatatatgaaaattacttggattaatgtgttaatcttcctctttaaaatgctaatatccattttatgcacattaaagctcagtatgcattttcaaaaaaaaaaaaaaag

SEQ ID NO: 48334 - DNA, 885 bp, Homo Sapiens
  misc_feature (738)..(738): n is a, c, g, or t
  misc_feature (760)..(780): n is a, c, g, or t
  misc_feature (782)..(800): n is a, c, g, or t
  misc_feature (802)..(807): n is a, c, g, or t
ccacgcgtccgaccagcctgggcaattcagcaagatcccgtctctacaaaaaataaaaaaaattagtcgtggtgccacttgcctgtggtccccactgcttgggaggctgaggtgggagaattgcttaagcctgagagttggaggctcagtgagccatgatcatgccactgcactccagcctgggtggccattgaattctgcgtggattgcctcagtttgccttgtcagccaacttccactggctgccttggcactgccatgacagcacagctccacaccagagctggggtttctcttcagtcctgggtaccccttggcagagggatttgctgaggaaaattaggtatccttcctagccctccacacacttccaaaccagggctgcggatctgatggatgccaggaagacagccttgggctgagagtgacatcactgcaagagttgagagccagcgtctaaagtgtccacggcatcctgggaggttttatccttggtgactctaatggtagatttttgtccaccttgttctatttgcttttgtttgtttttgatttttctgttttaaaattttaaggagagatggggtttcaccgtgttgcccaggctggtctcaaactcctgagctcaagcgatctacccaccttggcctcccaaagtgctgggattataggtgtgagccaccgcatccagcccacattgttctatttgtatttcatgaaagcagttctgaatgagangtaatcagcttcaggggggtannnnnnnnnnnnnnnnnnnnncnnnnnnnnnnnnnnnnnnntnnnnnnaaggggcgggccgctctaagagtattccctcggagggggcccaaagctttacgccgtaccccaggcttttctttgggg

SEQ ID NO: 48335 - DNA, 726 bp, Homo Sapiens
  misc_feature (426)..(426): n is a, c, g, or t
  misc_feature (633)..(633): n is a, c, g, or t
tatactaccagttgtgtctttagatgtcacacaagtccaaataagtggtcatacttctttattcagggtctcagctgcctgtacacctgctgcctacatcttcttggcaacaaagttacctgccacaggctctgctgagcctagttcctggtcagtaataactgaacagtgcattttggctttggatgtgtctgtggacaagcttgctgagtttctctaccatattctgagcacacggtctcttttgttctaacttcagcttcactgacactgggttgagcactactgtatgtggagggtttggtgattgggaatggatgggggacagtgaggaggacacaccagcccattagttgttaatcatcaatcacatctgattgttgaaggttattaaattaaaagaaagatcatttgtaacatactctntgtatatatttattatatgaaaggtgcaatattttattttgtacagtatgtaataaagacatgggacatatatttttcttataacaaaatttcatattaaatggcttcactttgaattaaagttaaaaggtactatttttatttgctattgtactttcattggtggcattcaattgacattcctgtgtactgtattttactactgtntttataacatgagagttaatggttccggtttcatgatccttaatggaattcaggaataaaatttactttgattattcaagtggattccttata

SEQ ID NO: 48336 - DNA, 607 bp, Homo Sapiens
cgcgtccgtgaggattcagtcaaatgacacatgatgtcttgggcacacctggcgtggattatggcgcctgtaggagcaggagggcttcctggaggagggggctagttgaacagagtctagaaagtatagattgggaagagcactctgggaggcaggatcaccatgtgcaaaggctcagagaatgccacccactacctcctggaaatcaaggggattctgtgtgtccaagggcattggtggtctctaggcccccgacctgtgtctgggaggtgtcaaggggaagccagatccgaggcccacacttgcatgttttcaggtgaggtccagagatatatccagagaggagtggaagggctcggagacctacagccccaatactgcatatggtgtggacttcctggtgcccgtgatgggctatatctgccgcatctgccacaagttctatcacagcaactcaggggcacagctctcccactgcaagtccctgggccactttgagaacctgcagaaatacaaggcggccaagaaccccagccccaccacccgacctgtgagccgccggtgcgcaatcaacgcccggaacgctttgacagccctgttcacctcc

SEQ ID NO: 48337 - DNA, 679 bp, Homo Sapiens
  misc_feature (679)..(679): n is a, c, g, or t
ggatcacaagcttgaatatttaaattctgtacttatatctgtaaaatagccaggaatttcctgtttgtgatctattatgcctttttacaaaaaaaatggctgtaaattattgtaaatattaaaggaactttccttacttccttccctttctcaggctttttttgactgttcctttccctaccaactcaggccttcttattaaaaaaaaaaaatcagtgtaataacactttttaatgatttgtcttgatggaatcattgtttagaatgtaaaaatggggaaaggggccacttaattccattagtcctctttttatactgaatattttattagatacatgttattcccttttttttccttttttagtcaatattgtgtttgtagttttaaaaaatggcgagatatgtaaaatctaaactgcatgctctggaaacacttttttcagatgcatctggtttaaaagggtaggtgtataaacacttttcagaatccaaaacggccaaaagttattgtaaatccgtttgttttcccgttttatgtgggcaataatgtcaaatgtgctatgcagccaggttaacattttagataaacttgattgacttttaatataaactgttacaatgcacactgattgtatataaaaacgttatatatgacaaattaaaattttagaaaaaagcn

SEQ ID NO: 48338 - DNA, 856 bp, Homo Sapiens
ctatactccactccctcagtaaataagtgaaaattgttaacccatgtgcccattcctgagtagggcagactcttcacaagaggcccatgacaagaattctagggtccagattgaactttaatatagacctttgtctgtgtagaccagtttgtcttgtaaactgtcttacttatgtgtgtaaacattttacattcacatgaaaagttattttcctttatataattggattcagaatcataagggacaggactgaaattattctacagtaaccagtaagaataagattcggccgggcacggtggctcctgcctgtaatcccaacactttgggaggccaaggtgggcggatcacctgaggtcaggagtttgagaccagcctggccaacatggtgaaaccccgtctctacacaaaaattagccaggcgtggtagcgggcatctgtaatcccagctacttggggggctgaggcaggagaatcgcttgaacccaggaggcggaggttgcagtgagccgagatcacgccactgcactcccgcctgggtgacaagagcaaaactccatcttaaaaaaaaagaaaaaaagagtaagattcatttttattagttactcaacttcagacacaattttgttaatttggatatatacatatatataataagaactcatggttagaatagaaatacagatactttaaaaatggtaatagaaattgtaccaatcaggttgctgtgagaaaactgacaaaatatgcaataaagaataccaagagagaaaggacaatcgccaattcagtttcccagaacagaatttttatgaactgcacaaatgtttaatgtaaatggtgatacctacaggga

SEQ ID NO: 48339 - DNA, 729 bp, Homo Sapiens
gcaggaacagctaccggacctgcatagccatttttctgatctgaacctggaagctcatatgtatgcatcccagtggtttctcactctttttactgccaagttcccactctgcatggtgttccacatcattgacttactgctttgtgagggtttgaacataatctttcatgtagctttggctctcctaaagacctcaaaggaagaccttctgcaggctgattttgaaggtgctttaaagttctttagagttcagcttccaaagagatacagggcagaggaaaatgcaagaagactgatggagcaggcttgcaatattaaagtaccaaccaagaagctgaagaaatatgagaaagaatatcagacaatgcgagagagtcagctgcaacaggaagacccaatggatagatacaagtttgtatatttgtaggtaactccagctgttgcatttatactgggaatcttcataagaagctgagagaaagagaggggaaaaagaaagtggctttctactttcaaaaatgaaacaaaaaggaaaaatggcaaagtactgttttagctgtgcatgtcatatccacaaagacttttagcaggtgaactgttccaagactgacacaaggatgtttcaaacttgcctctgtctgtagaaaatgttaaaaataccaactcacttggaaggaaaaataaaaatcacaaaggtatattgagcacaaaaaaaaaaataaaaaaggg

SEQ ID NO: 48340 - DNA, 784 bp, Homo Sapiens
agaaaatctttgctcagtatcttgtcccccacaacctggaaacagaagagagaatgaaatgcttatattacttatatgctagtttggatccaaatgctgtaaaagctctcaacgaaatgtggaagtgtcagaacatgcttcggagccatgtacgcgaactattggatttgcacacgcagcctacatcagaggctaactgttctgccatgtttggaaaactgatgaccatagcaaagaatttgcctgaccccgggaaagcacaagattttgtgaagaaatttaaccaggttctcggcgatgatgagaaacttcggtctcagttggagttattaattagcccaacctgttcttgcaaacaagcagatatttgtgtggttagtaaatcatacttcacactttttctctagctttacttacagaaatatgtattttattaaagcctgttttacatacagtgatttgtgtaaatgtaacaatattgtgagctctgaattactttggagtatatctattgtcaagttaattctctatttaccattcactctcagccacattccaggaaaataactaaagaactaagccagggagattggtcttaggaattttacaagataaagtactttgaacttagtagacattcattgagtaatgataagtattttctgaatgcttgtgtacatgtgcattttcttctttcatgtattagaatggccaataatcgtcaataaattagtagtagtaacattgccaaaaaaaaacaccacacaaacctcaccctacccac

SEQ ID NO: 48341 - DNA, 824 bp, Homo Sapiens
  misc_feature (734)..(735): n is a, c, g, or t
  misc_feature (768)..(769): n is a, c, g, or t
  misc_feature (775)..(775): n is a, c, g, or t
  misc_feature (777)..(778): n is a, c, g, or t
  misc_feature (788)..(788): n is a, c, g, or t
agaggtaatccgttgcctgctcactacggacacagtgattcgaagctacttaggggcatacattactaagtggaagcctcctccatctcctctgctggcgctgtgcacctttttagtttcagaaaagcatgctgggcaccgatctctttggaagccttacctggagattttacccaaggcgtatacccgccctgtttgtttggagccggaagtggtgaaccttcttcccaaatctttaaaagcaaaggctgaagagcagagagcccacgtgcaggagttctttgcttcctccagagactttttctcttctctgcagcctctgtttgcggaggctgttgacagcatcttcagctacagcgccctgctgtgggcttggtgcaccgtcaacaccagagccgtgtacctgaggcccaggcagcgggaatgcctttctgcagagccggacacctgcgcactcgctccgtacctggacctgctgaatcatagcccacatgtccaggtaaaagcagcgtttaatgaagaaactcattcttacgaaattagaacgacttcacgttggagaaagcatgaagaggtattcatctgttacggccctcacgataatcaacggctgttcctggaatacggatttgtttctgtccataatcctcatgcttgtgtttatgtctcaagaagaatacttgttaaatatcttcccatcacagataaacagatgggacaaaaagattctattnntaaggatcatggctatatagaaatttgacattnngatggnannggacatctgnagctatcacagccttaagttgtatgtctggagctga

SEQ ID NO: 48342 - DNA, 461 bp, Homo Sapiens
aggagattgagactggagacatgattgtgccactgtactccagcctgggtgacagagtgagaccctgtctcaaaaacaaacaaataaataaaaccacaacaaggtacatttaggcaaaaatataaagtctcacaatgccaattattggtcaagatatggaataacagaaactcatatactccttggaaggctaaattgatagaatcatcttgtggaaagtttgttattacctatcagcgtatggatccaatactctaagaagacctcataattttacacctaggtaaatattaatattttacaaacttcacatatgtccataaagaaacacaagtaaaaatacttatagcaaaaaactggaaataactaggtccactgataggaaaaataataaaaatggaatgacagtcctgttagaaaataacaacagcatgtttataaaaaaaaaaaaaaaaaaggac

SEQ ID NO: 48343 - DNA, 731 bp, Homo Sapiens
gtcagaaagaacgaacagctgtagggggaaaaaattctcagttgtmaaaaaaaaaaaaaactaatctaaaaammmmyyyyyyccyyyyyyyttyttycctacattaacctccatcaaataccaattccaggaaaaactcttctcattcaaaaaggaattattcaaaagtaatcaaaaccacaaatgcatttggtttttgggccagcaattccacttctaggaatktacatactcacacatktacaaaataatgaacatacaaaagtattcattaatgcagcgtttgtaaaaacaaaarattggaagctgtttaaatdacaccatatcagggttctggttccctaaattttggtatattcatacagcctactcctgggtagacaacaatgaataaataaggagaacttggaaaccatttatttagttatttgggataaccttcattttattttattaggtaggaaaaataaggttgaggacagttactgccatttktatataaaaaggagaaaaatggtaagtacataattktgaattcataatttatctctggaaagagacatgagaacctggtaaccctgattaccttgggaggggaaggggsagtggtggctggggggatggaattgagagggagacaactgtatcctttcatagcttttgaaaatgtgggtgtactatgtactatgtggatgtactaccttttcaaaaataaaacatttaaaaagcta

SEQ ID NO: 48344 - DNA, 566 bp, Homo Sapiens
ggcacgaggtgaatatacaagtctactgataaattatgtattgtctgggaatttgatagtcattgttttagataactggattttacgctgtggtagacaggctgtgacactagtgttgcacaggtgtaattggtcatcctatgccttcaccagaataacttgggagtggtgccagaaactagagtctacaattctcactgtttagagagtgttaatgacatactgtgtatgcataatagccgcatgtactataatagcccttaaaattaaactattgggattgctgtaaatattttaaagtactggaggtgccttttacctgtttattagattttgaaaaggtttaaattatttcatgagcaatcttttaaatttcatttaacataaagctgaaaattcaataacaggataaaaaagctttttaacaaggctgccatttaacttaaacgtgttcatcttagctttcacttgtataaaatttgattctttgaactgcagcaataaaaccctcagctcctaagaagtcttaagagggtattctatatattctgctttgttttattttc

SEQ ID NO: 48345 - DNA, 666 bp, Homo Sapiens
cggagcctagggaagcaaattctcctggcggcctccgttcagacgcggcagctgtgacccacctgcctcctccgcagagcaatggcggtgtctgccgggtccgcgcggacctcgcccagctcagataaagtacagaaagacaaggctgaactgatctcagggcccaggcaggacagccgaatagggaaactcttgggttttgagtggacagatttgtccagttggcggaggctggtgaccctgctgaatcgaccaacggaccctgcaagcttagctgtctttcgttttctttttgggttcttgatggtgctagacattccccaggagcgggggctcagctctctggaccggaaataccttgatgggctggatgtgtgccgcttccccttgctggatgccctacgcccactgccacttgactggatgtatcttgtctacaccatcatgtttctgggtgaggggaactgtgggaaatattgactggcctgccagaaacacagaaatagaagcatgctggtgaatggtcaaagtctttggcaccttatttcacttctgctgtgatcaatttcatgctgttgacctgtgtgtcacttaagctgtgatcccataattctttttaaaatattaaaataacatttaattttcaaaaaaaaaaaaaaaaaaaat

SEQ ID NO: 48346 - DNA, 581 bp, Homo Sapiens
  misc_feature (561)..(561): n is a, c, g, or t
agcaaattctcctggcggcctccgttcagacgcggcagctgtgacccacctgcctcctccgcagagcaatggcggtgtctgccgggtccgcgcggacctcgcccagctcagataaagtacagaaagacaaggctgaactgatctcagggcccaggcaggacagccgaatagggaaactcttgggttttgagtggacagatttgtccagttggcggaggctggtgaccctgctgaatcgaccaacggaccctgcaagcttagctgtctttcgttttctttttgggttcttgatggtgctagacattccccaggagcgggggctcagctctctggaccggaaataccttgatgggctggatgtgtgccgcttccccttgctggatgccctacgcccactgccacttgactggatgtatcttgtctacaccatcatgtttctgggggcactgggcatgatgctgggcctgtgctaccggataagctgtgtgttattcctgctgccatactggtatgtgtttctcctggacaagacatcatggaacaaccactcctatctgtatngggttgttggcctttcagct

SEQ ID NO: 48347 - DNA, 663 bp, Homo Sapiens
ttttttttttttttttttagttatttaaatataaaaaaagatttaattcatatttatgccaagaacactacaatttacaaaagtttcatccaaactcttaccctatgtctacccacaccagagggaggaacatgtctttgtggagaggatttctttgagactctaaatatgctttgttcaggaaaggggaagatacaaaaatatagaacaaaaaagaatattggctcattgtacacaagagaggccagccattaagaattgttatcaatacaataaaagggaatacttggccagagatcctctagataagtagctaaaatgtgatcaaaaggagaaagaggaagaagcaaatacacaaacgttttatgggtattaataaaaataaagacatctctgaacaaatgataaaatcccttccctgaaaaatttcaaatgagattcacagaaatgcagaagcagaagaaactttagatttagaaacatctcatttgggctgggtgcagtggctcacgcctgtaatcctagcactttgggaggccgaggcaaatgaatcacctgaggacaggaattcaagaccggcctgggcaacatggtaaaaccccatctctactaaaaatacaaaaaaaaaaaaaaaaaagcaatgatctgcggccgccctcgtgc

SEQ ID NO: 48348 - DNA, 685 bp, Homo Sapiens
  misc_feature (666)..(669): n is a, c, g, or t
  misc_feature (671)..(677): n is a, c, g, or t
  misc_feature (679)..(682): n is a, c, g, or t
ggaggtggccaccctgagcaaggaactcctgcaattcacggcatccaagattccttacagcctccggcggctcacagggctagaagtccagaacatgtatgtgggaccccagaccatcccagccaccccccatcttcctggcctctttggcagctccaccctgtccccccaccccacaaaggggggctacgcagtcactgacttcctcacctacaactgcctcacgaatgacacagacctgtacagcgactgtctccgaaccttctggacctgcccccactgtggcctgcatgcgcccctcacgcccctggagcgcatcgcccatgagaacacctgcccccaggccccacaggatgggcccccaggggctgaggaagctgccctcgaaaccctccagaagacatctgtcctgcagaggccctaccactgcgaggcctgcgggaaggacttcctctttacacccacagaggtgctgcgccaccggaagcagcacgtgtgagctgggccaggagccctgcccacctccgtgcagctgacctgccctccagcccaggactaggggcaggactcttgcctgaacccccagcctgggcttagccctgtggtcctgtcccagtgcagagggcctggagcacggattgtgaataaagcctcacatgctgaaannnnannnnnnnannnnaaa

SEQ ID NO: 48349 - DNA, 658 bp, Homo Sapiens
aatttagcaataatgtcgtgctaggacatgagagggattaacattgaagacacagcctctatctttaagtaattcataatttagccaaatatattaatatctgtaatataaaacttacctaggaaagtaaaatagagatccaagaatcaggagtcctaaagcatataatgagtctgttcctcttggaagccacacatgtcaaggtcatcagtaagcaggcctactctttcttcatattctgggttaatgttcaccttgactgcttggtaaatttccctcactggtgctgaagtaaccaaaatggggaaggagtgatgaaaactcatctttgagtaagcttagtgggaaatagtatatctgggcctatagagaagttgggtcattacttagaatgacaactggaaaagtacatagactgcttgccaatcagtttgttgtaccatgtacctgttcacagactcttttcaaaaaacaagtttattttactttttttggtactttggtcatgttgtttccttggtaaagatcaaagttgaataaagcttaacaaagtttaataaagaaaaggaataaattactatctaaatgtgttaaaagcaatcaccaagtttaatcacttaaaaaataaatattctcttaacagaaaaaaaaaaaaaaa

SEQ ID NO: 48350 - DNA, 601 bp, Homo Sapiens
acgagatggagttcaccgaggccgagagcaacatgaacgacctggtgtccgagtaccagcagtaccaggacgccacggccgacgaacamggggagttcgakgaggaggagggcgaggacgaggcgtagatgcccccgcgagacgggttagggaaagckgaggaggaaagcgagggggtggggggcttcccgggacgataacctggcagtggaaggaaagaagcatggtctactttaggtgtgcgctgggtctctggtgctcttcactgttgcctgtcacttttttttccttttttgtaatattgatgacatcaatgtaacatttgagatatttctgaattactgttgtaatggctaaaatcacataaacgtttgtgtcggaatggtgtcctctctttctcttcctttttctctttattaacgatttaaatgtaactttctgaacacattgcattgaattcttcctttaacaaaaagcaaaggcgtaggtaaaagctcaaatgaatttattctttcggtatggtaaaattgaaccaatcacagttaagatgagagatcaacctgagttttaaaatacctttaataaatattagttgaaaaaa

SEQ ID NO: 48351 - DNA, 773 bp, Homo Sapiens
acctctgggggtggggagtaggaataaggggcctggggcctccataaatctgcaatctgcaccctcctcctagagacagggagatcgtgttctgctttttacatgaggagcagaactgggccatacacgtgttcaagaactaggggagctacctggtagcaagtgagtgcagacccacctcaccttgggggaatctcaaactcataggcctcagatacacgatcacctgtcatatcaggtgagcactggcctgcttggggagagacctgggcccctccaggtgtaggaacagcaacactcctggctgacaactaagccaatatggccctaggtcattcttgcttccaatatgcttgccactccttaaatgtcctaatgatgagaaactctctttctgaccaattgctatgtttacataacacgcatgtactcatgcatcccttgccagagcccatatatgtatgcatatataaacatagcactttttactacatagctcagcacattgcaaggtttgcatttaagttaaaaaaaaaaagaaaaaaaacctaagggtgaaacgatgccactttgacgcaaattaaattccaaccgggttcgggcaaagaatccagtatcccttccatgaagacggcacatatctcctctcactgggtcttccattcagggacacataagtttggtcttacctccaaattaaaccacttgttcacacgggtgtgaccttaaagtggacgctcatagttaaataccactcggaggactgcaatgcc

SEQ ID NO: 48352 - DNA, 853 bp, Homo Sapiens
agaggttgcagattttgttctgttaagactgcaagaaatcctcctccactggatgccagtgagccctacaatactgcaaaggcaattgcagaatggggtctggattatgttgtcctgacatctgtggatcgagatgatatgcctgatgggggagctgaacacattgcaaagaccgtatcatatttaaaggaaaggaatccaaaaatccttgtggagtgtcttactcctgattttcgaggtgatctcaaagcaatagaaaaagttgctctgtcaggattagatgtgtatgcacataatgtagaaacagtcccggaattacagagtaaggttcgtgatcctcgggccaattttgatcagtccctacgtgtactgaaacatgccaagaaggttcagcctgatgttatttctaaaacatctataatgttgggtttaggcgagaatgatgagcaagtatatgcaacaatgaaagcacttcgtgaggcagatgtagactgcttgactttaggacaatatatgcagccaacaaggcgtcaccttaaggttgaagaatatattactcctgaaaaattcaaatactgggaaaaagtaggaaatgaacttggatttcattatactgcaagtggcccttggtgcgttcttcatataagcaggtgaattttctgaaaatctagtggtaaagaaaaaaagactctaaaattcaaagactcagatccgaaatttacaattgatccgttataacagagggtgccaattcctggcggtggttgcccctcttgtttaaaacagttttccggatgggcccgggtcccttgggccgggggacccaggggttaaccgggaagggaggtcaaaa

SEQ ID NO: 48353 - DNA, 582 bp, Homo Sapiens
aggttataacttttaggtatggtatcgtaacgtactgtcccccagcaaacatttaaaaagccaattttaaaaaatgtatttctgactaagttacattaaggtctctgcctctgtatcttatgtttcttccaggtgcaccctgaagaccacaaattaaataaatatcatgactggctttgggaaaatcatgaaaaattaagtctatcttaaactctgcagctttcaagctcatctgttatgcatagctttgcacttcaaaaaagcttaattaagtacaaccaaccacctttccagccatagagattttaattagcccaactagaagcctagtgtgtgtgctttcttaatgtgtgtgccaatggtggatctttgctactgaatgtgtttgaacatgttttgagatttttttaaaataaattattatttgacaacaatccaaaaaaaatacggcttttccaatgatgaaatataatcagaagatgaaaaatagttctaaactatcaataatacaaagcaaatttctatcagccttgctaaagctagggggcccactaaatatttttatcggctaggcgtggtggt

SEQ ID NO: 48354 - DNA, 610 bp, Homo Sapiens
gggtatgctgcccactcagcttgagactcaccctcatgcattcagccagtaggtctggccaagcctgaactgaaggaccatggtcctatcccagcttcatcagagcaatccattgtgacctgagaatccatttaacctctcggtctagaacctccttctggaaagtgaggtattaatacttgactcatgttatcgccaccccacattctaagtcatggttgagtagtaatttggacagtaccttgtaaattgtgtgagattaccttaatataaggtataacttaaaatattcatgaatcccaggaggttaaaggttataacttttaggtatggtatcgtaatgtactgtcccccagcaaacatttaaaaagccaattttaaaaaatgtatttctgactaagttacattaaggtctctgcctctgtatcttatgtttcttccaggtgcaccctgaagaccactaattaaataaatatcatgactggctttgggaaaaaaaaaaaaaaaaaaaaaaaaaaaaatgaaaattacagtaccgagagccacaaaaaatacccaatatataaaaaaattgtctcctcctaattttattaggtttttttagtgtcct

SEQ ID NO: 48355 - DNA, 842 bp, Homo Sapiens
ccccgcctccgccgccgcctccgcctcctcctcagtctccggctcttcccggccctgtctgtctctagcctgtggtgcagagcgggcggcggcggcggcggcgccggcggcgggatgaagcccgcactgcgcctgcgcgctcacggccccgcccggccccgcccctcgttcggggctggctgagggctccgaggccccaccgcagcgcgtctctccggtgaatggccgagggctgggtggggctgcggtgggcagcggtggcctttctccttcacacacatacacatgccttccaaatgtgcatggcttgggattcgcgtatttgtttaagagacgacggccacatccttttgttcggcgttcagcagactcctccgagttccgggatttctcccgactgaggcgtctccgtctcagtactctcggaggaaagcctcgaggggcagaactgccctctgttgtttcacggggctggaacctccctctccgcagcccaaagaatccggatggacccgcctttcccagaaccggagaccttggcctcctcaggctcccctctgactcaaacaaaagccggaattggaaagaccacccctttgatgtgttcgctgtaatcgacgtcctgctttcctcaaccgcccattcccttagccttcttagttgacaggaatattgagtatttgcaaagatgcgaagccagaaaaaaaaaaaagactttttattctataaatcggtcccgctgcgtgcgcgccgtctgtccagtacaagcgcgggggccccacccccgaagagagggccctgggatttcaaccaaagggctgggggggcccttggaggggcct

SEQ ID NO: 48356 - DNA, 620 bp, Homo Sapiens
gcagccccgcgtaccgcctttcacgagtcttcaagccttcaggctttcttctagtcaagatgagtgataaaccagacttgtcggaagtggagaagtttgacaggtcaaaactgaagaaaactaatactgaagaaaaaaatactcttccctcaaaggaaactatccagcaggagaaagagtgtgttcaaacatcataaaatggggatctcctccaaagagcagatttcagcattgcctgacagtcttggttttaggcttgtttttttgtaaacctgtgtgtttgtagagatttcagacatcttctgatttcttctcacctatattccctggttaagaggtcaggggtagtgaatgtttccttaagttcctttttaaacttcccattggtatgtaaattccaaatggcagatgctgtcaataaccttgccatggatgacctttgtgtaggtagtccttgcacctcatgcaggataagccaattttaactttctacaatgggtgcctcaatagtttcataatcttcatgaagttgcatcctttggcagcttcttacagtttattttcacttccaatgtagcaataaaataataaatataatcgttgttgtctgaaaaaaaaaa

SEQ ID NO: 48357 - DNA, 586 bp, Homo Sapiens
  misc_feature (351)..(351): n is a, c, g, or t
cgcaggagccccggggtgaggcatggaggaggcaggcgacagctgacagggaccctgctggcctccagcatgtccagccagccgggcaggatttctctgcttctggctggcagccaggaactgagtatgacaatgttgtactaaagaaaggcccaaagtgacagaggcagcagagggatggtccaccgccccttggcttctgctggtgactcctcctggccactgcatcagaagaacctcctctgccccttctggagcccgaggcctggcctgtcttcgttggggctgataaattgcctctcccagggcctgctgggtgagtcaccatcccaaagcaggaagggtgccctnggagagaaccaccctcctcctactctttttccacttcctcctctttctttccccagctgaggaggaacctggggcatttagggcagaggacaaaaggatgtcagcaattgcttgggctgcttggctatgcaagcctcctgcctgctgatggccacttcagggacagcctgggcccaggcacccagggggatggcggcagcttcctgcacctttcagatttcttggtggcattaaa

SEQ ID NO: 48358 - DNA, 833 bp, Homo Sapiens
tttttttttttgaataaaagatttatttttttttctcaggaaaaacagaaagttagggaaacacactacatttgacaaccaacattaatttgtagttggtcctaacccttcctggcacagctatcaaaagtacagctgtttaaccagaaccaaggtgttcaccccccacagaatgtacatgaaacactagaggactgcatgtttttccctgagagaagcgtaagacaaacagaagtcaaaaagtagtcactgggagcgccatccttctaagcaaatcctccctttcccttttggaggatttgcccgaactacgtagccagtcagcacttagaccacctgcctcctcctccccctataaacccaccactcccctcctcctttcccaaaccacttggggtgtcctaagccctcactgccccaagcccaaaatatcaactaagatccttgtctgtatttccacagtcatacctaatgaattgggaagtggggcccctaaaaaccaattcacatctatgcacttgtttccactggatttggcagacaggcttttttagttaccgtaaccagatcttaagattaattaaaaactacataaagtgcttttaggtccttagagatacatgatataaataagcggcttatgatcaagaacgataaatacataggtaaaaatagctctagcaaagatgaccttatggctctgagatgggcaggcagggcaattcttccccattacattcttagtcatcttattcatacctatttttaaatggagtccacagactaaaggtcatgttccgagactgaagctttcaaatgaccctagttccaat

SEQ ID NO: 48359 - DNA, 512 bp, Homo Sapiens
  misc_feature (368)..(368): n is a, c, g, or t
  misc_feature (433)..(433): n is a, c, g, or t
  misc_feature (466)..(466): n is a, c, g, or t
  misc_feature (481)..(481): n is a, c, g, or t
  misc_feature (504)..(504): n is a, c, g, or t
tagtgcttgggaaatcaattcagaatatcacatcctctccaattctctcttactcaaattgctgggaaactctcatgttactaactttgttgctctaactctgccatcttggtttccccatcccttctcttcctcatggtacgtgtgctcctaatattagcgttggttgagattttcagtggtccaatatacctcttccctctggttgcctttcctgagataatccactaagaatattttgtgtttcttttctcagggaatctaagggaggaaattatcaactgtgcacaaggaaaaaaatagatatgtgaaaggttcacgtaaatttcctcacatcacagaagattaaaattcagaaaggagaaaanacagaccaagagagaagtatctaagaccaaagggatgtgttttattaatggtctaggatgaaganatgcataggaacattgtaggtacttgtaaatanctagaaatacctggntttaggtcataattgtggaaaanttataata

SEQ ID NO: 48360 - DNA, 734 bp, Homo Sapiens
  misc_feature (705)..(705): n is a, c, g, or t
tgcctaatcccgctggcagattagtctttacataaacaaatgtgatgatctacaacgaaacaaatgttaccaggaagtagccaaactccttagggaaaacagaaggaaagaaatagagataataaatgcaatggtggaggaggaagccaagaagtggaaggaagctgaaggaaaagagttccgtttgagatcagcaaagaaagcttctgctctttcagatgcgtctagaaagtggtttttaaagcaagagataaatgcggctgtagaacatgctgaaaatccatgtcataaagaagaacccaggttccaaaatgaacaggactcaagctgtttgcctagaacctcacaattaaatgactcttctgaaatggatccctcaacacagatttctttaaatagaagagcagtagaatgggacaccacgggacagaatcttattaagaaagtgagaaatcttcgccagagactcactgcccgggctcgtcacagatgtcaaacccctcatcttttggctgcatagaatgcatgtcaccttgagacggtcgagagagagacctattttgcaatcagtgacattgatttttagattatttatttaaaattcctataaagatcagccctttgtacagaaaaatgtgtctataaaaattatgtgttatttaattctgatactttttgggcttgtaaatggcttcttgaactttntacaataaaaatgttttagaaactgttaa

SEQ ID NO: 48361 - DNA, 581 bp, Homo Sapiens
  misc_feature (544)..(544): n is a, c, g, or t
  misc_feature (548)..(548): n is a, c, g, or t
tcatgttaacagctttggcgtggggcacctccccaggataggcacaggagctgtgcaggcaagtagaaaagagcaccgggagaacggcccagttcacagataaggaggcagcaagtctgcacacctttgtactatgctgaaattgttcaatcactcgacagttcagaaataaatataggaagattttgaaaatcctacctctctgctctgctccacagcactcctggaagcctgcactttccgtagaccttaaaatctcagaggtagggctgccaccaaggtgaagatgggaacgcagatgatccatgagtttgccctggtttcactggcccaagtggtttgtgctaaccacgtctgtcttacagctctgtgttgccatgtgtgctgaacaaaaaataaaaattattattgattttatatttcaaaaactccattctttcctaaatattttcaacaaagatttctttatgcattctgcctaaatacctatgcaactgagcccttccttctcagctaagaattcgtctggtctttcctacagctnttgntgtgtgccatggccacattcctgggttacaagt

SEQ ID NO: 48362 - DNA, 597 bp, Homo Sapiens
  misc_feature (427)..(427): n is a, c, g, or t
atgtgaattgtttccagtgaggggattgagtcaaaacttggatctcaggtacctcaatttttcccccaatttctggctactactaaaagccagaaagaacagaacagtggcctcaggagatctgagtttgaatccttgctctctaggatgcaggtggcttgaagcagaatgccacacctgcaagttgattagaactgcctttcttcccaggcttgacataggtattaagtcaaaattacatgaaacccagtggtaaaaaagcctctgaaagctgtaacaccctcagtaataacaaaagggatttttatttcacagctaaagggaaaataggtggagaagttaaaaaataatgtctgatcctgttcctaagttccaaactatagccaacactctgatgctgctctttttcttgtaggaccaaccgtcncagtttgcctgggactttctcatttttacagagtcccaaatcctaagaaactggagcaactggtacaactggtcacctactcttgcccctctgtaaatcaagccaactgtgaccatccaatgtgtcatcttacagggaaaagttataaccactattcccctataacgtaa

SEQ ID NO: 48363 - DNA, 713 bp, Homo Sapiens
cccacgcgtccgtgacgtgtcaatgtttgtgtctggcctaggagaatgaggaggacagcttcacttgccttttgaagaagaaacattacaaaaccttaacctgaagtataaagtcaaaagatacggctctttctcacacttgcaagacttacaaatacagcctcaaacattatgacacaccaacaatatctagaaagtaagaactggtgtagcaatgatgcttcatattctagctgtagccacagagttgagggtagtttttgtaggtctaaaataatctataaagatgtccaaagttaaattttcaacaatacaaatctagagaagtgacagcctacattacttcattactcttcttttagtctttagtctttaatattttaaagtttactctataaatcagcattttgtaatcctttataaactcatccagatttaaatgctactttttcatgaagaaaggataactttatagacagtcagtgcaacacacacattttatctcatcaccgtcttactgcctccccatccactgtctcataaagccctcagctgaactaagataaataatacaatggaaattattttcagttccccttgcactgtcaaagtaaaacaagaaaactgaaaagctgcacccccagcaagaaagggaagtatgctgttgtatgcatcattactcaacaattacccctctaactaaacatcctgtt

SEQ ID NO: 48364 - DNA, 447 bp, Homo Sapiens
  misc_feature (116)..(116): n is a, c, g, or t
  misc_feature (118)..(119): n is a, c, g, or t
ggagccggggcggagcgaccccaggcggtgacggaatcagtccccaatgcctggaaattcctcattggattactgtgttttaaacagaagttcgtgaacagccttttatctccaancnnaaagaaagatgtggaaagcttcagcaggccacgctgtgtccatcgcccaggatgacgcgggggccgatgactgggagactgaccctgattttgtgaatgatgtgagtgagaaggagcaaagatggggtgccaagacggtgcagggctccgggcaccaggagcatatcaagtaagaggcgtcgccaccaccctcccgagggcccctctgcggatggagccccaggtgcaacagggcccatggtcatctgtggagggacagcccgtgtggaaactgcatttatcttcttgacctgatacccatgcagtaaatgaatataagacacacaca

SEQ ID NO: 48365 - DNA, 419 bp, Homo Sapiens
gaaccggaagtagagcctggtgcctgggagcggctggcgcggcggaatccagggccgacccgggccggaccgaccccaggcggcgacggaatcagtccccaatgcctggaaattcctcattggattactgtgttttaaacagaatttcgtgaacagccttttatctccaagcggaaagaaagatgtggaaagcttcagcaggccacgctgtgtccatcgcccaggatgacgcgggggccgatgactgggagaccgaccctgattttgtgaatgatgtgagtgagaaggagcaaagatggggtgccaagacggtgcagggctccgggcaccaggagcatatcaacatacacaagctgagggagaatgtctttcaagagcatcagacccttaaggagaaggaacttgaaacaaggccacat

SEQ ID NO: 48366 - DNA, 588 bp, Homo Sapiens
agattcaagaagagaggtctttccctctttcctcacctcttgaggcatgaaacaggaattccttatcctagttttatcaccaccaaactcctagcagtcataaaagtcctttttcctctaaacccacctcctctctgcctcacactgcagtatccactctgtcgccagcagcgaggcattatagcaggaggcttctgaattggccagaacagcagctcccaggtggggtgtctgagaacctcatttcctcattacatccctccctggtcagccatatgtgttcagcagccaaatggcaaaattcacccccagaactgtgattgtcttccctaatctggaaggcccacaagtgtggagaagcactggagaccctccagaagcagtagtgctagcagtcaggggctactctccctgccgggccccgtgcaagggcctggccaccctatcccaggtatgtgacacttggctggctgttctttattgtcctgctagtacctgttgtaaagcttcttttattaaagaagagcaggagattgaagtgtcataaattgaagagattcacaccaacacggcacatgtatacatatg

SEQ ID NO: 48367 - DNA, 469 bp, Homo Sapiens
ggcaaagatttaaaattttttatttttagtaaatgtttgaagcaaactaaaaagacgtgggcaatatttaccaaaacaaaacagaacccaaaaaattgtacatcttgatcttagcaaatatccttattgtagagacacttaataaagagatggtattttaatatctgcagttctgaggtagggtgtaacttagttctacattgtgatttaggaatttttaaacctttcttcttcaggggagaagtgacccaggcctcgagtttagtgctaaagccactagtgtacttatgctgtcacctaaccaccacatgcgacatggaggcagaggctaaatataggggctttcttaagaaagtgagaggaaattagcaagcattattagtgtttgactactgctatcaagtgaattcaaaggaaacaggtttttatgccatatttaagttacagaaaccaggcatgcttagaatag

SEQ ID NO: 48368 - DNA, 671 bp, Homo Sapiens
tttttttttttttttaagaatttacactctctaagtcttctatttttcctgtttatttccttaaacagaaataaattcaagcatagttttatgttttattagaaataagccactgcagttgctagaactgacatgctttcattttcaaggggttaacttttattgcatggcatagattattagtaatatcctgcattgtatacttttccaaaaagggttggactcctaaggattagaatccttataagcttgagggaaagctgaaactaatttgaacagtaatagaagggattatttttaatttcatagttaacactttacaatggattagatttattacctagtataatccgtagcagatcagatcaaagtttactgttttaccaatatattcatttgaaaaaatacagtggaggaaaagacactttagatggtagttttatggtgcttttctctgctgtaccaaagtgctttgtcatcaatgaaatgttaaccctatgctactttttctgcatgcttcttaaatgtcatcttaatgcttaattgtcctaacttgtaatatttttgtattaaatttttttaggagttccttgtaatttctttacaatttacaatatattaaacacaaagtgtttagtaaagtacaaaaaaaaaaaaaaaaacctcgtgcc

SEQ ID NO: 48369 - DNA, 587 bp, Homo Sapiens
ccacgcgtccgcccacgcgtccggccaagatcatgctactgcactctccagcctgggctacagagtgagactctcaaaaaaaaataataataataataagagaaaatagacaaggtctccaggctggtcaactcctggcctcaaatgatcctcccacctcagcctcccaagcagccgggactacaggcaaacatcaccatgtccagctgtccccagctttctaatctggtctttctcttgccccagaacctcaagaaggcatgaagccagcccctgcagtgccgtccacccgcccctctgggcctgcctgtggctctgttgccctcctctgtggcggcaggacctttgtggggcttcgtgccctgctctggggcccaggcggggctggtccacattcccaggccccaacagccttcaaagatgggtaaaggagcttgccctccctgggccccccaccttggtgactcgccccaccacccccagccctgtccctgccacccctcctagtggggactagtgaatgacttgacctgtgacctcaatacaataaatgtgatcccccacccaaaaaaaaaaaaaaaaggggg

SEQ ID NO: 48370 - DNA, 339 bp, Homo Sapiens
gtcgaccagtgatggagccttaagtaaagagtataattttggtgtgtggttggtagaatcactataatgtaatgtgacttaaaccttagacatcaatcattattttggtactttaaatataactgatgttttattccttgtgactacactatttagatatttacattaaatatcgaaaaactgatcacaaagatactataatacttttatacatgtgtgtacgtatgtatatatgtatgtatgtatgtcaatgtatgttttactattggcattagtaattattttccctttatgcaatttcttttagagtgcttctgtcttctcctcctacccaatagt

SEQ ID NO: 48371 - DNA, 673 bp, Homo Sapiens
  misc_feature (603)..(603): n is a, c, g, or t
  misc_feature (650)..(650): n is a, c, g, or t
cagccaaccacactattcaaaaagcaaagtgttcaccactaaagctaaccattcatctggttgcaggcaaggctaaggctctctctcctctagttcctggaacagactcacagattggcatgaagcactgatcaggggctgcactcagactccctggccaagcaaacctacaccagaagagtcagtgtcacagatatgatgcggccaatctctgtctccaaaaacctacctgaacttaatggtagaattcaaagatctggggactgagggcacccagccttctaaaacacaatgtattcatgtgtttagtgtaaactctctgcatggattctcagtgttaataataaaaggaagcattcttttacaactcctgctgtgtgcaaaagaaagtgcaaaggatttggagtggcattccgaagatcaccacacataccttggttctgatggctgctgaactccgacttcttcgctgagacatgactgtgggaacagcctccagctatctgctcatcagaggtgctttcctcaacctcctgcaccacctccaagagaaacagcctaaaaagaaacccagctgtttacttatattggtctgtaaatccnctggaagtaacccatgcatttttatctactgtctgaggaatacaatnatctgagaaatctatgctgtcac

SEQ ID NO: 48372 - DNA, 659 bp, Homo Sapiens
gagcccattgcctttcccgctgaagtctagatgttgacatgtaataaagcgggcagcaggatggtggtggatgcggccaactccaatgggcctttccagcccgtggtccttctccatattcgagttgaggctgtgaagctgggcagggtttcagctgagctgaggttggaagtccctgaccttcagctgtggccgcctacggagcagcagggagagcaaacccatggagaaccccgcggcccccaaagcatggacggagctgccagccttctcccctgcccttcttcctctactcccgacctgccagccttctcccctgcccttctgcctctactcccgacctgccaaccttagcctaaaatcagagctgctagaatcacacacactgtcgtagctggttttgtattgtaaatgagtcattctgttattttggaaacttatgtctcatgccaggatctgcagatagttctttttcaaaatattgtttagacaaaataaatttctttaaatataatatctctacttcaaatgcctgggggtgttgcatgcatttttctaggctagcaaagcttaaagattatttctataatttcagttacatttacctttatagatggggtactctaagtaacaaattaaacacacatgggatcttctaa

SEQ ID NO: 48373 - DNA, 774 bp, Homo Sapiens
  misc_feature (755)..(755): n is a, c, g, or t
  misc_feature (757)..(757): n is a, c, g, or t
gggcaagtaccctaatttagttcttttggactaatacaattcaggaaagaaaaaacccaaaaaccaacctcattcacatatggctttttttttaaccaataacaattaggtgtacttctattttaaaacatttcagaaaaaaatatatgttatagcaatactcttactcaaaagaagaaatttcctaactctatcagataaactcatctttagtataaataagcattatttgcaggttgccacaggtggacttttagtaagtaacctaacccatgtttcagcttctaaatctgcaaaatgagcaaggtacagtagcacatttttaggtgattcttagtaactccagtagccttcattagttaaaaacattattattttttgcatgctgcttcgactctaaatatctggttttccctgtctttttggtttactacttccccagattcagaacagaggagtaactaggggatctgattttagaggccttaattttctgttcatggactgttaaaagtaaaaccaaactttcaaaagggataaacctaaatatttacttgttatcattagagagggaacatcaaatgctgggacatcattactaaccaatagcatcagacactggatttaatggataatcacaatggtcgtaatgtatacagacctatataccacgtttctagtataaatttttccaaaaatacaataataatattatttataaagaaacctcttctatgaacaacaccaccaccatntntattttaatacccccgt

SEQ ID NO: 48374 - DNA, 535 bp, Homo Sapiens
cgaagcgggtacagacaatgttagggacccagcaacaccagtcggggtgttagggtgcgggatggaattgcttagggacatggcctacgtggccagttcccaagaactttgtcttttccaggtgagtgcagccccttccgctccagtaggttccagattaattttttatccccaagctctttcctgctccttcatgggtctcaggtctcctggaaatccaggaacagcaattagcccactgctatttagggcctttgtaaacattgaaggatgattcggagcttaggctttctctcccgtgtcaggaatcagtcagatgaagcctgctgcacgcgtccctgtctagaccttgattcaagtgattatatgcatttggatctccgtggatgcatctggtggcctgggctaggccagtgtaagttaaatctgctttcttgagccagtcctcagaaatgacttggtggcctagttgttggtggaggtaagtgagtgggagttttagccccgccttccagcctccagatcagactctatc

SEQ ID NO: 48375 - DNA, 877 bp, Homo Sapiens
gctggtaccggtccggaattcccgggatcaacgtcaagatggacatcctgtcctacatgaggcggcaggcagccctgggggtcaagaggaagtaactgaaggccgtctcatcccatgtccaccatgtaggggagggactttgttcaggaagaaatccgtgtctccaaccacactatctacccatcacagacccctttcctatcactcaaggccccagcctggcacaaatggatgcatacagttctgtgtactgccaggcatgtgggtgtgggtgcatgtgggtgtttacacacatgcctacaggtatgcgtgattgtgtgtgtgtgcatgggtgtacagccacgtgtctacctatgtgtctttctgggaatgtgtaccatctgtgtgcctgcagctgtgtagtgctggacagtgacaaccctttctctccagttctccactccaatgataatagttcacttacacctaaacccaaaggaaaaaccagctctaggtccaattgttctgctctaactgatacctcaaccttggggccagcatctcccactgcctccaaatattagtaactatgactgacgtccccagaagtttctgggtctaccacactccccaaccccccactcctacttcctgaagggccctcccaaggctacatccccaccccacagttctccctgagagagatcaacctccctgagatcaaccaaggcagatgtgacagcaagggccacggaccccatggcaggggtggcgtcttcatgagggaggggcccaaagcccttgtgggcggacctcccctgagcctgtctgaggggccagcccttagtgcattcaggctaaggccctgggcagggatgccaccctgctcttcggagga

SEQ ID NO: 48376 - DNA, 950 bp, Homo Sapiens
  misc_feature (672)..(672): n is a, c, g, or t
  misc_feature (675)..(675): n is a, c, g, or t
  misc_feature (678)..(680): n is a, c, g, or t
  misc_feature (683)..(683): n is a, c, g, or t
  misc_feature (685)..(689): n is a, c, g, or t
  misc_feature (691)..(728): n is a, c, g, or t
  misc_feature (730)..(743): n is a, c, g, or t
  misc_feature (745)..(745): n is a, c, g, or t
  misc_feature (749)..(749): n is a, c, g, or t
  misc_feature (755)..(755): n is a, c, g, or t
  misc_feature (757)..(770): n is a, c, g, or t
  misc_feature (777)..(778): n is a, c, g, or t
  misc_feature (785)..(785): n is a, c, g, or t
  misc_feature (787)..(788): n is a, c, g, or t
  misc_feature (790)..(791): n is a, c, g, or t
  misc_feature (796)..(799): n is a, c, g, or t
  misc_feature (801)..(806): n is a, c, g, or t
  misc_feature (809)..(809): n is a, c, g, or t
  misc_feature (811)..(811): n is a, c, g, or t
  misc_feature (814)..(821): n is a, c, g, or t
  misc_feature (847)..(847): n is a, c, g, or t
accccgcagcgagacctgaactctcctgtcttcttctgtctccttcatccgttctctgaagacactaacaacacttctgtcttttggaaacttccagctggtcaaagagattgccgatgaagaccccagccacgtgaacttggtcaatggggacggggcgacgccactgatgctagcagctgttacggggcagctggctctggtgcagctgctggtggagaggcacgcggatgttgacaagcaggacagcgtgcatggctggacggccctcatgcaggcaacctaccatgggtcagtgccagccccacgccctcagcgacaaggccagacagatgctctggcctgagatggaggttcccaatgggctcttctggtcctgagatgctgcatacaaaccccaggactatgacgacattgaggcatggaaaaaaaaaaaaaaagcggcacaggctcattttagtcccacccttctgtgtccagatttcctgttcccccatcacagaatttcacaatggccctgaaaaaccatgcagcaggagcattttatgcagagagataaggttctctaggttggtttcagttgaacacagtgactgattcattggagttttcacattgagatatagtgacctccttaagtagctcctgtatgaagtaaacattggttattcntanaannnaanannnnnannnnnnnnnnnnnnnnnnnnnnnnnnnnnnnnnnnnnnannnnnnnnnnnnnnanaaanaaaaanannnnnnnnnnnnnnaaaaaannaaaaaanannannggggnnnnannnnnnaananaannnnnnnnaaaaaaaaagaaaaaaaggggagganggggttttaaaaataaaaagttttttgtaaaagggggagttttttaattagtaggaaaatggttaaattttggaagaggtggggtattttgagaaaaaataag

SEQ ID NO: 48377 - DNA, 628 bp, Homo Sapiens
  misc_feature (613)..(613): n is a, c, g, or t
caggtggtcagccagattatagtgcagcctgggctgagtattatagacaacaagcagcctattatgcccagacaagtccccagggaatgccacagcatcctccagcacctcagtgcaggtttgatccagccagtatagaactagctctgtaggggtgaggaggactgtgctgtgtatcatccttgattgtgttccttcaaggagcattgcacttgccttcccagaccttccaccttaggttctgctgcaaaaagcaccagtgctgaagatgctgcaagcaccaaatcatagctcataaaatcaggtcctgagatagttacccataaagaggaatcctttgagtgtatgccattggtgagccgatgagcatggaccatagaagggctcaatgtagaagaaactacccgtgtgtaaaaagaagattggcttaaaatggctactgtgatgggaacagtgtcttagggagatgcagcttggacttgaggtaaattgaatactttacaactgtggtttagagtttgctttaatgacattgtatgtaaaaggtcacatgattgctgtaattttgtattcattatggtttcctcaataaatgtacattgatgactattanaaaaaaaaaaaaaag

SEQ ID NO: 48378 - DNA, 497 bp, Homo Sapiens
gtcattttattactctttaacactcatgctgaagttctgatattttgttgaaatccattgttttactctttgcatatttgttggctctttgcatattaatatattagactacatgcaaatacagtctgtcttgccattgtctgttgaagtgcaggtttgatccagccagtatagaactagctctgtaggggtgaggaggactgtgctgtgtatcatccttgattgtgttccttcaaggagcattgcacttgccttcccagaccttccaccttaggttctgctgcaaaaagcaccagtgctgaagatgctgcaagcaccaaatcatagctcataaaatcaggtcctgagatagttacccataaagaggaatcctttgagtgtatgccattggtgagccgatgagcatggaccatagaagggctcaatgtagaagaaactacccgtgtgtaaaaagaagattggcttaaaatggctactgtgatgggagttgtgtcgga

SEQ ID NO: 48379 - DNA, 446 bp, Homo Sapiens
ttttttttttttttttttggtaacaagacttagaaggagggcccaggcactttctgtttgaacccctgtcatgatcacagtgtcagagacgcgtcctctttcttggggaagttgaggagtgcccttcagagccagtagcaggcaggggtgggtaggcaccctccttcctgtttttatctaataaaatgctaacctgccctgagtttccattactgtgggtggggttcccctgggccaaacagtgatttgtctccctcaatgtgtacaccgctccgctcccaccaccgctaccacaaggacccccggggctgcagcctcctctttctgtctctgatcagagccgacaccagacgtgattagcaggcgcagcaaattcaatttgttaaatgaaattgtattttgcccaaacaaaaacaaaaaaaaaaaaataggtgcggcctcgttcc

SEQ ID NO: 48380 - DNA, 668 bp, Homo Sapiens
  misc_feature (614)..(614): n is a, c, g, or t
  misc_feature (661)..(661): n is a, c, g, or t
caagaagagttcttttgcataccctttactcaggtcctctcatgttaacgttttacataactgtagaacatttatctaaagtaagatattagcccagaacaatactactaactgaagtataaaacttatttgaatttcaacagtttttttttcatttcttattttccttttgtgtgctctgtttataccatgatccatgatttttttaaaatcatgattgtcttttaaagatctgtgtgtctctgttttgagtttttcctgtttattttgaaaagtactgttggtcaagataattggtcaataatccatgttggttttaacaaaaagcattttaacattaaaaatattacagtataaaataacactctgtgctttaaattgaggttttatgtcattttagcagaattataatatttctgatatactcatgtttgacaagttgaaacagatttgtttcttaaaggaaggtttaatatacaaaaaaaggtaatcttaaacttacgaaaaagtaaattttacaatttgagcattactagatgtttagtttgcatgaactcatagttagaaattctgccaataggaatatctacaacccggctgatttggaattttgnaaaattataggggttacatggtataccctattcaaatttaaaattangggaaat

SEQ ID NO: 48381 - DNA, 497 bp, Homo Sapiens
agtcagcgtctggccaacctcaggcaacgggtggagcagtttgccagggccttccccatgcctggttttgatgagcattgaaggcacctgggaaatgaggcccacagactcaaagttactctccttccccctacctgggccagtgaaatagaaagcctttctattttttggtgcgggagggaagacctctcacttagggcaagagccaggtatagtctcccttcccagaatttgtaactgagaagatcttttctttttcctttttttggtaacaagacttagaaggagggcccaggcactttctgtttgaacccctgtcatgatcacagtgtcagagacgcgtcctctttcttggggaagttgaggagtgcccttcagagccagtagcaggcaggggtgggtaggcaccctccttcctgtttttatctaataaaatgctaacctgccctgagtttccattactgtgggtggggttcccctgggccaaacaaaaaaaa

SEQ ID NO: 48382 - DNA, 544 bp, Homo Sapiens
  misc_feature (391)..(391): n is a, c, g, or t
tcggaggtgctgttgaagcaaacagtggcacacacaggcttacagtctttgttttttaaaccagttaccactaatgtattaagccctgcagcagttaccactgacttctcgcacgcataaaatgaaccgggagaagccagtgttgatactgttgtgaagaggttcaagagctggcttttcagacaactaagaccatttttagcagaataactccttcagaaaggcctggctgaagatctttttatttctattgtctcacctatataaatttcagggttcttataagtcatctttaaaaagaaaaaaataatgtatatcagtttctcttatttaatgtggctatgaaagatgtttccttattatttcttcatctctaagaaggacaccaggnaatgggggttgggggtggaactaaagggaggaaaaaaaccagaacagggtaggtttttgtttttttgctttttgtttttttttggccaaggggtcggtcacacagaagggaaggcaaggaggaaaactaaactacaatccttggttcagatcg

SEQ ID NO: 48383 - DNA, 699 bp, Homo Sapiens
ccggcccctggggcacagcagcagcacgggggacactggcttcagctgctcccaggactcagggacagatatgatgctgcttgaggactacacgtctgatgacaaccctccctctcactgcacttgcccacccaagagaaggagctcggtgacatttgaggatgaagtggaacaaatcaaagaagctgccaagaactcgattcttcatgtgaaagctgaagtacacaagtccttggacagttacgcagcaagcttggccaaagccattgaggccgaagccaaaatcaacttatttggggaggaggctttgccaggggtcttggttacagcacggactgtcccggggggcggcttcgggggccgccgaggcagcagaactcttgtgagccagaggctgcagttgcagagcatcgaagaaggagatgttttagctgccgagcagagatgagggcctcagggtgccgtggggctgcagcctgagaggctggcccggggaggagttcccatcaccgcctgtgccgcggccttgggagcatgtcactgtgtacagctggccacacacagggaaggagcagcatctggtatgcagccaccaggacaaggactgaaaataatgtctacagtccacagcttcagcatttccagagaccacatgtgagcttcttttaggtcccagtgatgggaccagaagcatctaaa

SEQ ID NO: 48384 - DNA, 802 bp, Homo Sapiens
  misc_feature (787)..(787): n is a, c, g, or t
cttggacaactggaatgtttcagtttgggaaatctggatgccaaacgagattggggccatgccaaggactatgtggaggctatgtggttgatgttgcagaatgacgagccggaggacttcgttatagctactggggaggtccatagtgtccgggaatttgtcgagaaatcattcttgcacattggaaaaaccattgtgtgggaaggaaagaatgaaaatgaagtgggcagatgtaaagagaccggcaaagttcacgtgactgtggatctcaagtactaccggccaactgaagtggactttctgcagggcgactgcaccaaagcgaaacagaagctgaactggaagccccgggtcgctttcgatgagctggtgagggagatggtgcacgccgacgtggagctcatgaggacaaaccccaatgcctgagcagcgcctcggagcccggcccgccctccggctacaatccccgcagagtctccggtgcagacgcgctgcggggatggggagcggcgtgccaatctgcgggtcccctgcggcccctgctgccgctgcgctgtcccggccgcaagagcggggccgccccgccgaggtttgtagcagccgggatgtgaccctccagggtttgggtcgctttgcgtttgtcgaagcctcctctgaatggctttgtgaaatcaagatgttttaatcacattcactttacttgaaattatgttgttacacaacaaattgtggggccttcaaattgtttttctcttttcatattaaaaatggtctttctgtgaactanaaaaaaaaaaaaaag

SEQ ID NO: 48385 - DNA, 666 bp, Homo Sapiens
gtgctttttatctgtggatgaatggaaatcacactgaattttaattcttatttattttagtggatagcaggaatcactctgtagtagttgtgttcattttcttttctttttcttttcttttttttgagagagtctcgctctgtcaccaggctggagtgcagtggcgtgatctcggctcactgcaacctccatctcctgggttcaagtgattctcctgcctcatcctcccgagtagctaagactacaggcacacgccaccatgcccagctaatttttatatttttagtagagatggggtttcaccatgttggccaggatggtctcaatctcttgacctcgtgatccacccagtttggcctcccaaagtgctgggattacaggcgtgagccactacacctggccttgttcatcttctaattaaatatctttgaatgtttgtaataattttaatgttgacaataagagtttaaaaataatttgattttggactgtatttagatttctctttaattttgctgtagaaatagtaaatgatttaaagtggttatgatgtgttttatgaaggcttactattttatattgtacttatttaatttgtatttgagtctgtctaattttaacataaacaggtttatacattctgacaacacaaaacaaccacaaaaa

SEQ ID NO: 48386 - DNA, 611 bp, Homo Sapiens
acttatagggagactgcattgcttattgatccaaaaattcctgttcttcatcccgccagtgggttgctctggttgtgggacatgaacttgcccatcaatggtttggaaatcttgttactatggaatggtggactcatctttggttaaatgaaggttttgcatcctggattgaatatctgtgtgtagaccactgcttcccagagtatgatatttggactcagtttgtttctgctgattacacccgtgcccaggagcttgacgccttagataacagccatcctattgaagtcagtgtgggccatccatctgaggttgatgagatatttgatgctatatcatatagcaaaggtgcatctgtcatccgaatgctgcatgactacattggggataaggactttaagaaaggaatgaacatgtatttaaccaagttccaacaaaagaatgctgccgcaggtaatctttaatagcttgagatagaaatggagagaaagtattgtcactctatccaggctgggacattttatttttgttctgaatacttaactcaaggtcaggatccatgtaataaataaattagccttatttgaaaaaaaaaaaaaaaaaaaacgcgg

SEQ ID NO: 48387 - DNA, 1068 bp, Homo Sapiens
  misc_feature (1028)..(1029): n is a, c, g, or t
gcgagtgagtgagtgagtgagtgtgtgtgtgggggggactcggcttgttgttgtcggtgacttccccctccccttcaccccttcccctccccgccgccgctgcagtggccgctccctgggccgtaggaaatgagcgataacgatgacatcgaggtggagagcgacgaagagcaaccgaggtttcaatctgcggctgacaaacgggctcatcataatgcactggaacgaaaacgtagggaccacatcaaagacagctttcacagtttgcgggactcagtcccatcactccaaggagagaagctctatttcctcttttggaaattgtgtactcctgtccttcatcgtcaaagtttgatgcagaaatgccacaccttcatttcaagctaccaagtgcacaagaaaaaagaatgcaagatttaaaaaatgattgttttgaccccttacacaaatgtcttactcctggctttaattaagctgcttgagggctgatagctctgcctttccctggtaatcagcaaaatggtcctgtggctggggaggccctggcagcaggaagccttcaaggagccatgggtctgtgctgactctggccttacaaccttccagcctcctttgctggcattgatggggttccatttttgaatgaactagtttaatgtggatccaaatttattgtgcgcattcttctctcgtgggggttttcaaaagatggcttattcacatggaaatgtacaccagtttagccctgggccctccctttaccttcatatggtgtaaagcttacacaggtttcagaaaataaatggtttcattttctctaaaataactagtacaaaataaacagatgccagtttgttgaacccaaaaaaaaaaaaaaaactccaggatctttgtcgggggcggaaaaaaaggtatgaaatggcgcctggtcctaactggttcctggacccacctttcttggaaaaaggggaaaatctgccgggcctccccaaaaggaaggcgaatttaattttcgataaaccggcggnnacccgggctttaatgaaattgggttgcaattccccgggg

SEQ ID NO: 48388 - DNA, 833 bp, Homo Sapiens
cgcttgcgaagatgaagtttggctgcctctccttccggcagccttatgctggctttgtcttaaatggaatcaagactgtggagacgcgctggcgtcccctgctgagcagccagcggaactgtaccatcgccgtccacattgctcacagggactgggaaggcgatgcctggcgggagctgctggtggagagactcgggatgactcctgctcagattcaggccttgctcaggaaaggggaaaagtttggtcgaggagtgatagcgggactcgttgacattggggaaactttgcaatgccccgaagacttaactcccgatgaggttgtggaactagaaaatcaagctgtactgaccaacctgaagcagaagtacctgactgtgatttcaaaccccaggtggttactggagcccatacctaggaaaggaggcaaggatgtattccaggtagacatcccagagcacctgatccctttggggcatgaagtgtgacaagtgtgggctcctgaaaggaatgttccagagaaaccagctaaatcatgacaccttcaatttgccatcatgacgcagacctgtatacattaggttaaatctgaatttccttgtgtgatgcctccttaggcacacaggcaatgtctcaagtactttgaccttagggtagaaggcaaagctgccagtaaatgtctcagcattgctgctaattttggtcctgctagtttctggattgtacaaataaatgtgttgtagatgactggttagtgtttgaggctttgttctatgttttcccctgatttgttctggtcaaaactcatcaaatgtgtaactagcatccaggcg

SEQ ID NO: 48389 - DNA, 533 bp, Homo Sapiens
gctcagtggaccgtgtggaacaggaacagctggagtggagttgaggactattagaactggttcccctcaccacccaacctacccacctatgtcatactgtctcctcccaattcatccttaattccaagtgaagcagcacagtgctgagaaacagttcatccatggtgccatgttaaagaagttggaaatatatcttgaaaatcctatcttccttttaggcttgaatatgatgctgaacagtaagtttgttaaatcttggaacttaaaacaatcctgctttctcaagtactattctaacattgcgctttataagggatgatatttctaccacctcactcatatttttagctgaaatgattttcctggtatgtctgttattttgtggaaaaagaaatattgtgtaaaatgggtgctgccaaaattccaggccattttgcagggactctgaagtgacctttagtagtaatagtcttatgtgcagtaactataatggtaaagaatgttaaataataaaatttaacattttccaaatg

SEQ ID NO: 48390 - DNA, 773 bp, Homo Sapiens
  misc_feature (744)..(760): n is a, c, g, or t
  misc_feature (762)..(763): n is a, c, g, or t
  misc_feature (765)..(765): n is a, c, g, or t
  misc_feature (767)..(767): n is a, c, g, or t
  misc_feature (769)..(769): n is a, c, g, or t
tttccgggatgcaaagcaggtaagaagccgaactctgaggcctctcgccattgtctccgagtcggccagctggagcgttttcggggctgtaaagggagaatggcgcatgcgcatattcagggcggaaggcgcgctaagagcagatttgtggtctgcattatgtctggagccagaagtaagcttgctcttttcctctgcggctgttacgtggttgccctgggagcccacaccggggaggagagcgtggctgaccatcacgaggctgaatattatgtggctgccgtgtatgagcatccatccatcctgagtctgaaccctctggctctcatcagccgccaagaggccttggagctcatgaaccagaaccttgacatctatgaacagcaagtgatgactgcagcccaaaaggatgtacagattatagtgtttccagaagatggcattcatggattcaactttacaagaacatccatttatccatttttggacttcatgccgtctccccaggtggtcaggtggaacccatgcctggagcctcaccgcttcaatgacacagaggtgattcctgcctttttcctcagtaggctgagggtacacagaggtgatctaagtcagggaccagaagctgtgacatgttaactaagattgataggagaccttaacatccccaaaatccaacccaaactcccaaagatccatgtgccacatgttcattccattaaagaatgtctgacgttaaaaaannnnnnnnnnnnnnnnnannanananaagg

SEQ ID NO: 48391 - DNA, 583 bp, Homo Sapiens
attgtctccgagtcggccagctggagcgttttcggggctgtaaagggagaatggcgcatgcgcatattcagggcggaaggcgcgctaagagcagatttgtggtctgcattatgtctggagccagaagtaagcttgctcttttcctctgcggctgttacgtggttgccctgggagcccacaccggggaggagagcgtggctgaccatcacgaggctgaatattatgtggctgccgtgtatgagcatccatccatcctgagtctgaaccctctggctctcatcagccgccaagaggccttggagctcatgaaccagaaccttgacatctatgaacagcaagtgatgactgcagcccaaaaggatgtacagattatagtgtttccagaagatggcattcatggattcaactttacaagaacatccatttatccatttttggacttcatgccgtctccccaggtggtcaggtggaacccatgcctggagcctcaccgcttcaatgacacagaggtgctccagcgcctgagttgtatggccatcaggggagatatgttcttggtggccaatcttgggacaaaggagcc

SEQ ID NO: 48392 - DNA, 670 bp, Homo Sapiens
gaaagaaatttgattcctcccgggacagaaacaagccctttaagtttatgctaggcaagcaggaggtgatccgaggctgggaagaaggggttgcccagatgagtgtgggtcagagagccaaactgactatatctccagattatgcctatggtgccactgggcacccaggcatcatcccaccacatgccactctcgtcttcgatgtggagcttctaaaactggaatgacaggaatggcctcctcccttagctccctgttcttggatctgccatggagggatctggtgcctccagacatgtgcacatgaatccatatggagcttttcctgatgttccactccactttgtatagacatctgccctgactgaatgtgttctgtcactcagctttgcttccgacacctctgtttcctcttcccctttctcctcgtatgtgtgtttacctaaactatatgccataaacctcaagttattcattttattttgttttcattttggggtgaagattcagtttcagtcttttggatataggtttccaattaagtacatggtcaagtattaacagcaccatttatgagtctcaagttttattattgcaataaaagtgctttatgccggcttttctcaaaaaaaaaagaacaggaagcacccacccacccgcaagcacgcac

SEQ ID NO: 48393 - DNA, 426 bp, Homo Sapiens
cgtccgcgcatccttgcccacctcacaggcaccgagttcatgcaagacccggatgaggagcacctgaagaaatcaagggaaaagtatgtcctggagctgcagagcccacgctacacccgcctccgggactggcaccaccagcgctctgcccacgtgctcaacgtgcagtcgtagcccggccctctccagccggctgccctctctgcctccctctttctgttcctcctgcccagggcacccccttagtgcctccagcttctgcctacctcaccccccctttcgtgcccctggcctgagcctcctgctggcctggccctggccgcccacctgggttcatctgacactgccttccctctttgccctgtggtactgctgtctgccaggtctgtgctgccttgggcatggaataaacattctcagccctga

SEQ ID NO: 48394 - DNA, 720 bp, Homo Sapiens
  misc_feature (583)..(583): n is a, c, g, or t
  misc_feature (650)..(650): n is a, c, g, or t
  misc_feature (704)..(704): n is a, c, g, or t
ttttttttttttttttttcagggctgagaatgtttattccatgcccaaggcagcacagacctggcagacagcagtaccacagggcaaagagggaaggcagtgtcagatgaacccaggtgggcggccagggccaggccagcaggaggctcaggccaggggcacgaaagggggggtgaggtaggcagaagctggaggcactaagggggtgccctgggcaggaggaacagaaagagggaggcagagagggcagccggctggagagggccgggctacgactgcacgttgagcacgtgggcagagcgctggtggtgccagtcccggaggcgggtgtagcgtgggctctgcagctccaggacatacttttcccttgatttcttcaggtgctcctcatctgggtcttgcatgaactcggtgcctgtgaggtgggcaaggatgcggaaggaacgcgactggcctgtccccggccgcggccgccagtcctctgtgttctccatcagccgctgcttgctggcatctgggaccagcggtcggagcggctgtccattctgctgcggggcgctgtcagcgggcgggggcgccccanagggccgggccgtcttgttgagggagacgctgggtgcacaggtgtaccgcggagggtccgcggcggnggcggaggccttctgcggtttgctctgaaccggctgggccctgctgaggcccangctgaggcgctcccgc

SEQ ID NO: 48395 - DNA, 479 bp, Homo Sapiens
ctaaattctacacatgaaggcaaacgtccgtggttgacagaaattacactggccagaatccccagtccccatgaggcttgtccagacgcagtgaaccagtcgcagctgataacacacagaccattcccgatcccagaggtgcatttcaggattcattctatttcatcagagacggggtcttcctgtgttgcccaggctggtctcgaactcctgggctgaagcaatcttcctgccttggcctcccagagggttggaattgcagatgtgaggtgtgtcctggaaccctggctgcacccacagatacagccactcccgggcccatgtggatgtaaccttcgagtgccggaatgcctcgtctccatggagaccaaactcaagggcctgactggcccagtctaccgagaccatgagacctgctgtgcccctcggccaggccaacccaaattcttttaaataaaaggcacaagccacagccaaaa

SEQ ID NO: 48396 - DNA, 582 bp, Homo Sapiens
ggagacttggacacagttgcagggcttggaaaaagaactgagtaatgccaaagaggaacttgaactcatggctaaaaaagaaagagaaagtcagatggaactttctgctctacagtccatgatggctgtgcaggaagaagagctgcaggtgcaggctgctgatatggagtctctgaccaggaacatacagattaaagaagatctcataaaggacctgcaaatgcaactggttgatcctgaagacataccagctatggaacgcctgacccaggaagtcttacttcttcgggaaaaagttgcttcagtagaatcccagggtcaagaaatttcaggaaaccgaagacaacagttgctgctgatgctagaaggactagtagatgaacggagtcggctcaatgaggccttacaagcagagagacagctctatagcagtctggtgaagttccatgcccatccagagagctctgagagagaccgaactctgcaggtggaactggaaggggctcaggtgttacgcagtcggctagaagaagttcttggaagaagcttggagcgcttaaacaggctggagaccctggccgc

SEQ ID NO: 48397 - DNA, 745 bp, Homo Sapiens
gttaagctaatttagtaatcctagaattgtcctctgagagatttagatggatgggccacttcacagtagcagccaactcacgggagcacctgggcaacgctagtggacttttttgtagtgagtgtgttgatcatagaaaatgtagatataaggaaataaactttgaggatagagaattaacattattttgagatattatatataggttgtgaagagtggtggttgtcacactttatggtctctggaccccttaatgtctgattcatgtagcagaagccagctagattttcatctgtctctattcattttgttgtgatgtcatggatcatgtggcctctggaaaactctactgtatactcgagaatgagaatataacaggcaaaataacattatcatgaaaatagttttgacctcatgaaccccatgaaaggttccccagaccaaaattttagaatcactggtatagggtaacactttattgtgtaaattcagttctctgtaccccacttaaatatgtattattatctcttgaccattattttcccaaaaaatgctgtttgatttcttacttgttctgtacttggtttttcaggtcaaagcaaggaaaattcagccagttgatttgttttagcttactgctggctttgtcccgaagaaactgttcctccattatttgaattactgaagacagcaagatattgtaattatcttaaaataacaacaaagaaacaaataaaagaacaaa

SEQ ID NO: 48398 - DNA, 776 bp, Homo Sapiens
  misc_feature (9)..(9): n is a, c, g, or t
cagaaatcnggtgaacttgagagaattagagacagctgcctggttcagtcatgatgaggtagccacagccctgaagagaaagggcccctatactcagcaacagaatgggactttcccattctggctgccccctaagttagccatctcccaccaactgattaaggagtgggtggaaaaacagacctgttcttccctgcctgcttagcccggatcaagtcacttagatcgctccttggtattcctgagggacaaactagagatcagttgacaaaggagaagtgacaaaagataagctgcagaaggacctcagaagggcagagcaaagggtgagcctacagtaagacacttctatcagcagtgttaatggaagaaattcctaccaatgggcaatcaaaaaagccagtgtgagaagaaaactgatgagctgtcaactgtcaaaaatcagggggaagggggaagcattagtttggatgtaggcccttgttcagtcattttctctaaggccttggaagcaaacatcttctggcatatggcttgttaatgttgtgtttacactaactgccaaaatgtgcctgttgtaagtttggttaaaacttttatcttagtattgaaaatatatagcaagttttaagtcattactgagttacttgttacccttacagaattaagaaaaatagcacagtatgacattttaaaattcatgtacaggtgcattctagttacatgaacatgctagttaaataaaagtcacaaattaagtcaaaaaaaaaaaaaaa

SEQ ID NO: 48399 - DNA, 640 bp, Homo Sapiens
gaaactgagccaaggccacatagctacctacagtgacagaatcaaaattcaaactcaggtttatctagttccaaaacccatgttctttctgccacaccatgttagtagaaatggaaactattggatgaaatgaggaaaaacaggaaaagaattcactttttaaatgaagaaattagtgaaaaaattgacctaatgaaggaaacatttgtgctttcctatatttttaattttaagaataggatttcggaaggcgacagaaaatttagttcttagacatttaaatagaaagttgtgtgcccctatagaaaatatttgagaatttcttatactatcaagaaaaaattctgtgaattaagatgtaatttataaaataacatttcaatgggggtaaacaggccagaagagtgtgccaagttgtttgtgaatcattccaagcacctcagatgaaaactcacttttattaaaaaaaaaaaaagacaagggtttatattcatatacactagtatatatgtacacagcagcatcctgcatgccaaagtagcttcaccgttagtaatccctcactttaatacctcttaggaaccaaagaatgcctctacaagcaaaaagatagttgaaaatagttaagatccaaagtcag

SEQ ID NO: 48400 - DNA, 1062 bp, Homo Sapiens
tgtaggcagcaactcaccctcactcagaggtcttctggttctggaaacaactctagctcagccttctccaccatgagcctcagacttgataccaccccttcctgtaacagtgcgagaccacttcatgccttgcaggtgctgctgcttctgtcattgctgctgactgctctggcttcctccaccaaaggacaaactaagagaaacttggcgaaaggcaaagaggaaagtctagacagtgacttgtatgctgaactccgctgcatgtgtataaagacaacctctggaattcatcccaaaaacatccaaagtttggaagtgatcgggaaaggaacccattgcaaccaagtcgaagtgatagccacactgaaggatgggaggaaaatctgcctggacccagatgctcccagaatcaagaaaattgtacagaaaaaattggcaggtgatgaatctgctgattaatttgttctgtttctgccaaacttctttaactcccaggaagggtagaattttgaaaccttgattttctagagttctcatttattcaggatacctattcttactgtattaaaatttggatatgtgtttcattctgtctcaaaaatcacattttattctgagaaggttggttaaaagatggcagaaagaagatgaaaataaataagcctggtttcaaccctctaattcttgcctaaacattggactgtactttgcatttttttctttaaaaatttctattctaacacaacttggttgatttttcctggtctactttatggttattagacatactcatgggtattattagatttcataatggtcaatgataataggaattacatggagcccaacagagaatatttgctcaatacattttttgttaatatatttaggaacttaatggrgtctctcagtgtcttagtcctaggatgtcttaattaaaatactccctgaaagtttatactgatgtttwttttagccatcaamactaaaataataawtkgtgatatgaawcywawaamcgkggtagckgkttaaryggaaatattgccccwgtggacmaaa

SEQ ID NO: 48401 - DNA, 762 bp, Homo Sapiens
catctgtaagacttactgagttgctgccaaaatggaactgaattcttaaaagcaggaacgtgcctttgtgaaacattagaaaaccaaaataaatgggaaaattcagacttgaagagctgaatcatgtgacaacaaagtactgatcttaattcagaaaggctacttggagaaggtgtatcttaaggggtaaaaaacctgtgggttaccacatattaacagggaataatatcaacagaggcacccataagcaagcaagaaacaactgagacagatgtaccaggtgaaaaaaatcttcagtatggatacacatgggtattctgaaggctacaatgaatggtttagtctttgacataaggaggatgaacatattatttatactgtgtaatctaatctggcttctatggggaaagcaacatgtacataagtgaattttctacatgaagtgggctacttctgattttwatcaaagctataawatagattgtatatttcactagcttcttaaagtaactcttccattttcatttatctctaaaaacagttaacttcctgtgctctaggaaatgcaccaataccaaaggtcaatgtggaaatatgggcatgtttgccctatgctgtgtggtctctagatttctatatttgctttgcttttgtctgctctagtaatctccctccttttgatctgtggcctgggaaaatgtggtttctttgtatttcaaataaaagtaaaatagttttttgagtggttcactcaagaaaaaa

SEQ ID NO: 48402 - DNA, 722 bp, Homo Sapiens
ggttaggggaaagtacctgggggaaaggtagaggaggtaaggggacccttggggatgcccctacgggctaccagtgttgaacgcacaggcatggtcacgtcggggtattgccaagcttttggcgcagctggtcgggtggccaggctgcatgcggcttagcaggagacgtcctgggctgtttgcgcaggacctctggaggccctcgagatcgtcgcaagtggaaaggtgctggagaatctggtaaaagcaccattgtgaagcagatgaggatcctgcatgttaatgggtttaatggagaaatataatatccctagatgatggctacagtttctcatcttcccggctatgtcctatcacaatttgcatgctggaattgctcggtcttaggaacttctaataagaatactattctgttatctgaggggggaggggggatggggcccctgctacctgaccttaaacgatgattgaaaaaacgaaaaatggactgaaatccttaattggcagaaatgtagtatgacaactatccaaaaaggcatctctataagaaatgactaattgacaatctgctgtaccaaaagttggcatttgagcaagatatgacaagtccttagtgagcaacctactgtgtactagatgtcctgctaaacccttgaaccctactaataccttggcctgcacgtctctctcactctgttctgcaagtcaatataagtattaac

SEQ ID NO: 48403 - DNA, 806 bp, Homo Sapiens
ctctttatacagaattttacttggaaaactttgggggctttgaatgcattacataatatttatattgtattgagcttttttattcctcacactatatttacattaataaatgattgagaagtttatagtaaagggaaacttacagaacacttttgtatcatttaaaagatgacctgaccaaaaactttacaggattcataaatcagggatcattttgctattgacttcacagtaatcagtagttttataggtaatattatagttaatttgcagcattttagtacttgtattatttatttttggtcagaaatagtaaattaaaatattttttgatagtttataggtaataatcaacccataacttttaaaagaaacaaaacatttctattattgagttaacatttgattatacaaactaggaaaggcagggaaattccccttctccccagtgattctattaagatgacctttatgttaaactttcaaagtactttatgaatttagttaccagttactatttattaattgacaattttctgaaaaatcccgtttcagcagacttaatgaaggtgaacagcaaccgcttatgtcgctttctactttatttgaatgttccctcaaagtatttctatacttacaaaacgacaacgaagggaccagcagaacacagttgcctctgtttttagaaaacctacctggctcagtacagttggttaaaccaattatggatagtaatggacattttatattaccgtgtctcctacttttcttgcgatggattattctaagatgctcacagtcacaat

SEQ ID NO: 48404 - DNA, 526 bp, Homo Sapiens
aaaaaacaaactttctaaagaatgtgaaatatttatttccaaggcagaaataacctaatgttctacttcctagaaacatcatgttctaacattgtgagtacagaggaaacagtctcttccccaaacctagccactagagctgtggctggaaaactctgaacccttggtataccgcaagtgtttctgtttcttcattttcagtatactaataagcctctgtatacaacattacaggtgaagatctttaagcaagaagttaaagagtgaacatggtggaaaaaatataattattttcatcagacttaaactggaaattgatgatttctgaactgaagccttcacacatgtgagatccatgctgaggagaagcaaaatggcacagggctagttgccaccaaccaatttactgatgaatgaagcccaggggactgccattttataaatgtcagcagttggaaaaatcgtcacgaattgacttagagcaagggtcagcaagctttctgtaaagggccaaacagtaaatatt

SEQ ID NO: 48405 - DNA, 557 bp, Homo Sapiens
  misc_feature (530)..(530): n is a, c, g, or t
tggaaaatttttttgtaccttcatatcacagctgaatagttatcaatgccatttccatttggaagtatctaaataaccacaatgtgatcacagcttctccacgagccttcctgaagtaaagctggtatgcttgctataatacttggaacctgttgctttctcttcctcactctttaaatgtcataaggtcacacagttcttggaatcagaactattcagttatttcttcatgattctgcctggctttctgagtcttctccttcggcatgttatgtaaaagtctgaacaacaatgatgacgcagacgagagcaacatacgtttttattttttgataggtttttatttttttgataccagagggaattaactatgatcacatcgtgctctctctgttcagcatcacacgcccacatactgcagtgtgggagtagattggtacttactgagcacttagaaacatcacgcatcaggaaccgggtcagggtgacagcatcctacggtcatatcatgaaggaagcctcccttacanacctaaaaaaaaaaaaaaaaaacgcgg

SEQ ID NO: 48406 - DNA, 576 bp, Homo Sapiens
tgactcctctccaatcccacaccatcaggaagaaggggcctgtcggggctcacttgaagcctgtcagggatgctttgtatctaacacaacgccaacagaagcacatttgtcttccagaacaccgtgccttagaaatgctttagaatctgaactttttaagacagacttaataatgtggcatattttctagatatcacttttattaggttgaactgaaagggtttttgtaaattttttggccaaaattttttaaaacatacttactttggactaggggtacattcttacaaaataaataaacagtttttaaaattgtttagacacagatatttggaattagctatcttagtgccaactgctttttatttttttacttcatcaaggtgatgtaagtgactcacctttaaagtttttttagtgttattttttatcactactctgggaaatggtttgtcttcaagatgcaatacttttcttagtaaaggaaaaacagcataaaaagatacctggtctgccttgtacaagaaaaggcaatattagaggaagaaaatttaaagaaaagctagaggaaaaaaa

SEQ ID NO: 48407 - DNA, 234 bp, Homo Sapiens
gcgggcgcctactactactatacggctgcgagaagacgacagaagggctacgacgtggtggcggtgtaccccaatgccaaggtggaactcgtctgagctgggaccctgctcccacgcctgcttcttaaggtccctgctcggccggtgtaaatatgtttcaccctgtccctctaataaagctcctctgctccaccccaaaaaaaaaaaaaaaaaaaaaaaaaaaagtcgtatcga

SEQ ID NO: 48408 - DNA, 628 bp, Homo Sapiens
tttggtttggtttgaaatttctttgtttatccagtgaattacaagtagaataaagatctggttctaaattgtcttttggtggtgaagtgccatagaccatttcggaccatttctatgatgtaccagcagcccccacatcacacctcctcttccttggcttgtctcttccccaattcttagagttagcagtgtttcttactgcattcatctcctcagtcataagtgtctgtcaacctccgttgtgaagtcatgagtctcttgagactgaaactccaagaatgtattgtgctcacagtggcgatggtgttcctgtgctggatggtcagtggttgttgacatgtagttagaaaataggtagcaagttccacgcagcctcactctttggaacctagtttctcctatggcctccctttctactgttgttaataacattctattaatgatccatgcctctcttcacaggaggaatattagaatctatggagcagttagtattctttgtcacctaaatttgtctacttctgtacatttccaataaggcaccaccagggcaagggaagattccccacatgtatatccccagctgtttctgtcataaaacttgcatgtgtataaaaaaaaaaaaaaa

SEQ ID NO: 48409 - DNA, 762 bp, Homo Sapiens
atttaagctaaacaattagtaacgatatttttatatcgagcaagaaaaaatattaccgtaatcttcacatttgatttattttaagatgaaaaatatttttgttggaatttaagtttaatggctaaatatgaagactccttgatataaaatattgtgtttaaaatgtcatgcatgttatactgaaatattctggagatgtctgaagcagttctttaagcagcactgtgtattatggaaaaatgtttgtcttttacctagcatatttgtaaatagacctttaataagaagtgtgtgtgtgtgtgtgtgtgtgtgtatatatataccattaaaaggtgggctaatgtggctttccactacagctcttaccagattttttattttcagtgtgatttggctggaatattaataacagttggttgacatgtattcacaattgcatgacttctctttggaggctggtaggttgagtattgttctttttatccatcctttcccctcccctaaatgtcagtctttctgcttttaggattatatttgaattttcaggggtttatacaccaccactggagagtagaaggccactaacttgcaggcagttaacttatatctttacaagctacattctattttaagagcctatttagggtaacatttaaagatttgcttatcactgtattctcatccactgaaatcagtccagctttaccttggagaaaaagcagatgggaaacaggcaaggggaaaagcaaaaaaaaaaaaaaa

SEQ ID NO: 48410 - DNA, 489 bp, Homo Sapiens
ccgctggtcccgtgcagatttgaaaagattcctccagcagacagtggctagccccttgcttcctctgccattcagtctgttttctgaaatactatgctatttcctggttgtggtgacttggcagggcctgacggtttgatcagcttttcatgggctatggccattagtggggttggggtgcaggtgggagtttgttaacacaagagcttgttgttctcggagcttcaggccctggtttggaaatgttaactggccaaccagccacgggagttggaattccctaactattgtcagagagagtgcaaagggatttgtctgattgaacaatctgcatttgaagatgacctggacctgcctgcatcccgcatggcagaggtggacatttggaaggtgcgtttgctcatgtttcctcttctctccccagaacctgctaaggctgcctcagacctgactgcctggttcagcctcttcgctgacctcgacccactc

SEQ ID NO: 48411 - DNA, 1022 bp, Homo Sapiens
  misc_feature (13)..(13): n is a, c, g, or t
  misc_feature (17)..(17): n is a, c, g, or t
  misc_feature (23)..(23): n is a, c, g, or t
ttattcccttttnaatnagacantttttaaaagttgatttataaatacaaaaatacattctccaaagatagtatttccaaactgttatatacccatctactcccaacatggatataagttttttaaaaaaatabttgtatataacatacatatctgccccagtgttacttcacaggcctatkccctacgggaactccactctccyatcyccactttttctcttggttctcccacattcttattctcccacatccctacccacgtttgakctggaaaggatgtccctaccctaggcatgaggtatattttattctgggcaccacacatttgccccatagataacaatacacgtgatgatgtcactagtactacctttctagtatttacatacttaaaagtagtaactagaacagttatcactggaactaagaattttccccacagaggtgaacagaccaagaactaaaatttcaggaaacctgtttaatttcttttgtatctttgaaaagttagttttatatctaagatttcttcacataggttwtaattcttttktatgttcaagcttttatgtaaaaatatatagtgccttcagttttaacatagtttcacatgttctcagaactgctaaattcagtgctaccagtaaggcttaataagtagttcattgaccctgtaagataggagcactcagctctgtcacaatttgttgttaaacacatcactcaatgtaagtataaaaatatttattgataaaaaataaacttataattcagcaacttgaagttccaggagcatttctgttgtwcctatgtcagtaagcscttgawttttcacattaaggagggaagctaagcatgttacttggagtaattttttcccagwyaccatcatgtggwtcstgtgcacaacgttatrtgcgaggamtcttkagcttagtctttgatctgrmtrragkatyyaywgrmtgctgcwtggaaaggcttgygktttcaycammacccyrgtgtgtgwggtctgct

SEQ ID NO: 48412 - DNA, 581 bp, Homo Sapiens
  misc_feature (16)..(17): n is a, c, g, or t
caataccaattacagnnaagcaatgagaaatgacatcatagcaaggatttgtggagaagatggacaggtggatcccaactgtttcgttttggcacagtccatagtctttagtgcaatggagcaagagcactttagtgagtttctgcgaagtcaccatttctgtaaataccagattgaagtgctgaccagtggaactgtttacctggctgacattctcttctgtgagtcagccctcttttatttctctgagtacatggaaaaagaggatgcagtgaatatcttacaattctggttggcagcagataacttccagtctcagcttgctgccaaaaagggccaatatgatggacaggaggcacagaatgatgccatgattttatatgacaagtacttctccctccaagccacacatcctcttggatttgatgatgttgtacgattagaaattgaatccaatatctgcagggaaggtgggccactccccaactgtttcacaactccattacgtcaggcctggacaaccatggagaaggtctttttgcctggctttttgtccagcaatctttattataaatatttga

SEQ ID NO: 48413 - DNA, 582 bp, Homo Sapiens
  misc_feature (575)..(575): n is a, c, g, or t
ccacacggtgcaaaaaggctcttggcagccggagcccagaagtgccattctgtgatcacacaggactttctgacttgctggctgagcatccgacaagcagagctgctgctccctggggctgagtttcatcactatgtgggaggacctacggaaacccatgttgtaaggtccccacatccctaccagcttccacaggccttggccccccatgtggactttgtggggggactgcaccgttttcccccaacatcatccctgaggcaacgtcctgagccgcaggtgacagggactgtaggcctgcatctgggggtaaccccctctgtgatccgtaagcgatacaacttgacctcacaagacgtgggctctggcaccagcaataacagccaagcctgtgcccagttcctggagcagtatttccatgactcagacctggctcagttcatgcgcctcttcggtggcaactttgcacatcaggcatcagtagcccgtgtggttggacaacagggccggggccgggccgggattgaggccagtctagatgtgcagtacctgatgagtgctggtgccaacatctncacctgg

SEQ ID NO: 48414 - DNA, 768 bp, Homo Sapiens
gcagcaggcatgtgcattatgggtgccaggtggccagtgagggcccgaggaccacgcagcagagtcccccacgggcctgagcctgaragctcagaggattcctgccaggcctcagaactgtgtgtgcgggacagggtggctggcacgagatgtgtgggactgggacgcttcctttggggaccagaggaacattaggggccggtcagacacgtagggggcagtgaggaaacggggtaaagtggaccatgcaggctgcagagggtgggccttgggctggccggggttgctgggtggccccttccccatgggcctccacaagcactcaggccactggcacgttgggccaggcagaaggtccacatggcagggctgcctggaacaccgctgccactgtggctccaggaggcccttgggagcatgaggagagctggactcgctcatctgttcttgcaccaccatccagaatgccccctttgcaaggcctgctgcagtccccagtctgaccagcaagtcccggggtcacccttgctgaaccttgtgctccaggggtcctcctcctctaggaccagcttgccacggtttctcagagcccaggtgccctctgacctgccatgcggaggtgggatttgatactgtacattgtcttgatgcctgtttttttatgttttcattaagggtttttagtttttggttgggttgacactaacttttcttaagatgctgtgagaatcatttcatccaaatgccaaataaacttgtgttccggaa

SEQ ID NO: 48415 - DNA, 465 bp, Homo Sapiens
  misc_feature (330)..(330): n is a, c, g, or t
  misc_feature (335)..(355): n is a, c, g, or t
  misc_feature (357)..(360): n is a, c, g, or t
  misc_feature (362)..(381): n is a, c, g, or t
  misc_feature (383)..(386): n is a, c, g, or t
  misc_feature (388)..(390): n is a, c, g, or t
  misc_feature (392)..(392): n is a, c, g, or t
  misc_feature (394)..(394): n is a, c, g, or t
  misc_feature (396)..(400): n is a, c, g, or t
  misc_feature (402)..(406): n is a, c, g, or t
  misc_feature (408)..(408): n is a, c, g, or t
  misc_feature (410)..(410): n is a, c, g, or t
  misc_feature (413)..(413): n is a, c, g, or t
  misc_feature (431)..(431): n is a, c, g, or t
  misc_feature (450)..(451): n is a, c, g, or t
  misc_feature (455)..(455): n is a, c, g, or t
tcacggactcccccaactggaaggtccttctctggcctcaattcccgtctaaggccacgccttccacctacagtggagtcttccgcacccagcgcgtcgacctttaccagcaggcctccccaccagatgccctgcgctggatacctaagccttgggagcggacagggccgccacctcgagaagggccctcccgacgggcagaggagcctgggtcccgaggggacaaggagcctgggttgcccccaccccgctgagggagttcctcttgccccctacccccggggcttgtatatagattataaatatataagggggaaaggggtgggcggngaggnnnnnnnnnnnnnnnnnnnnngnnnngnnnnnnnnnnnnnnnnnnnngnnnngnnngntnannnnngnnnnngngnggngggggggggtgggggggnggggggggggggggggggnngggngttcgggttg

SEQ ID NO: 48416 - DNA, 823 bp, Homo Sapiens
  misc_feature (563)..(563): n is a, c, g, or t
  misc_feature (578)..(578): n is a, c, g, or t
  misc_feature (710)..(710): n is a, c, g, or t
  misc_feature (746)..(746): n is a, c, g, or t
cttcgccagccgaggaaccggacgcggacaccgccgccccgcgagcctccagcccctcgcctgttgccgcgcgagtcccgggcccggagcgctaggagcgcgcggaaggagccatggctctggacgggataaggatgccagatggctgctacgcggacgggacgtgggaactgagtgtccatgtgacggacctgaaccgcgatgtcaccctgagagtgaccggcgaggtgcacattggaggcgtgatgcttaagctggtggagaaactcgatgtaaaaaaagattggtctgaccatgctctctggtgggaaaagaagagaacttggcttctgaagacacattggaccttagataagtatggtattcaggcagatgctaagcttcagttcacccctcagcacaaactgctccgcctgcagcttcccaacatgaagtatgtgaaggtgaaagtgaatttctctgatagagtcttcaaagctgtttctgacatctgtaagacttttaatatcagacaccccgaagaactttctctcttaaagaaacccagagatccaacaaagaanaaaaagaagaagctngatgaccagtctgaagatgaggcacttgaattagaggggcctcttatcactcctggatcaggaagtatatattcaagcccaggactgtatagtaaaacaatgacccccacttatgatgctcatgatggaagncccttgtcaccaacttctgcttggtttggtgacagngctttgtcagaagcaatcctggatacttgctgtcatacaccaatcacgtaccaaaatctggcaaaatgtcaagctca

SEQ ID NO: 48417 - DNA, 737 bp, Homo Sapiens
  misc_feature (164)..(164): n is a, c, g, or t
  misc_feature (169)..(169): n is a, c, g, or t
agcggatctctcaggcttagagctttatactcactcctttgacagccacgcttctatttctttttaaatctcaaaggtgtgggattacaagtcctgtcttagtaataaacttttgcagataaaccctgagatggtataactgcatcctttcttggcaccttaanatcanattaactaaatacttagtgaggagagaaaaggaaaacacagtttttttgcaacgtatctgactgggtgagaagccactgctgcagcataaagaaccgacgggaatctgggctttcccactctggaatgaaggggggaattacgggttggtggtcggcttcatgttaggaggacacccctccatctgttcacagctcagcctgtttccaatttaaagcccagatttcaatacaaacctcaatttcttttccccattttaaatgcaaagcaagacttgtgaatcatagtgtctctgctcctgggattcagaccaaatttccccccaaaattctcaggctatttgtttgaatacctgcttacagtggtacacaatgggcagctttgagaagaaaaattgataatcttcacggaagagtaatttgaatgaaattacacttgacagcctgtctccaagcaaacaagaggaacgagggagcctgagctaagctctgaggacttgcccaagccactgctgttggagcttcccaggacaaacaccgaaaaaaaaaaattctccccaggggaaacca

SEQ ID NO: 48418 - DNA, 696 bp, Homo Sapiens
gggagtgggagcctcctccccacagcctgagtcctagacagcccacctctgcatcctgcccctcttgtctgagccccagactggagggcaggggcagggctggagtgtgagggatgggggagatgctacctcccttctagggccaggggagggagggtctgggtccaggccctgctgctcacacctctctcctctggtttctctcttagagcccccagaactgcagcatcatgtaatctgggacctgccaggcaggggtgggggtggaggctttctgcgtcctactcaccttatgcccaccccctgccctgcacgtcatgggagggggcttgaagccaaagaaaaataacccttaggcttcattcttccgcattgttatttctaagagaaaggattttctaccgcgggtttatactggatgaaaaactcatgccaacaccaaaaagcaaactccagggggttccccgtacccaatagggcccatggtgagtcggcccacaattaacttgcccttctattacaaccgtctagtcttgcgaaaacccctgcggttacccaccctaaatggccttgcagaacttcccccttttgcccgattgccgtaacatccaaacaggcccctaccgatctgcccttccaacaaatgggcaacccttaatgggcgaatggcaaattgaaagcgggaaaattttggta

SEQ ID NO: 48419 - DNA, 578 bp, Homo Sapiens
atttttttttttttttattttgtataatgactgtcttttagatctgaataagtcactttaaaaccttggcctatgaactttgccttatcaatcatgaatctagatgaatgctatctagttcttggttcagttttacctatttttatttttggttcactgcttgcttgagcatagctgggatttgtagcccattttctaggcttattgcaatctcactgtggtattttatagaagctattacaactgataggctagcttcatggtattgatgatacatggcttaaccatactaaaagctgctttccctctctaaattgtaaaaaggtgatgaagtttcacttgatggagacatactatatatgtgtgtttatcatggaactagtgcattaggccataagctgtttttctggtctatgttttttgtatttaaaactttactgaagacaatggactccttcgggttttctttctttcaaccctgaattgtccttgtttgaatttttaagtactgtaattttttttttcaataaaatctctgacttgggcaagaaaaaaaaaaaaaaaaaaatggtggagcg

SEQ ID NO: 48420 - DNA, 279 bp, Homo Sapiens
gggccatttctaaggatttatgagcagcttccagcaagtacagaaaaagagagaagaagagaagagaaaatcagaatataagtcataccggctgcgagcccagctatataaaaagagagtgaccaatcaacttctggggagaaaagttccctgggactgacacaagtttattttcctcagagccttggaattctattttatgaacctagagaagcagaatccttacttttgtgagtctggttgaataaagcttattctttgtccatgtgaaaaaaaaaa

SEQ ID NO: 48421 - DNA, 481 bp, Homo Sapiens
gcacgagtccaaacggatttatgagcagcttccagaagtacagaaaaagagagaagaagagaagagaaaatcagaatataagtcataccggctgcgagcccagctatataaaaagagagtgaccaatcaacttctggggagaaaagttccctgggactgacacaagtttattttcctcagagccttggaattctattttatgaacctagagaagcagaatccttacttttgtgagtctggttgaataaagcttattctttgtccatgtgtattttagaaatagtaacttctaaagagtctggaacaaagtggtgattaaaattcctaatggtttgggagcaatactttctgcatagtggccttgtccaatggcctgtgtgttacaatgatatgatcatttctcaagaataagtccctttttgtatgtgtttttatacttttagaaaataaaaactttagattaaaaaaaaaaaaaaaaaaa

SEQ ID NO: 48422 - DNA, 962 bp, Homo Sapiens
ggtggcgaattcggacgaggaagcttccagatgccgcccaaaggaaaaagtggttctggaaaagcggggaaagggggagcagcctctgggagtgacagtgctgacaagaaggctcaaggtcccaaaggtggtggcaatgcagtaaaggtcagacacattctatgtgaaaaacatggcaaaatcatggaagccatggaaaagttaaagtctgggatgagattcaatgaagtggccgcacagtatagtgaagataaagccaggcaaggggtatgttgctcttattatttataattttctctcaaggtaagaaagcaaagtaaaaatgacaaataataaaataagataaaaattctccatcctccacagaagaaacacagaagtagggatcattcctttgttcaaccattggttgtagcgatattttggtttaaagatctcaaaagcagaaatgtccaacttgtaaatagtagaataagggtcatctatgtcaaaacctatgcatgaccaaacttgcacggctaacttcaaagtccagcagtgttgagagtacttatgtgttcagtctagttagacttcttctacctatttgtccttattgagcctattcctgtattgctcttaggaatatacctcgtaaccttagcaaaatgttgggaaattctctcaagctacagtagaactgttccctcttctgggccacttgatatcacttatcttttgggttttttcagggtgactttggggtggatgaccaaaggggtccatggtggggaccactttccaagaaccagcattttgcctttgcctggtaagtggggatggaataaaccctgtggtttaacagaacccccccggggttaaaaaccaaaatttctggaatatcccttattaattaacggggccccaaaagggaagaaaaaattatgaaacttctcttttggaaacagaacctgtgaaattat

SEQ ID NO: 48423 - DNA, 526 bp, Homo Sapiens
cgtttttaaccaaaactaatcttctgtacaaagttgtgtgcatattgagatgattagttaaggcagtgtagttttttaaattttttctgtataaatttctttccttcttccccacctcaggcacctaccctactcctttcaaagcactttatatccctcttgaaatacaaagaaattgaaaaaaaaaaaaaaaagtaactgtctttaaaggaatttgtcttctattaggagacacagacttttattttgctttattctattctctttgtacttggagagcgtaatcaacttgtctcataatgggctagtgatgaaacaagggtgatagttggaaacagtcattacaacatggttatttttgttatatagaagactatcatgtaaataagtgcaatcgtgttcttacgtactggctaaaaaaaaaatattgcaactataaggatttttaaatgagggttgtgaattccaggaaatttcactgcaaaatttcttttggttttgttttttaataaaatggaaccagaaa

SEQ ID NO: 48424 - DNA, 774 bp, Homo Sapiens
cttattataggttggcaaccacggtgtaggaaaaaacaagattgttgacagattccttcacctgctcaacagaccccgagaatatattcagctacacagggataccacagtacaaactcttacgcttcagccttcggttaaagacggacttattgtatatgaagactcacctttggttaaagcagtaaagttgggtcatattctggtagtagatgaggctgacaaagctccaacaaatgtcacgtgtattttaaaaactctagtagaaaatggagaaatgattctagcagatggaagacgcattgttgcaaattctgctaatgtgaatggaagagaaaatgttgtagtgattcatcctgattttaggatgattgttctggcaaatagacctggatttcctttcctaggcaatgatttcttcggtaccttaggtgatatttttagctgccatgcagttgataaccccaaaccccactcggagctcgagatgctcagacagtatggaccaaatgtgcctgagcccatccttcagaagcttgtggctgccttcggagagctgaggagtttggctgaccaagggattattaactatccttattctaccagagaagttgtcaacatagtcaaacatttaccagaaatttccgactgaaggtctctccagtgtagttcgaacatgtgtttgactttgattcctacaaccaatgacatgcagggagatatttgcttaacactttacacaaatacgggatacctatcggagcaaagcctaca

SEQ ID NO: 48425 - DNA, 675 bp, Homo Sapiens
cgacgttctacttggcgggcaagctgcactgcttcaccgagagtgggcggggaaagagctggcggctctgtgctgccatcctgcccttgtactgcgccatgatgattgccctgtcccgcatgtgcgactacaagcatcactggcaagattcctttgtgggtggagtcatcggcctcatttttgcatacatttgctacagacagcactatcctcctctggccaacacagcttgccataaaccctacgttagtctgcgagtcccagcctcactgaagaaagaggagaggcccacagctgacagcgcacccagcttgcctctggaggggatcaccgaaggcccggtatgaccagtgtcctgggaggatggacactaagccctgggcacatctgccaccctgacatcataacacaatagaaatggttttctgtagtgtatttttcatcagttgtttctcaaagtcatcgtacttctgcttctgtttcactgatggtgttcctgctactttaaatgtctacttccaacatccttgaatttgcaagtgaaggacaacaatctctgagagacgtgtggaagaggctgtgaaggtggggtttggggagcttggccgattcgtctatctgaaatgtttgctgtaacagccaccttcctatgtttttcatggttgtaaacataat

SEQ ID NO: 48426 - DNA, 482 bp, Homo Sapiens
gctttgagaagctgcagaagcggctctgcctttgaccccgaatgggcatctttactcgggtccatcatccccacaaagacaggaaatctgatgccaaaaaaaaaagtcattccaggtgtcagtaaccaggcgctgcctccagcgccgccccgcccgccgccccgcccgccgcctgcgccaatccccgacgggcccgtcttccagccccgaagcggtcacctcctgacctctagtggcgagcgcggggaactgcgccccggcccgtccgcccgccgagcccgggccgtgcatgccgagcccgttgttccttcgcaaaccgagtgaacctcccgatgcatggactctggctgtcgtcgacgcagactctcgtgcactgcttaaccccgttttgctgccatgtgacggctgcagacactgtcctcaaactgcagtcccacagacaagttttgtattttggtctgacctacccgaaggtgtccttt

SEQ ID NO: 48427 - DNA, 981 bp, Homo Sapiens
ggatagagaatacggtcattgctgtctccaaccttcaccagcggaaaactcaaggagaaaagacatcacaaaattcattacaaaatgtcacttactgctccatgctggagaaagccatatccttctgggacttgagtctgcacatttaactacagcatctttggggcctacagcatggatgtgattactggcacatcatttggagtgaacatcgactctctcaacaatccacaagacccctttgtggagagcactaagaagttcctaaaatttggtttcttagatccattatttctctcaataatactctttccattccttaccccagtttttgaagcattaaatgtctctctgtttccaaaagataccataaattttttaagtaaatctgtaaacagaatgaagaaaagtcgcctcaacgacaaacaaaagcaccgactagatttccttcagctgatgattgactcccagaattcgaaagaaactgagtcccacaaagctctgtctgatctggagctcgcagcccagtcaataatcttcatttttgctggctatgaaaccaccagcagtgttctttccttcactttatatgaactggccactcaccctgatgtccagcagaaactgcaaaaggagattgatgcagtattgcccaataaggcaccamctacctatgatgccgtrgtacagatggagtaccttgacatggtggtgaatraaacactcagattattcccagtwgctattagacttgagaggacttgcaagaaagatgttgaaatcaatggggkattcattcccaaagggtcaatggtggtgattcmacttatgctcttcaccatgacccaaagtactggacagagcctgargagttccgccctgaaagkttcagttaggagaaggacagccttgttcttacatatacacaccctttggactggracagaaactgcttkgcatargktgsyctmtgaaatgaaa

SEQ ID NO: 48428 - DNA, 754 bp, Homo Sapiens
gtccggaattccgggatcggacacgtggagggacccggcccgcgccttctgcccctgctgccggccgcgccatgcggtgagcgccccaggccgccagagcccacccgacccggcccgacgcctggacctgccgcccagacccgccaccgcacccggaccccgacgctccgaacccgggcgcagccgcagctcaagatggcccgaggcagcgccctcctgctcgcctccctcctcctcgccgcggccctttctgcctctgcggggctctggtcgccggccaaggaaaaacgaggctggaccctgaacagcgcgggctacctgctgggcccacatgccgttggcaaccacaggtcattcagcgacaagaatggcctcaccagcaagcgggagctgcggcccgaagatgacatgaaaccaggaagctttgacaggtccatacctgaaaacaatatcatgcgcacaatcattgagtttctgtctttcttgcatctcaaagaggccggtgccctcgaccgcctcctggatctccccgccgcagcctcctcagaagacatcgagcggtcctgagagcctcctgggcacgtttgtctgtgtgctgtaacctgaagtcaaaccttaagataatggataatcttcggccaatttatgcagagtcagccattcctgttctctttgccttgatgttgtgttgttatcatttaagatttttttttttttggtaattattttgagtggcaaaataaagaatagcaat

SEQ ID NO: 48429 - DNA, 477 bp, Homo Sapiens
cctgtcttcctcccttcccctcctttccctaacccccttccctccccctttctccttctctctcacagtgtaggcaccacttctcttacaatttaggctttctctctgccttgggctgagtgaggaagaggagtgctgttcctgccttcctagcccagctgggtctgaccagaggctactgtgtacccatttaccatgcgtgattgttaactcagagtggggtgtagccaggtattgactgaatgtatgttcttgctgacctgtgtttttttctgtagggaccaaagcagtatccttacaataatctgtacctggaacgaggcggtgatccctccaaagaaccagagcgggtggttcactatgagatctgaggaggcttcgtgggcttttgggtcctctaactaggactccctcattcctagaaatttaaccttaatgaaatccctaataaaactcagtgctgtgttaaaaaaaaaa

SEQ ID NO: 48430 - DNA, 500 bp, Homo Sapiens
ccccccttttctccatttgagaggagagtgcttggggcttgaaccccttaccccactgctgctgactgggcagggccctggacccctttatttgcacgtcaggggagccggctccccccttgaatgtaccagaccctggggggggtcactgggccctagatttttggggggtcaccagccactccaggggcagggaccatttcttcattttctgaaagcactttaatgattccccttcccccaaactccagggaatggaggggggaccccgccagccaaaacattccccccattcccgacccccctctcctcttctagcccatgcccttccccggtggagggagggagcagggagccctcactctccacgccccttgcttgcatctgtatatagtgtgagcagcaagtaacccttctcctccctcccccctcccccctcctcaatgtagtggccttggatatcctgtttgttaataaagacaattcaaccagctcccacc

SEQ ID NO: 48431 - DNA, 1158 bp, Homo Sapiens
tcgccctgttgcccttcctcatacccccacgctgagcccctcctcccactcccccccacccccctctcctttccccccccaaaacccccaaacctccgatggcaccggtccggaattatccggatgagccgtgagccccaggctaattcccagctggacttgagtattgacagcctggatctgagctgcgaggaggggaccccactcagtatcaccaggtcaggaggcagccttcctccctatgtctgtttatggagtgcctgctgtttatcaggctgtatcctagtgagataaataagatgtgatctaaatttattcttagagaagaataacgaaaaacgggtattataccagatatctatttagggcacagttggaataaaaagcaagtggtcaagaaaggcttcgtggaagctatcgctcctgctgagtcttgaaagcatccataggtgtgtgtgccaggttgacgagaagagcagtgtgaacagaggctgtgaaagagcctgactaagctgagatgtgaggccaggaaggcccattggagaccgactattaagacttgatcctaaaggcattgaggaaaccttggtggctgtaattgaaaggtttaggagaaaaaaaaaggaaccttggaagaatttgaaactgaagagtacatggttaatttgcatcttaaaaagattattctaatagctagtatagaagttaagactggaaaaatgtttttattaaacacttacatttacttattttgtgctagacataaagcactcatgacaattatacctgcatttgtcccccaacaacccctctgagggtaggtttattctggcctcccttaaaccgatggaatctgggggccataagagggggccagtcactttgccccaaaggtttccccagatgggttaaagcctggggggtttggacccttggggccagccctggcccctggaagttccttgggccttggccacccacttcaatccttcccttctgggccaggggccccatggatggaagtccctagggtgaaaaaggaagaattaaaacccccaaacccaggggaaaaaggaaccttggaacccttggcaaccggggggccggtgggttttaagggaggcttggtttccagggaaaacctttgggggggaaatg

SEQ ID NO: 48432 - DNA, 587 bp, Homo Sapiens
agagagagcaaactaagcaggtggaagaactgagtaagaaactggctgactctgaccaagccagcaaggtgcagcagcagaagctgaaggctgtccaggctcagggaggcgagagccagcaggaggcccagcgcctccaggcccagctgaatgaactgcaagcccagttgagccagaaggagcaggcagctgagcactataagctgcagatggagaaagccaaaacacattatgatgccaagaagcagcagaaccaagagctgcaggagcagctgcggagcctggagcagctgcagaaggaaaacaaagagctgcgagctgaagctgaacggctgggccatgagctacagcaggctgggctgaagaccaaggaggctgaacagacctgccgccaccttactgcccaggtgcgcagcctggaggcacaggttgcccatgcagaccagcagcttcgagacctgggcaaattccaggtggcaactgatgctttaaagagccgtgagccccaggctaagccccagctggacttgagtattgacagcctggatctgagctgcgaggaggggaccccactcagtatcaccagc

SEQ ID NO: 48433 - DNA, 502 bp, Homo Sapiens
ggcaggccgcatatggcgccagcgcccccagtgtgacctcggctgccctccggtggatgtaccaccactcacagctgcagggtgcccacggggacgcggtcatcctgggcatgtccagcctggagcagctggagcagaacttggcagcaacagaggaagggcccctggagccggctgtcgtggatgcctttaatcaagcctggcatttggttgctcacgaatgtcccaactacttccgctaggcccatcatggctcaggctgcccaaggcttttctgtcacctcttttgttctctcacactgaccagtcttggccttaagctgacttagaagggtttttctgaattgtctagatccatgcattatttttctagcttcctgccttgctccctattcactttacactgtgaaaggtggggggtgagtcccacttgagcgcttcctgttgaataaagcaggcacttgacctggctgtagcctaggtcttgagtgaaccccaaaaa

SEQ ID NO: 48434 - DNA, 522 bp, Homo Sapiens
ggtatttaaagcatgtgatgaagatcacaaaggatatctcagcagagaggactttaaaactgctgttgtaatgctgtttgggtacaagccctccaagatagaagtggattctgtgatgtcttcaataaatccaaatacttctggtatattactcgaggggtttttaaatattgtcaggaaaaagaaggaagctcaacgatatcggaacgaagtaagacacatcttcacagcctttgacacctactatcgtggatttttaactttggaagatttcaaaaaagcatttaggcaggtggctcccaaattaccggaaaggactgttcttgaggtattcagggaagtagatcgagattcagatggtcacgtcagctttagagactttgaatatgccctgaactatggacagaaggaagcctaactattgtgaactacttttggtaactctggggagatcaatagattgtaatgtcagcagactctactctactaatgatgtcatgctacagacttgtgattaaacat

SEQ ID NO: 48435 - DNA, 490 bp, Homo Sapiens
aggagattatgtacaacgagaacacgcggcgctcccagctgctcatgctgtttgacaagttccgcagcgtgctggtggtgaccacccacgaggaccctgtcattgccgtcttccaggctctgctcccctgagcccaggcggagggcggaaggctgctggggtgcgcaggtttggaaaggccccttggattcctggctggggacaatgatgacctggaccctggccagaagagccctggccctccagcaaggcagcacctgctctgatgcacctgtgcacccctggccctcccagccacctgggagcccgaagcttagcctgtaggtggccaagccagtccctactcttgggctgcggccacgtgaggctccgcatcagcagccaggggcgagcactagtggacaaagccagcaaatgcggcgttcctgtgagcagataccctcaaccagccagctgtcaaaagtatttcaagataaaatccaggccaagc

SEQ ID NO: 48436 - DNA, 938 bp, Homo Sapiens
tcttgttttcagaagagaaggtggctacagccaggcataacatatccactgtgtgcatagagggtctcttcacgttgatgcttggcattccatcagctttctctaagtctttgctcaagttcaaccttaaaatgatgttagacaacaggtcccagtcagttccctctattttcacccattttgctcacaagccatattggcccgattagtggtactgtctgactcacgtgtgtgatccaaataaaggtagctgctgaccactgcctggtttgttttgtggactaggggatagagaatccagggttctctcatgaggagttaaacatatttcaagagcaacaggaaaaaaggtacatcaagccatttgaaaacaaaaatttattgcttctccttccaaagctttgtgaatttacaaaaaaaaggatgaaagtttacaaactgcttagttccaactaagcataagaggtgagaacgtacactgcagggccaccagcagcagctgtgcactgatgttaaaactggctcccccagacttgtagtgctgtcttcagggggctgcattccttacacgccacctcttgtgacataggtcattggtcaagccgctggaatgctacagaggtttttttggttttgagaggctttttttttgttttgccttcctactataaaagcgaaattttcagttcatttctgaaaaataaattggtcaataaaaaaaaccaaaaaaaaaaaaaaaaaaaaaactaattaccaggcaaaaaacagctcttttatcttcctgccaagaaagaatgggggattccattccttgagggattatgccaaattaacaagaatatctcgggggaaacacaggataaataaggggagtatggcgggttaaatgaaaggttgtgggccaagggaataaaagaaaattacctttcaaccggtag

SEQ ID NO: 48437 - DNA, 499 bp, Homo Sapiens
ctctcggtgactactatcgctgtcatgtctggtcgtggcaagcaaggaggcaaggccgcgccaaggcaagtcgcgctcgtccggctggccttcattccggagcgagtgcatcgttgctgcgaaaggcaactacgcgggcagtgggggccggcgcccgtctacatggctgcggtcctcgagtatctgaccgccgagatcctggagctggcgggcaacgcggctcgggacaacaagaagacgcgcatcatccctcgtcacctccagctggccatccgcaacgacgaggaactgaacaagctgctgggcaaagtcaccatcgcccaggggcgcgtcttgcctaacatccaggccgtactgctccctaagaagacggagagtcaccacaaggcaaagggcaagtgaggctgacgtccggcccaagtggcgcagccggcccgcgtctcgaaggggcacctgtgaactcaaaaggctcttttcagagccacccacgttttcaaat

SEQ ID NO: 48438 - DNA, 568 bp, Homo Sapiens
ctggctaacacagtgaaaccccgtctctactaaaaatgcaaaaaaaaattagctgggcgtggtcgggtatctgtagtcccagctactcaggaggctgaggcaggagaatggcatgaacccgggaggaggaactaggagtgagccgagatcgcgccactgcactccagcctgggtgacagagcgagacgctgtctcaaaaaaaaaaaaactggtagttttatattcagtacctcaggcccgtatgattatctgctgatggccccacttagatgtacatagccacttcaaaatgggccctctccccaaatctaagaagcttgttttcagtaattgatcacatttagttcttttaagtcaagaacctgagtgattctgtacacttctttttacatctaatgaacttaagttctgttgatttctaccatttaagtatttttcccccttagtccttaacgactaggtttcctgcctccagaataagctgaagtcctccaagatgtactgtggttttctctaagaaacttaacacatttttctttccccagatatcccagaagaaactgaagaa

SEQ ID NO: 48439 - DNA, 986 bp, Homo Sapiens
gatgtgaatgctttcaagcaaagaaagacggcggctgagctgctccagtcccagggctcccaggctggaggctcacagactctgaagagagacaaagagaagaaaaataatccatggctgtgtactgaatagtattccccgctacagctggactggactccatttagccttttaagccgaggttcctattttaactgacagctttcctttggggtgccaggcagcgaggccccccacccctatcctgccatgtacttcaagctcacttcttctttttgagttccgcaacttgctcctgcctcccagccccactggcactgaccatgaccacctacttctattttttttttagagtttctttttttgatcacttactttcaaagcacacagtcaaacaaggttatgccaaatttccaggcctttttgaagtattgagaaggggaaggggatttctcacttcaattatagatcataataggaagcaaaaagaaaaaaatgaaaagcaaacatatgcacgcacttttcttgttgacaaagcaagaatgtaggtttgctgtgtaggtttggtgctctattgattggtgagtgaccagagcaagtatgaaggtgatgctgccaaagcacaagccagtttcttgggaaaattcaagttacagtggagtatttttttgaagaccatatgcttggaggtagaaacaaaccaacgaccaaaaaaaaaaaaaaaaaaaaahyccccccsskkkktkkkbbbkkkkkkkkkgkgkrakkktkttttaggsctgtmaggtcyccttgggaaaggsttcawatttgcaactttgatgattcwatgtcmacttcagagctgctttcccaraaattcacgcttaaamaacmaaccggtaacmacacttcccmcaccgcggctggtaattatttsmttacaaccggagcgcctcattkcattktktmagattamtagttargstgrgagyctgaaaatcaaa

SEQ ID NO: 48440 - DNA, 578 bp, Homo Sapiens
taccgaggtggaagagtgcggctgcatgggccggcgctgccctgcgccgggcgacacccagcactcggaggaggcggaacccgagcccagccaggaggcagagagtgggagctgggagagaggcgtcccagtgtcccccatgcactgaccagcactgccgccctcctgacctccaaggagaacctcccatatgtcctctgagctcggcttccaaggccagtggaacttgtgcccctgtccaggcggctgcagctttgaacacactgtccacgcccgctttcttgtggagggtgtgggctatgggtcacctgctgcctggaggaggggcccttacccaccccgcctgcagccacctctcaggaccagccccggggctggccgagctcctctggccatgcatccagcctgctgttctggggacgtgagcatcacctgagggtctcaggaatgacgcttggacatggtgatcagctgcctggtggctgcaggaggaagaacctcactcctacctcagccctcagcctgcgctcccctcctcagtacacggccaatctgttgcataaatacacttgagcatt

SEQ ID NO: 48441 - DNA, 290 bp, Homo Sapiens
ttttttttttttttttaacgagggaaagagaaacctgtatacctagggtcattatttgaccccatagtataaccagattcatggtctaacaagctctcagtgtggcttttctctgaatgcttgaatttcacatgccttgcatttcacagttgtactccatggtcaaccggtgctttttttcacatcgtggtacttgtcaaaacattttgttattttccttggtaaaatatataaaaaaggttttctaatttcaaaaaaaaaaaaaaaaaagcctacagccgcctcgtgcc

SEQ ID NO: 48442 - DNA, 576 bp, Homo Sapiens
  misc_feature (515)..(515): n is a, c, g, or t
  misc_feature (553)..(553): n is a, c, g, or t
atttggtgagaaacccaactcagtaacctaatacctgcctttgtgtgtgtgtacaaaaataaatgatgcaaaattgtaagtttcaaagacttgaataactttattggctaatattaatttagcaatgttaaccatcagattaattttaggcttggggcagttttagtgattgggggagaacaagagatggacttttgagttttaggtatctgtatgtatgtactttcttgacctctgttatatttctccagataagtactgtttaaataacatataaagatgtcagatgagcaatagatagataagaatggtgcaaaaaaaaatcaaaatatgaagctactgagagcaatttctgagtctcagcatactgagttttggccccaaagtgcctggggaaaatggacatatcatctaaaaagctgtaaataccagccaacaacaggaagtcttagactcctgtcccacacttctgagctgcagggcgtgggggaagccccatgcctttatctcactgnctctatctctagcaaggaaacctgtttcctgactctgnaaaatttcgctttcccccttttt

SEQ ID NO: 48443 - DNA, 703 bp, Homo Sapiens
  misc_feature (671)..(671): n is a, c, g, or t
  misc_feature (700)..(700): n is a, c, g, or t
ccttggaccaattggggccaatggcttggccaatcctcgtgatttcttgatacccattgcctggtatgaggatcgccaagtaccaggtggttacacggtcattaataaataccagggcaagctgtttgctgccaaacaggatgtctccccgttcaatgttgtggcctggcacgggaattatacaccctacaagtacaacctgaagaatttcatggttatcaactcagtggcctttgaccatgcagacccatccattttcacagtattgactgctaagtctgtccgccctggagtggccattgctgattttgtcatcttcccacctcgatggggggttgctgataagaccttcaggcctccttattaccataggaactgcatgagtgagttcatgggactcatccgaggtcactatgaggcaaagcaaggtgggttcctgccagggggagggagtctacacagcacaatgaccccccatggacctgatgctgactgctttgagaaggccagcaaggtcaagctggcacctgagaggattgccgatggcaccatggcatttatgtttgaatcatctttaagtctggcggtcacaaagtggggactcaaggcctccaggtgtttggatgagaactaccacaagtgctgggagccactcaagagccacttcactnccaacttcaggaacccagcagaacctaantga

SEQ ID NO: 48444 - DNA, 736 bp, Homo Sapiens
ggggctgaagggagaggcgcaggagccctggggagagtggtccctgcccttccgcgcctcgagccatcgctaccgcccttcggaaccagtgcagcggccgatcagtaaacacagagactggggatcgatcatggggctttgtaagtgccccaagagaaaggtgaccaacctgttctgcttcgaacatcgggtcaacgtctgcgagcactgcctggtagccaatcacgccaagtgcatcgtccagtcctacctgcaatggctccaagatagcgactacaaccccaattgccgcctgtgcaacatacccctggccagccgagagacgacccgccttgtctgctatggtgaggccttggcacctcggggggatcaggccagcctcaggggccagcttggtgactggtttccaggccctcctcaagcagcaggacagtgagtcccccgagtctcagagcccagattctagtcctgttaaagttccttacctgctgtgtaagttcaggcaagttattcttcctttctaggcctcactgtctttcctaaaaattaaagctcctagttcctctttcctaaaaattaagccctgccaatctggaggtttcagcgagaaccagtcaagcttacgggtatgctggtggccgtgactattagctagccagaccggcatgttgctttcagatattcaggatccaccactgattccaaggctaaacagagaggaagtgagtttcccaca

SEQ ID NO: 48445 - DNA, 490 bp, Homo Sapiens
gaaggccgagctgctgggcgagctgtgggctggccggacccgcgtgcctccacagggtctggagctggcagacagggagggccaggatcctggcagatggcctcgaaccacacccccggtccttgaagccacttcccaggtgatgtggaagcccgtgttgctgccagaagccctgaagctggcccctggtgtgagcatgtggaaccggagcacccaggtgttgctcagctctggtgtgcctgaacaagaggacaaagaaggtagcacctttcctcccgttgagcaacatcccatccagacaggtgccccaaagcccaggtgaccgtagcacagctaatgaagaactcagcccccaaagtgtggtcacgctcctctaagcctgctgcctccctctgatccctgagcctctggcagtagtaactggtccctccctctgctagccagaaataaacacctgagttgccttaggaactagaaaaaaaaaaaaaaa

SEQ ID NO: 48446 - DNA, 485 bp, Homo Sapiens
  misc_feature (460)..(461): n is a, c, g, or t
  misc_feature (463)..(463): n is a, c, g, or t
cggagggataatcggggcggccggggctgaagggagaggcgcaggagccctggggagagtggtccctgcccttccgcgcctcgagccatcgctaccgcccttcggaaccagtgcagcggccgatcagtaaacacagagactggggatcgatcatggggctttgtaagtgccccaagagaaaggtgaccaacctgttctgcttcgaacatcgggtcaacgtctgcgagcactgcctggtagccaatcacgccaaggtggggccttcaggggagcgactgagcagggcactgggtgggcaaggcggtattggcttcctccaaatccatgaggggccccgcgctagaatgtaagccccacaagggcaaggacttgatttattttgttcactgatatatcccccgtccccaagagagagtctggtgcacagtatgtgctcaataaatatttattgattaaacannanaaaaaaaaaaaaaaaaaaggac

SEQ ID NO: 48447 - DNA, 799 bp, Homo Sapiens
gatgatgtatattttatgtttctttttagcttctcttaaaatcagaatattgaacagaattctgatatgctgaatatatatagtgcatggctgaaactccagcaccaactgggtgcttcaaatgaagtcatagaataattccatctagagctgacagaaatctttcagagccttcattattaaatttgttatagatttagttatcaaagatagagttctctaatcttttttttaaagctaaagttctctttatttacatgtataggaaaacattctgcctaaatcatgatgttaatgaaaatcatattgaggagaacttgaaccttattaaatatgagcttctaacataattgactaaaatgtgattgtcatatatgacacagatgctgtgtgcagatgatatcaaacctaaaaccacttagcaatgtgagaagaaacagaaaacatcccagttaccctggtgtaaaatttatactatttattaatggccgataagggtctcattactaaaacactgaagtgggattatatttttgtaatcgtctaatatttacagtcataaacctgcatgagaatactttcaaatactagcttttgtgcttttaaaataggtaacagtgaatgttagtattgggtgtgggatgcatcagggacacaggtttgtaaaccatgacaattcagttgtaaaactaaagccaagtgcacctgtagtcccagctgctggggaggatcacttgagcctaggaggtgaaaattgcagtgaactgatattgtgccattgcactccagactgggtgac

SEQ ID NO: 48448 - DNA, 600 bp, Homo Sapiens
tgttggcctactgggataagaagaaaaagaaaggagaaaaggaagaaaaagagaaagagaagaaaaaaggacctagcaaagccactgttaaagctatgcaagaagctctggctaagcttaaagaggaagaagaaagacagaagagagaagaggaagaacgtataaaacggcttgaagaattagaagccaagcgtaaagaagaggaacgattggaacaagaaaaaagagaaaggaaaaagcaaaaagaaaaagaaagaaaagaacgcttgaaaaaagaagggaaacttttaactaaatcccagagagaagccagagccagagccgaagctactcttaaactgctacaagctcagggtgttgaagtgccatcaaaagactctttgccaaagaagaggccaatttatgaagataaaaagaggaaaaaaataccacagcagctagaaagtaaagaagtgtctgaatcaatggaattatgtgctgctgtagaagttatggaacaaggagtaccagaaaaggaagagacaccacctcctgttgaaccagaagaagaagaagatactgaggatgctggattggatgattgggaagctatggccagtg

SEQ ID NO: 48449 - DNA, 457 bp, Homo Sapiens
ggcccaggcgcgtgggcgctgccgagaggctgggagcccgggaaccggttcctggacttgagcggcagcagagaaagagcagcgccgcctgcacgactggactggagcggccgggtgccctggaggcccctgggaattgcagtccttgcgcaggtggagagtgagcccttatgagaaaactcaagactcagaaacaataaaggttacagagatgaaattgacagagcctgaatttcaggttatgattctgtatggtttctttggtgctgcattagacctgagctctgattgaaaattcttccacgctcgctacattccaaaactttatctccaatatgaatttccagatgcctcacaaggtctgagctccatctgaaggctttcccatgcttgtcacattcatagggcttttctccactatgaattctatgatgtcgaataaagtgtgagctctgat

SEQ ID NO: 48450 - DNA, 624 bp, Homo Sapiens
caaaatattaaaatttaaaataaagacaggattagtattactgagttttccttttgtcccaggctctaatatggcttggcatggggcagaacattacaacataccagtcgtgtcatggtgcccaaggctccacagacctcagtggctccctgctgcctgccaaagcatctgttttagcagcctcgactcctcagcactcctcagcacacacctcttcttatcaggcttcctccacttagcaacttgctaacggccacctctgtgccttctgatccctgggcgccaatatcctcctgcccttaccatccttccaggcccaacttaaatcccactttcccatgaagcctaactgcgtgaacacccctacccccatacccattagcagtgattttgcccttccccgtaatgctgtcccacttataactgtgctctacttagcattctcagggatcataccttaatgttttcagtatgtctgcgttctcctactagattgtatgtccctcaagagcatgttctgtttctcttctgtctgacagagcactattatacctgactttcagtaactgttagctgtgattagttagctggtggatttaattgattaaaaaattacgattgaat

SEQ ID NO: 48451 - DNA, 1701 bp, Homo Sapiens
  misc_feature (158)..(158): n is a, c, g, or t
  misc_feature (678)..(678): n is a, c, g, or t
ggaggcggtatgatgagctgcagaattcttctgggcgtgatgggaagcccagggccatggccgtcacccggagcacatcttccacttcctcaggctccaactccaacgtccttgttccagtgagctggaaaaggccccagtattctcagaagagaacnaaagagaagttggtacatgtcctttctctgtgtggccaagaagtaggattgagcaaaaatccatcagtgattttttcatcgtgtggggatctggatctgcttgagcaccagacaagcttggtatcttctgaggacggtgcccgagagcaggagaacatggatgacacaaacagcgagcagcagtttagagtcttcagagacttcgacttcctagatgtggagctggaggatggagaggaacttcagggtgagagtatggacaatttcaactggggagtgcgcagacgttctctggacagcctggataagtgtgatatgcagattctggaggagcgccaactgtcaggaagcactcctagcctgaataaaatgcaccatgaggacttcgatgaatcatccgaggaggaggacctcacagccagccagatcctggagcactcagacctaatcatgactctctccccctctgaagagacgaatcccatggagctgctcaccacagcctgtgactcgacccctncagaacctcattcctttaacaccagaatgtccagctttgatgcttccttgcctgatatgaataatctgcagatttctgagggttcaaaggcctgaagctgttcgtgaggaggaggacaccaccgtgcatgaggatgatctttctagttccatcaatgaactcccagcagcttttgaatgcagcgacagctttagcctggacatgactgagggggaagaaaaaggcaatcgggcactggaccagtttaccctggcgagctttggagaaggtgacaggggagtctctccccctccctcgcccttcttctcagccatccttgccgcctttcagcccgcagcctgtgacgatgccgaggaggcctggcgcagccacatcaaccagcttatgtgtgactcagatggctcctgtgctgtgtatacatttcatgtgttctcctccttgtttaagaatattcagaaaaggttctgcttcctaacctgtgatgcagccagttaccttggagataacctccggggaatcggatccaaatttgtcagctcttcccagatgctcacctcctgctctgctggacaagctcaagttcagtgtgttagaactgcaagaatatttggatacctacaacaacaggaaagaggccacactctcttggcttgcaaattgtaaggcaacatttgcagggggatcaagagatggagtaattacctgtcaaccaggggactccgaagaaaaggtaataaaagcctgttagaatgggtctcttgtgtgctctaacattgtgtattagttttggtctacccaagaagcctggaacttgagaaaagaagaggcggaatgagtcaccccaaacatttacatgaaaccaacagagtaagacagaatgccttccagcatgactgtgtgttgatgggatttgtggggaggtttcttcgttttggaaaagtagaggtataaaataaccttttttgctggatactgtctaactatactaataatttcctaataaatttattcttaattcagaaa

SEQ ID NO: 48452 - DNA, 415 bp, Homo Sapiens
gcacgagaggccacactctcttggcttgcaaattgtaaggcaacatttgcagggggatcaagagatggagtaattacctgtcaaccaggggactccgaagaaaaggtaataaaagcctgttagaatgggtctcttgtgtgctctaacattgtgtattagttttggtctacccaagaagcctggaacttgagaaaagaagaggcggaatgagtcaccccaaacatttacatgaaaccaacagagtaagacagaatgccttccagcatgactgtgtgttgatgggatttgtggggaggtttcttcgttttggaaaagtagaggtataaaataaccttttttgctggatactgtctaactatactaataatttcctaataaatttattcttaattcagaaaaaaaaaaaaaaaaaaaa

SEQ ID NO: 48453 - DNA, 399 bp, Homo Sapiens
cacaccttaccaggacaaaaggagcttactctacccaggcaattaagcaatctcccaccaccaccaagctcaaatgttttcatcatagactagggttcatttttatttccttccctggagctttgtaattctttcagcgtaaacattgttgaggttcaacagtccttattgctgagtaggactcgattgtatgaatatactataatttgttaatctgttttcctgttagtgaacattttattggtttctagtttttggcaagtgtgagtaaagctgctatgaacatttgcacacaaatattgtgacttctgggcatgtagtggtatcttgtggtttcagtctgcatttctctgactaatgaacacgttctcgtgtttattggccattaatatgtctttg

SEQ ID NO: 48454 - DNA, 675 bp, Homo Sapiens
  misc_feature (269)..(269): n is a, c, g, or t
  misc_feature (279)..(279): n is a, c, g, or t
agaactcttttgttctgtttttgctttgcgacactgtgaaccgtgcttctgcctcggaacctccctagttatattacttgtgccacatggatttctttaggattattgattcaaacctagagttgtctggaaaatgtgggttctcttctttgtgattgtctgtagtatgctttgaaggtgctctgcagtggtagacacactggttctggcctcatttaatgaaattaataacacatgcccctatttctcttttggatgatgtgtgggtngggtgggtanctgaggtttcctggccagctgtaaggcagattttgacattcttgtgccagaaacagaaattagagtagtccagttacccagagagctcacttaacattgcctctttacttccccagtactgaaacatttcttcaagtataacataaaattaccgtaacaagcagacccagaatactgaaaataactccatttgttcattataggtatctttatttgaaaagtgaaaaatgctttgacacattacagatctgggtatttggattttgcctatggagtgcatatatgatttcaatgatttacaggctaaatagattttagaaataatcatcttaaaattgaaaacaaaggtaggtcctggtataatattaaacataaagttattaaacattttaaaaa

SEQ ID NO: 48455 - DNA, 398 bp, Homo Sapiens
ttaatgttttgatttttgttttctgaaattggattttattttattttatcttataatttcagttcatctaaattgtgtgttctgtacatgtgatgtttgactgtaccattgactgttatggaagttcagcgttgtatgtctctctctacactgtggtgcacttaacttgtggaatttttatactaaaaatgtagaataaagactattttgaagatttgaataaagtgatgaagttgcattacacctcactgcaaggattctttacttagcttgtttttagatttcttctatatatattttatttatatcccatctagaattcagctaggtgctgctgctgctctgtttcctttgatgacgctttgaaataaaggcaggagtacaaaaaaaaaaaaaaa

SEQ ID NO: 48456 - DNA, 747 bp, Homo Sapiens
gagtgttatcagccatggttctgacaatattctagggtccttagatgagcacacttcctgtatctgcattatttttatagcattagtggggttgatccccaggctcacctttccttaccaaataccatcccatcagactgggattaatgggaggagaagctttgaagtcacatgctcaatttcttgagttgattttccccgacctcatcctttgatgctaagcaagaagggctctgaaattctcattcctatttcttacatgaatgagtagtgaagaggggagatgctggtttggtgcaggcaaaattagtctttctggtttaaacacgaatcacgataacccaaacccaggaaggtccatgctgcgattccctggcacttcttctttgtagtcacttcggtgaccggcttgtgctgcaccctccattgactagccttggcatattgacaagagcaggatgcccctccatccatcccatcctcaccatctctccttccaacttctcactacggggtggggaggggaaagccccaaatctaaaaaaaagaaaatcaaaaaactttgggcggccctggcccagaaaagtttttgaacccatcgctggggcccgggccccgtggtaggaacatggccagagcgtcccaaggaacccggccgcacctggctggtttccacataaaaacgccggggcccggttgacacccaatggcgtcgggctacggttctcaagggccggcttaccgcgg

SEQ ID NO: 48457 - DNA, 583 bp, Homo Sapiens
aaaccgcgggagagggtcgctgacgtggaggcgtccgaagggcagcagggtgtgtcggggctcggattaagacatcggagtcggagacctgagagatgttaaccaaattcgagaccaagagcgcgcgggtcaaagggctcagctttcaccccaaaagaccttggatcctgactagtttacataatggggtcatccagttatgggactatcggatgtgcactctcattgacaagtttgatgaacatgatggtccagtgcgaggcattgacttccataagcagcagccactgttcgtctctggaggagatgactataagattaaggtttggaattacaagcttcggcgctgtcttttcacattgcttgggcacttagattatattcgcaccacgttttttcatcatgaatatccctggattctgagtgcctccgatgatcagaccatccgagtgtggaactggcaatctagaacctgtgtttgtgtgttaacagggcacaaccattatgtgatgtgtgctcagttccaccccacagaagacttggtagtatcagccagcctggaccagactgtgcgcgtttggga

SEQ ID NO: 48458 - DNA, 541 bp, Homo Sapiens
atcagaccatccgagtgtggaattggcaatctagaacctgtgtttggtaaagcaggaggcagagggctcgaaaagagtcttcatttttcctagtttttcataatgagcttctcttagaacaatcttctcccttctcaaatggactatgtcggctgattaattactgattgtatttgtaggatgcttttaagtgcaaaataataaatgtagaggcaatcccatatatgaatctggacttccaataatttcttaccaggaagagaagtcatatagccttttagaacaagaacttttagctggttttcaattattttcccataaaacctgagtcaaggtctagacctttgtcttattttgtgtttggagctggagctttacatagaactttccatgaagagttagggaccatttaaagtgatggccttggcccggcgccatggctcatgcctgtaatctcagcactttgggaggccaaggcaggcaaatcacctgaggttagaagttcgagaccagcctggccaagatggtgaaaccccgtctc

SEQ ID NO: 48459 - DNA, 469 bp, Homo Sapiens
ggggacccgtgcaggtgacccaggtagaggaagatatggtgatggtgttgatggatggctctgtgaagctggtgaccccggaggggtccccagtccggggacttcgcacacctgagatccccatgaccgaagcggtggaggccgtggctatggttggaggtcagcttcaggccttctggaagcatggagtgcaggtgtgggctctaggctcggatcagctgctacaggagctgagagaccctaccctcactttccgtctgcttggctcccccaggcctgtagtggtggagacacgcccagtggatgatcctactgctcccagcaacctctacatccaggaatgagtccctaggggggtgtcaggaactagtccttgcaccccctcccccatagacacactagtggtcatggcatgtcctcatctcccaataaacatgactttagcctctgcaaaaaaaaaaaaaaaaaa

SEQ ID NO: 48460 - DNA, 492 bp, Homo Sapiens
ccacgcgtccgcctttcagaacactcaatgtcggaacgttccgaagatgacgtcggagcgttctcgaatcccgtgtctctcggctgctgctgccgaaggaacagggaaaaagcaacaagaaggaagagcaatggcgacactggatcgcaaagtgcccagtccggaggcgtttctgggcaaaccctggtcctcctggatcgacgccgccaaattacactgctccgacaatgtagatttagaagaggctggaaaagagggtggaaaaagcagggaggttatgaggcttaataaagaagatatgcacttatttggccattacccagcacatgacgacttctatctcgtagtgtgcagtgcctgtaaccaggtcgtcaagccacaggttttccagtcgcactgcggtaagtggacccctgcaccgtcggccacatctgcagctgccgccctggggacagtcgccttcccctgggctccccgacagggtctcgccat

SEQ ID NO: 48461 - DNA, 862 bp, Homo Sapiens
  misc_feature (862)..(862): n is a, c, g, or t
gtgatggcagtggaccagcatttagccctctaaagataaagaaaaaattaaatttaatctagaagtattttagacccttatcacagaacccagtaagttatgccaagggtaactgtgtgaactgtgttcgatactgggctatgtatgtttcttattcattgccaatttaatacctaagtttatctaactttacaataaagctttttttcccctataaatacttttctacctcttttgaaaaattgaaataccttaatttggtttatgtaatagttgtctacgttccttcctcctctgaaaattaatgtgggtggtcagaattacagactttttaatgcctaagattttaagaaataaacctgtaggtgttggcaggacttatttcatttagattttaattagtttagatgtgtagaaatgatttttatctgtaaggctctctctccaccaaaataagtgaattgttgggagtaaactagttggtaagtggggcctgctgatagatttatacactcgtgtgtaagcctatactggtgctgtcactaatgttttgtgatagtttacttaagggcatgactgtggttaatgaaggttgttggtgaatactctctcttttccttagcttggaaattcttctctgtgctatcttatgctttagaagaactagaaaagcgattagaactggaggaataatactaggttggagttttaaaaaatttggatcccttctgttcaaatctatacacttgtgattattgcacaaaaaaaaaaaaaaaaaggtgggggggaaatttaaatgggggccaaaaagggtgttaagggtaaggggcaaaaacggggggaaaaggtgttgaagaaaggn

SEQ ID NO: 48462 - DNA, 644 bp, Homo Sapiens
gtccgctaagatcaagtgtagtatctgttcttatcagtttaatatctgatacgtcctctatccgaggacaatatattaaatggatttttggagcagggagatggaataggagcttgctccgtccactccacgcatcgacctggtattgcagtacctccaggaacggtgcaccccctccggggatacaacgtgtttcctaaaagtagagggaggtgagagacggtagcacctgcggggcggcttgcacgccgagtgcctgtgacgcgccggcttgacttaactgcttccctgaagtaccgtgaggttcctgatgtgcgggcggtagacggtaggcttatgcggcacgctttcgtttccaccgtggctactgcgctttgggaagaccgtgcgcttgctctgaagccttgtgagcaaggaaggctccctgcatgtcctgcttgctgcacgccacatgggtgtggtctgcatctcagttggccgccatcagtgtaaatagagcttaaagtcatggtttggctgcataaaaattttctaacttgggttcaatatttgtagtgaagtatctgttttcatttttttcacgttataaataaaaatactatgctggccgggcgcggtggctcacacctgtaatcccagcactt

SEQ ID NO: 48463 - DNA, 593 bp, Homo Sapiens
cttttttcttaaggcatactagtacaagtggtaatttttgtacattacactaaattattagcatttgttttagcattacctaatttttttcctgctccatgcagactgttagcttttaccttaaatgcttattttaaaatgacagtggaagtttttttttcctcgaagtgccagtattcccagagttttggtttttgaactagcaatgcctgtgaaaaagaaactgaatacctaagatttctgtcttggggtttttggtgcatgcagttgattacttcttatttttcttaccaattgtgaatgttggtgtgaaacaaattaatgaagcttttgaatcatccctattctgtgttttatctagtcacataaatggattaattactaatttcagttgagaccttctaattggtttttactgaaacattgagggaacacaaatttatgggcttcctgatgatgattcttctaggcatcatgtcctatagtttgtcatccctgacgaatgtaaagttacactgttcacaaagggtttgtctcctttccactgctattagtcatgggcactctccccaaaatattatattttttctata

SEQ ID NO: 48464 - DNA, 511 bp, Homo Sapiens
  misc_feature (344)..(344): n is a, c, g, or t
  misc_feature (423)..(423): n is a, c, g, or t
ctgaaatgcctggaagtgtccctttatttataaaataacttttgtcatatttcttatacatgtttcttgtaagaaattcagaaactacagacaaagagagtggaaattacccactgtcaggcctctgagcccaagctaagccatcatatcccctgtgccctgcacgtatacacccagatggcctgaagcaactgaagatccacaaaagaagtgaaaatagccagttcctgccttaactgatgacattccaccattgtgatttgttcctgccccaccctaactgatcaattgaccttgtgacaatacaccttccccacccttgagaaggtgctttgtaatatctncccacccaccccacgcccgcacccccgcacccttaagaaggtattttgtaatattctctccgccattgagaatgtgctntgtaagatccaccccctgcccacaaaaaattgctcctaactccaccgcctatcccaaacctacaagaactaatgataatcccaccacc

SEQ ID NO: 48465 - DNA, 595 bp, Homo Sapiens
  misc_feature (537)..(537): n is a, c, g, or t
  misc_feature (593)..(593): n is a, c, g, or t
gattacaggtgtgagccactgtgcccagcctgttctctgtatcttaaatcaactctgtgccaaagcagttctgtcccctgactcccacccctacccaccaaaaagtggtagacatgaagggcaggtaagggaacagaaaatgtctccttgcagatatatatattttaaacgaactgtgtaataagtatgagctaaggagacagaaagacagtagatgagaaaagaagagtacctatacctacaaggggcaaaatgaatgcaatccttcatttgataagagagaactgaaagagaatattatttttctacaataaagcaagctgtcctctcaggataaagtggaatttcgacatggattatggacttcttccaactcccattgacattgcttcttaccacacatggggaagggctgcctttcctgaaaggggaagaaggcactgtcctttcagacaaagtttgtacaaattcctgaactgcagatttgctaatgtgaccgcgtatacttatattccataattaagtgatgtttatggncagatccatattgttaacttgaaatgtttattcattccaccaaataagtctattgngc

SEQ ID NO: 48466 - DNA, 667 bp, Homo Sapiens
cattcttcgttgtaaattgcttctaaacacttctgaattttaaattgctaccgagaaggtccagaaaccgttctcatccaatttagtcacttttattacgttccactttgcctcccccaatcactgcggcggctcccagtttcagcgtggccgcatttggaaaaggctgaaggtagaaaactctggaatggagaggctggcgactggagcaggatccaggggctttaaattttaacctgaatgcgatcgaatgcgcgactcccagaagagatagccaggcgtccgcccggccgctcaacccccgccaggactcggaatgccttgcttttggttcttttctacaaggatgtctgcgtggatatccctggacactcgataccccccggggacctgcttttcccgcagctccgcagacgcggcgggagggcgcgctggccccggcgctgctgggacagaggtgagcagcggggtggacattgaccgattcgacaacgttcgggctctaagggctcgggaagggacccggcattttaccctccagattcccaatctatttttaaaataatgttcaaaacatatgggaaaaataagtgattgctccttttcatggtcacagattgtatttattttttcagactggttttccacctaacgagggaatgggtag

SEQ ID NO: 48467 - DNA, 671 bp, Homo Sapiens
gctttagccaacaaatttcaatcagtttctctcttttctaccctactcactactatctcttttgcatttactcaatttctaagcatagatctcacttctttgaggttaccttttcacaacgaaaccgccaccaaaaaatttgtatattagtttctcctgctcttttcctatagcagcctgtacttcgtatcatagtaactatcatgctatattataatcatttgtctgtctcccctaatagatgtcaggctgttgaaagtgcttactgaatctcttttgctttatttctttgtgcctagtacacagtagtcatatttatttattaaatgactaaatgtcttgacacacaatgggtacattaggctacttgccttcataccattaggcatttaatccatttctacttctgattcagtgctcagcaaacaaacttctaattatgacttggcttcctaatcataattgattgacaaaaatgagaatgttttgatcattaaatcttctgatctgccataagacgttaatcaaccatgtgaactttgtatataaattgggaactggaaactttgaattaaacttttgcacattatcctcctgagcttgggtgactcattgtgtgctaagaaaaaaaatcaaatttcagaacatgcgagacctcgacccaggtaaat

SEQ ID NO: 48468 - DNA, 893 bp, Homo Sapiens
ctgctgccatcttctccgcgctatggctgcgttcggccgtcagcagcctcgtcttacagcgtgactgcaaagaaaaagacttttgttttgcaaaagaaaagcagctcggtgactccgtccacatcgccacagttgagtcagatggcagtggcagtcctttgccagtggaaggagttcctgctaaggggaggtgcaggaggactaatttattattgtgcaactgccagtcctgcgcattccagctacgctaagcgccctgcccaggcacgtaacaaaacataggcctgttttgaagtggcttgttacccaagggtgcctcactcatctgcgccaccaggaagatgaactgtgagggctcctataaggggcaggaagagcaaagctgtcctaggccaaccagagattcatctttcatgcagtgacatgttgataaaaaatgatggaagtaccaccaagaacagggaaggacaagccagaggctggaggaagatacctgcagaacacagacctgacaaaggatcagtatcaaaacatataagaattttgacaaatgaataaaaagagtacaaataacccaacataaagtcaaaaggcgtgatcaggcattcacagaagcaaacacctttggtggatgcccatgaggagaggcgcagtcacatcagtgcccaggagatgcaaacccagatcccaggggtgtgcatccacccgttctgcctgttaagatctgcaaacccggcaaaacctagttctaagagagacttggattcacctgcatgtcttcatcactgctggaaggagccgcagactgctatcgcctcttagacaatgacttagtctccttggttattgggcattcacacattctcatcctagatccagttttccattcccgg

SEQ ID NO: 48469 - DNA, 526 bp, Homo Sapiens
tggtcggcaggaaggactttgctctctgctgctgggcggggaggggtacgctatctgccgggactccctaaccctttagaaggagcaagtgcgtccaaatggtttgaaagtggacctttattgttttccaggagtagaagatagaacagttgaccagttttgtttgtaaaacttctttccttgcctcggacctgtgctataaagtgaccagggcgtagtgagtacagttagtaccgcacacgttagcacgctcgaccttaacgatctttttatagagacaataaacctgcagcgtttcatgccacgtctttgtacgcatcggatgtctctccgtgttgttactaggtgaaatcctcttggcgtgcgcaaattaggttaaaaaaatagctgtcaaacctgagacaggagttggaggagtagagggtggcgcttgttatgtgaaacatttaaccaggaatggtattgtgtgccatcctgtattaaacaatgtatagacagagtggaacaacagcatagcaaaaaaaaa

SEQ ID NO: 48470 - DNA, 1027 bp, Homo Sapiens
  misc_feature (655)..(655): n is a, c, g, or t
  misc_feature (901)..(901): n is a, c, g, or t
  misc_feature (1019)..(1019): n is a, c, g, or t
ttgaacaaagcatgaaacttgttgttttaaaatttaagaataattgaatttaccatctaattggcatccgtactgtgcattgatagtaatatccaaatcatcttattcttccatagaggaagcgctcatataaatcacattgctgagaactatataaaactacatagaggtaaatggtgcttattaaatatgagtatagtttgttacttgctggaagtcttctagttcatttggaccattttcttaccctgaggtgaactcaatatctgttggcaatgggtggttaaatgtgaagtgcccttgttcagtgtcccttgttcttgtacaggtattttcttagtttaaaaaaaaaattctagcatgccaacatttgtctttggcctattcctttttttctgaagtgtgtaacttctgattttttctttgctatgttgtaaataacagtagctaaattctctgttttactatctacttttcttttcttcccagatcatttcattctaaaattaaattgcttggttttctttagaggaaattgctacatggtatacttgtagtagtgattcatattaaaaaaatagctggtaaatctttctaggtagtaacttatccaaacaatactttgagtatcatattttgtgaatgacttgcttanactgggaaactgaatattctttttaaatcatataattcctgtattaaatgtgaaacacacagtctccaaagtcacctgattctctgtggaaaatgaaaagcattgaagggaaccagatacattaatacttagttttggttgaaagtgcaacattactgtacttagaaggggcttggtttatttttagatatttaagctatcattaattttagacaatgggctaataataagaagagatttttgggntgcctcatttatgggagagaccaagaaacagcatgggcataaaccaaacatccccagaaattaaatgaaaaagttttaaagcggaataaaaattgggggttttcctataggaacccangggtttgt

SEQ ID NO: 48471 - DNA, 504 bp, Homo Sapiens
cagttcaacagtcatttattaagcacagatggtataggatactgagtgcccccccagccctctgtgctccccccacgcacacgctgtctatgtcgattaggctgctgtgccgtcggttcccttcttggtctagcagagccttcagctccttgatctgctcagccaactccgggttcaagtcaaactccgctgggaaggcggagatccagtacctgaccaggtggcacgttttcacctgcagggaattggagttgtccttccgggattgttggtagatgtggagcagcttggccgccagctgagaggaggggatgtaccaggggtgcatcatgaggaacatgcgcaccagctccctgactcccctcactcccagattttggcagagccttgccccacggaaaggtaccccggccctacacatactcactcccccaggctggaggacaggggagctcctgtacggagttctcaggcggacttttcctaagagccacccagagccgt

SEQ ID NO: 48472 - DNA, 1014 bp, Homo Sapiens
ccgggacaggggttcggtccgagcccggtgggaggctcccggagcgcacctgggcccagcccaccccgcgccggcggccatggcaggcaccctggacctggacaagggctgcacggtggaggagctgctccgcgggtgcatcgaagccttcgatgactccgggaaggtgcgggacccgcagctggtgcgcatgttcctcatgatgcacccctggtacatcccctcctctcagctggcggccaagctgctccacatctaccaacaatcccggaaggacaactccaattccctgcaggtgaaaacgtgccacctggtcaggtactggatctccgccttcccagcggagtttgacttgaacccggagttggctgagcagatcaaggagctgaaggctctgctagaccaagaagggaaccgacggcacagcagcctaatcgacatagacagcgtccctacctacaagtggaagcggcaggtgactcagcggaaccctgtgggacagaaaaagcgcaagatgtccctgttgtttgaccacctggagcccatggagctggcggagcatctcacctacttggagtatcgctccttctgcaagatcctgtttcaggactatcacagtttcgtgactcatggctgcactgtggacaaccccgtcctggagcggttcatctccctcttcaacagcgtctcacagtgggtgcagctcatgatcctcagcaaacccacagccccgcagcgggccctggtcatcacacactttgtccacgtggcggagaagctgctacagctgcagaacttcaacacgctgatggcagtggtcgggggcctgarccacagctccatctcccgsctcaaggagacccacagccacgttagccctkagaccawtaagctctkggagggkyttamggaactwrttrmggggrcaaggaamtatkgsaactaccggcgtcggtkgsagcctgtktkggcttcccytyccgatcctgggtktsmcctaaggmcctkgtgscc

SEQ ID NO: 48473 - DNA, 741 bp, Homo Sapiens
cgtccggacggggaaggactcgtgtgctgcgagctggcggccgggccggagtgctggggctttgaactccgagaggaggtggaccagaacttttggaactagtgccggcggctctccaccccccagtataaaagaacgtgtggatcactttgctgagtacatccaagatttgaagaactgaaataaatcagctttaaacctgctttttaaaaatatctgggttggaatttgcccctgacaaataataaaatgatgagtgatgcaagtgacatgttggctgcagcgttggagcagatggatggtatcatagcaggttctaaggctctggaatattccaatgggatttttgattgccaatctcccacctctccattcatgggaagtttgcgagctctgcaccttgtggaagacctgcgtggattgttagagatgatggaaacagatgagaaagaaggcttgagatgccagatcccagattcaacagcagaaacgcttgttgaatggcttcagagtcaaatgacaaatggacacctaccagggaacggagatgtgtatcaagaaaggctggcacgtttagaaaatgataaagaatccctcgttcttcaggtaagtgtgttaacagaccaggtggaggctcagggagagaagattcgagatttggagttttgtcttgaagagcacagagagaagttgaatgccacagaagaaatgctgcagcaggagcttctaagtaggacatcc

SEQ ID NO: 48474 - DNA, 568 bp, Homo Sapiens
aagaatccctcgttcttcaggtaagtgtgttaacagaccaggtggaggctcagggagagaagattcgagatttggagttttgtcttgaagagcacagagagaagttgaatgccacagaagaaatgctgcagcaggtatgtgcagaggccagaaccaagatgggatttccctgctgaactatgtgagatgctgcatttctatgttgtgtttgctctgatgcagcagtaagtttcttgattcacttagaccagcacattaaaaaaaaaaaattgagagtagtagagtctcaaaacacatgcacacaatataaagtgtttatgtaattagaatctggaacaaaatgtcaataggattgtggcttattttaattttctttttttgcattcagatggtttcctctcacccatagcatgtgttttataattaagaaaaaatataatagtaaaaaatctaataatccagtttaaaaatgggtaaaatatttgaatagacatttctcaaaagaagacatacaaatggcaaacagacatatgaaaaggtgctcaacatcattgctcatcagagaaat

SEQ ID NO: 48475 - DNA, 462 bp, Homo Sapiens
tatttattccccattaataactgactaggaaggactaaaagccagaaaggggatgaaaaaaaaatccttaattcagggccgacattatctacttaaacaactttgagatatggtcttaattattttaaagcagaataatataattgaaagtttatagctaaaagagactatataggtcatttagtataattcttcattagtttacgaaccacaaaattgcaaataaataagctatgaactttgatgtacactataaatctccttaattctataaatttgtgtctgtaacctgaatagtttgaaaacttctttaaaaatctcttgtatttcatccgggcgcagtggctcacacctgtaatcccagcactttgggaggccgaggtgggcagatcacgaggtcaggagtttgagaccagcctgaccaacatggtaaaaccccatctctactaaaatacaaaaatt

SEQ ID NO: 48476 - DNA, 863 bp, Homo Sapiens
  misc_feature (538)..(538): n is a, c, g, or t
  misc_feature (612)..(612): n is a, c, g, or t
gcctagctgcaacgactctcttaacatccaccgctacagctctctacggcgttctgtttgagaagagcaaggaagctgccttcgccaatcaccgcctgtgggaggccctgggcttcgtcattgccttcgggtacagcacgtttttgtgcgtgcacgtcaagctctacattctgctgggggtcctgagcctgaccatggtggcgtatgggcttgcggagtgcgtggagtccaatatcccgatcagaccccacgctccaggacaggcgaaccaggcagaggatgaagaaatacaaacaaaaatgtgagagcagtgaggtctgaggaggatgaactcagaaagcaccagccagagaattttcttagaagatgcctcaggacatagagcggctcctcatcaccatctcagcacaatttggccattctgaagagatcatattatttcactctttatgtattttttttctattctaacaaatttttagtccaccatcttaacagagatcaagtgtatacatgaaggtatcagttcatttaattntagatgcaaaagaaaaaggtctaacgtacaatcagccaattagaatttgcctgaaatcatagactcaccctagntttattgctgtagttgtttttaagaattggaaagcctgcttaaaaaatgtagttgagccccataattttaccaatggggcaaatttttaaactttttaactttactttggatcaaaccctcatacattttacaaaggggtcctgacaagtcagctgactcaaccttaaagagtcagggggtgacaaaccagactggggctcaagatttctgaacgtgttgggtcttctttataaataaagccgatgcgcca

SEQ ID NO: 48477 - DNA, 570 bp, Homo Sapiens
caagagttgtgacttcagatgcctcctgaaagtggcttggattctccaggtgtccatatgtcatactttggaaacggatgatatgaattacaatgtgttgccctctggatttgtgcactgtactgtgtgcacagtctgcatgaaaattgcgtagacttcagtgtgggaaaattaggtgctgaactgactgattctttgttgaggaggatggtctcaacatcattatggagaggccaggtgtggtggctcatgcctgtaatcccaacactttgggaagctaatgcaggaggatcccttgaggctgggagtttgagaccagcctgggcaacactggagacttcgtctctacaaaaaaaaaaatgtttttaactagccagtcatgttgagcacatactgtgtagtcctagctactcaggagactgaggtgagaggattgcttgagcttaggagttcgaggttgcagttgagctatgatcatgccactacattccagccttggtgacagagtgagatcttgtctcttaaaaaaaaaaaaaaaaaaattcattctggaaaattttttctttgggg

SEQ ID NO: 48478 - DNA, 229 bp, Homo Sapiens
gcggccgcctactactactatacggctgcgagaagacgacagaagggcagtgactcgacaaaggccacaggcagtccaggcctctctctgctccatccccctgcctcccattctgcaccacacctggcatggtgcagggagacatctgcacccctgagttgggcagccaggagtgcccccgggaatggataataaagatactagagaactggaaaaaaaaaaaaaaaaa

SEQ ID NO: 48479 - DNA, 522 bp, Homo Sapiens
aagcgattctcctacctcagcctcccaagtagctggaattacatgcatgtgccaccatgcctggctaattttacatttttagtagagacagggtttctccatgttggtcaggctggtcttgaactctcgacctcaggtgagccgcccgcctcagcctcccaaagtgctgggattacaggcatgagccaccatgcccagcagacctgaattattattattaaaatgttacatcaacatgtacaaatataaaactacatctaaactctaagtacagacttcttatgcttaaaactcttacacagtgttaaccccaagacagatttgcaattaagtagttaaaataagacaacaaagtcaataaaaatcaaataaacaatatacatttaatgtggtagactttgctgttttgctgaagctaagcaaggaaccagtttttaaatcagcaatccgttattttaatggactgagcaatttaatagtgcacctcaaaggtcaatgataaaaactaaaaaaaaaaaaaaa

SEQ ID NO: 48480 - DNA, 1064 bp, Homo Sapiens
  misc_feature (845)..(845): n is a, c, g, or t
  misc_feature (864)..(864): n is a, c, g, or t
  misc_feature (1016)..(1016): n is a, c, g, or t
gggtccggaattcccgggattttccccctaccacagggcacgtgctttttcttggattgcagacaatttttacagtttttttctgactttattgtgaaagtttgtttcaagcatttcttgatatcatgttatgtactatttttatgatttagtcaacatgcatacaaagaaatgttttttatgaagtgctcacttccattttactttgcattgaaatcaaattgggctgaacacttcaatggaatacattttgtggacaatgtcactttagaatctttcatctcagtgaaggattacacattctcaatacttccataattgcaggttgtgttcatttttttatatagtttttgtaatccaaagaatattttgctagatttgcacagatctccaattgaatttgcaatgaagaaataactcaaaaggaatatgaatagcatttaaataagtatacagctgtaagtaaccctgtcaccatggatgatccttttctctaggaatgtatttggattagagatgacaactacattttcgcatttttatgttgaagtcttttttaaaaaggctgtttacttttcagtagttaagaatacttgtttttctttttctttttttttttttttttaccttttattttttcgttaagcctctattgtttgtagaacactcttagaaacttggaaataaaatgtctttcccaactagtggagtcctttttcatttggagcacattgccttaaaagaagtcttaatttaaacggtccttccttattctaaagtaatcactgttttataccatctatgcagctaaaagaaggaacatgcttctgttcttttcctcaagnaatggttattgtttctagncatcattcattcattgattcattcaataattcatcaaaatccttattttataaaacctggtccacttactgggagattcagaatgaatcctactacctttttctgacatctttttgaaaaatcaagccctgtaacaaagtatccaaccttgntggcctataaaccacctatttactattttgccctcctagaaaatgcaa

SEQ ID NO: 48481 - DNA, 614 bp, Homo Sapiens
  misc_feature (420)..(420): n is a, c, g, or t
  misc_feature (462)..(462): n is a, c, g, or t
  misc_feature (484)..(484): n is a, c, g, or t
ctgtggtgcacgaggtccagagatacattgaccttctccccaccagcctgccccatgcagtgacctgtgacattaaattcagaaactatctcattcccaagggcacaaccatattaatttccctgacttctgtgctacatgacaacaaagaatttcccaacccagagatgtttgaccctcatcactttctggatgaaggtggcaattttaagaaaagtaaatacttcatgcctttctcagcagggacctccattttacagaactttaacctgaaatctctggttgacccaaagaaccttgacaccactccagttgtcaatggatttgcctctgtgccgcccttctaccagctgtgcttcattcctgtctgaagaagagcagatggcctggctgctgctgtgcagtccctgcagctctctntcctctggggcattatccatctttcactatctgtaatgcctnttctcacctgtcatctcacatnttcccttccctgaagatctagtgaacattcgacctccattacggagagtttcctatgtttcactgtgcaaatatatctgctattctccatactctgtaacaggtgcattgactgtcacataatgctcata

SEQ ID NO: 48482 - DNA, 477 bp, Homo Sapiens
  misc_feature (25)..(25): n is a, c, g, or t
gaaaaatcgtcttaacgctcagtgnataaataaccacattcatgacaatgagattatgtaattgttttttattcacaaatattttctggcacacacattaattcacagaaagaaagaacagtagtcacgtgggcacaatatttaaccctttcagatactgaggtttatcaccgcttgatttcttagttggaaatgttgcagtttggtttcaggcaggatttccaggctatcacagcctgctccgatggcatgattattaggagctcatctgcatcactggtgaatttctttggtcacttctggacagtttttaaacataagtccatgcccttctttgttctgctgatgaggcacgtcataaaataaatgtccagcaatgtcttcccgtcttgttctcaggcctcaggctctcggactccttcccccaaccctgcccccatgttaactttctattgctgctgtaaaaaaaaaaaaaaa

SEQ ID NO: 48483 - DNA, 601 bp, Homo Sapiens
cacgaggtttgtttctaaagtgagaggaaagtgcttggtatcttgctttttgctgagggcaaaataacaacatgaagacaaagtgctttttgttgtctattcatgaaactgtagaagaatattttgagtttttattcttatattatgaagggattctttgcctagcagtggccgtcaaactgatgtagcattgtacttctcaacagtgaagcctgtgtaataccatacagtaggatgaaagactattctgagcaaaataaaatgggatgtcagaatctttgaaaattattttatcattttttctattttttcatttttataaattagaaggattttccattcaataaggataatctctcttcctatcattctgtcaaaatggcagtttcttttggtaattatccaacctagtttcattacatttagaaggaggtttcagagcttattcttgataactataataatgatttgaatgttttatatcatgaagttttttctatgaggaaggctattctcaatgtatctgtcgtctaattttttattttctatctataaagaatatttaaataataattggtgtatgttccttttgttgaaaatg

SEQ ID NO: 48484 - DNA, 938 bp, Homo Sapiens
cgactcatatttacaataaattttaaaaatcattgttaacctaatagtccttcaaaagaaaaaaaaattgaaattacattattttaatgactctattagtgagggtcattcttcccatgtttcttgttagccatgaccctataagaaataaactgcactgcaaaatgataaacatgatatcaatcattacatgggaaggcactatataaagaataataccttaggttaaggccacataaatatttatcaggtgccttttctgcggaggactctgaagggatactaaactgcatttagctgcatgcaactgaaactacttttacctacattgtctcttataaacattataactactctttgagaaagtgtttactatggactgaattgtctccccatccccccaaattcatatattgaagccataaaccccaatatgactctattcctagacaggacttataagaggtaattaaggttaaatgaggtcattaggatgggttcctaactggataggattggtggccttataagaagaggaagattctgcacttggtcttccaattaaataatttatttaaaagaaaaaaaaaaaagaggaagagagggagctctgcacatatactgaggaaaggctatgtgagctcctcacagtgagaaggtagcacctctacaagccagcaagagagccctcaacagaatccagccatggctataccctgctctgagacttccagcctcccagaactgggataaaattttgttggtttaaacccccacaatcctatggggattctttttattggcagcccccaagcccaaccaaagaccggccatcacttgcctggtcacctttaccggacccagaaaaacctcaggaccctacgggaaagcgagaaaaagtttaaaaaccttggtcccaaggggcccccaaaaaagcg

SEQ ID NO: 48485 - DNA, 794 bp, Homo Sapiens
aaagaattacctccagttgtagagacagctctgagatggggtgtctgtagtgtgctaagccagatttttgaaggactacgatagttattctggtctctgactcagagctgctggtccacagaattcctctaagctaaagctgtaacacaatttgatgtttgccaaataaggtgagactcacagagtatatgtgcagagcatataatgcagagcatacaaataggggccatcgaagtgtggcaatgccctaggtatattgtgattaccacaaggagctttattcctcatacttagaaaacaagcacacaaagaaaaatctgccagctgtctatttcccaattttccttctgactgttcctttctccttcctcacacaattaaaatgctaggtttcctgtaatcgcaatcttcagggaatttttcactcaagcccagaaaataaactccagataatgatactgagaaatttattggttggaaaactgctatctacaggccttccactacctatttcttagtagattttacatttttaaagggttgtagaacaccaaaacaatatatgacagatactgtgtttgggccttaaagcctaccctttatataaaaagtttgttgactcctaggctctcatttgcaagtagacaaatgagaaacagcaaatatttaaggaaaagagcaacatgaaaaatacacagcaaacttaacaagcagaaagaattcctggggaaacaattcagggggaaaaaatgaccaagtataattagtattatatgggaataataattactact

SEQ ID NO: 48486 - DNA, 517 bp, Homo Sapiens
gcacgagcttcagcagcggcagcagtcttagtagcagcagcaccagtgcgggttgcgccagcagccttggcggcggcggcgcctcggagcttctccctgcagcacagcccacagccaggagcgctcccaaaagccccgagccagcccaaggcgcgcttggctgcttatagactgtactagggcggaggggatccgggccttgcgtgcaggctcccaaccatgggctgggttttgtgcttactgtatgttggcgacttggtagggcaggagacgcagcgtggaggctacctcccgacattcacgcttcgccccacgctgctccgactggctgcagcggacactgcccaaagcagaggggagtctcagtgtcctgctagccagccgaacacttctctccggaagcaggctggttcgactgtgaggtgtttgactaaactgtttctctgactcgccccagaggtcgtggctcaaaggcacttaggacgccttaaatttgtaaataaaatgtttactacgg

SEQ ID NO: 48487 - DNA, 933 bp, Homo Sapiens
  misc_feature (705)..(705): n is a, c, g, or t
  misc_feature (711)..(711): n is a, c, g, or t
  misc_feature (840)..(841): n is a, c, g, or t
gatggctcccctgccgccacccccgagatcagagtcaaccacgagccagagccggccggcggggccacgcccggggccaccctccccaagtccccatctcagagctctcttcctgctgtcgtggtggagaccttcccagcaactgtgaatggcaccgtggagggcggcagtggggccgggcgcttggacctgcccccaggtttcatgttcaaggtacaggcccagcacgactacacggccactgacacagacgagctgcagctcaaggctggtgatgtggtgctggtgatccccttccagaaccctgaagagcaggatgaaggctggctcatgggcgtgaaggagagcgactggaaccagcacaaggagctggagaagtgccgtggcgtcttccccgagaacttcactgagagggtcccatgacggcggggcccaggcagcctccgggcgtgtgaagaacacctcctcccgaaaaatgtgtggttcttttttttgttttgttttcgtttttcatcttttgaagagcaaagggaaatcaagaggagacccccaggcagaggggcgttctcccaaagattaggtcgttttccaaagagccgcgtcccggcaagtccggcggaattcaccagtgttcctgaagctgctgtgtcctctagttgagtttctggcgcccctgcctgtgcccgcatgtgtgcctggccgcanggcggngctgggggctgccgagccaccatgcttgcctgaagcttcggccgcgccacccggggcagggtcctcttttcctgggcactgcttgtgggtgggggcccaaacaccagcctaagctggctctgccccgannagggtctgtgtgctggtttaaaataaaatcttagtggttcaaaccaaatggaacaaaaaaaaaaaaaaaaactcgaggcttcttggtgcggg

SEQ ID NO: 48488 - DNA, 777 bp, Homo Sapiens
cgcgtccggaaagtctaatattagatgggctttttatggaaattctcaatgactgttctgatgtagatgagatcaaattccaagaagatggttcttggtgtccaatgagaccgaagaaagaagctatgaaagtatccagccaaccgtgtacaaaaatagaaagttcaagcgtcctcagtaagccttgttcagtgactgtagccagtgaggcaagcaagaagaaagtagatgttattgatcttacaatagaaagctcttctgacgaagaggaagaccctcctgccaaaaggaaatgcatctttatgtcagaaacacaaagcagcccaaccaaaggggttctcatgtatcagccatcttctgtaagggtgcccagtgtgacttcggttgatcctgctgctattccgccttcattaacagactactcagtaccattccaccatacgccaatatcaagcatgtcatcagatttgccaggtttggattttctttcccttattccagttgatccccagtactgtcctcctatgtttttggatagtctcacctcacccttaacagcaagcagtacgtctgtcaccaccaccagctcccatgaaagcagtactcatgttagttcatccagcagcaggagtgagacaggggtcataaccagcagtggaagtaacatttcctgacatcatctcattggactaaaggaggactcacttgattctgggaatcattcatcagaactgcttttttcttggatctctagtctgggggaaacgttcttttttt

SEQ ID NO: 48489 - DNA, 503 bp, Homo Sapiens
atctgaagtgggctaagattgtgccactgtgctcactccagcctaggcaacagagcaggactccatctctaaaagtaaataaataaataaaatttacaaaattttaaaaatcaaatgaaatatgtcaggtttgtacctaccacatttaaaatagggacttgaagaattaaacattttattacaaatgaagcacttcatgcacagactggcacatagtaagtagtcgataggtgttaacaatttgtgttattgttattttctggagtccaactaacaaatcccacagtgaatgacatcacagggatgcaaccaacaagatccagaatatggaaacttctactagataaacaactccatttcttcagcaacaattcaagagagagagagaagagaagctatacattttaaaaggctgaagaaatatatgaaccaaatttgtatgaggcaatcagaaaaactgacaccgactgtattaaggaattatctaattttagtgtggtaat

SEQ ID NO: 48490 - DNA, 604 bp, Homo Sapiens
caactttaatctgcaacgtcaccaatgccctaggagctcgccaggcagaactgaccgtccaggtcaaagagggacctcccagtgagcactcaggcatgtcccgtaacgccatcatcttcctggttctgggaatcctggtttttctgatcctgctggggatcgggatttatttctattggtccaaatgttcccgtgaggtcctttggcactgtcatctgtgtccctcgagtacagagcatgccagcgcctcagctaatgggcatgtctcctattcagctgtgagcagagagaacagctcttcccaggatccacagacagagggcacaaggtgacagcgtcgggactgagaggggagagagactggagctggcaaggacgtgggcctccagagttggacccgaccccaatggatgaagaccccctccaaagagaccagcctccctccctgtgccagacctcaaaacgacgggggcaggtgcaagttcataggtctccaagaccaccctcctttcatttgctagaaggactcactagactcaggaaagctgttaggctcacagttacagtttattacagtaaaaggacagagattaagatcagcaaa

SEQ ID NO: 48491 - DNA, 752 bp, Homo Sapiens
attccacgctccgccagcacgctcattaaagtgatgatttgggttgcaacaacagtgccaagtacttcctgtgttcaactggggaccatgtggcaagacccaaagcttccccagagatcctatgggaataagttttttgagccaccatattccattatttcagcctaaaataacaccatgggacaagaatcagaagacagaggagcagacaaatgtgtgtagacatgctggaaggaatctttctttttagaaacagggtcaatatctattaaactttaagatgtgtatctcttgacctggcagtttctgtatttgagttttaacctactgatatacccatgcatgtgaataaagtatcttcctgcatgtaacaggatatttaatgtaaccttgattatagttgcaaatgctgggaaacgatccaaatgtctttcaatatggcactgattaaataaattatggcacagtctcacaatgaaaaacaaatgtagccattaaacagaatgaaatgggtctagctaaattgaaataggactacctctaagatatgttgttccacaacgaaaaaaacacagacagtgcagaggaacaagtatgataccattttgtattttttaacatatgcaagcgtgattgtgcctacacagaatacctttgaaaataaactcagtatttgcctcagtggataaaaacaagaaccagccttattttcactgttatatccttttggtgccactttttgactttttaca

SEQ ID NO: 48492 - DNA, 818 bp, Homo Sapiens
  misc_feature (587)..(587): n is a, c, g, or t
aagggattgaagactgtttttgatgaggctatcatagccattttaactccaaagaaacacactgtaaaaaaaagaataggatcaagatgtataaactgttgtttaattacgtgagaaacatcttcagtggccaaggaaactgtccatttctctcagaaagcaaatgaaatgctacagctatacccagaccttttataggtaatgaagcagttcaaaacttgaaagaaaacaaaacctgtcctcagaattctataaagtgtattaagaatgttccttaaaggtttaagaagcagtaagcagcatctgaagccacaatctattataaatactttatttcaactagaaggtacaatctctcaggggtttcatagtttaaaaagctacaatcacatcatgttgtaactacgtaaaaaacagagctgtaaatggaactgcttggctttgaccatacacatttctgcccagcccttacagaatctgcacaaagaaatatctccctttgctccagttaattgttcttgtatgtaagttgctttctattccagtatatccagagtggtgaaataacaaggccagccacgtagccnaaggtcgctccaagcgtacaggagatgggccatacctgaggagagaatgtatgagatcaaaaaagaacaaatgttttattattacttgagcacaagtgtaacctaaatatttctatattaaagcttaatgtgctttcttaaagaatgccaaaagtgtaataaggtcataactgcatttatcatgaacactaaaaatgtacacattttagttaatgtgcattaaactgtaac

SEQ ID NO: 48493 - DNA, 512 bp, Homo Sapiens
caaattaaatcatcatgactacattgattccccatcgctgaaggacagaattcattgtgtggcatttgtatttgatgccagctctattcaatacttctcctctcagatgatagtaaagatcaaaagaattcgaagggagttggtaaacgctggtgtggtacatgtggctttgctcactcatgtggatagcatggatttgattacaaaaggtgaccttatagaaatagagagatgtgagcctgtgaggtccaagctagaggaagtccaaagaaaacttggatttgctctttctgacatctcggtggttagcaattattcctctgagtgggagctggaccctgtaaaggatgttctaattctttctgctctgagacgaatgctatgggctgcagatgacttcttagaggatatgccttttgagcaaatagggaatctaagggagggaaatatcaactgtgcacaaggaaatagatatgtgaaaggttcacgtaaatttcctcacatcacagggt

SEQ ID NO: 48494 - DNA, 490 bp, Homo Sapiens
cagaaatcatcacataggggccatgcttcgtagatagggatgatagagaggagacctgcccaagttgaatttccatggccttcctcccttccttagttccatgataaagtatggacagtaaaccactacttgagctacctaaggtgaattaactctcagggaaccctcttccagttctttaccttgcacagtgaaagaatcaatggcacctagaaagttaaatccctttaggcccatacactagagacatgttttgtttgaacaatgtagtttaagtacttgaatgtcacactatataactgaggttagagaaaatgtttcttctagcccttacagggtgtgattcttaaacacaatgtccaaggtgtatacaaggatatgtattgtaacaactatgggtatgtatattttgcagagcgtagtttctatatcttgaaaaggaaaatattttcataaattgtttttataagtactaataaaataatatgaa

SEQ ID NO: 48495 - DNA, 854 bp, Homo Sapiens
gaggcagaagggaagctagcaaacgtgccagatggttcttttcttgtcgggacagttctgacgaccgttaccttttaagcttgagctttcgctcccatggtaaaacacttcacactagaattgagcactcaaatggtaggtttagcttttatgaacagccagatgtggaaggacatacgtccatagttgatctaattgagcattcaatcagggactctgaaaatggagcttttgttattcaaggtctcggctgcctggatctgcaacttaccccgtcagactgaaccaacccagtgtcccggttcatgcaggtgcgctcgttgcagtacctgtgtcgttggtatatacgtcagtataccagaatagacttaattcagaaactgcctttgcaaacaaaatgacaggattatttacaggagaagcactactgaaaggatggagaaccctgcatcttgcctttgtgggattaagaacaagagattgacaatacagtttacaaactttcattgccatcacaatcttttgctgcataactatttcagttgatgtgtaacaagagtccatcagtgttaaggggtgggcgaagtgtcagcaagggtgtctggggttaatcaggtcttttaaaaaggccagtcttgcgttacaagctgggcactcatcgtcccatcaatggtccggactatcccatggtcgattttccaatttcctaatgccccccgccagctttggtgtttcacggaattttatggctaaccgctttcttgtttcaccctatctaagtgtagcactacaaggcatcggctctctcaatctccttccacacgtgataacattgtgtcaaacacactatacga

SEQ ID NO: 48496 - DNA, 746 bp, Homo Sapiens
  misc_feature (719)..(719): n is a, c, g, or t
tcccctctgaattctaaacagctaattctagacactaacatctggatcttataatttaccggtctggtatggacatgaacagttccagtgcctttcaacttatccctgaatttttctcttctcaaagttctaggcagtaattttaatgccctcaaattagataaagctgattacttagagcttataaattagctacactttatgacactaagaatagagctatgacttatgcatatcatacctgtcaagctacctagcaccacgaatagaactaatattaatggatggactaatacaaggatctaatatatgtcagtgatagtcttaaaaacaccgatttgttattttccttatatataatccaaattcctttctatccttctggcaatgtttctactgcctgactaccttaaataactatatagtgtcaatttcttgcttgggccgggtggtggctcatgcctgtagtcccagcatattgggaggattgcttgagcctaggagttcgagatcagcctgggcaacatggtgaaacctcatctctatttaaaaaaaaaaaaaaaaaaaaaaatatatatatatatatatatatatatatatatgtcttaatgttaataacaattccctaggtcactagtaataagaagctatgggctttaaacttaaaaggtgctaaaccagtttaaatgtaaaacattctcataatagaattgcactgnatttcttttctactttgatgcttttcc

SEQ ID NO: 48497 - DNA, 1063 bp, Homo Sapiens
agcccaccacccccccccggcatgccccggaatggggatatataacaaggctggtaaccggtccggaatttttcaaaatcgtcgaccccgcgtccgcttcgcgtggggaaacaccattttatgcagaatcgctggtggagacatacggaaaaatcatgaaccacaaagagaggtttcagtttccagcccaagtgactgatgtgtctgaaaatgctaaggatcttattcgaaggctcatttgtagcagagaacatcgacttggtcaaaatggaatagaagactttaagaaacacccatttttcagtggaattgattgggataatattcggaactgtgaagcaccttatattccagaagttagtagcccaacagatacatcgaattttgatgtagatgatgattgtttaaaaaattctgaaacgatgcccccaccaacacatactgcattttctggccaccatctgccatttgttggttttacatatactagtagctgtgtactttctgatcggagctgtttaagagttacggctggtcccacctcactggatcttgatgttaatgttcagaggactctagacaagaacttagcaactgaagcttatgaaagaagaattaagcgccttgagcaagaaaaacttgaactcagtagaaaacttcaagagtcaccacaaactgttccagctctgcagtattcaactggtgaatggcccacttaacagccagccaaaagatttacaaaaaaaaaaaactttaaaaagaagaaattttgaataacctatatacacaaataaaaacacgggcaggccgcctcttagaagaattccctccaagggggcccaaactttacgcggtaccccaccttttctttggtaaaaagaggggccccctattagaggagccggcatttttaacgttaagggactggggccggactattttataaagtctgtggtaactgggaaaaaactgcccaaccttgggaaacctttcgtgaaaggaaaacttttacttttggggggtgagcgcaataatatgtggccacacacttccttcccgacaa

SEQ ID NO: 48498 - DNA, 369 bp, Homo Sapiens
ccctgtctaaaaaaaaaaaaaaaaaaaaaggatttattatgtgctcactgctggctcaggccccaacctctggccttttaagttacctagacttgagttctggcatccagagctaacaatcattcttcagatcacccacaccggatggaatctctagctattttatcagctaagaaaatcagggtaataacgaaaaagcagtagggcctggggctagcactgagttcagatccagctttcaggaggacagtggaaagagtgcagagcctctgcctaggccctgggccccacgaagcaggacaggcagagcccagggtactgttggcatctctgtccttcccttcaggacaccccttacctatctgcctc

SEQ ID NO: 48499 - DNA, 867 bp, Homo Sapiens
ggtaaaaccaatcaccaaagactacattatgaacccaccactgggcaaagaaagtatccctttaatgacagaagccacattcgatactctgcgactctggttaataatcctgctgtgtgctttgcggttggccatgatgcgtagtcacctgcaagcttatttaaatttagcccaaaaatgtgtggatcagatgaagaaagaagcggggcgaataagcacggttgagctacagaaaatggtggctcgagtcttttattatctttgtgtcattgcactgcagtatgtggcgcctctgataatgctgcttcacacaactctgcttttgaaaacactaggtaatcattcctggggtatttatccagaatctatctctaccttaccagtggataatagtctactgtccaattctgtttactctgaattaccatcagctgaagggaaaatgaaggtaactgttacacaaataacagtggcactgagcagcttaaaaaatatttttactcctcttctttttcgaggacttctgtcttttctgacctggtggattgctgcttgcctcttttctacaagcctttttgggcttttctatcaccagtatctgactgtggcatgaatctcagttaacaaaaaagcatatccaaatcaccctttaaattaaaatatctgtgcccttaaagggctgatgaaaaccagaagaaagcaaatacaatgggaaaaaaaaaacatatcagaatgtcttgtattaaatgtttcctctgtattctcagggtgaattaatgtagtaatatttaaaattacaaaatagattgttaactgttacactgtggcattggaattttaactctttgtatttactggtatgagagg

SEQ ID NO: 48500 - DNA, 573 bp, Homo Sapiens
ccattctttttctttattcagtggattgttagttcttctgctgttaggaagccactatgtctggacgtggaaagcaaggcggcaaagctcgggcaaaagctaaaacgcgttcttccagggccggtcttcagtttccagttggccgtgtgcaccgcctcctccgcaaaggcaactactccgaacgagtcggggccggcgctccagtgtacctggcagcggtgctggaatatctgacggccgagatcttagagctagctggcaacgcggctcgcgacaataagaagacccgcatcatcccgcgccacctgcagctagccatccgcaacgacgaggagctaaataagcttctaggtcgcgtgaccatcgcgcagggcggtgtcctgcccaacatccaggccgtattgctgcctaagaagacggagagccaccataaggccaagggcaagtgaaatgattactagtcaaatccgtcagtgatcccgagtcccagaaaccaaaggctcttttcagagccacccaccttttctgtaaagtgctggaatacacatacgatgcctgaaatctcaatgttca

SEQ ID NO: 48501 - DNA, 853 bp, Homo Sapiens
tggctcgtaccaagcagactgctcgcaagtccacgggtgggaaaagcgccacgcaagcagctggccaccaaggctgctcgaaagagcgctccagccaccggcggcgtgaagaagccccaccgttaccggcccggcacggtggctctgcgcgagatccgccgctaccagaagtcgaccgagctgctgattcgcaaactgccattccagcgtctagtccgtgagatcgcgcaggacttcaagactgatctgcgttttcagagctcggcggtgatggcgctgcaggaggcctgcgaggcctacctggtggggctgtttgaggacaccaacctatgcgccattcacgccaagcgagtgactatcatgcccaaggacatccagcttgctcgccgcattcgtggggagagggcgtaaattgtcttgtgaatgtgtgctaaccaaaacccaaaggctcttttcagagccaaccaccttttctataaaagttgctgtttactgttgctgtccgtaaactggaacctctgttcactcaagggacgaggtctcactgtgttacccaggctggcctcaaaactccttagcttggccaggcgaggtggctcaggcctgtaatcacagcactttaggatgccaaggcgggcggatcacgtgatgccaagagttcgagaccagcctgccaacacattgaaacttcgtctctactgagaaatacagaaattagccgggtgtgggtggcacaacgccctgcaagtcccagctacatggaaagctgaggcagggaagaagggttgaaccggaggggggaagttgcgttgaaccgagatcaaccatggttcagctgggagagataaatcct

SEQ ID NO: 48502 - DNA, 800 bp, Homo Sapiens
tttaatcatgaataatttattaaattacataaatttattcatagaaacttttctgggttttagtaaaattgctaaatcaaaccaagattttaatatatcagcatttacttgtacccttataacatttcactcttgacttgatttgagaaacatgtttattttttgaatgttcttgtgttcaactaattttctgctgtggaaataaatacttatgatatataaaatcagtgttaactttgaattctaaaatatcctgatagcttcatagataagtgcttttctttttcttttttttttcttttaacatgtacctctacttgaatgtaagtgcttttaataatcaaagtgagtggcggggtgcggtggctcacgcctgtaatcccagcactgggatgctgaagcgggcgagattacctgaggttgggagttcaagaccagcctgaccaatatggagaaaccccctctctactacaaatacaaaaaattagccgagcatggtggcgcatgcctataatcccagatactcgggaggcacgaggcgggagaatcgctgtgaacccgggaggcacaggtggcggtgatccgagatcacaccagttgcactccagcctgggcaacaacgagtgaaactccgtctcaacactaactcataataaccaaaatgaggtgttctgccgattaaatgccttagacttgtgtagactaaaactgtactaaccgactagggcttttcacaacaatgccactcggcccgcgtcgcatggctcatgccctgtaatccccaccctttgggaagccag

SEQ ID NO: 48503 - DNA, 560 bp, Homo Sapiens
  misc_feature (554)..(554): n is a, c, g, or t
gtttggctataatgccgatccccagaaactgctggctaaaaatggagagactcttcttggggccattaattttttcattgctagtgtgaacactttggtgaataaaaccattgaagatacattaatgactgtgaaacagtatgaaagtgccaggattgaatatgatgcatatcgcactgatttggaagaactgaatcttggaccacgtgacgcaaacactctgccaaagattgagcagtcacagcatctcttccaagcacataaggaaaaatatgataaaatgcgcaatgatgtttctgtcaaattgaaatttctagaagaaaataaggttaaagtattgcacaatcagctggtccttttccacaatgccattgccgcttactttgctgggaatcagaagcagcttgaacagacacttaaacagttccatatcaaattgaaaacccctggagtggatgccccatcttggcttgaagaacagtaaaatcacagcggaaaataaaaagaaagtcgcgttgttatatttttaaaccaacctaacaagaattaagcanagttgg

SEQ ID NO: 48504 - DNA, 648 bp, Homo Sapiens
ctatgtgatgctcaagggaggagcacgagtggctgtgctgggggcgccccacaaccctgctcccccgacgtccaccgtgatccacatccgcagcgagacctccgtgcccgaccatgtcgtctggtccctgttcaacaccctcttcatgaacccctgctgcctgggcttcatagcattcgcctactccgtgaagtctagggacaggaagatggttggcgacgtgaccggggcccaggcctatgcctccaccgccaagtgcctgaacatctgggccctgattctgggcatcctcatgaccacatagttcagcgtctgacgtcagacgctgaactatgtgtaggagaggataagtttctttctcagagtgtgctgcagccagacataatatttctccttggcagaaactctgctgttccaatcatgcatgtagccattgagttcaatgtgaagatccaggagtgggcgttttctttcttgtctcagtttctgggagaggcactgcaggtacaggtatggtgagctgtgagactgctccagcagggacatgtccgcagtacacaggctccagaagaagtcagcttctcggtgaactgtgcacagccctcgcttcttgagccttgaattccacatagttcagcgtctgacggg

SEQ ID NO: 48505 - DNA, 584 bp, Homo Sapiens
gaagacttttaccgcaaggagattgaggtggactcgtcgccgtcggtgctggagatcctggatacggcgggcaccgagcagttcgcgtccatgcgggacctgtacatcaagaacggccagggcttcatcctggtctacagcctcgtcaaccagcagagcttccaggacatcaagcccatgcgggaccagatcatccgcgtgaagcggtacgagcgcgtgcccatgatcctggtgggcaacaaggtggacctggagggtgagcgcgaggtctcgtacggggagggcaaggccctggctgaggagtggagctgccccttcatggagacgtcggccaaaaacaaagcctcggtagacgagctatttgccgagatcgtgcggcagatgaactacgcggcgcagcccaacggcgatgagggctgctgctcggcctgcgtgatcctctgaggcggccaccgcgcgccggccgcgctctgcgcacaaaagccaaacgcatccgactctctaaatgtgatttatttcttgctttgagattggagaccactttgcattggccagggtgtcttgggagcccggctggcctccgc

SEQ ID NO: 48506 - DNA, 918 bp, Homo Sapiens
  misc_feature (630)..(630): n is a, c, g, or t
cataactctgataattaattatgataataactatgatagttaaaaatacgtcattttaaagatttcccaaaccacaccactaaatttgttttatgaattgattttattttatttgaaattatataatgtagtcaactgcaatatggaagtttgttcttgtttctttgtcaataaccttaccagttttataatgcagtttttgatggaattaaacacaaagaacttgaaagcagtcagttacaaaaaggtagttgtggtcaagtagttttaatatgtaaatttgcaagtttttggagaacccccaaactccttctccactggagttaggagggcctgtggtagacagcgtgaatcatgaaaataagcctggagagttctgttattaaggggcatagcattaatttttgcagtcttaaaattacacttcttgacttctgaatgtctcttatttgcgtgcactgacaaaattctatttgtttacttttatattaatggtaataaaatagattataaagtaagctggaactttgttgttttaacctccatcctgtcaaggcaaatgtgatctcttatcttatatcctttacgtttaaatatttttttctcaccgatcaccacatttaatatgangctattatgaacttatatataccatggtaatggttactgaaagtaaatggaaacaagggtggctactgttctctataatgacacaaggggaaaggaagaaaaactgcaacttctacaagtataacattgagaaaactattacaaggtatatatgccggtttgcatgcaatggtataggactatctagattaaatatatccctggtattttacggaagaagggttttccctatttaagaaaaatctttaaaagagagatctaaaatgggaccttaaatttggctctttc

SEQ ID NO: 48507 - DNA, 389 bp, Homo Sapiens
cacacccttgaatgctatagttatccatgaagtctatgaagaaggggcagcagccagagatggaagactttgggctggtgaccagatattagaggttaatggggttgacctgaggaactccagccacgaagaagccatcacagccctgaggcagaccccccagaaggtgcggctggtggtgtatagagatgaagcacactaccgggatgaggagaacttggagattttccctgtggatctgcagaagaaagctggccggggcctgggcctgagcatcgttgggaaacgaaatggaagcggagtgtttatttctgacatcgtgaaaggcggagccgcagacctggatgggagattgattcagggagatcagatcttatctgtgaatgggg

SEQ ID NO: 48508 - DNA, 605 bp, Homo Sapiens
ctcgtacagacttagaagaaataggtggactggaaagtgagctgctatcaaaggagattaatgattttgtgatcccaagcaactatggagtgtgaagttgcatttaagagctccttagaaggaaacaaattatcaactttaagttcttaggaacgacatttttgaatcaaaatttaaaacaatcttcacaaaatgcaaaatagcggctaccctaaaatgtcctgtcggtacaacgcttcccctgcgagagtgaattaactcccctcctcccacctcctccagagctaccctgatggctaagtttcgtttctcttttaatgagaagagagttcatgagtctccgttggacacaacttaattctatcagccacagctgatattttattttcattggaagaattctcagataaagaaaagtgatacattggggaaggaggaaaggtagttaaattaatatttgattttgtagtgaaaaggctcaaaggaaacacagaaggcttgagccggtgtcaaaaaaaaaaaaattgagttaaccttcccggggaataaagattcttaaaattctcacctctgggaatttcaattcactttatccacttaccttg

SEQ ID NO: 48509 - DNA, 895 bp, Homo Sapiens
cattctcgatcttcatcctcttcagcatcaccttcttctcccagttctcgagaagaaaaggagagtaagaaggaaagagaagaagaatttaaaactcaccatgaaatgaaagaatactcaggctttgcaggagttagccgaccacgaggaacctttcatgacgacagagatgatggtgtggattattgggccaaaagaggaagaggtcgtggtacttttcaacgtggcagagggcgctttaacttcaaaaaatcaggtagcagtcctaaatggactcatgacaaataccaaggggatgggattgttgaagatgaagaagagaccatggaaaataatgaagaaaagaaggacagacgcaaggaagaaaaggaataataaatatgaagtaagattacaacagagcagaacttgcacccaccattttttttacctgatttttgttttcaaataagaatgtaagcattttacttaaattttactgtttgcaagtagtctatagaaattttgttttaagtcttcaaatatcttgagaaatagtagactgtatgttgaaaattgtactgaaataaagtagaaaattgttacgtaccatatttgtaactatcaacttttaaaacttttaacgtttttgttacatgcattgtaattctgctttgtctataagatatggtcaagtacagctctgtgaaaggtctgattctcttccttccgtgtttgtcaatgttttattctgaagtaaacggtagctctacatataaatcctggaacagaaattggttatagagactacactaattatttttaacgggatacatctggtttaatttgaacaacactaccatcgtagggtggactggaattttttgaaagtattacccccggaccaaaaaggtgg

SEQ ID NO: 48510 - DNA, 382 bp, Homo Sapiens
  misc_feature (319)..(319): n is a, c, g, or t
ttcctatggttcctcttcactgtctgccatgattgtaagtttcctgaggcctccccagccatgtggaacagtgagtcaattaaacctctttcctttataaattatccagtcttgggcaattcttgatagcagtgtgaaaatggactaatacacttgtgtttatctgtaatttaaatttcatgtctttttctccttgccttacatagggtaaagaccaagaaatgccaaacgtgaactaaaatatgtaggggccttcaacttttttacttcctccagtatcttagggaccatcgtaattcttgttaggcatctctaaccngggagggcagctgaggggagggagggggaaaggaaggactggtaaaaaatccccccttcacta

SEQ ID NO: 48511 - DNA, 940 bp, Homo Sapiens
cacttagggcagagacccagccttattcatctctacttcctgatgtccatagtggtgtgtcatgaatttttattgaatgaacaaatgaggtgtatgaggagagatggttttctcctgctcagctcttacacagtgataggtttgttccatgggacttatcataggcctggtgattcttgaaagagcatttttcatgactcaaaaatgagctgagaaggagtgttatggccaggtgcggcgtcatgcacctatagtcccagctgctcaggaggctaaggcagaaagaccattcaagcccaggagttccagcctgaagtatgctatgatcatgcctgtgaataaccactgcactccagccaggcaacataacaagactctatctaaaaaaaaaaaaaaacttttaaaaaataaaatttgaaggctgggcgccgtggtcaacgcctgtaatccaagcacctttgagaggccaaggccagggtggataaacctggggtccagaagttcgagacccagcctggccaacatgatggcaaaaccccgtccctataaaaaaatacgaaaatcagctgccacgtggtggcacacatctgtagtccccaagtagttgagactacaggcacatgacaccaaacacagatgattacactatatgtcgagagatgggtctcctctgttggcacagctggcgttgacgtccgggataaagcgaaacagcggctaaataccagatggggaaaaagggactgcaccgtgaggaagatccaataggagaaggatacaacgtggagagagtcaaacggatgaagacacacatgacaaaaggaaacagtagaacggactactttgacaaagaggaaggaataaacgagagaaatgacatacataacgacgaaaaaaaaacaagaaaaggagaaaagatagcatcggcgacgctgctgcg

SEQ ID NO: 48512 - DNA, 1078 bp, Homo Sapiens
  misc_feature (873)..(873): n is a, c, g, or t
  misc_feature (921)..(921): n is a, c, g, or t
ctgtcaaaaattgattgatcacagttttccaaatatggttctggataagatcccttaggtttcccgaaatttcagcctggcttgttttgtaccacgcaggaggtcattttgggagtttgctctttggattgttcttggtagaagtctggaatctgaatagttcaaccacagttgcatggaacactttgagtgttcaactgcattatgtggtcttgataaatttttaaaaatcctattttgatagtttttaaaagtggaaaaccattacaagagttgagtggatagggaatgtaagaatgtagttttagaaaaattcaattatatttggttatcactggtattgtattgttattgagctaccttgttatcattttaagaaaaataagtttatatactgggaactatgttgggaaaatgttgccatagtaactttattttttataatagaattttctatttttgaccaaacataaaatatttggatatgggccaggcatgatggctcatgcctgtattcccagcactttggaaggccaaagcaggagactcggttgaggccagtagtttgagaccagcctggacaacatagtaagattcatctctacaaaaaaaaaaattagccggatgtgatggcacatgcctgtaatcccagcactttgggagtctgaggcaggaggatcccttgagtccaggagtttgaggcttcccatgagctgtaatcacaccactgcaccccagcctgcgtgacagagtgaaaccctgtctctaaaaagtctgaatatgaaaattatattggcagcatactcagacataaactccaaagttgtctctacactgatttcacatctgcataattttctgcatacccagcangtgaaatttttcagtttttctgggagacaatttttgagagatggtganatagaatgggaagtttaagaagggggagggaaaatgtttttaatgaggagaaccaaaaagttttaaagtcaataacactttgggaaacctgagtggggcagatcccaaggtccagagatcaaaacctcccgggttaactggggaaaacccatttcta

SEQ ID NO: 48513 - DNA, 624 bp, Homo Sapiens
gcacgagctgagtacaaatagcttgatttggctaggcttggctgcagggggacgtgcctaaaagacattccgggcatttgcacttgggaaacttgcctcaccttcaggcttgtggggcctctctatgcccagtgagtccaggcagtcctagcaagtactcaggagagcaggggtgggtgtgacagaggctggctctggattgggggacaacagaaccagagtaactcctcgcctgttgctgctttgcaatgaatttcctttacctttctggaacacaagctgctgtgaaccaaactgatatcaagtgattagctcaccgggccttggttgcttttcaaagatccccttcagccccctgccagagtcactgccccataatcaccatgtcagaagggaccctagggcattcgtgtcctatttatcaatcttcagcaccacctctaagatctctgagagagggtggatcagcctctgtgtaaacaaaaagctgttaggacttgttgcctctcaaggtggactattctgttttctgccaggacactgccattcatgcattgtcagatatttattaaacagcagcaaagtgccagccaatttgtcctggaggaattcatagcctcatgg

SEQ ID NO: 48514 - DNA, 950 bp, Homo Sapiens
tgcatgttacagatttcactactcccaccagcttggagacaacatgtggttcttgacaactctgctcctttgggttccagttgatgggcaagtggacaccacaaaggcagtgatcactttgcagcctccatgggtcagcgtgttccaagaggaaaccgtaaccttgcactgtgaggtgctccatctgcctgggagcagctccacacagtggtttctcaatggcacagccactcagacctcgacccccagctacagaatcacctctgccagtgtcaatgacagtggtgaatacaggtgccagagaggtctctcagggcgaagtgaccccatacagctggaaatccacagaggctggctactactgcaggtctccagcagagtcttcatggaaggagaacctctggccttgaggtgtcatgcgtggaaggataagctggtgtacaatgtgctttactatcgaaatggcaaagcctttaagtttttccactggaattctaacctcaccattctgaaaaccaacataagtcacaatggcacctaccattgctcaggcatgggaaagcatcgctacacatcagcaggaatatcacaatacactgtgaaaggcctccagttaccaactcctgtctggtttcatgtccttttctatctggcagtgggaataatgtttttagtgaacactgttctctgggtgacaatacgtaaagaactgaaaagaaagaaaaagtggaatttagaaatctctttggattctggtcatgagaagaaggtaatttccagccttcaagaagacagacatttagaagaagagctgaaatgtcaggaacaaaaagaagaacagctgcaggaaggggtgcaccggaaggagccccagggggccacgtagcagcggctcagttggtggccatcgatctggaccgtcccctgcccacttgctccccatgagcact

SEQ ID NO: 48515 - DNA, 422 bp, Homo Sapiens
  misc_feature (404)..(404): n is a, c, g, or t
ttctaaacagcttatctgcccctactgtggaatgatgtgacagacatagaataacacttacagtgattctagttcaaaatgaggcaacatggaagggataaagaagtcactgacccaaaatagtttggaaatggagctgggcaaaatccagcagaagtttcttaattaggatcgacagcctgggaccggcccgccgtcctgtgggtctttgcctctgggctgtctgctgtgcatttcttggaaccattattatttatctttttttctcgcacttttttgggtatggcttctatcgcactccaaatgtttttgagattcatccatgttgttctgtgtgtcaccagtttgttcctttagccattccatggaatgagtgtatcacagtttattgatccattcttgtnttgacagatacttgaatg

SEQ ID NO: 48516 - DNA, 365 bp, Homo Sapiens
atgtctcaaatactttcactttcccccatacaccacctaagaagtcaatgcaaattttcacccctttgactaatataaaatgagtattcctggaggcagtcatccccaaagaaaatggggagtggcaaagcaacagggcaaggtgttcctgtttcaaagcggtgaagaacaaaatcgcacggacaattttgagctgcaaaaattggccccaggaaacttctgagcttgggagataaaaggcagaacctggaattgtagcatccaaggacaaaaagaatgtttgccagcaaatcttggctgtcaattttaaaggggccgtgggcggggcggaggggggcgggtaggattccaacaaaaaatgagta

SEQ ID NO: 48517 - DNA, 561 bp, Homo Sapiens
tctcagagatacagacaccataaatatgatgtcagaatttgttgctaatttgccacaggagctgaagttaaccctgtctgagatgcagccagcattacctcagctacaacaacatgtacctgtattaaaagattccagtcttctctttgaagaatttaagaaacttattcgcaatagacaaagtgaagccgcagacagcagtccttcagaattaaaatacttaggcttggatactcattctcgaaaaaagagacagctctacagtgcattggctaataaatgttgccatgttggttgtaccaaaagatctcttgctagattttgccgagatgaagctaattgtgcacatctcgtataatattcacacatattcttaatgacatttcactgatgcttctatcaggtcccatcaattcttagaatatctaagaatctttgttagatattaggtcccatcaattcttagaatatctaaacatctttgctgatgtttagatttttttatttgatgtgtaagaaaatgtcctttgtgtgattaaatgacacatttttttgctgaaa

SEQ ID NO: 48518 - DNA, 905 bp, Homo Sapiens
  misc_feature (787)..(787): n is a, c, g, or t
tcctgggttggaatgtttgtactggtctgtggcggtggttgtcggctgtcctgccaggaaaactcggcactgactatcccactgctgatgctgtaaaagaggtccttctgctatgacgcaactgtggttcctctggttctggggacacttaggcctcgcgtgccgattttcatagttccctgtggctccgagctgagggagccgcggtgtggaacggagggaaccagtgatctcagtgctgaagaaaacagggagtgtgtgtcttcatacttgatttgccttaccgcaggggcataatatgagatatctgggcgtgttaagtcgttcttgatgaaatgtgtcctctgtgaatgtagtctcactgttagactaggaagatgctgttttgctgtgcccagttcctcttaaaagtacagatgctccttgggttgcagccgtaataaacccatcctaaatagaaaacgcgttttaatacccttataaacgaaaaggataaataagcctttgggttctgtaatgtgagccagcattctttgagtgcgtatgtgacaggaaccaaagagaagtgaaggaatgtgtccaagggctcccaagttggcggtggaattagaattgaagcctcagctccaaagcctgtgttctgaactacccggttgcagttcacaaaatacacttttggcagtacttttcataaccgaaaacaaaatgatttaccaaccagttttacaaaaatgcttttggcttttactggggaaggaattcgacaattgttttgaacctaaatttnttccaaaaaattaaaattcttcaaaaaaagcaggccaaaaaaaaaagaaaaaaaaaaacaatatggagaaaagaaaaggacaataataacaaagccaagcaccccaatataaacaaaa

SEQ ID NO: 48519 - DNA, 717 bp, Homo Sapiens
ccacaaaaatctgtaagatcggggccttgaatttgtatttccagacactagtgattctctggtccttgtgggaaaagaccactatgttttgtggaaagagaagccaatgaacctcggagaggaagatctactgtgaccaagagtattgtggaggaatttatccgagaacaactgtagctactccagaccaccggaggcatccaagggacattgccactgactgtccagaaggtgttggcatcccaagcctgccatggggccattaagtttaatgatggcctgagcttacaggaaagttgccgccttattgaagctctgtcctcatgccagctgccattccagtgtgctcacgggagaccttctatgctgccgttagctgacatagaccacttggaacaggaaaaacagattaaacccaacctcactaaacttcgcaaaatggcccaggcctggcgtctctttggaaaagcagagtgtgatacaaggcagagcctgcagcaatccatgcctccctgtgagccaccatgagaacagaatcactggtctaaaaggaacaaagggatgttcactgtatgcctctgagcagagagcagcagcagcaggaaaccaattcgtgctcatggaagatggcattcattagcgtctgcccagagaaggttagagaaacttacttgtttcaaggggatccttgagattacgtaatggattctgagacag

SEQ ID NO: 48520 - DNA, 513 bp, Homo Sapiens
gtgcactgagtgatgtcaccatttctacctgccacgtatcggcgaaggttgggactcgactggtgtttgatcacgatgggaaaatcatccagaaaaccccctacccccaccccagagggaccacagtcagcgtgaagcagttattttctacgctacctgtgcgccataaggaatttcaaaggaatattaagaagaaacgtgcctgcttccccttcgccttctgccgtgattgtcagttccttgagggctccccagccatgcttcctgtacagcctgcaaaactgactcctagaagtaccccaccccacccctgctccttggaggacaacgtgatcactgtattcagctctgtcaagaatggtccaggttcttctagatgatctgcacaaatggttcctctcctccttcctgatgtctgccattagcattggaataaagttcctgctgaaaatccacatctcccctgggtccggtgttctggaagtgagagagacaatgtcacacttcaaggag

SEQ ID NO: 48521 - DNA, 474 bp, Homo Sapiens
caaaatggaaagaactgatacctgctttgtgcctgctgtggttcagatgctctgctctgagcagactatactcactgtctcctataattctcccagcagtcctaagagggtgtgttttccccgttgtacagtgaaggatggtgagccgatagcaggttccagggtcgcacaattcagaaatggcagagctgtgtcaaggcctgcctttaatgtggtgctccccacatgggaccaagccttcctccatgaggaaaggactcgcctgtgcctggttgccctggaaacagcatgttggtttctcctgtggctcctctcaagctggggagcatgaaactaagatacacagttctgagtatcaattggataaataggaaatcacctgccaagaagcctaaaaccaaagagtttgcctcttcctcctcccttccctttaaaagacatccacacaactccagccttataatatggagcatg

SEQ ID NO: 48522 - DNA, 592 bp, Homo Sapiens
gttttgtcatcaagacaaaacagatgcaagatgcatcactgcattacttccatagagttgtaaaataatccttaatattagaatatttttctgtcacttagcaaaagtggttcagttcattgccgcgcccatcatgttcttgactatttgatccactttttcgtttatgtcaaccccttccctctctggctaaataaagtggatgcagaaagctccttaaatggagatatcgattgccttggaatcacaatcctgattttgaaaattcctcatgaatgaagaaaggaatggcatcccttgagaaggaaagtggttaatatacatactgagctcctaaagtttaaattcaggtactgagtgtacaatttcaccaacattctaacccatgaaacttttacactctgtgccaagaaactgttggcttttgtaaggtacagtgctcaacatttgcagattcaggtctcaagaagcagagatgtctcataagcagcattttcccaacagtttagcatctgtacacatctgccttggtcatcagtccactcacagagtaccatactttatcatcacaagtgtctgacgtgaacgaatg

SEQ ID NO: 48523 - DNA, 1098 bp, Homo Sapiens
  misc_feature (812)..(813): n is a, c, g, or t
  misc_feature (815)..(816): n is a, c, g, or t
  misc_feature (819)..(819): n is a, c, g, or t
  misc_feature (821)..(822): n is a, c, g, or t
  misc_feature (825)..(829): n is a, c, g, or t
  misc_feature (831)..(838): n is a, c, g, or t
  misc_feature (840)..(844): n is a, c, g, or t
  misc_feature (848)..(848): n is a, c, g, or t
  misc_feature (853)..(854): n is a, c, g, or t
  misc_feature (861)..(861): n is a, c, g, or t
  misc_feature (878)..(879): n is a, c, g, or t
  misc_feature (931)..(931): n is a, c, g, or t
  misc_feature (940)..(941): n is a, c, g, or t
  misc_feature (955)..(955): n is a, c, g, or t
  misc_feature (1098)..(1098): n is a, c, g, or t
gtttttcctttaaccactgagttgtgaatgtgaagaaggtggtggagaggaacaaaaaacagaaaggtattttgatcttgccacaaagcatacacacaaattggcacatgcagctgtttgccaaagccttctttttttttttactttttaagaaattatgttagggaaaataaattctgcttccagggacaacttcatggagcctatttacaaattaagagtcagcttaatttgtaacatttctaccagagccaagaatcccaaattcctggtagattagtgttttatttctaaggggcttatgcattcggctccaactcaactcgtctatgtgctgccagtaattaaaatgttccacctcagactgcacaaatggcttatccttctttgtggcatggcgtctgtctcaggaaaaaaggttttatgaaattccatggcaacagtcccaacatgtttgagacttcagctaaaggaatggatgtattttggtgtgtagtcttcagtatatcactgtatttccgtaatactagactccaagctatgccagattgcttattcacctttgtgaaagaggagttgctcattacgttcctgaaatatcgcacatcctgttggtccttcaagggaccagagaaagagaatttggaagacaggtattagtagaagagaaaacgagggaaagggagccctttccaccagattagggtttcaagtctttgcagaagagaccaactttttttgttttcttttgttttgagacagtctctcctcgggtggcccagctgtggaaagtcccgggccaccctctaaanntnnccncnnccnnnnncnnnnnnnncnnnnntccnacccnnccccccncccccaagccccacccnncccccccccccccccccgggcccccccccccccccccccccccgcccccccnccggcgccnncccccccctacccntgcggcgcggcgcccgcgcgccccctgcctcccgttgcccgcctccctcttccccttccgcttgtctcccacctctgcgtcccccccccccttcctcccactttcctcctcaactcctcacctcctacttccgaactccccgn

SEQ ID NO: 48524 - DNA, 652 bp, Homo Sapiens
ccgtattggccattatggccgggggcagtgccaggtccggtgttggggtgtccgagttgccgccggagaggagtggcctcgcccgcttgagttttgattcatcatggataatctgtcatcagaagaaattcaacagagagctcaccagattactgatgagtctctggaaagtacgaggagaatcctgggtttagccattgagtctcaggatgcaggaatcaagaccatcactatgctggatgaacaaaaggaacaactaaaccgcatagaagaaggcttggaccaaataaataaggacatgagagagacagagaagactttaacagaactcaacaaatgctgtggcctttgtgtctgcccatgtaatagcataactaatgatgccagagaagatgaaatggaagagaacctgactcaagtgggcagtatcccgggaaatctaaaagacatggccctgaacataggcaatgagattgatgctcaaaatccacaaataaaacgaatcacagacaaggctgacaccaacagagatcgtattgatattgccaatgccagagcaaagaaactcattgacagctaaagctactgctgttcttctttatcatttattcacttccgtagctcctccttgaaagttattaccttttcagag

SEQ ID NO: 48525 - DNA, 594 bp, Homo Sapiens
  misc_feature (555)..(555): n is a, c, g, or t
acgtggtttttgaagtttagtggtctctcctatccctggccaaggaagtatgcaaattgtattgtggtttttgaagtttaggtgatctcttccttctatccctagccaaggaagttcatcctgactccccaacaagcatatcaaaaggagtgtttcgtcacctttttcctcttaccctttacatccttttagcaataaagtgttcagaacaaactggttttcctttactgtgctttgcaaaacttattcatgttttattgggtgactttgtatttacactttcctcagatagtctgttgtcagatgactttgaccaatgattgggaggaaccaaatacagaggattttatcctatgcctaatctatattgtctacagagtaaatcaggtatgaatttgtgaacagtaatgaaacaattttccaactaatcagaagaattgtttgttaagtaaccttaattactcagtttttggtgaattgtttgcggcttaacttgtaaataatttcttattctttttttaaatgtatgaaatatttctagttattttgttcaangtgactgataaaagtttatattggaaaaaaaaaaaaaaa

SEQ ID NO: 48526 - DNA, 604 bp, Homo Sapiens
gaacaggtttcagaagagctggtgaggttacagaaagataatgacagtctccagggaaagcacagcctgcatgtgtcattacagcaagcagaagacttcatcctcccagacactacagaggcactgcgggagttggtattaaaataccgcgaggacatcattaatgtgcggacagcagcagaccacgtagaagaaaagctgaaggctgagatacttttcctaaaagagcagatccaagcagaacagtgtttaaaagaaaatcttgaagaaactctgcaactagaaatagaaaactgcaaggaggaaatagcttctatttctagcctaaaagctgaattagaaagaataaaagtggaaaaaggacaggctaccgttgaacagctaatgtttgaagagaagaacaaagctcagagattacagacagaattagatgtcagtgagcaagtccagagagattttgtaaagctttcacagacccttcaggtgcagttagagcggatccggcaagctgactccttggagagaatccgggcaattctgaatgatactaaactgacagacattaaccagctttcctgaaacatgacaccctcatggcaggatt

SEQ ID NO: 48527 - DNA, 623 bp, Homo Sapiens
  misc_feature (593)..(593): n is a, c, g, or t
cctctatatcttaaattccaagtatgtttaaatttgctagttgcattatactgggtcatgaaaaattatcccttgaaatagatatgaaacatgttacttcatttctggtttaaataacttgtggaatctttcctaatgacaacctgatattaagggaaactaaagaaaatgttattgtggatcccacagtactatattacactgttttttttgtttgttttgttagttttttttatttaaagcaaacctcaaacattattgggtatcaattaccacctggttgtattgaaatagtaacttatcaatgccatgtaaaaattaattccattttcgaagccacctggcagacaggtttagctgtttcatcagcagcctaatatatactgttaaatttgttaaggatttcactttgaaggatacatgcaaaacatatagttactattttcatgagtcctgcttctagctccattgtggaatacagaaaattaaatatacctgttaagttcgtatctaaacctaagacattaccaaggtttgtacaaattctactacctgacatttattccaagaagatctggaaagctaaataaatntataaatttaataacaaaaaaaaaaaaaaa

SEQ ID NO: 48528 - DNA, 649 bp, Homo Sapiens
  misc_feature (30)..(30): n is a, c, g, or t
acagccaaggcttgggtctcacttggactntttgaccagatcagcgggtgctaagtggccgctggcgcctcccacttcgggcccttcctctggaccccagccttagccttgggcagctgaatgggattcctcaggcaggtcaggctgagctctttctgcggctggtgaatgcaagagatgcagctgtacagacactggcagagatcaatccagcaagtgtccatgagtaccagtacccacctccggtgtccagcacatcttcactggaagccaacttcctcacccccgcagttggctttgctgatcccccacctcgtacagaagagcccctcagtggagtcaaggatagagatgagggtttgggccctcaccacagttctgacttgcccccagtgagtttctgaacccaagtgaatgtggagatgagcatctgaacatgcacaggactggggcctatttccagacctacagctttactactccatgttctgacattggatctagaagcatctagcagttgagtacagaaaaccagttccaaccacagctttaccacctcccgttaagtccttaacttttctgtacctcttctgtttttgtaaaacagattaaggattaaatgagtttgtcaggtaaaaaaaaaaaaaaa

SEQ ID NO: 48529 - DNA, 584 bp, Homo Sapiens
cgaatggggacacatactgtattttcaactttgcattctggggtgacactgctgtagagaggttgaacgtgttcattaccatggccaaggtctttctgatcctccacttcattattggcttcagcgtgcctatgtccatcatcacagtctgctatgggatcatcgctgccaaaattcacagaaaccacatgattaaatccagccgtcccttacgtgtcttcgctgctgtggtggcttctttcttcatctgttggttcccttatgaactaattggcattctaatggcagtctggctcaaagagatgttgttaaatggcaaatacaaaatcattcttgtcctgattaacccaacaagctccttggccttttttaacagctgcctcaacccaattctctacgtctttatgggtcgtaacttccaagaaagactgattcgctctttgcccactagtttggagagggccctgactgaggtccctgactcagcccagaccagcaacacagacaccacttctgcttcacctcctgaggagacggagttacaagcaatgtgaggtcggggatattttttggctctgtctctt

SEQ ID NO: 48530 - DNA, 506 bp, Homo Sapiens
  misc_feature (506)..(506): n is a, c, g, or t
gggactctccctgcacagctcagcgggacctcagccatgagacttctcatcctggccctccttggcatctgctctctcactgcatacattgtggaaggtgtagggagtgaagtctcacataggaggacctgtgtgagcctcactacccagcgactgccagttagcagaatcaagacctacaccatcacggaaggctccttgagagcagtaatttttattaccaaacgtggcctaaaagtctgtgctgatccacaagccacgtgggtgagagacgtggtcaggagcatggacaggaaatccaacaccagaaataacatgatccagaccaagccaaccggaacccagcaatcgaccaatacagctgtgaccctgactggctagtagtctctggcaccctgtccgtctccagccagccagctcatttcactttacaccctcatggactgagtttatactcaccttttatgaaagcactgcatgaataaaattattcctttgtatttttn

SEQ ID NO: 48531 - DNA, 657 bp, Homo Sapiens
atcttgtcctgcacacccacatacctgtgcctctgaaggagcagcccccgtttcctgcccactcctaatatgtctcttgagagccctcagtgattttgtgagtgagtgtgactccctgagtttcccttttattccaaacttacatcctaggccacacttggactttaatgatttactaacattttatctgatagcttcatacctaatgggggccacatgtttttcctgtgctcaggcaaaggtgagaaacgccatgtgtctcgtgtctccctggagtgcctgctccctctttggaattctgcttatttggttgccttgccatcttagatctttgatagactcaagaaaaattataatgttggtacactagccaggtttttttattattctttgcagctttctacatcccacatggaagcagcaatgagatgttttaaaacgagatgtttcaaaatcaccatctcactctagtttgtctacaaagccatctatcaagaacattatatgaacttttaaatacattcttctgtatttatagaatgatttttaaagcatttccagccatgtttaaaagctgtgaatagtcttttttttgtaacctagtaaccaaagttattaatgaaagtcacagttaaacttttttcctttgaaaataaa

SEQ ID NO: 48532 - DNA, 689 bp, Homo Sapiens
atcttttaaaaattgagttatcaaaaacttaaattataatgtcatcaactaataccaggtaaatatactaatatatatgtagggcatgattaaattgcatatattttgaaatgtcaaactattttttgtttttttaaaaaaatgaatgcatctcttaaacctgtaccattaattttaaaaaagtttcatttggtatttcatattatattttaaaatatttttctttatctagtagtacaggtttaaagaaactttttctgattgaaatgataaaatatgcctcatttcactagaattttaagaataatacatgtaaaagtataactcatataagattataaatatccacaatatcttctttgattttcatgtaacaccactttttactcattcttttatttgttattattcgaaatcattcacaatgtaaatagcatgtttcatgatgtaaaatgtctttgcatttacagactgcagaacaaggtgaatttgtatatgaaaaataagtgatggaaacgtgggattcttataaaacaaagtggaaatgatagttctgtgttatatttacataattcattacaaaattgtctagttaagtcatgcatttatttaccttaaaagtgtccaaactgtcacttataaaatatttaaatcaataaataataccaaaaaggaaaaaaaaaaaaaaa

SEQ ID NO: 48533 - DNA, 976 bp, Homo Sapiens
  misc_feature (975)..(975): n is a, c, g, or t
cttcaatttgaaatcaccttttctaaaaagtcaattcatctagttaagtcgctgaacaattacctgccaaatgctatactgtgtcatggtgatgcaagtcactaaatttctcagtttttgctgattgctaagggaaataacagtatttccacaatagggttcaaattcctgcaaaattacctaccccagttcatctctgctgaacatttggaaaccatgcactagccaacccaactgacttctgctaggtagaggcatttgtcttagagagagagagagcgcgggagagagtgagagagagtgagagcacaaagataacgcaggagagagagagagaaagaatgagaaagaaaaggaatgcaagagaaggagatgtaatgacagagagttctggtgagatacccagagagaaaaagagagagcagggtggggtaaggaggagaaaataaaccaacaattaggtctgcattttctcaggcagtaggcattctttagtctacataggcaaagttttccattttgtcagtctgagtcatcaaaaagagtcttaattttctaaaacaagttggctagaagaaagtaaaaagaacaacacttgttatgaggggcctgtgatattttcacatcttagttaagctccttaagtttgaaggctgcacactgacataatgtagtgagtgtagactggccatgcaagtggttgggccccatttcagaaaatctcagactctaaaccaccagtgattgccctagcatgctccagaattgtcccgcacttagtcactctggttcgattactgttgcgaaaccagtcccccattatgacaatacccagcggggtctttggtaacatggccgagatgaatcaaaacgggcccttcgggcacgttaaacctgctactaaacaggatgggtaaaacactccaggcaaacaccagcgaaagattatatacaacggatgccttgaaaaaatanc

SEQ ID NO: 48534 - DNA, 960 bp, Homo Sapiens
acacaaatatcacaggcttcagggttaagattgctgtttttctgtccttgctttggcacaacacactgagggttttttttattgcgggtttgcctacaggtagattagattaattattactatgtaatgcaagtacagttgggggaaagcttaggtagatatattttttttaaaaggtgctgcctttttggatttataagaaaatgcctgtcagtcgtgatagaacagagttttcctcatatgagtaagaggaagggactttcactttcaagtggaacagccatcactatcaagatcagctcatggaaggagtaaagaaaatatctcaaaatgagacaaactgaagttttgttttttttttaatgacttaagtttttgtgctcttgcaagactatacaaaactattttaagaaagcagtgatatcacttgaacttcagtgccctcactgtagaatttaaaagccttactgttgattgcccatgttggacttgatggagaaattaaatatctttcattatgctttacaaaatactgtatatgtttcagcaagtttggggaatgggagaggacaaaaaaaagttacatttaatctatgcatttttgccaagccatattgagttattttactactagagacttttgcgaaaactaacttgttccaaaaagaaccccaagttttaaacagcattttgtggggggtacatccatttcttataattgtttcatggtatttccctctggtggcttcaatggtcaagactttttgttcacctttaaatgtttgctgttcgaatgtgattcttcttcaaccccttcaaggggtgatatcccttaggccaatggaaaaatttttggccactgattcaactcaaactttcactatgtgtgcgttctgactgctgttaactaatgggcaagaaatttctcacacattgaatagagaaaaactctcatactat

SEQ ID NO: 48535 - DNA, 612 bp, Homo Sapiens
gggctcatgaaccgactgagacatggttgagcggctaagatttctgtagctatgatgctgccatccaggccgacttcagacttgggaagtttccatggaagaatatttctcagccctccgttctcaagacagatgagtgctttagaaagaggactctgcagcggcgaggaggatggaatgacaggcaaagcacgcaggaccaggagatggcttcgctccctcaatcactcatccaaagacgtttaatgagcacctattgtgtgtcaggcattgtaccgggcaatggggatatcgtagtcagtaataagtgaggagagatgagttcatttgtgagaggctctgaccagtggaatcagaggaagggagttcccctgggtgggccaggttcaaagacattttggaagtagaatctgcagaacatgatgatcttttggaaacagggcagggacgtgaatgagcacgtaatgtccccatgggtttgtctttccgaaggtttaaaatcctcaagaataaggaacataggcatgtgtcgtaacggtctccacagtgggggagtattatgttagtgcacctgcatgttaactctgctcatgaaggggccacgtcttcacc

SEQ ID NO: 48536 - DNA, 780 bp, Homo Sapiens
agtaaagaactggaatacttatttttcatataaaaatctaaatgtgttaataaatcatttcatacaaaagtacattattaaataaccacattattaaaataattgcaagaaaatggaccatatttacaatgttttgtaaacttgctagtgtgtggatatgtaccctacttgtgaaatacatttgaagatataaagagcagccaaaatgatggcaaaatggtaggctaatattttctattattattggagaacatatcatattttggaatcatgcaattttgcacacagtgaaaccattaattttccaaggtaattcctttagaatatggtattggcatgcagtttcttacttatctagaatatttggcttatctgaaagatatcaatttaagatctctggaagtgttagaatttttgatccttcacagtgtcaatatttaatgaatcactaagctttatttattagacgtgttgagtgagtgctgagttccttgctgccacttttgttaccattgtcacacactatgtgtaaaccagtcccaccacttattactaataaaattttgactgataatttatatttgcacttacaatatatatatcctgtccttatatttctctagagtacattttccatcatgtttaagtgtatttctgctattatttcctctcctgcagaatacatacaagtgtatgtgtataaagtcatacatgtacaagcatgcatattgagattgaatcacatttccatactgtctgttattttattgggttttatat

SEQ ID NO: 48537 - DNA, 596 bp, Homo Sapiens
  misc_feature (596)..(596): n is a, c, g, or t
tctagcgaggtgacagcgtagaaccaaaatatcaggcatgatccatcgcacccggccacccatgtattcttgattgaaaacatttgctcatgtcttagttctacagctgaccttctttcactgttttcaaggtcaataactgtgtgttcacacttctgcattttataaatgttactgtgattttcttgtaatgaagaattaaatgttgggagtcaatggcatcagaaccttgcaaaagaggtttttttagcccaggtatgtggaagacacttctttaattttcaataatgggtgtgataaagaccaacccttcccattagcccttccaggcccacatgtaagaattcagacacatcttttcactcatctcagaccttctcagggtaactcggtgaaaatgtcttcactctgagcctcagtgagcctccctgcaacttgcagatgaggggctagaccggaaaagctcaacctgagtgaccctggcccctgaaatgattggcaaaatagagtgggtgtctggatgtggcttttttttctgtgagaggggactgccttgataattaaggagtactaataaaaaaagaacatgaccattn

SEQ ID NO: 48538 - DNA, 397 bp, Homo Sapiens
tgaaattactccgcaaacgttcacaagtctggaaaccaaaggtaattcgtatttctgcccgaagtggagaggggatctctgaaatgtgggataaaatgaaagatttccaggacctaatgcttgccagtggggagctgactgccaaacgacggaagcaacagaaagtttggatgtggaatctcattcaggaaagtgtgttagagcatttcaggacccaccccacagtccgggaacagattccacttctggaacaaaaggttctcattggggccctgtccccaggactagcagcagacttcttgttaaaagcttttaaaagcagagactaataaaattcatcctgtataataattttacatatcatttcataaagtattttaataaaaaaaaaaaaaaa

SEQ ID NO: 48539 - DNA, 663 bp, Homo Sapiens
ctggagtgcagtggcgcgatctcggctcactgcaacctctgcctcctgggttcacgccggttgtcctgcctcagcctcacaagtagctgggactgcaggcgcctgccactacgcccggctaatgttttgtatttttagtagagatggggtttcaccgtgttagccaggatggtctcaatctcctgacctcgtaatctgcccgcctcaacctcctaaagtggtgggattacaggtgtgagccaccgcgcctggcctaaataaaaagtcttgaaatggaagatattcacctaaccctcaacaaaccatgatgtaatgaagcacgaatcacaccattttgtctctttcctaattcaaataggtccctggcattagttcatgccgagactagaaaactgaaccctagtactgttttttaaaacagttttaacagaaaattaaactgtatgtttgaaatcataagtaaaagtttgttgcttgcataagagtagcctcttgattctcatagtggtaattttgtgtcatatcatttagatgttgaaccatttcatttgtgcatgtgtatatgtgcccaaattcatcctctttgtttagaatctgcttacaaataaaactaatagaatctgaatacatttatcatatattcttccagggtttttcttaact

SEQ ID NO: 48540 - DNA, 570 bp, Homo Sapiens
cagcgggcgtcctgtagctgcgccttccgaatccagcccagattctcctaccagctgcttgggtcacgtcggtggaactcctaaagggatgccttcaaaatgtgtgaataagcttcaatcagactgcccttcccaaagaaaataactataaatgctggaaaaactacaaaacagccacctgaaggcactggcgagagacaaaagcaagcaaattctggagaagagtcaacacttggaagaagggagctgcactgggtacatggggaaggaacagtgtctctgcatgagaatggccaaagaacaagatacatttccccgtggagagcaatcctagagagagggaagcatgggtcagaataaggtgtactggccccagggtaatagcatgtatttctgttgcattggtgtttccaaaataatgcttcggttccaagtttcaggaattggttgggggagcatggggatcatacagtgattcaggagcttccttgcaagtaagtgagtgagccaatcaaataatttatgtttaaatctttcactgtgttaaatgttgaaaaataaagcaagtga

SEQ ID NO: 48541 - DNA, 511 bp, Homo Sapiens
ggtggtgtttacagacgactttgacaacagtagaagtgtactcagtggtgtctgtgtatctgaactatttaatttcgtgttatgtttatatgcagaaatatttatggatactacaccaagtgtttatttaatgttgataaatatgactcttcagtcgtcagccatggtgtcctttcaaagtgattctttaaggtccacttgagcaatgaatagagtatattggagctttcctgtggctaagaagaagaaacatgtcatcctgttggcatcaccaagcacctaactctttctaggtaataaaaagtcaacggtcacttcaacgtaaatgtttaaaaccactctttagttaaatctgatgggaactgaacaaagctccaccattgtgtctgaaatcattttacacagggaaaaaaaaaacaatcagcataattgtaagaatgatttttttgggcccacattcaaccaaagaacaagaaagaaacagacgattttctaatatgtacacagcaaa

SEQ ID NO: 48542 - DNA, 612 bp, Homo Sapiens
cataaacaaagagaaaagacttcaactctctcggatgctcaacctcactgaccggcaagtcaaaatctggttccagaatcgcaggatgaaagaaaagaaactgaacagagaccgtctgcagtatttcactggaaaccccttattttgagagctccaggaagcgccctcaccccagccccactcacccaccctccttcccaccagcctgctctccgcaggcccactgtccttgggtttaatgacgtctcttctctgtggaacttcacgattccttcccacggtcaactcgggacctcccagcgaccactgcagcctgcggacgaggccgggacttggccgagcggatcctaataaggggaaaatggtaaatgcaaacgtccctttacaattttaccgccagtgtgctgtcgttccccctccccctctccgagtcctcgtggggacacggcggggtctgtaggaagttgggccgggttgggggttgctagaaggcgctggtgttttgctctgagttttaagagatcccttccttcctcttcggtgaatgcaggttatttaaactttgggaaatgtacttttagtctgtcatatcaaggcatgagtcactgtctt

SEQ ID NO: 48543 - DNA, 761 bp, Homo Sapiens
  misc_feature (609)..(609): n is a, c, g, or t
atgcatcgatgaaattgagaccataatcagtgttaagctccagctcatggaatgtcggtatggaattgcaggtctgacgatcttggcatgatattcagcatggtcctctgctgtgcgatacgaaactcacgagatgtgatatgaagctacttctacatgaaaattgcaatctaaagctttcataccaaatgtcacaggagctgtctcccagctcatttttaacactgaaatgacattaggatctaaaataatttgctgtcaattgtacatttgcatgagtacgtatgtttggctcattactggtttaccccttgagtgaatgcctgtttatgatgaactgagagcatattcatgtgtgatctgcgtgtttctggaatatgctttatacgtaatgaaatctgtttgctgggaattcctgattcttgttatataagaagaacaactatttcgctccagaaaaaaaagatcaaagagctttcagaaacttgggagaactgggtatttagaacaagtgataatgggtcagtttctcagactgtagcattgaaattagatgcgagaatcagagattcttcttatgggagtatagctgtagaatgggagatccangggggttaaactgatggtctaaggtgggggtaagggtccggggtttaaattatggttcccggaataggtaaaccagttttaatttccttgggatatttgtgggaagcctgggaagggggggcaaaaaaaaaattttgggaaaaaaagtgtta

SEQ ID NO: 48544 - DNA, 730 bp, Homo Sapiens
ctgaagtgggagcggcccgcccggctggttttttgtatttttagtagagacggggtttcaccgtgttagccaggatggtctcgatctcctgaccttgtgatccgcccgcctcggcctcccaaagtgctgggattacaggcatgagccaccgcgcccagccccaactattatttttttaaatgatcttataaaacacaccagtatgattgatcctctgctttttaaaataattttactcatctagaaggaatctccacattgctttttaagactaagctctgctattgtgattaaaataaaattttattttctaagatggatgtatgcacatttccaaagaactggtattacataaagcgcatctgtgtggttgctcaaatcttaagtacctttacaaaaaggagaagattcattatgtaggagaggttgtactgctgagttgcctatggttctgagttaattgcacccacagtcactgcactgtgttgaaaaatcaccaatttaattagcagatttcctagacagtgactagactgaccttttatatgttaagctttgtaaacacatttaagccgtgatggaatcgaagtgctagctcagatttattgaaataaatatagctcttgctgttggcaacaggaattatgagaagcagtcttcataagaagaattacatttttatatgtctgttaagaaattaaaaaaaatttttttaaccataagatcttag

SEQ ID NO: 48545 - DNA, 687 bp, Homo Sapiens
  misc_feature (6)..(6): n is a, c, g, or t
atgatncggagtttgggcatcctgcagccattaatgatcccaagatagtggtgtataaggaggccgagaagagcccacagctgggactgggctgcctctccttcccgccgccccgggccggggccggccctctcccgagctcagagagtaaatatgagatcgcctctgtcccagtctccttacagacactgaaacctgttaccgacagagcaaacccgaaaatcggcataggaatgctggcatttagtcctgacagctacttcctggcgacaaggaacgacaacattcccaatgccgtctgggtctgggacattcagaagctgaggctgttcgcggtgctcgagcagctgtccccagtgcgcgcgtttcagtgggacccgcagcagccgcggctggccatctgcacgggaggcagcaggctctacctgtggtccccagcgggctgcatgtcggtgcaggtgcctggggaaggcgactttgcagtgctctctctgtgctggcatttaagcggagactcgatggccctcctcagcaaggatcacttctgcctctgcttcctggagacagaggcagtggtcggcacagcctgcagacagctgggcggccacacgtagcagcggtgcactaacgtgtgcagaaacagggctactctgtgtttccagtgtgggaaaaaacacagcttcacca

SEQ ID NO: 48546 - DNA, 767 bp, Homo Sapiens
  misc_feature (26)..(26): n is a, c, g, or t
tagggtcagaaaatataaggctcagnaaggatccagaataatttcctctaaacccttcattcacagagtaaataaaatgaagctaccaatgtcacaggtagctaaagttagggcttggtctagaaatctcctccttatttaaattttctttattctccactgaacaaagagaaattggaagaatgcaagagatctccccacttcagacctacagtccacctcgccacagccagtcttcaaaagaggcaggtggagagccacgtgatggcattttcagctggtgcaaaggatcttccctgccctttcagaatgccccttcttcatgcctgcctccctggctcacacagaataaatccactcctttgagcaaagacactctatcctgagaaggagtcatctgcaaaattgtatgcttttataaaggccaggccaccatcaaacattaacatgccaatataggtccaatcaagcaaagctgatttccaagaataggaagctggactaacgcagatgacttgaggctccacacagggcttgcacacaactggagtctacagatatcatttggcttgaaaagaattgaatcatattgatttctagacaaggatcctaaattgtattgcctctagaccttcagctagtacctaaagcaaaatcaattgctctagggaaaaacaagtttgtaaggacaataataacatgcaagtaaatacgtttttactaaggaatgggagggtctctcacaccaaaaagaaaatggtttacta

SEQ ID NO: 48547 - DNA, 783 bp, Homo Sapiens
gcaaaatcacttgtttcggggtgttagaaccacatttaggcgagaagatcacttttggggagcttgggaactgaggcaggccgcaggtgcagcagaggcatgagcttgcccgggcccgccctcttgtctatgctcatggagtgaaggaggggccagcggaatggcccaaacaactgatttgtttttctttttttaaatctttttcagacaaataccattgtgtttaagcgaaatgtgtgtataatgccaaatcactgtaccccacaaccctgcacacctctacactggactgtaatttcttgttcctagtttgtcttgctagactgtaagctccgtgagagcagggaccgtgtctgcttgttgagtgggctttcccctgtgcctgccagcatgcctggcatctagcaggtcttctgtaaagatgggatgagtttgtaaaccctccagcctcaggagtggctccatcctctgaggctctggggccctctggcaggctagtcatttttctgccatgtacgtacaatgctttattttcatgttgtattttcctttctagccagtaagcaagctcctaatgagcaagtttctttgtggtgttatctctgtatcctttcatcaggccagcccagagtaagtagtgcttcgaaagtgtaaggtacatgaatgaatcatggtaacccagcccagttctggcatcactgtctgcaggttagtctaattccagatgagagccccagattcgaaaaaagggaaagattatccagaagtgcatatggtcgtata

SEQ ID NO: 48548 - DNA, 461 bp, Homo Sapiens
atttttaatagagatggggtttcaccatcttggccaggctggtcttgaactcctgaccttgtgatccacccacctcggcctcccaaagtgctgggattacggagtgagccaccgtgcccggcctagaatctatattcttaaccatttgtagccatgatggcacacgttctattttatattctagctctagacacatagaaggtttgtcatagttgacattataatttatgtaactattgctgccagcgcctaaatcttccatataagaatttgcaatgatttgattactatttgttaagtaaataaagcatttaaaaagaactattataatcctaaaaaatcccattatggttatgaagacactattcaagcatgaagaacttcctatgtggcaagtttaagcttttccttttgtgttttcatttcagatgtcagtactttgtgtgccccttgaaataggg

SEQ ID NO: 48549 - DNA, 543 bp, Homo Sapiens
ttgctctcccacctttcatttcttcctccaggctttactcccctttttatgccccaccgatacactgggaccaccccttaccccggacaggatgaatggatcaaaggagtgaggttgctaaagaacatccttttccctctcattctacccttttcctctccccgattccttgtagagctgctgcaattcttagaggggcagttctacctcctctgtccctcggcagaaagacgtttccacacctcttaggggatgcgcattaaacttcttttgcccccttcttgtcccctttgaggggcacttaagatggagaaatcagttgtggtttcagtaaatcatggtcacctgtatttattgctaggagaagcctgagggtggggggagatgatcatgtgtgctcggggttggctggaagccctgggtggggggttgggggaggactaatggggagtcggggaatatttgtgggtattttttttacttcctcttggttcccagctgtgacacgttttgatcaaaggagaaacaataaagggataaacc

SEQ ID NO: 48550 - DNA, 728 bp, Homo Sapiens
  misc_feature (698)..(698): n is a, c, g, or t
  misc_feature (700)..(700): n is a, c, g, or t
cttgcttagtaattctgacttttgtaatctcctgtcgtgaacaaatctacactgcactttatttcttgccccgtcctggaattcagccactcctgcactacatttcttaaggtgaagaagtgaaagacgaagacaccaatccaagtgaacgtgtgttattctcttctataatgctattgtattatattccctcttttttttttttaaattctcttgatttctctgcacaaaagagggaaattcttccaaagcaacggaaagtttccttgaaatacttttatctagtcacacttacatagtgtaatgtctctctcttacagcattgtacagtttgggatttgtttttaatcctgtggaaaatgtcctaacagggctttggtgtatctttgttccaatttctacattgcttggggagggggagaagctttctttgtattaaatgaaatacacctctacttcattaaataaatagacacctcaaccattagttgctaatgaaacaaaaatctaagtaaaacatctaactatccaaatactacattttctctacctttgccccaaaatgtgcctcatctccctgcacctccaaataatatttctagtgttttcattttattagttttgcaatgtcactgtccagatagaattattcgatgacttaaaacaactttcgtaagattttcaagccctaaattaananatcatatttcaatacaaaaaaaaaaaaa

SEQ ID NO: 48551 - DNA, 766 bp, Homo Sapiens
gggaacttcttgctaaacgagcagagcttcagaaaaaagtagaggaactacagagagagatttctaaccgatcaacctcatcctcagagagagccagctctcctgcacagtgtgtcactcctgtccaaactgttgtataaaggactgtaagatcaggggcatcattgctatacactcttgattacactggcagctctatgagtagaaagtcttcggaatttagaacccatctatgagagaaagttcagtcactttatttattttaaatctctctaggatgagtttagaactgtagcagtgcaggtggcttaagtgaagtaactccatatgtaattacatgattatgatactaatcttttaagtatccaaagaatattaaaatacttcaatcctggattcacagtgggaacaagtttctattaaaaggcaaatgctgttacaaatttttggcatctggtaatattaaaaccattttagaaatacactctgtgctcactgtgcagaggaacatcagttttcaaaccaacactgaaattctgtggcatcacatatattgggccttgatgtcatgacagatcaaaatcatttgatatccctttctccattctaggtttttcttttttttccagtaactgatttacccttgatcactttttcaactttccatatttcttcatatagtaaaaaggcaaagtggttgaaggatacttacgggtggtgggtagtagtttgaaaaatttattgcccgttcattttattttacatt

SEQ ID NO: 48552 - DNA, 619 bp, Homo Sapiens
cttttttttgatgctttataggaaactattttttaaaaaaagccatttcccacccaaggacacagtggatgtgttttccctgactccagcagggcaaggaatgtagccgagaggttgtgtgggctgggctctggtgccctcttccctggccaggacacctctcctcctgattcccttggcaccttgtctttctgtctgtttacctgtctccctgcctgcccatctgcatcttttgcagcccactctgacttccatctgggggctgagaccacccttgcctgcccccttctttctgccttaagaatgtccttttaggctgggcatggtggctcacgcctgtaaccccagcactttgggaggcggagacgggcagataacctgaggtcaggatttcgagaccaacctgacctacatggagaaactccgcctctagtaaaaatacaaaattagccgggcatggtggtgcacgcctctaatcccagctactcgggaggctgaggcaggagaatcacttgaacccgggaagtggaggttgcagtgagccaagagtacaccactgcactccagcctgggcaacagagcgagactccgtcttaaaaaaaaaaaaaaacctcgtgcc

SEQ ID NO: 48553 - DNA, 640 bp, Homo Sapiens
tttacgttgaagatgcattggtttttgcttattcttaaagaaaagattcaggattgtgaatttgtgactgcagctttaggcgtatcccaaggttttcagtactagtttagtttttgttgtttttgtttctaattatccttttggcatttccttatcaatataagactttttaaaattcaagtgttttgattcattttatccaatttttggttactaatttcttggtttctttgtgttgtggtcacatcatgtggcttttacacacattttctctgttttggggatttgcttacttttttttgtagtcgtgcaagattttttgtgaaaagaaaaactgtatcaagttcatcacctttatcaatttgacctgtgccgtgaacttctttagattcatttgattcaaatggatctaagtattttaaacatttagaatactaatttaagcaaggcttgaaaattaaatggagtaaaagcaataaaaaaatcaatattagcctgggcattggtggctcatgccagtaatgccagtactttgggatgccaaagcaggaagatctcttgagcttaggagattgagatcaggttgggcaaaaacatgaaaagactaaatcacatctctagcaggaaaaaaaaaaaaaaa

SEQ ID NO: 48554 - DNA, 413 bp, Homo Sapiens
cctaggcagatggagcccgtgacctctcacctacccacctgtttgcctgccttcttggtgcgtttctcggagaagttcttagcctgatgaaataacttggggcgttgaagagctgtttaattttaaatgccttagactggggatatattagaggaagcagattgtcaaattaagggtgtcattgtgttgtgctaaacgctgggagggtacaagttggtcattcctaaatctgtgtgtgagaaatggcaggtctagtttgggcattgtgattgcattgcagattactaggagaagggaatggtgggtacaccggtagtgctcttttgttcttgcttcgtttttttaaacttgaactttacttcgttagatttcataatactttcttggcattctgcaaggaacccacgcgggta

SEQ ID NO: 48555 - DNA, 721 bp, Homo Sapiens
  misc_feature (559)..(559): n is a, c, g, or t
  misc_feature (602)..(602): n is a, c, g, or t
  misc_feature (633)..(633): n is a, c, g, or t
  misc_feature (638)..(638): n is a, c, g, or t
  misc_feature (646)..(646): n is a, c, g, or t
  misc_feature (657)..(657): n is a, c, g, or t
  misc_feature (691)..(691): n is a, c, g, or t
ctgaaagggaaaaaatagaaatgagggcattttgaagtttttagaaaagagaggaagagctgttggccagatcaaagagatacttataagcccggcacaatttttaacataagtcattcctggctattaagtaaaatatttcatgaaccagaagtcctgtttctctaatattataatttgttgaggtttgtgtgtgtgtgtgtgtgcatgtgcagacacatgtacacatataaattgaatacaaaaatagctctataacaccaaaaaacagagtttacagaaaataaacacaaaagctatatctgcaagacaagtttgattcatctagtttcatatagtttcatatagtttcatttttattaatatttaggtttaacttatagttctgcaattatttaaaaaacaagtacagagcgtttgattaaaaaaagtcaacaaatgtttcaaaacagcttgtacaaatgttataaaacatatttaatgattaagaaatgtactagactcatcatttacttttaaaacattaattagaaaacaggtgatatttaagccatttaanctattggccaaatgccaaaagttcttttccctaccttggatcnaataatgatatggcccatgtaacgaccagtngcccnggtttttnccactcatggntttgggaattttacctcctgccgggggaaaaatnttcgttgtccttccttccggccatttcccc

SEQ ID NO: 48556 - DNA, 876 bp, Homo Sapiens
gcgcttcaggaggactgtgctggttgttcccagaccaaagagagtcacttttgactccatcaacttcaaggggacagagcctaggcagcagattctcctaatttttaacactaaaattcaaggaagcagtggaggaaagaatgcattactaccacagatagaaataggggactcatagaactctcgactagtacctgtcagctctcaaatgcattcttgtgtctttgcttgagctgccaaagaagggtcacaaagtgttcttcctcatggaagaagtgcctcggggttgcagggctgcaaagtgacaactgcactgaatgacactttattttttggctttggcttattatttagcactgggaggcccaggggaattggtgattacagtagcactttgggaagttaaagccccctttgggcttgctttggagagatgatggcatgcttggtattccatttggataatcaggaagcctccctagtccatccatattgtgtcagagtgggattaacaaccctggaagagtccactgccaaaagagtagttgctttcctggaatttccaaagcttttggattttctggatcaagtaacccactttttaaaacctgaggtcaggagttcgagaccagcctggtaacatggtgaaaccccgtctctattaaaaatagaaaaaattagccaggcatggtggcgggcacctatagtcccagctactcaggaggctgaggtaggagaattgcttgaacccaggagacagaggctgcattgagccaagatcacaccactgcactccagcctgggcagcagagcaagactccatctcaaaaaaaaaaaaaaaaaaaaaaactcgaggcatctatgtccgggttgcga

SEQ ID NO: 48557 - DNA, 675 bp, Homo Sapiens
  misc_feature (659)..(659): n is a, c, g, or t
gcggccgcggctgtaggctttttttttcacatagatatctttctatgacctagttagttactgcaattcagaattagttcacattgcaaaagaattacttgttgtaagcaaaatgctgaaactaccaaaccagtggatgaagaccactaagaactttgcacataatcatacaatcttttgaaaatattttgcaaatatgtgtttagacaataagatggactagagttcgacaaaatgatttctttatttaaattttgtataagtattttcttcgacactttcaaattatattgtgttcttgatatatgctgtatatttatttgttagtgcatgtgtttttaatttacatgaaaacatgagttaggagaaattacaggttgaaagatgaaatgcctgtatgtgctctgaagaaatggtaattccagattgtgcagggggaaacaaatctattttgttttgttttgttttttgagacggagtcttgccctgtggctgggctggagtgcaatggcgcgatcttggctcactgcaacctccgcctcccgggttcaggggattctcctgcctcagcctcctgagtagctgggactacaagcatgcaccaccacgcccagctaatttttgtagttttagtagagatggggtttcaccatgttggncctcgtgccgaattct

SEQ ID NO: 48558 - DNA, 738 bp, Homo Sapiens
gcttttgatttgctttgtgaaaggagataaacgtttcagtaattgtcagagcatttgttgcctcaggctgtgttacctcaatttcagagtaagtagtggttgattagtaatgtagtatacactggcagacatctagaatagtatgatgctttacatttaaatgaggttattcttttaaggacttttatttgtatgttttctgtaaggaataataaaataattgtaattaaggaatataccatactatattaaacacattcttcctatttgttagttatacactaaattcacatcacccgtgattatttcagttcagagataagtgaatcctcttcatgaccctgagtctttgcctggttcttaagaatcactgtcctttagttaacgccctgtgacctgaaccaatcactctatacatctttagatacgttgtctgttttcaaatgggcatggcaaggatgcatacatttccctcctttatcaactagaaacagtacattgttcaggaaaacatgagtgttagaattagaaagagatccaaattgtagttttgctgcccgccaccacgcccgtgtaattttgtattttagtagagatggggtttcaccatgttgtccaggctggtctcaaactcctgacctcatgatccactccctcagactccaaagtgctggaattataggcgtaagccaacaaccagacagaaagtggttctcatgatgcttctcagaccggaaa

SEQ ID NO: 48559 - DNA, 380 bp, Homo Sapiens
ggtactagaacaagattacagtatagggcttatattgtatgagtcttagagaagttggattctacatagctggtggccttgtagctgtgtcaaaaaaagaactggctaaatacagacatttgtaaaacatagtcatgcttaagagactagggaaatgagtaacagtagaagaatttgtctttctctctctctctctctttgttttccttcactttgttctggaatttaaaaagtgtctagagcccattactttagccttagcttttgggacagcgttatcttataactttccttgaagtgagctgctaagcagaagaaaacttgtttctttttctttttaacctttaccacaattctgtgggccaaagggatcaggagac

SEQ ID NO: 48560 - DNA, 584 bp, Homo Sapiens
cctcaagactatcagtgtgacctccccgtaacaagagaaccccatatatagtttgagactttcccttgagaaacttatactaaaactattactcatcagtcattcactgatcagcagctaaagtccatgagaccaaatggttttatatggaaccaacgaagtgggagctaaaactgcacagtggtcattctttggcctctccttggctttatgacttaaaccaactacaacttccctatagcttctaagcagtttcatcagcattacttgggaaaacgtgttgcaagtcaaccagtcactaggatatttctacccatgcaacggaagaaaaacccattactccagaagagtatatctaagtaactaaaatggaggcagaaaatgttttaaggattttcttcaaagaataagccacagcaatggttttgtagaaaactcctgtgcttttgagcaaggacttttgccctctagaaagcaactgaggccaggtgcggtggctcacgcctgtaatcccagcactttgggaggccgaggtgagcggatcacctgaggtcaggagttttgagaccagcctggccaacatg

SEQ ID NO: 48561 - DNA, 721 bp, Homo Sapiens
gttgtgggggcttttcaagaggggccaggcttcctggagggtgactgatgtggccgaagcaggtgtccaggcaggtaggctgcagccaggagctccctggcaccgcaggacctcgtggtactcttgccttagattttacacacactccacagccaagcactgccacggtcctccaggacctgggaagcaaaggcacaggcccacggtggccagccattgtggtgccgccccagcttctggatacagccttttgggtaaacactgggaactccagaagttgtggggagagtggggaatcagacagccgcctctaggggctgggttctgctggggcctccttgttggtgctgtaggcacccgccagggagcagggacccgacttgcagacgcattgcccggtactaggaaggagtgaggtgtgttcccaccgtacacttcccacacgagctgcggctgccagcctcgggccatcagcctaggagagcagatgcagctccaggggctcgacttatagccagttacagctccccggctcttctgtgtggcagagcgtcgtttccgggccctcagggctggggagctcagttcccattgcttgtgctcagggctgagtcttaaagaagggtttgccggccctaacgctgcagcgcgtgcgcggtgagaggccctttttgagcctgtttactcctgtggccttgggcagaacagtaaatactctgtg

SEQ ID NO: 48562 - DNA, 471 bp, Homo Sapiens
tgaccgtcctgggtcagcccaaggctgccccctcggtcactctgttcccgccctcctttgaggagcttcaagccaacaaggccacactggtgtgtctcataagtgacttctacccgggagccgtgacagtggcctggaaggcagatagcagccccgtcaaggcgggagtggagaccaccacaccctccaaacaaagcaacaacaagtacgcggccagcagctatctgagcctgacgcctgagcagtggaagtcccacagaagctacagctgccaggtcacgcatgaagggagcaccgtggagaagacagtggcccctacagaatgttcataggttctcaaccctcaccccccaccacgggagactagagctgcaggatcccaggggaggggtctctcctcccaccccaaggcatcaagcccttctccctgcactcaataaaccctcaataaatattctcattgtcaatcag

SEQ ID NO: 48563 - DNA, 542 bp, Homo Sapiens
taaggagcatttagcaatgatggaaaggattcttggacctctaccaaaacatatgatacagaaaaccaggaaacgtaaatattttcaccacgatcgattagactgggatgaacacagttctgccggcagatatgtttcaagacgctgtaaacctctgaaggaatttatgctttctcaagatgttgaacatgagcgtctctttgacctcattcagaaaatgttggagtatgatccagccaaaagaattactctcagagaagccttaaagcatcctttctttgaccttctgaagaaaagtatatagatctgtaattggacagctctctcgaagagatcttacagactgtatcagtctaatttttaaattttaagttattttgtacagctttgtaaattcttaacatttttatattgccatgtttattttgtttgggtaatttggttcattaagtacatagctaaggtaatgaacatctttttcagtaattgtaaagtgatttattcagaataaattttttgtgcttatgaaaaaaaaaaaaaaa

SEQ ID NO: 48564 - DNA, 501 bp, Homo Sapiens
cagtgccagagccagagctggatccggggccccagccggagccgaaacctgagccagagtccgcggcgggcgagcccggagcccacgagccgcagacgcagcgctgcccaggtggggagaagtgggcaggagagagggccgcccgctgctccccgctgcgtccagggatggagggccccaccacccatggaattgctggcccctctgcgtggcccgggacttcagccgtggcttcgcgtcaagagggtatttttcctaaacgaaaccgcttcgttcgttcgttcgttcgttcgttcgggcagcaatgccgcagaaaagcagcagacgtcggtccgcgccctggctctcttcgccccggaccccgacgtcccgccgcagcgctcggaggtgcccccagcccaaggcagcctgctctcgccggcacaggtcgggctttttcttcccaggagagaaaccccaattcccttcgtaacgtccaataaagacattcccgcggcttca

SEQ ID NO: 48565 - DNA, 644 bp, Homo Sapiens
  misc_feature (499)..(499): n is a, c, g, or t
  misc_feature (586)..(586): n is a, c, g, or t
  misc_feature (601)..(601): n is a, c, g, or t
  misc_feature (604)..(604): n is a, c, g, or t
cattctgctatgaattatttatataagccaaagctatatgttgtaactttttttagagaatagctttatcttggtttacctctttagttttattttaagaaggggaaaacaaaaatatcttgcaagcagaaccttggaaaaaaaagccatgaacacttattctaaatgtaaattaaaagttgagccaaactctttgtgtatatagcatcttaaatatattatcacctttgatgtaagtacctatgtattgtatggtcaccagattaaaaagtatatttttgtggattgccgccaatctggggggaaaaggcgaggtcctttattaagtattcactgtttaatatttactattttgttaaatatactgtactttggattttaattattagcccagttttttcagaggattgtataaaggggtttctcccctcactggtggtgaatgtgtgatgttacattgtaatctttgtgctgtatgggttgagcatcattatatatnttgtatgtgtacataaatagcaaagtggcaaaaaaaaattggtgttaagttcatcctgcataagtataaaatgtgttgtaacagatnttataaggcattatntanaacttgccttttgtgaggaaaaaatgtagtagaaaaagct

SEQ ID NO: 48566 - DNA, 425 bp, Homo Sapiens
aggcacacgaccaccacacgagcacgtgccacgcatgcctcgtgtgctcatctcacacacacacccctcccgggtcacgcagacaccccccccccacacacatctcatgccgtacacctgaggctgctcacgtctcacgcccagtgttggtgcacatttgcctacaacatgctgccctctccacccacccagggacaccccacggctcctccctgcccctgcccctcccccagccttgaggtgccctgcccggcggggctggtgaatatgcaatgggagtcccaggctgtacagtggtgagtgtgtgtgtggcgtggcgtgcccgtccccagggctggctggtgcccacgcgggcgctgtcatgtgaagctcgtgtcctgactttgtcttaagtgcattcacgcacttactcttggccttatgta

SEQ ID NO: 48567 - DNA, 506 bp, Homo Sapiens
cgcctgtaatcccagctacttgggaggctgagacgggaggatcacttggactcgggaggtggtgggtgcagtgagccgagatcgtacctctgcactccagcctgggtgggtgacagagtgagatcctatctcaaaaaaaaaccaaaaagaaaactgaatcatggactgtgtgtattctacactcttaacatgaactctgagactaagcttttataacatgcaaaacagaatcaagcagttttgcattgaaaggaaaacccgttgtatttcccacttgagaatttccagcggaaggcaggtgggggaggggctgtttaggggaccacgcagcgggagagccatccccaacaggaagggagcggttgtctgcaggagcagtgaccaggaactcctatggggcacctgggttgggggaagctggatttagggttagaagcttgtgtgtaaacaggaaatatcagtgtaaaacagaaaataaaatatgtaattaaaaaaaaaaaaaaaag

SEQ ID NO: 48568 - DNA, 818 bp, Homo Sapiens
  misc_feature (653)..(653): n is a, c, g, or t
  misc_feature (754)..(754): n is a, c, g, or t
  misc_feature (773)..(773): n is a, c, g, or t
  misc_feature (789)..(789): n is a, c, g, or t
ggtgcgtgcctgtagtcccagctactcagggctgaggcaggagaattgcttgaacccggcaggcagaggttgcagtgagccgagatcgccctgctgcactccagcctgggtgacagagggagactccgtctcaaaaaaaaaaaagtctgagagtagctaagaatttatgtaaaagcaatcagagtttttaatttatgggaaccaaataaaactataacctcatagtgtttataagaactcagaaataatatttatttaactttattatgaggccacacatattttcctgtgtttctatatatagtttggaaaactatccttaatagtctgttttatatgccttatatttaaaagtttgttttagttattttgaaagactattgctgctgcaaatagttgtgtgctttacattctaagcttcagtacatttatttaagagcatcataatctgacctgagcatccacttggagagtgtttttttttgtgtgtggtctggggtgacaaaagaccacaaaaatgtgtggtctggattttttcaactatgtcattaactttatgatccaagaccagttataggatgaatctgtatgtaaaaatagagtcttatttatggaaggaattattctaagggaaaaatccagggtcaagctgnatcttttatgtcctttatattgcatgtctatttctggtacacaatttggtatttcttcaaatttcctatggtagcatgataaatcatcaaagacctgtttngggatataaaactctgatngaaaattttaatgagnatcttggttatacctagaatatgtatccc

SEQ ID NO: 48569 - DNA, 693 bp, Homo Sapiens
gtccgccctatttctgatgtgtgtgaaaggaaggcctgtcttctggggtgaccatgaggctcagtgggaggagctgccaggcttgagctgggacttggcacctggccagcctttttttctatttcattgtaccttgatgggctgtcagttctgaagagaaaaaatacactaggaatccattcttcctccaccattctccctggcagagggaagtgactacacccctatggtgtggacatactgacgctcctccatgaagcagcaaagttctgttgtttcaggagactgtgggccttgaggatgtggtagtgacctcaccagaggagttggcaattcctaagtgctgcctggaggcctctacagagacataatgttggagaacttctgccacatggcagtgctgggtaagacccctctgtccccaccagtgcccttgaggttatgggtgttggtaggtctgtggcctccatttccatgacgatggtgttaaggactgcatgtttgtgtccccccccaaagtttatatgttgaaaccctgacccccaggagggtggtattaggaggtggggcctttgggaggtgactaggcttaggtgagatcgtgagggtggggctcgccgatgagatcgagtccttataagaaaaggaaggaactagagcgaggtcactttgtgctgtgtgagcatacaagaa

SEQ ID NO: 48570 - DNA, 908 bp, Homo Sapiens
caggctcagcaggagctgctggatgagaaagggcctgaagtcttgcaggactcactggataggatgttattcaactccttcaggttgtcttgaactgtgtgactcatgccagccctacagaagtgccttttatgtatggagcaacagcatgttggcttggctgttgacatggatgaaattgaaaagtaccaagaagtggaagaagaccaagacccatcatgccccaggctcagcagggagctgctggatgagaaagagcctgaagtcttgcaggactcactggatagatgttattcgactccttcaggttatcttgaactgcctgacttaggccagcctacagcagtgctgtttactcattggaggaacagtaccttggcttggctcttgacgtggacaaaattaaaaagaaggggaaggggaaaaaaagaaggggaagaagatcaaagaaggaaagaagactgggacagacacagaaggggaagaagatcaaaaccaccatgccccaggctcaacggcgtgctgatggaagtggaagagcgtgaagtcttacaggactcactggatagatgttattcgatccgtcatgtactttgaactacctgactcattccagcactacagaagtgtgtttcactcatttgaggaacagcacaatcagcttcgccctttaacgtggacaataggttttttacttggacggtgaccaagtctccaactgggtgttccagaatgggaagtccataattcccaaaaataagaggcccttcaggaatcccgaaagatcgtcttcctggagcagaccctataggcagcgaagatctgatgcagggacgtcatttggacccagacataggcgggcgggacggctatcatattcaaccagcaggcggcgggcatcaaacaga

SEQ ID NO: 48571 - DNA, 560 bp, Homo Sapiens
taaaactccggaattcttccccctctcttgctgtctcatcctttaccttctggatttaggtgctttttaattccagttcaggaaagataggaagagtagaatttccccacagcaaccttggctcctgacattggggattccgcccctgatctctgaagactgcttcttgtttgttcctctgtgagccttaaggattcctccacagctggatgtgcagaacaattctttgtcaaaaacatcacttttcagctctatgtccaattttccttgagctgtctgtgtcttcaagcaatcaatagtctccttatgcccaaccacaatctattctgctttaagacgtagcctcttgtttggttctctctaaacatgtactgttaactgttgagcatcctcataagatccctcttagactaaaagacagtcatgcaattttaattttcccttatccatttatttttttaatctgattttctgtatttgcccacggcagtacttgtggagagtttaaaattttataaattaaaattccatttacattaaaaaaaaaaaaaaaaacaaaa

SEQ ID NO: 48572 - DNA, 758 bp, Homo Sapiens
cgtccggcacaccaatgaaggggtcatgtaccgcattggagatcagtgggataagcagcatgacatgggtcacatgatgaggtgcacgtgtgttgggaatggtcgtggggaatggacatgcattgcctactcgcagcttcgagatcagtgcattgttgatgacatcacttacaatgtgaacgacacattccacaagcgtcatgaagaggggcacatgctgaactgtacatgcttcggtcagggtcggggcaggtggaagtgtgatcccgtcgaccaatgccaggattcagagactgggacgttttatcaaattggagattcatgggagaagtatgtgcatggtgtcagataccagtgctactgctatggccgtggcattggggagtggcattgccaacctttacagacctatccaagctcaagtggtcctgtcgaagtatttatcactgagactccgagtcagcccaactcccaccccatccagtggaatgcaccacagccatctcacatttccaagtacattctcaggtggagacctaaaaattctgtaggccgttggaaggaagctaccataccaggccacttaaactcctacaccatcaaaggcctgaagcctggtgtggtatacgagggccagctcatcagcatccagcagtacggccaccaagaagtgactcgctttgacttcaccaccaccagcaccagcacacctgtgaccagcaacaccgtgacaggagagacgactcccttttctcctc

SEQ ID NO: 48573 - DNA, 480 bp, Homo Sapiens
atctgccacctcacctgccagggtactgcggttacaggcatgagctgcaccccgccactttgccggtttctgaacatagtatgttcagcctcagcaagaatgtgtcagttgatgacgcaaatttcataaaatggaatcttcaagctgttaagtatctagactttactacccccagactttactaacttacttggatctactccagactttactaccttacttggatcttttcatagtgtcacagatgcttcacaacacttgtgtgaaatagtcacccagtatcaatttaaaaacttactgtgataagattatttatttacttatttgaaaagtttgttaaaaatacttgcttataaaaatattcatctgacctcttcccttttggacacctctctctctcgcaacagagagctgctgtcctctcccctttcttttgcttattaaactttctgctccttaacccataaaaaaaaaaaaaaa

SEQ ID NO: 48574 - DNA, 549 bp, Homo Sapiens
attagaaattacgtctccagtggttagctcacattgcctctcaagagacaggtttccaggtgtcttcattgtagtgggtattaatgtcttcagcctcttgatatccataccttcctgtcctctgcctagaagcaaggccagcggtgcctttacggactgatcgtgtggtgcgatttagggattcttcagtttgcttgctttaggtttccaaaagttatacattggtgttttgattggaataaagaaatcctataagctatttgggaaaaattatagtgtatgtttcccatccagaaacatgcctttctatttattagagtattatattcctgtgaaaatttttctaattttcttcacttgttttacacaattttgttattgtagttttttccattatatttttatagttgattattgcttttacatgggaaagttatttttaattatatatttgtatagtcatctcactgttgttaattttcaatagtttgtggtttagttctgttaacttttggtacaatgacaccatctacaaaaaaaaaaaacaag

SEQ ID NO: 48575 - DNA, 818 bp, Homo Sapiens
  misc_feature (783)..(790): n is a, c, g, or t
  misc_feature (792)..(798): n is a, c, g, or t
  misc_feature (800)..(801): n is a, c, g, or t
  misc_feature (804)..(814): n is a, c, g, or t
agagttgaaggcacagttaaatgaaacactcacaaaacttagaactgaacaaaatgaaagacagaaggtagctggtgatttgcataaggctcaacagtcactggagcttatccagtcaaaaatagtaaaagctgctggagacactactgttattgaaaatagtgatgtttccccagaaacggagtcttctgagaaggagacaatgtctgtaagtctaaatcagactgtaacacagttacagcagttgcttcaggcggtaaaccaacagctcacaaaggagaaagagcactaccaggtgttagagtgaagtaattgggaaactgttcatttgaggataaaaaaggcattgtattatattttgccaaattaaagccttatttatgttttcaccctttctactttgtcagaaacactgaacagagttttgtcttttctaatccttgttagactactgatttaaagaaggaaaaaaaaaagccaactctgtagacaccttcagagtttagttttataataaaaactgtttgaataattagacctttacattcctgaagataaacatgtaatcttttatcttattttgctcaataaaattgttcagaagatcaaagtggtaaagacaatgtaaaatttaacattttaatactgatgttgtacactgttttacttaacattttgggaagtaactgcctctgacttcaactcaagaaaacacttttttgttgctaatgtaatcggtttttgtaatggcgtcagcaaataaaaggatgcttattattcacnnnnnnnncnnnnnnncnncannnnnnnnnnnaaaa

SEQ ID NO: 48576 - DNA, 827 bp, Homo Sapiens
  misc_feature (67)..(67): n is a, c, g, or t
  misc_feature (707)..(707): n is a, c, g, or t
  misc_feature (709)..(709): n is a, c, g, or t
  misc_feature (778)..(778): n is a, c, g, or t
  misc_feature (787)..(787): n is a, c, g, or t
ccttccaaaaatggtgactttgcttttgtgactgacaacacttatactaagcaccaaatcagacagnatggaaatgaagattctaagagctttaaactttggtctgggtcggcctctacctttgcacttccttcggagagcatctaagattggagaggttgatgtcgagcaacatactttagccaaatacctgatggaactaactatgttggactatgacatggtgcactttcctccttctcaaattgcagcaggagctttttgcttagcactgaaaattctggataatggtgaatggacaccaactctacaacattacctgtcatatactgaagaatctcttcttccagttatgcagcacctggctaagaatgtagtcatggtaaatcaaggacttacaaagcacatgactgtcaagaacaagtatgccacatcgaagcatgctaagatcagcactctaccacagctgaattctgcactagttcaagatttagccaaggctgtggcaaaggtgtaacttgtaaacttgagttggagtactatatttacaaataaaattggcaccatgtgccatctgtacatattactgttgcatttacttttaataaagcttgtggccccttttacttttttatagcttaactaatttgaatgtggttacttcctactgtagggtagcggaaaagttgtcttaaaaggtatggggngnatattttttaaaaactcctttttggtttaccctggggatccaattgatgtatatgtttatatactgggntcttgttcnatttacccgcctttcactttattaatttcagttattgaag

SEQ ID NO: 48577 - DNA, 513 bp, Homo Sapiens
  misc_feature (11)..(11): n is a, c, g, or t
gccagcctgangggatggcctcaccatcttagaatactgagatctcaccagaacactgtaagccatataaacagtagggaaagagtcagcaacagtgaaaccatctgtttaaaatgggcaaaagcgattaagggaaaaaaaacaggtgaatttgaaaataaaccagggtaaggtaaattctagaaataatagcatttgaaatgaaaacctcacttaagttcactagaacagtaaacaggagattgctgaattttttgaagacagcaatgacctcacctagatgactcaagtttggggaacatcaagattttgacgggtactataatgcttaatatgtccaaattttcaaaatgaagtttctcagatattatttctgccataggagctacagtgtagagtatcacataagtatcttgggctagagaaatgcagtttatatataccgttggatttttataataaagtttcccaagacctgttattttgcccaaaaaaaaaaaaaaaaaaaaaaaa

SEQ ID NO: 48578 - DNA, 837 bp, Homo Sapiens
  misc_feature (466)..(466): n is a, c, g, or t
  misc_feature (473)..(474): n is a, c, g, or t
  misc_feature (512)..(512): n is a, c, g, or t
  misc_feature (521)..(521): n is a, c, g, or t
  misc_feature (523)..(557): n is a, c, g, or t
  misc_feature (559)..(589): n is a, c, g, or t
  misc_feature (592)..(702): n is a, c, g, or t
  misc_feature (705)..(722): n is a, c, g, or t
  misc_feature (724)..(728): n is a, c, g, or t
  misc_feature (730)..(771): n is a, c, g, or t
  misc_feature (773)..(799): n is a, c, g, or t
  misc_feature (801)..(801): n is a, c, g, or t
  misc_feature (804)..(811): n is a, c, g, or t
  misc_feature (813)..(814): n is a, c, g, or t
  misc_feature (817)..(818): n is a, c, g, or t
  misc_feature (822)..(823): n is a, c, g, or t
  misc_feature (825)..(828): n is a, c, g, or t
  misc_feature (831)..(831): n is a, c, g, or t
  misc_feature (833)..(833): n is a, c, g, or t
  misc_feature (835)..(835): n is a, c, g, or t
ctatctttaccgaactacctgaatttgttcctgggctccactttcttccagaagagggctaactatcctactaaggtctgaagagtgttgaaagtagactagagcttgggaactcctaacctagaactatctgccatcccacaaagtgattatatgccaaagggatactagtcatacctagtgtttctctttctgaaaagagaacttatcctaaaattagccctgggcctgggacaaaggagccctctccgcccccaaaatgattattaaattgagatgagtccaggataaaactcagataccaaggataaatgaaacttatttagggataaaagtgggctgggcgcagtggctcactcctgtggtcccagcactttgggaggctgagacgggcggatcacaaggtcaggagatcaggaccatcctggctaatgcggtggaacctcatctctactaaaaatacaanaaattanngctggtgtgatgacaggtgcctgtggtcccagtctccngggagaggntnnnnnnnnnnnnnnnnnnnnnnnnnnnnnnnnnnncnnnnnnnnnnnnnnnnnnnnnnnnnnnnnnnctnnnnnnnnnnnnnnnnnnnnnnnnnnnnnnnnnnnnnnnnnnnnnnnnnnnnnnnnnnnnnnnnnnnnnnnnnnnnnnnnnnnnnnnnnnnnnnnnnnnnnnnnnnnnnnnctnnnnnnnnnnnnnnnnnncnnnnncnnnnnnnnnnnnnnnnnnnnnnnnnnnnnnnnnnnnnnnnnngnnnnnnnnnnnnnnnnnnnnnnnnnnncnctnnnnnnnncnnccnncccnncnnnnccncncncc

SEQ ID NO: 48579 - DNA, 721 bp, Homo Sapiens
ttttgaaaaaatagaggaactattcatggaataggccttagaggcaggctgcttgggttcaaataaaatagccctgccactcactacctgtgaccttggcaaattacttaacctttctgagtcttaatttcttttcctgtaaagaaagctgaaatgttctaccttagaagtttgttgtaaggtacagaacaagcgcatagtattcaatgaatgttagctatatgtacatgtatgtgtatgtgcaatacattgtattacgtgggtttcattaatgtcaaaacagattagggctgagtagtattatttttgcttctcaagttctgcacatttatttttaaagcaagttgtagaatgtaatgtgacatatttgagcctgaagttggctgaccaaggactgtggataagtgtagcatagttattttttctatcaaaaacaataacaaaaagattgagtacttttaatatacatgttgtcaaaagacaaaattacaacaaatttaatcatagatctaattggcttttattcaagatgcatgaatcggatcagcctccattctacaaaatagaatgagaggtctcactgggcagtggcaaagccctggggtttgtaaggtgacaactggtacaggaaaaaatgctgattgtttaacatcagattacttttcttttaaggtttaaaacatggagcatttcccgataacactaattccggtagaacgga

SEQ ID NO: 48580 - DNA, 795 bp, Homo Sapiens
  misc_feature (743)..(747): n is a, c, g, or t
  misc_feature (749)..(749): n is a, c, g, or t
  misc_feature (751)..(754): n is a, c, g, or t
  misc_feature (756)..(757): n is a, c, g, or t
  misc_feature (761)..(763): n is a, c, g, or t
caaacaaaaaagagcctggaacctcctcccctctctcttgctccctctctcaccatgcgacacacctgtttccccttccccttctgacataagtgaaagcttcctaaggcctcaccagaggcagatgctggcaccatgcttattgcacagtctgcagaacagtgagccaaaataaacctcttttctttataaattacccagtctcagatattcctttatagcaatgcaaaatggactaacaatacataagttagggagtgttaattagaatggaaattaaatatgcagaaactcaaaggaagatgaaattgttagggaagacatatgtgttaacctagtgaggcttgaatcagatgtttggaagaaatgagggaggtttctgaggctcctggtgaccttgccattgaggacacatatacttctccccctacacacgccttttcttcttccccagtacaatgaacattaggaattacctgctcattgtagggaaaatgaccacccttcaggcattgcttttcatgaaaagtggattagacaagaggagaagtggttacactttttaattgttacataattgttagactgttttccctatggcaaagttgggaaataagtaactgttggaaactagaggcctttggaagcaagtagactcttagattggaaaatgtggttctaatctaaagcaatgatacaatgagagcttgtttgattaattaaaacagaaccaaattttaatnnnnntnannnnannaatnnnataaattaatctttatttttatatctaataaa

SEQ ID NO: 48581 - DNA, 709 bp, Homo Sapiens
  misc_feature (558)..(558): n is a, c, g, or t
  misc_feature (681)..(681): n is a, c, g, or t
  misc_feature (690)..(690): n is a, c, g, or t
ggcctatggctgccaagaatgtgggaaaagcttcagccagagtgctgccctgaccaagcaccagaggacacacacaggcgagaagccatacacctgtctgaaatgtggggagcgcttcaggcagaattcacacctaaatcgtcatcaaagtacccacagtagagacaaacattttaaatgtgaggaatgcggggaaacctgtcatatttccaacctttttagacatcagagactacataaaggggaaagaccctataagtgtgaagaatgcgagaagagcttcaaacagcgctctgacctctttaaacaccacagaatccacactggggagaagccctatggatgttccgtctgtgggaaacgcttcaatcagagtgcaaccctcattaaacaccagagaattcacactggggaaaagccttacaaatgtcttgaatgtggggaaagatttagacaaagtacacaccttatccgacaccaaagaattcatcaaaataaagtgctgtcggctgggcgtggtggctcacgcctataatcccagcactttgggagggccangcaggcagatcatttgagatcaggagtttgaaaccagcctggccaacatggtaaaatcctgtctctactaaaaatacaaaatgagccgggcatggtggtgcatgccctgtatccagctattcnggagctgangtaggagatcacttgacca

SEQ ID NO: 48582 - DNA, 702 bp, Homo Sapiens
  misc_feature (624)..(624): n is a, c, g, or t
  misc_feature (693)..(693): n is a, c, g, or t
ccttcggccggggagaccaatttgatcccgcctcctatatcatagggccagaggaagatcttccaaggaagatggaatacttggaatttgtttgtcatgcaccttctgagtatttcaagtcacggtcatcaccatttcccacagttcccaccagaccagagaagggctacatatggactcatgttgggcctactcctgcaataacaattaaggaatcagttgccaaccatttgtagttcacaaattaaaactgggtttccaggcctggtgtggtggctcacgcctgtagccccggctattgcaccactgctctccaagctgggcaatggagtcagattctctttcttaaaaaaccacaaaaaaactggatttccagttctctaatattcttagtaccacaagatatgtcataggtatctttaaatgaaattcttagctggaaaagtgactaaaaagtttttctcctgctacctagtaataaacaaatcattgtttattactggtcacttagaaaattaaaagggatagggccaggcacagtggcttatgcctgtaattgcagcacttttagaggccgaggcaggcggatcacctgaggtcgggaagtggatcgcctgaggtcangagttcgagaccagcctggccaacatggcgaaaccccgtcgctactaaaaatacaaaaattagccaggngtggggggc

SEQ ID NO: 48583 - DNA, 542 bp, Homo Sapiens
aaacaccatgtgttctcatgcctccatgtcttttcacacactgttccatttgctcttcctcccacattacattgaaactttcaagcctcagtcgaaacattgcttcttctggatagcagccttcttgacatccctcctcactccccagtccctacagggcttccatagctctttgtgtgcacttcgatcccagcatttaccatcgacttgtaattgtttctgctacctgacaatcatcgccttgagtactgggacaacctttgattactcattatatcctcaataaatatttgttgaactaaaaaaaaataaaaaaaaactcgagggggggcccggtacccaattcgccctatagtgagtcgaattacaatttacttggccgtcgttttacaacgtcgagaactgggaaaacccttggcgttacccaacttaattcgccttgcagcacattcctcttttcgccagctggcgtaaatacctaataggccctgaaccgatcgcctttttccaacagttagcgcagcctgaatggcaaatgggca

SEQ ID NO: 48584 - DNA, 915 bp, Homo Sapiens
  misc_feature (607)..(607): n is a, c, g, or t
  misc_feature (618)..(618): n is a, c, g, or t
ttggcttttatctgtgtcttttggaaaaggagctgcatggcctcagtgcctccataaaaagcttaagttgagttcatgggagaacattaagatcgttttttttcccttttagctcggtaatctcatgtaccacaggtaatgaccaagcatctctgctagaggatgtaactctcataactcctgtgtaaaatgaggatcctgttggtgatcctcattccagtttccaaagcgagaggagccttctgagcagaagtatgcaagactgattctgtttggaacagtttcctatttggctgcattctaggaggcctcctgacttattcatagtattgtcgcctggtggcattggtgtggggtagcttgtcctgctacttgctaaagttctctttctttgagaaaactgaggaaccagaatgcttagagttcataaaataatctctaaaccatgttaggttaaaacaaaatgaccatctcacaaaaacgagtttagttgaatgctcaattccttacaaaatcttcatttaaggctgagtgtggtggctcatgcctgtaattccagcactttgggaggccgaggcaggaagactgcttgagcccaggagttcangaccagcctgngcaacgtaggaagactccgtctctacatagaaattttattataaaagtagctgggggatgtggcacacacctgtagtcccagctactcaggaggtttgaggtgggaagattgcttgagccccagaagtttgagggttgcgttgaggcttgatcatgcccactgccactctaaccctaaggctacagaagcaaggaccccccaatcttccaaaaaaaaaaaaaaaaaaaaaagtcaattttaaaaaaactggaaaaaaaaaggttcccccccttccttgggcctccaatatttcccct

SEQ ID NO: 48585 - DNA, 629 bp, Homo Sapiens
ccgaagtcgggattctttctttcctgctctgagagggaccaggtccctcctccgtagcttttgtctctctattgcctgcgccgtgtcctggactgctcacgggagttctgcaggagacgccggaatatctggaagctgaaaaatggaaataaatggaaagaccagaatattgaagatcactacagaaatctaaggtgactcccacgaccagtgcgggtcacagcacaggcgacagaagctatggcagaggcacctgaaccctctcggaggggaaagccaggctcccaacctcagctcgccgcctggagccgggaaccgaggagagcagggccttcgccctccccgatggacactcggcaggccccgcccagcgcccctgattggacgaagcgccgggccccgccccctcagccttttgagtcagggtctcaccctgtggcccaggctgccctccagtgatgccatcatgactcagtgcaacctcaaactcccaggttcaagcgatcttccatcctgacctccaaaagggctggattatacacataagccatgtcacactttatatgtttctagggaagcttttctaagaataaatacattggaactaaaaaaaaaaaaaaaaaacactt

SEQ ID NO: 48586 - DNA, 625 bp, Homo Sapiens
gccactgcgcctggcctgttacttaaaatttttatactagtaaataaactttttgttcacatttataaaagctctatatttgtttgactagaaaataacccaaattttctggaccagtcagagaatgataaaatttcaccaaaaataaaacaaaaaaaatccttcagaactgataggtataggtacaacaactactaatagcaataaagcaatggtgcttttatagttccgatatgtgttataacatttaacataattgaggtgtataaaataaatttttcaccttatgcatttaatttttggtggatgaccagtaattgctttcttattgaagttaaatttttgttatttctattcttgagaaaattttatgggctagaggagttaactgttaaataacagttttgaaaagcttgttattaattttagcaaagcccaagggaaatagttcagaactgaaacatgtagtccaagtgatgaatgaaaaacaaaagtttttattttcaaaatttaaaacatcacagtatataagacctctgtggcactctttttaaataagtacttagtcttaggggcctatccccaggcactctaaaaaagatttacgaactctaaaatcccttat

SEQ ID NO: 48587 - DNA, 745 bp, Homo Sapiens
cgggccccaaccccttcaccacactcacagaccgtgagctggaggagtaccgcagggaggtggagaggaagcagaagggctctgaagagaatctggacgaggctagagaacagaaagaaaagagtcctccagaccagcctgcggtcccccacccgcctcccagcactcccatcaagctggaggaagaccttgtgccggagccgactactggagatgacagtgatgctgccacctttaagccaactctccccgatctgtcccctgatgaaccttcagaagcactcggcttcccaatgttagagaaggaggaggaagcccatagacccccaagccccactgaggcccctactgaggccagccccgagccagccccagacccagccccggtggctgaagaggctgccccctcagctgtcgaggagggggccgccgcggaccctggcagcgatgggtctccaggcaagtccccgtccaaaaagaagaagaagttccgtaccccgtcctttctgaagaagagcaagaagaagagtgactcctgaaagccctgcgctaacactgtcctgtccggagcgaccctggctctgccagcgtccccggccacgtctgtgctctgtccttgtgtaatggaatgcaaaaaagccaagccctccgcctagaggtcccctcacgtgaccagccccgtgtagccccgggctgacccagtgtgtgctcagcagccccaccccaccctgccccttgtcctctc

SEQ ID NO: 48588 - DNA, 670 bp, Homo Sapiens
ggattaaatggaatgaggtctcttagtacagttattttgatgcagataattccttttagtttagctactattttaggggattttttttagaggtaactcactatgaaatagttctccttaatgcaaatatgttggttctgctatagttccatcctgttcaaaagtcaggatgaatatgaagagtggtgtttccttttgagcaattcttcatccttaagtcagcatgattataagaaaaatagaaccctcagtgtaactctaattcctttttactattccagtgtgatctctgaaattaaattacttcaactaaaaattcaaatactttaaatcagaagatttcatagttaatttattttttttttcaacaaaatggtcatccaaactcaaacttgagaaaatatcttgctttcaaattggcactgattctgcctgctttatttttagcgctatcacaggacccagagcctatgcccttttaaacttaccacaaaagcagaagattaattcaatttaagatgatactctcatttgttacgtcctttttttttttttttggagatggagtcttgctttgtcgcccatgctggagtgcagtggcatgatcctggctcactgcagcctccacttcccgggttcaagtaattctcccacctcaagcctccctagt

SEQ ID NO: 48589 - DNA, 522 bp, Homo Sapiens
gaaaatataaatgtgaagatttgtggtatttgggtttatatataagatatttctacattgaaaagagacagtggaaaagcttggtataagatttgtaaaatatgtttgtaataatgctaatggaagaggtgagagttgggtggggtgcggtgtagatgggaacatggtttggggattggggaaagggaagtcgtgctgttaataaaatagtgaggcatgttgtataaagtgtgttttatgtctcaattgaaatgttatagagataaatttaaaatagatcatgatgggttttgaatctgatttctaattttaaaatgttatgagcttttgttgctttcctatttcatacacatttctttatgggtttcacttagactgcatgaaattgcagatgccaattaccttttaacaaaattaaattcacatatatgtataatttacatgtatatattcatggaattttttattctacacgatatattattttaacaatggtttttcaatgacaaaataaaaagtatc

SEQ ID NO: 48590 - DNA, 685 bp, Homo Sapiens
tcaagaagataaaggagcgcattcgcaaccacaagtaccgcagcctcaacgacctagagaaggacgtcatgctcctgtgccagaacgcacagaccttcaacctggagggctccctgatctatgaagactccatcgtcttgcagtcggtcttcaccagcgtgcggcagaaaatcgagaaggaggatgacagtgaaggcgaggagagtgaggaggaggaagagggcgaggaggaaggctccgaatccgaatctcggtccgtcaaagtgaagatcaagcttggccggaaggagaaggcacaggaccggctgaagggcggccggcggcggccgagccgagggtcccgagccaagccggtcgtgagtgacgatgacagtgaggaggaacaagaggaggaccgctcaggaagtggcagcgaagaagactgagccccgacattccagtctcgaccccgagcccctcgttccagagctgagatggcataggccttagcagtaacgggtagcagcagatgtagtttcagacttggagtaaaactgtataaacaaaagaatcttccatatttatacagcagagaagctgtaggactgtttgtgactggccctgtcctggcatcagtagcatctgtaacagcattaactgtcttaaagagagagagagagaattccgaaaaaaaaaaaaaaaaaaa

SEQ ID NO: 48591 - DNA, 727 bp, Homo Sapiens
cagacatctttgttgacccggtacttcatactgcttgtgccctggacattaaacaccactgcgcagccatcacccctggccgcgggcgtcaaatgtcctgtctcatggaagcactggaggataagcgggtgaggttacagcccgagtgcaaaaagcgcctcaatgaccggattgagatgtggagttacgcagcaaaggtggccccagcagatggcttctctgatcttgccatgcaagtaatgacgtctccatctaagaactacattctctctgtgatcagtgggagcatctgtatattgttcctgattggcctgatgtgtggacggatcaccaagcgagtgacacgagagctcaaggacaggtagagccaccttgaccaccaaaggaactacctatccagtgcccagtttgtacagccctcttgtatagcatccccactcacctcgctcttctcagaagtgacaccaaccccgtgttagagcattagcagatgtccactgcgttgtcccatccagcctccactcgtgtccatggtgtcctcctcctcctcaccgtgcagcagcagcagctggtcgctggggttactgcctttgtttggcaaacttgggtttacctgcctgtagacaagtctctctcataccaacagaacttccggtacttccagaaccaactcacctgacctgcaactcaaaggcttttttaagaaaaccaccaaaaaaaaaaattt

SEQ ID NO: 48592 - DNA, 873 bp, Homo Sapiens
gtgtggattatcccccagaaagctgttcgttggattctagtcatgattgccctgggcatctcaggatctctcttggcaatgacatttggccagctgttcgtgaggataaccgacgcgttgcattggccacaattgtgacaatgtgttgctccatatgctgctttctgtgggctgcttggcatacttttttgatgcaccagagatggaccatctcccaacaactacagctactccaaaccaaacagttgctgcagccaagtccagctaatgaggaaagactcacttgagataccctctccttgctgaagtttttcttgacttctccagttctcttttgttttttggagcatggttctttgggaagtggcatccactgcaggaaagcagaatgagcagagccagcagaactgatggagtggcacaaattcccagtgtctggatggtgccacactggcgcctaatcacccgtttaacaagcagaaattaaatgttgctcagcacatgtgtctttcagctcttccttttcacccatggatgatcattgcgagcatgcgctgattggactgaaatgccggggaataggttaggcatgctcagtgccgtccctttgccaccacagtcaaatgacatgcttcactgtggtaccttaatacctgaaatagaaccatggaaaattctgatgtcctctctctgaattatgtacagactacctgggggatcctcttctctccaaatgttagccatcctgaagtagccgaacagtagaaactttggtggggattaaccgggagcttgaaaattgtctttggtacctgatactggacagtgaactgaatggtgcaaaataatcctcacttgaaaaaaaaaaaataa

SEQ ID NO: 48593 - DNA, 425 bp, Homo Sapiens
ggtcgacggaaggataaaagatctagtctgggcagtgtctgctctgaaatgtcccacatctccttttttttcctccacaccctatatagacacttcctgaatgctagaacaatgaattcttgttttgagagagtctctgctattttctatctctgtaaatgttcttagcctgcctttccaccactcccacttaatccctgattcactgtctgatttgggctttctgctttacttccctcctaacatttttcatctttaattgtgatttacaaccctaatatcccaggcacatacaaaacttatgaattacccagcacaactgtgaaactctgtattgcttcttccggtccacaccctatactcatgacattaaataaaaggtagggatgataacagtggggtaaatattatcatcctgtttgact

SEQ ID NO: 48594 - DNA, 419 bp, Homo Sapiens
gccccaccatgggcaacagcgcgcgcgcagcgagcttcgagtgggtctacaccgaccagccgcacacgcagcgggcaaggagatactgggtgcggaagatcgcgcccgagtactacgaccacctgccgcagcaccactcctgggtgaaggtgctctgggattttgtgtttgaggactccctggggccctatgccagggtgaagcgggtgtacaggctggcaaaagatggtctgtgagcccgggctgcctcctggtggtggccattgtcccccatcggcccctcagccttgcaccccagcactgagaagctacatttccttcctgtgctctggactgctgcccttgtccccgaggagtgtcccgcgcagcacacctggcaacagcagtgtgggctgcagggctccgtctgcacgtggact

SEQ ID NO: 48595 - DNA, 836 bp, Homo Sapiens
aggtcaggctgcagtgatccgtgatcacaccactgcacttcggcgtaagcaacagagcaagaccctgtctcaaaaacacacacacacacaaggtaagattggcagctatagcagggagaagattgttttgcccaggactttttccattttaaaactaagagttctgcatcccaggaaaccccgcagtcctggacaaacctggatagttggtcaccctacctgcagtaaatataaaggtggggatgcattccaaaggaactcagacagcaaaggaagagatggaaatggatccaaagcctgacttagattcagattcctggtgcctcctgggaacagactcctgtagacccagcctctagtctcctgagcctatagagcccccaggagactgggacccaaagaacttcacagcacacttaccgaatgcagagagcagctttcctggctttgttcacttgcagaaaaggagcgcaaggcagaggctctgaagcactttccttgtacatttggagagtggcattgccttttagataggatctaggagtgattttattgttttggagaatggaagggcccccatggccctggctttgtcatcagtgactgccatagcaacagcagctctgtacctcatctgttgatcccacctttgaagaggagacacagtgctcaccttaattgcgctggtagcagcttatatcccatgtatcattttcaccattgattggaagctgccttgggaattcagtaccaggcattacccctctgggtgggagagggagaagtgtaaagttggagtgggctggaatcaggtgtggcccgcccagtgtcctctg

SEQ ID NO: 48596 - DNA, 849 bp, Homo Sapiens
  misc_feature (803)..(803): n is a, c, g, or t
gagtgagcttccgagaggtccagtgagttatctagaagtgggccgaattcagactgaagaaggtactgaagtacatgtagaggagctgcatgttgaacgggtcaatcaaatgccagtggaagtacaaactgaacttctagaagcagatttggaccacgtgaccccagaaatcatgaaccaagaggagagagagtctagccaagcagatgctgctgaggctgccagggaagatcacgaagatgctgaggatttagagaccaagccaacagtggattctgaagcagaaaaggcagagaatgaggacagaacagctctgccagttttagaatgaaattacacatgaatatatttttaaatttacttgttgggtttttgaactgattatgggcagtttgactgtccttaattaagcctaacagacaagtggaccaaagttaagctgtttcctgttgtgctgaactgttgtccgttgaaacacattgattcccctccccctacttattgccacagaggagggatcttttccataactgaaggggagtttttgagaagtatatttctggaaacttaaatggattatattcttattatatagttgggtacgaatgtatctattttcattgtggtaaaaggtcttccttttctctttcccaggtcatgttcttcctcaaattttttccatattgtaaaatcaaactaaatcattagaatacaagtttatgtattctaatgcatgttaggaaattggataatataggaaaacacagggctgcatgatgaaaagtgcattgttactgtgcagntaaaatttgggcttctggctttctttagtttggacaaacgttccta

SEQ ID NO: 48597 - DNA, 637 bp, Homo Sapiens
  misc_feature (349)..(349): n is a, c, g, or t
cgggacaagtacgaggccgagctctccgagctggagcagtcggagcggaagcttcaggagcggtgctcggagctgaagggccagcttggggaggccgagggcgagaatctgcgtctgcagggccttgtgcggcagaaggagcgggcgctggaggatgcgcaggcggtgaacgagcagctttctagcgagcgcagcaacctggcccaggtgatccgccaggagttcgaggaccggctggcagcctctgaggaggagacgcggcaggccaaggccgagctggccacgctgcaggcccgccagcagctggagctggaggaggtgcaccggagggtgaagacagccctcgcgnaggaaggaggaggccgtgagcagcctccggacacaacatgaggctgcggtgaagcgggccgaccacctggaggagctgctggagcagcacaggaggcccacgccaagtaccaagtgaccagggatgccgggaacactgtcgaagaacggaaggcagaggacagaggctggacgtgggcccagaggcccacagggacgcccacctgccccccacagaggctggtggttgagatgcccacggctaagcacctgtggctgcattttaacagtaaaggaggccgttgttttc

SEQ ID NO: 48598 - DNA, 557 bp, Homo Sapiens
gctcgacctaagtgatttccacaggttctggaagatctcttacagctttgccttgtgtcctcttgttccgtgtgggctttaaaagaaaaaaaatcaaacccacatattaaaagggggctttttatctgccatctaatggcttcagagcgataatacactattatcttcttaaaccaggaaaaaataaaagggggggtgggatttttcagaaaaattaaaaaagaaagtttttgtagctgttcagttgccactaagagattgcacagtcaaaacgactctaaacacactagtttggattcctaaatattttcaagaaaagaatcttctcgtttgaaactttgaattaaaataaaacacatttactccacatattttttaacaaaaagaaaacgtcacatcaggaaactctgattttgtggtagctgacatagtgttttcttgtacgtgaatagaatcctgacatgtagtgcacattgatgtatagctttaactgaccctggcttttgcagaccagggtttgtttaatacactccattctaggccaaatcaggacaaaa

SEQ ID NO: 48599 - DNA, 560 bp, Homo Sapiens
tgcggccgccaacctaggccgccaccaggcgatccacacaggctcccgccccttctcctgcccgcagtgcggaaagagcttcagccgcaagacccacctggtgcggcaccagctcattcacggcgaagccgcccacgcggccccggacgccgcccttgcggccccagcctggtccgctccccccgaggtggcgccgcccccgctcttcttctgagcctagttctcacgaggaccctttcttgcccacagtttcgagaggcccgtgccatgagaccgcctggggtgagcaaggcgacctgggctgctgcccgaaggtttggccgccgcgggacacctgtttccttcccgcagtgtctgcgtccgcacagcatacccagctcggacctcctaggacagagactcagcgaacccttgctgggaaccgctgagctgaagttcttggaaggctcccacccaggtgccccgttggaaagcagatatttcccggacccagcgcggcctcaaccagggcaggaaagagtggttatttatgtacttaaagtttcattaaagttaaaatc

SEQ ID NO: 48600 - DNA, 405 bp, Homo Sapiens; identical to SEQ ID NO: 5023

SEQ ID NO: 48601 - DNA, 552 bp, Homo Sapiens
  misc_feature (369)..(369): n is a, c, g, or t
  misc_feature (519)..(519): n is a, c, g, or t
  misc_feature (537)..(537): n is a, c, g, or t
gaagttgaggttaagtgatttggaagttacaaaaactagtaagagctcaaactagcaataaaattatagtatgtttttcccttgccttcactgtaatgcttaatggttgtgtagtcttatacgtgactcctgacttcaaggatcctggtctgtacctctttaggtcaacacgttttgagtgaactggtgttggttatttggaattagatataaagtcatatattctttggtgaggaatggcttcatataggagttcacattcaaaacaagctttgacaaaataatagagtgaaaattggtagatcagagttgagcttgattgggaggaccaaattaaaagactggctgggcatgatggctcacacctgnaaaacccagcactttggggaggccaaggccggccagattgtttgagcccggggatttcaagaccagcctaggtaaccggggtatcccagctactttgggaggctgagctgcccgaggcttacagttgagcccttgatccgtgccctttcntttctagcctggggttgncagttgaggccctgt

SEQ ID NO: 48602 - DNA, 635 bp, Homo Sapiens
  misc_feature (582)..(619): n is a, c, g, or t
  misc_feature (624)..(624): n is a, c, g, or t
  misc_feature (626)..(634): n is a, c, g, or t
aggacagtggctgagtggaggcgcccagacctgggcaggcagcaggctcaggcccacaccttgtgatttttgaaaccaaagcccagaagatgatgtttacttctctctccctggctctgcccttcttactgcaaaccatgctgtgccttagggcccttctcatagctgttcctcatggccatgactggaacagggatgcaacctctttctacacaagcacagttagttgggtgaagtctttttttttgtttgttttagacggagtttcactcttgttgcccaggctggagtgaagtggcgtgaccttggctcactgcaacctccaggccagcctcagcctccctagtagctgggactacaggcacccactaccacgcctggctaattctttgtatttttagtagagatggggtttgaccgtgttagccaggatggtctcgatctcctgacctcgtgatccacccacctcggcctcccaaagtgctgggattataggtgtgagccaccgcgccgggccggttgctggcatcttaatgttctgtaggtggaatatttccaataaacacaaggtgccgtaattgnnnnnnnnnnnnnnnnnnnnnnnnnnnnnnnnnnnnnnaaaanannnnnnnnng

SEQ ID NO: 48603 - DNA, 605 bp, Homo Sapiens
cccacctcttccaactcctccagggaaacccaagccctgcagcgcatggaacaaaagaagtggaaccgatacttccggaacaaggctatctgagagcagttcttcctggccctcgggttcatgtaacggcataactggaaccaaagctcacggagcaagggtatatgagagcgggtctcctcgtacaggaagtagaagatgttttgtttgggggcctcatcgtcctcctccatgtcattggccagatagctgaggacagaaatcaggttgctgctcaggggcaccaccaggagagacctccggctgaggtcagcttctcagagaggaaggtaagggaccgtccctagctcaggactggcacccaccctgcagagagccatgccttcctcaggagggctctgctggacagagacctgatcaagggcgtctcccactccttcaggatggagacaaaaacccaactggtgaccaagagtggtggcttatgcctggaatcccagcacactgggaggccgaagcaggaggatcacttgaggccaggagtttgagacaggcctgggcaacatagcaagaccctcgtctctattacaaaaaaaaaaaacaca

SEQ ID NO: 48604 - DNA, 467 bp, Homo Sapiens
ctggggctggagctagtccggaggacagtgaagatgtcgccttccttagtcccccggcctgtgagcaagaggaagctgcagaccactcgggccaccctcacccagacacctttagcaaacatacgacgacaaagaagattttgatgaagttcaaattagagtcagcgtgctcatcagaaagaaagcgcagccaacacgtttaggaacagaaacggattatgttgaagacaaacaatccattgcgtttgtgttcagtaacccaagcatcaaaggaacttgtggctggggagaaggcttgactatttgaaatctcaggactcctctgtccaggagctcccagactcccgtggagtggaagcctgggggctcgctgaagaagtcacgtgactggaacgtgcttaatgcttggctgtctggtaaggaaaataaagtggtgcattttgaataaaaataaaaaaaaaaaaaaa

SEQ ID NO: 48605 - DNA, 576 bp, Homo Sapiens
acggccagtgaattgaatttaggtgacactatagaagagctatgacgtcgcatgcacgcgtacgtaagcttggatcctctagagcggccgcctactactactaaattcgcggccgcgtcgaccgtcaagatatggtaatataatgtgaaattcctagagcagcttaatgctagtctctatttggctacctttttctttagaattgcttatatagttagtgtatgagatttttgttatattttgcaaatattttctctccattatagctcatcatcttttagctttgtttatggcatgtttttatgatagagaagtttcattttttatttttaagtggttacatctattaataatttcctttgtgtctctgaggttttgttgcttaagaaggacttctcaaagatttaaccttattttttacttaaagagcaaaaaaaaataaaaaaaaagtcgacgcggccgtgaatttagtaatagtagtcgacccgggaatttcggaccggcacctgcaggcttcccagcttttccctatagtgagtccgaatcatagcttggcggttatcaaggttgattgct

SEQ ID NO: 48606 - DNA, 677 bp, Homo Sapiens
  misc_feature (532)..(532): n is a, c, g, or t
ggaagagattcagagaaaagaggtcaatgtttagggaacagagatgccagttgaggggagggcattacctgggctattggggaaatgtggtctctttcctactgagcacatattcttgttgtatttgtgccaggctgtgctttctaaggactgctcttagccagtgactgcagagcagggataccaaggcaggcctgttacactctccccaacctccttggactgcaaacaatctaggacacctccaccaaacctcctcttgcactttccctctggcttccctcccagccttccttggtttggatgttttgtcccctccttaatttatgttgaaactctacataaactgtttactgttgaaacagtgtaagtattaggaggtgggacctttgggaagtgattaagtcaagtcacgaagatagagctttgcgaatgggatcaggtgcccttatgaaaaggcttgatagagggagtttgtcctgtggcccttctattttctgctctgtgaggacacaatgctcctcccttccanaagatgcagcatgaaggcatcatcttggaaacagacatgagccctcaacagacaactgcacctactgatgttttgatgttgaaacttccagccctcagaactctgggaaaataagtcctctttattcaaaaaaaaaaaaaaaaaa

SEQ ID NO: 48607 - DNA, 592 bp, Homo Sapiens
  misc_feature (591)..(591): n is a, c, g, or t
atgatgcacaatcagtagaaactctgggaaagccaaaagcgaaacgaatcaggacgtcaaaaacaaaacaagcaagtcaaaaacacatgaaaaagaaagtgcttggtcacctcctcccatagaaattcggctgatttcccccttggctagcccagctgacggagtcaagagcaaaccaagaaaaactacagaagtgacaggaacaggtcttggaaggaacagaaagaaactgtcttcctatccaaagcaaattttacgcagaaaaatgctgtaatttcttgggaagattttaatgtacacctatttgtaaagtcatcagaatagtgtggattattaaatatctagtttggaagaaaataatttatataaattattgtaaatttttatgtaaacagaaggtcttcaataagtaaagtaactccatatggagtgattgtttcagtccaggcaatttttctattttatattaagacttcatacatttatatatgtaaatatggcttattaatggaatgttaaataaaatgtatacttcacagtcgtttgtgtcttggatttttgaaagggaggggatatctgtttaaatagttnt

SEQ ID NO: 48608 - DNA, 492 bp, Homo Sapiens
ccggtaaaagagattttatcaagttgtgattgcccagtggcaatctcaaacagagaagtgatgccttctctgtttttttcaggtgcaggtgcacttttgtctatatgaccaagatcagtccttccattcagagtagcccctctttgagtagtgctgatacctaatttttgatgttgataatttttctgctctggagtctgctgcctaccacccttcagacatattatgttaattaaattatatcatattttaccctagcacaccccagagtaggccctctacagatatttgctaaatcagttagattttagcatctggaagatttggtagacttcttggtcttataagcaacttttctttttaaaccttatttccaaactatgggtatgtactttatttatacagctcttcatagattacactatgtactttgaatacatagtatttgttttcattcgatttactatgttggtttttttatcttgatgcctt

SEQ ID NO: 48609 - DNA, 578 bp, Homo Sapiens
cgcgtccttttttttttttttttattattattattgctgttgttgtcatcgttaactgtgggcatggaatgcgtgaggctggcttctgggttgtccacaccactctctgctgtgttgacttcctgttgtcttcatcaaagcttttttccgtggtattctaaaattaggccagcagtgggggctgggagggcatctgtgttagtcctttcctggctgtgacccgccacactcactgtcagtattaaggcccagcagcctgttgataagctaccctgtctcaccatgtgctggtgtggaaacggggcccagccagcacgcctcaaggtagatggaatccccactggtcagagaaaaagctatgcggacactccagcttggcctgggtcacagcactgactcctcacccgctagtctggctgttaagaggagaaagtgcactgccttccagcccaggaggaggacagcattttgtatttgttccactgatgcagcttagaaccacacccctgagagtcgtggcaaacctttcacaacctggaaaatgttgaaagcaaccattcctatttttgtttgttttt

SEQ ID NO: 48610 - DNA, 768 bp, Homo Sapiens
tttggatgatttctaaattatcacaaagtgggacctcagcagtagtgatgtgtgtgtctcatgagcagtgagcacagtctgcattcatcatgaaacactatcttctaccaggaggaggttaatgtaaatcaccaaatcccaatgccttgtgactttcataggattcctgatcatgcatgttgatgtactggctcttcactttgggctttctgatgtttattcacacctttggagagttgcaacttgccacatacgaaattagtctcatagtgtagtgaacttcaaccccaaaattttaaaaatgtatttccccccagttttaaattgcctttgaaatttaaaaaaaaaaatttagacttagtaccagaaccaaaaatacctagatttttggagaacttattacatacatagaaacatgaatatggtttaccactgtgtgtgtgtgtgtgtgtgtgtgtgtatacagacattttttttttaacttgttgattcagatgtcttggtccctgaatagtcctagattacttattttgagaattcattgttaaaaattacagggaattaaaataattgccttttttttttttagagggtaagagatgggtagaagagtatgcctctgaaaattttattagtttattcttgtggagaataccaagaaaatgtgtatttgcccattgctaaatatgatatatgccattttgtatttttttgtcccaagtgtctttttgtaagaggagaataaacaataaggaattactgaaaaaa

SEQ ID NO: 48611 - DNA, 703 bp, Homo Sapiens
cccacgcgtccgcacagacttttgccaagctcttattttttttcctaaatctctccaaaaaaaaaatgcaagtgactaaattcaattattgactaatttccactttttatccatgacttctccaaatcaaaccacagtatatgttgtaacaatgaccactgttagcccattatattcattccaattagaagaaatgtgaatactatattccgtgttttgagtgacaagtttcgaaaaataaaaacactgtatttttaaaagggaaatgcacttaaatgaaaacagttattacaaaagttaagatttaaaaagaaaaagcaagagtttttattatgatgtaataccagtagaatatttaaaaggcacaccacatctgaataatcaatgtaaatattttctttcaaagttgtaagttttcatatcatgtgctgtaaagttttcctaaatgaggctttaacgtaaacactggtgacataaaccattcattgctacgttgcttattgtgtttttatgctgttttatacttttttatgagttatgatagcagcaattaagttgtttgtattttgcttaactaaaacaaaaatgcttttatcttgctatagaataaacacatttcagtaaaaactgtggactgtattttgatgcaacaacaaagaaactgttcacttttcaaataaaatgatatgtcagaaaaaaaaaa

SEQ ID NO: 48612 - DNA, 428 bp, Homo Sapiens
gcgtccgggacatgctggtgaagcaccacctcttcagctgggatgtggacgggtgaccccctcctccccagcccaacctcgggcctgcgtctgaggtggcccaggaccccaagctgcagagcccagggaagagcagctccagagccctggccggggccgcgggatatcaatatcaggctgccccactccacgttccccagcacatcccaggtggtgggagcagagggtaccctgccccaccagggtccttagggatgctctaggccaaaccacagtttgtaccaaaaaccttgtgaggaggtgggggagccatgtctgtgctcaggaagagggaaggggatgggggtggctagtaggctcctggcctctttggtttataaataaactgtgtctgtctttgaaaaaaaaaaaaaaaaaaaaaaaaaggg

SEQ ID NO: 48613 - DNA, 679 bp, Homo Sapiens
  misc_feature (583)..(583): n is a, c, g, or t
  misc_feature (651)..(651): n is a, c, g, or t
ctcccggctagccgggattacaagcacacgccaccacgcccagctaatttttgtatttttagtagagacggagttctgccatgttgcccaggctggtcttgaattcctgacctcaggtgatcgccctgccttggcctcccaaagtgctgggattacaggtgtgagccactgcgcccagctgaaacttgactgcagggaacattcttgtacctgtgttttgttcacaagtgattattcaaaagaatcaactcctagacatggaattgctgggtcgaaggctattgaatgtaaaatttccatagatactgccaagttgtccttggaggctgtgctgagttcttccttccccactgcatagcctgtacaccatcactcagagcgtttcccagggctgcagaggctgtggcctgcctgtttccctgtgcctcttgtttggcctgcacatttaaatttttaaaaatatttgccaacatttgaaaagtgagagcttgactatttaaaaactcaaaaaaaaaaaaaaattaccccaaagcaagaaacaccactggaagatccgaccatgctggcttggcatttccctgangaaagtgccggtggcccggagggcagcttggcttgtagtttgtcgcggcctggcctggccttgccttnctgccggtcaggccttgcctgccgcaca

SEQ ID NO: 48614 - DNA, 668 bp, Homo Sapiens
attcacccagaatgtgcacaggctggtcaacgacctgcgctactacagactctgcaacgacagcctgccccctggcactgtgaagctctaggcctgctactgcctggggacacggacttctgctgctgccacctgcgccagccctaccttccaccacagatgtctcccagatgggccttggtcacactccttggcttctcccaccgcaagcaacgctgcctgcctctgccgctcctccacatcttgccgctgcccagcagagctggcttctgggtccacctgagcactggacggtgctcccagggcgttggagcaggcggaggggtgtgtggccaggtactaggaggcaccaggaaatcccgcggggtggcccatgcagaccaggcgcacgtggctcatggggcagaattgccaaggacagctcacgacagtgccaccttctcaccattccagccaaggagagatgtgacgttggaactgctctggcacttctgtcaagcctcccccgccccaattgccttgagatctctgctctttgtcagagatttgcaaagactcacgtttttgttgttttctcatcattccattgtgatactaagaaactaagaagtttaatgaaaagaaataaaatgcctatgttgttgttctagaaaaaaaaaaaaaaaaaa

SEQ ID NO: 48615 - DNA, 627 bp, Homo Sapiens
  misc_feature (581)..(581): n is a, c, g, or t
agatcagcactgccttaccatccatcagagaatccacactgggagagaaaccttacaaatgtttagagtgtgggaaagctttcagtgggaagtcaaacttgaccaatcatcgaagaattcactggagagaagcctcacaaatgtgaggtatgtggaatggccttccatcatagttcagtcctgaggcagcacaaaagaatccacactggtgagaagccatacacctgcagtgagtgtggcacgtccttccgtcagggctcagctctgattggacataagcgagttcatactggggagaaaccttatgaatgtgaggaatgtggaaaagcttttagagtgagctcaaatcttactggacataagaaaagaaaacatcaagtatggagtacccatgaacttgatgggagtaggaaatccctctctccagtgactgtttctcagacctcagtagtcagtattttgaccagtgcctgagtataacgattctggtgttactttctgtttttcctacctcttaggctggtccttctgtctcttatattagttattcctgatttcctgacccttaattgtgagattcnccaaagacattgtcctttaccttcttattcactattttttcagtga

SEQ ID NO: 48616 - DNA, 542 bp, Homo Sapiens
gataagttagagataaagggaagaaaagtttatatgtatatatgaaagacatttaagattctaccttttggtagaatgaaaatgggagaacacaagctctcttgttggcctcattgtattattaatgagccttgactttttcaacaaatgttgtggagtctaaacaagcagtcggtattgaatactaatatctgagaagacctaggttttcatcaccctgaaaattttggatgatagcaaactttgaatttttatatctaaaaatatacaatattatcagtttggtacactgttgaatatttgaagcaagatttcagattttagtttaggtgtaatagaattatccattctgaagtttaatttgctttacttttagctggcatgaaacacaaaacacttgatgaaaaaatttgattatctgggcaggtgcagtggctcatacctgtaattgcaatactttaggagaccaaggcaggaggattgcgttagcccaagaatttgagaccagcctgggcaatatagcaatacccttgtctctacca

SEQ ID NO: 48617 - DNA, 483 bp, Homo Sapiens
atttttcttccttgcatatacatgaaaggactcatacgagagagaatccgtatgaatgtaaggattgtgggaaagcattcagcttgcttaattgctttcatagacatgtaaagacacaccagaaggaaaccctatgaatgtaagcaatgtggcaaaagctttcacttcttccagttcttttcaatatcatgaaaggactcacactggggagaaaccgtatcaatgtaagcaatgtgggaaagccgtcagatcagcctcaagacttcaaatgcatggaagcactcacacttggcagaaactctatgaatgtaagcagtatgggaaagccttcagatcggctaggattctttgaatacaaataatgaatgtaaacaattaactgtttataataactgtatactaacaaatgttattctttttaaataattaagaagctataataaaatatccattggtgtcatgtattagaaaaaaaaaaaaaaa

SEQ ID NO: 48618 - DNA, 982 bp, Homo Sapiens
  misc_feature (703)..(703): n is a, c, g, or t
  misc_feature (735)..(735): n is a, c, g, or t
  misc_feature (741)..(741): n is a, c, g, or t
  misc_feature (748)..(748): n is a, c, g, or t
  misc_feature (753)..(753): n is a, c, g, or t
  misc_feature (755)..(755): n is a, c, g, or t
  misc_feature (796)..(796): n is a, c, g, or t
tgacaggtcccccagaagccccagagccctatttgcactgccttaagagtgcccgctggccatgcagctacctggcctttcaggcaggagggatctgatctcaggtggctcacagtggaccacatccatccttgggccagagacactagaggaaaactccagctgtggggtttcagagttgtcaggaactggtgggctcaggaccgatgtcaggctctagggagtcaggctctggggatgtcggttcccacttctgaggagagggacagggaggcctcccaggtggtgaagcaccgacctcagcatccctggaggcaattgggagcctgacgggtttggcggctgctagatccacatcggcgacccacatcctgccggcgtgcacctgcgtctgtgtctgctcctggtgggttgtggggcaggaatcagattcactcattagtaagccgcactcgctgaaggggagagcatgagcaagggagacgtgagccaggccttggttattaggagctaattatgggccaagtatggtggctcacgcctgtaatcctagcacttcgggaggccgaggcgggcggatcacctgaggtcaggagttcgagaccagcctgggcaacatggtgaaaccctgtctctactaaaaatagaaaaaaaattagttggggtggtggtgacgcacgccctataatccccagctaactgnggagggctgagggcagggagaatcactttaancccagngaggcanagggntngcaatgaacccgagggtcgtgccaccgtactccagcctggngcgacagagtggagactgttctcaaaaaaaaaaaaaaaaaaaaaaaaacctcggaggcatcttatggtcgggggggcgggaaaaaaaagggaaatggaaattgggcacagtgggccatatagctggtttccctggaccccacctttttcttggtaccaaagggggggaagaatcttgccggcctcc

SEQ ID NO: 48619 - DNA, 539 bp, Homo Sapiens
gaggaccccggcggcgccgcagtcccgcgagccatggcccagtccggcggggaggctcggcccgggcccaagacggcggtgcagatccgcgtcgccatccaggaggccgaggacgtggacgagttggaggacgaggaggagggggcggagactcggggcgccggggacccggcccggtacctcagccccggctggggcagcgcgagcgaggaggagccgagccgcgggcacaggaataggagctcggtgaattcaaggaccatgcttgcttcgttcattgtatcttcagcacctagcacagcacccagcacataggacatgtttgttgactgaatgcgtatctctatcatcacactcactcaatggtgttgagatatttgtgtttccccttccctagacagtgagatccttgaaggcagctgccttatcttattcctttttgtatttccatacctagcctaatacctagcttatataagggaacagaataaatgaacaataaagaaaagtctttacagcctctaaaaaaaaaaaaaaag

SEQ ID NO: 48620 - DNA, 713 bp, Homo Sapiens
tcattacctcataagcattaacaaatcaggcccaaagagcgtaagtcctagaaatttgttttaaagcagccctagtcatggtgctggtgctaccgccttgttttaggagcctgcctcctgtcagtatgaaaccctcacctgaaaaatgccagcctggacaccaaacactgagccccttcaacaggcacattatttccccctgagatccataagggaatttagtttctactattgtagagttctgaaaagaggtaaaatagtagtcctttggtcatcctatttttgctttcaattttgatatttcagactgtaaaaggccttgggggatgatagtacatgtggtagcagtaatttttttgaagcaactgcactgacattcatttgagttttctctcattatcagattctgttccaaacaagtattctgtagatccaaatggattaccagtgtgctacagacttcttattatagaacagcattctattctacatcaaaaatagtttgtgtaagttagttttggttaccatctaaaatatttttaaatgttctttacataaaaatttatgttgtgttttaaaatccttaggggctttatctatttttctaagtcagttaactgtacttctaaaaaaaagtatttgtatctactttttgttaacttcggtcagaataaaatatttttgaaggcagaaaaaaaaagataaaaaaaaaa

SEQ ID NO: 48621 - DNA, 786 bp, Homo Sapiens
  misc_feature (1)..(1): n is a, c, g, or t
naaaaaggctggtacggtccggaatcccgggattgagattcctttagctatctatctatatgtatatatctgggttattcaaagcttccccacccccagtcatctaaatttttcaggtatcaagtgctcaacagacatatgatagtcaaggctcttagtctcattttttactctttgtcaagagaaatggaaaataagagtacttgggccctcttaagggagctcagagagaattactaaattagggacagtttcaatagttatcattctatctacatgaacaatcaagaccaggactcagggaactttactctgtaacagaaagagaggattcagtgtttgccctgggagaattgtcccattcttgttgcttctctcctgagtacccactaccacaatgtcttctgtcaaggaattacaagtagcaagggaaggtctgaatgtaaggacaggcctagggaccttgcaagcacttgatatctctcctcttgctgactttgtcaacatagacatatagtgaaatgatgagggaggcagtcttggccctcatccaggtatctggtttttttttgtagaaagcacagataagtggtaaatggtctttttctgactttcattatgtggactggatggaggctttcaaactggtaccatactgctgcaggacctaaagggagccccatctttatggctgatcaactacaaccctatatgcctgaatactctgcaagaaggcctggagatttttgcaaactgatttattgagaatggcaggagagcttgtga

SEQ ID NO: 48622 - DNA, 636 bp, Homo Sapiens
gaaagcacccaggtcattcatactatagaaaaaccttatgaatacggtaaatgtggcaaagcctttaggcagaggacagaccttaaaaaacatcagaaaatgcataccgaagagaaaccctatgaatgtaatgaatgtgggaaagcctttagccagagcacatatcttacaaaacaccaaaaaattcatagtgaagagaaatcaaatatacatactgagtgtggggaagccattagacaaaactcttcttttttacaacaataaaaacctcacactggagagattctctgaatgccttaagaatttggttaatatggagacccttcccagggaaacagaaggaggatcgtgaaaactgttgactacttagaatgatcacatggtttagtggagagagcatgattctgggttttaaaagtcatggatctcaatctcagctcctattactaactagatcttttactttggggtaagtcacttcatatctttaggccttaatttcctcatctgaaaaactggaaggcctgacttgttgagctttaagatcctcaattattatatttactaggaattcaagtttctatagatgtggttcagaattgtgacttatttattgtacatcgggtgtgctttcac

SEQ ID NO: 48623 - DNA, 609 bp, Homo Sapiens
  misc_feature (567)..(567): n is a, c, g, or t
agaagggagaggtagagaattggaagaagaagcactggtacaggtagacaattcagaacttgcacagaatctgagaagctgaagtaggactgtgattgggagcttgtggagaggtctatggaaattatcatgctgctgaaattgttgcctctatttatctgctacccttctggtccgtggccaagatcctggtgggtgggcttggagccagccttcgtcagcaggcctgcggtaagaaagatgggatggacacacagtggtggagatcaaggatcagctgcagcaggctgggtccctctgcatctgtccatcactgcgactgatggcaatgactgagtataacacctttcttcatggtcaactctacccaggaaccacgtagggaaggaaattctggaaaacagctcccagccttagccaacttgacatatcataatccaacagaactcaacctctaccaacttggaaatcatgtacatttgtcaggactgtatttaatttccacatagagagaaagcaaaattatacttttgaccaaactaatagaattatccattaaacaaacanaactgtgccatctgtaaaaaaaaaaaaaaaaaaaaggacgcg

SEQ ID NO: 48624 - DNA, 571 bp, Homo Sapiens
gtagagacggggtttcaccatgttagccaggatgtccacttttttcttaaatgaacatattgtcttataaccagcaaatgaagttttacttttttagtcagaaaaaatttcgtcataaagctatatttttatatttttaaaattgatacagttagataccttcagattacctaagttaagtttttgccaaaatgctattttatgccctttttgtaaagttatgatttattttgtaaatatagttccttatagttttctcttgagtgtttggacatgagaatagataagattaaattacaatttacaagatcacttcattaggcacaggaaaagtatttaacaaaattcaacaccctttcacaataaaaaataaaaaataaaaaaccctcaacaaactaggaatagaaggaaacttcctcaacctgataaagggcatctatgaagaacccatggttagcatcatacttaatggtgaaggactggattatttccccctgagatcagaaacaagacaaggatgtctgctttggccatttctattcaacttgtactggacagtcaagaaaggaca

SEQ ID NO: 48625 - DNA, 531 bp, Homo Sapiens
agcggccgcctactactactaaattcgcggccgcgtcgacgcagtggtagggatcattcctcaatatgtgtgagagctgagcctaactgaatgatatgggaaacttgctcagcaatgcaaggaaagagaacgggtggctgcggctgccagtgcgtgctggtgaatgcagcccatgggcggttggtgggttggggaatgatggtaaccaaatttcaaggcctttaaaccatcaccgtgctgtggtcatcgggctttctcttcagcatccctcctaattatctggcctttcccacgtgcctgaggttcctgatctggtgtccacaatgatctgagaactgattcaaggattcttggagccctcagacccaggaagaagagagtttttaggttccaaatgaggagagtaaactttttgttgttcagtttgattatccttcacaacaaagagaaggtactagaaacttggatgagggagatgagacagtggaaaggattcaagcacacagatgagtcacttggattctaagagtt

SEQ ID NO: 48626 - DNA, 833 bp, Homo Sapiens
  misc_feature (689)..(689): n is a, c, g, or t
  misc_feature (810)..(810): n is a, c, g, or t
  misc_feature (825)..(825): n is a, c, g, or t
  misc_feature (827)..(827): n is a, c, g, or t
ttttaaacacagtttactgggtcctgaccttagtgtttctggcttattaggtataagtatgagaagttgatttttatcaagtttctagatgctacagatctaggaaccatacttagagtgctattatatgtcttttaatgtacactgatatggaaaaagcaatgatacatcatgttatcgcatattttaaaatgtgatcatgaccagggaatcttgaaagttgtcttatgtaataatgtaaatcaatgtagaataccatatatttttttcttgcaaggttattattaataggaatgactatttgtagccaatgtgttcaaatgcatgggaggacgtaaacacttcataatttcctggaaatacagacatatatcacttaaaataatacatttctaatataaatttaaattatctacgtgatatgaggaaacgagcttatttttgataattttcctagcagtgaatcaactatactcatttgaatctaaattaaattaaatttgagtaaattcagccatttctaaattcagtccatataaattcactttgggtaaaagaagacaaaattcctgaaaacagtagattaaaaaaataacattttaagagcaggtatgatctcaatgaatatagtgtggtaatttctgcctaatacctacccttttggaggaaggaaaggtaatcctgtttgngtttaatggtaattactgactctttataacttggtttatttatttattggttgattttaaagccatctgcttctggtggactttaccatatggttggggttttggggaaaattttcaaccntaccagggttgggcnanttccca

SEQ ID NO: 48627 - DNA, 787 bp, Homo Sapiens
ggatcaggactcctcagttcaccttctcacaatgaggctccctgctcagctcctggggctgctaatgctctgggtctctggatccagtggggatattgtgatgactcagtctccactctccctgcccgtcacccctggagagccggcctccatctcctgcaggtctagtcagagcctcctgcatagtaatggatacaactatttggattggtacctgcagaagccagggcagtctccacagctcctgatctatttgggttctaatcgggcctccggggtccctgacaggttcagtggcagtggatcaggcacagattttacactgaaaatcagtagagtggaggctgaggatgttggggtttattactgcatgcaagctctacaaactcctaggaccttcggccaagggacacgactggagattaaacgaactgtgcctgctgaataacttctatcccagagaggccaaagtacagtggaagcagactacgagaaacacaaagtctacgcctgcgaagtcacccatcagggcctgagctcgcccgtcacaaagagcttcaacaggggagagtgtagagggagaaggtgcccccactgctcctcagttccagctggacccctcccatccttttgggctcggaccctttttccacagggaactatccctattgggtcctccagatcatctttacactcaccccccttctcctccttggtttaattatgctaatgttggaaggagaatgaattaataaagtgaatctttacaaaaaaaaaaaatataaac

SEQ ID NO: 48628 - DNA, 581 bp, Homo Sapiens
aatctctggtatgaatttgatgatcagagtgtcactgaagtttcagaatctactgtacaaaatgcagaagcttacgttcttttctataggaagagcagcgaagaggcacaaaaagagaggagaaggatatcaaatttattgaacataatggaaccaagcctccttcagttttatatttctcgacagtggcttaataaatttaagacctttgccgaacctggccctatttcaaataatgactttctttgtattcatggaggtgttcctccaagaaaagctggttatattgaagacctggttttgatgctgcctcagaacatttgggataacctatatagcaggtatggtggaggaccagctgtcaaccatctgtacatttgtcatacttgccaaattgaggcggagaaaattgaaaaaagaagaaaaactgaattggaaatttttattcggcttaacagagcgttccaaaaagaggactctccagctactttttattgcatcagtatgcagtggtttagagaatgggaagttttgtgaagggtaaagatggagatcctccaggtcctattgacactactaag

SEQ ID NO: 48629 - DNA, 580 bp, Homo Sapiens
ggatgtagagcgacagtggagggggcatgacctcaatgaggacggcctcgtttcctgggaggagtataaaaatgccacctacggctacgttttagatgatccagatcctgatgatggatttaactataaacagatgatggttagagatgagcggaggtttaaaatggcagacaaggatggagacctcattgccaccaaggaggagttcacagctttcctgcaccctgaggagtatgactacatgaaagatatagtagtacaggaaacaatggaagatatagataagaatgctgatggtttcattgatctagaagagtatattggtgacatgtacagccatgatgggaatactgatgagccagaatgggtaaagacagagcgagagcagtttgttgagtttcgggataagaaccgtgatgggaagatggacaaggaagagaccaaagactggatccttccctcagactatgatcatgcagaggcagaagccaggcacctggtctatgaatcagaccaaaacaaggatggcaagcttaccaaggaggagatcgttgacaagtatgacttatttgttggcagc

SEQ ID NO: 48630 - DNA, 499 bp, Homo Sapiens
gtctgcttatttattgtctttttgccccataagtccaaggtttacatgaacagggaacttgtctgttttgtttattactgtatcccctatgctggcacatactatgtaataagtgtttgttgagtgcatgagtgaataaccattctaaaaaactctgatgtttaaagccctttgctttatataagaattttacttggaaccctggtatttttgtttgtatttgtttgttaataaatgtcaagagttcagtagtaagataggtttcagaaatgctaagttaaacagaataaagaaagaatatgtattacaggtcctggcagagccttgaatatgctaacatttgacagtgggagtctttgagaattatcacatgaagctgctgtacattacaacacattctaggaaatgctgtcttagacaaaaacctgtcatattagaattggggtaaggggcacgatactgaccgtgaggcagcagattcctatggactacattaaaa

SEQ ID NO: 48631 - DNA, 729 bp, Homo Sapiens
cccttgcaactttatggttcaataaatatataattttttacaaatgtaaaattttacatttaagcatttgtaaagttacagcaaaagatgtacctgttaatacacagaatgtgtacagattatttgttatgacaataaaacactcaaaataaatggtctttagcatctcaaattccaactgaaatcattttagtattaactcttcttcccaaagcaatgtctcatttcttggctgtgcaggtgatgccatgttatatccaataactagaaaaatcactgtgctgaacttttatgtttagcttccaagtatttttctaatgttttgcatttcaagtggtatcactgttaaatgccatttgttttcagattgtggccttttattattggctgctagatcctggtgtttctatgttcttttttaagcaccaaaaagaagatggggaagaaaagaaggaaaattttctgatataaatatgttgttcaaattatgagtattatttaaaaaagaaaaaggaacataacccaggagtctaagttaaatctaatattgttaatactgaacttgcaggtccaggttggtatacattccaccctctagaagtattttcttacagtagataagctgctcacattttgttttgaatgggcatctcctgaggaaatgtagcatgacattggtactaactgcatgtgtaaatacatcatactggcaaaccgtaaaatataaat

SEQ ID NO: 48632 - DNA, 368 bp, Homo Sapiens
cttataaagtcaaatgggagatacttgtttgcaagaaatagttcttttggttcttacttttccataaggattgagtctcaaaatgtctggtagcatccactgcattttgtaggggacaataacaaagaagatgccagcaatatcttctatcttttccaacattattcacctctcccacccaaggacaatggtgggctggacagagcattcaatgaccgagaatctaccataagctactagggccacatcttcccctttcttctcccccaggtttgtcccatttgtactgactctgacccaggttgtcatgacttgagactcactagaagtttcagaaagatgcagactgctttaaaaaaaaaaaaaaa

SEQ ID NO: 48633 - DNA, 569 bp, Homo Sapiens
caaaaaactttaaaattttaagtattaattgctcaggaaaaaattaaaatgctggggtgctgaaatctcaagggccccattacaaaactccttaggaacctcgccctctctctgctgtaaggactggttccagaatgagagaatttaaaagacattccccccccaaaatgttcataatgtcaccccggaaacctgcgaatatgttatattacatgaccagggagaagtaaggttgcagatggcagtaaggttgctaatgggctgaccttaagataaggagatgatcctggattatctgggtggacccaatgtaatcacaagggtccttaactgtcggaatagtgaggtggctgagtcagaggcagagtgatgcaatgactgaaagacttaaccagccatcaccggctttgaatacggaagacggtcatgagccagggaatgcaggcaggctctgggagctgaaaaaagccagaaaatggattctcccctggagcctccagaagggatgcggtcctgccaacccttgtcagtgagcatttcagatttctgacttccaggactgtaagaaa

SEQ ID NO: 48634 - DNA, 781 bp, Homo Sapiens
  misc_feature (673)..(673): n is a, c, g, or t
agaggtaatccctttccacacactgagcttcaaggaagcacattctgataccctcttcactattggcaactcaatcaccggcattatttccagtgtacttgggcatatttctttgccttctatgatccgaaaaatatttgcaactttaacaagacctctggcattattttatgaaaactcaaagcttgatgaagttcctaaagtatatagttgtctgaacaacaagttagaaaagctactgggagaaattattgcttgtctgcaattcagctacaccggaacttatgatagtgaacttcttgaacaactctccccactattatgcataatatttctgcacaagaataaacagattcgaaaacagagtgctcagttctggaatgccacttttgccaaagtgatgatgttggtttatcctgaagagttaaaaccagtactaacacaagccaaacaaaaatttctgctcctgttgcctggtttggaaactgttgaaatgatggaggaatccagtggaccatattctgatggaacagaaaattcacaactaaatgtgaagataagtggcatggagagaaaatcaaatggaaaaagagattcatttttggcacaaacaaagaataaaaaagaaaatatgaaaccagcagccaaactgaaacttgaatcttcgtctttnaaagtaaagggtgaaattcttttggaagaagaaagtctactgactttgtgttatacctcagaaagaaagatgcaagggaagatattactgatcatcaaagagtctcaa

SEQ ID NO: 48635 - DNA, 627 bp, Homo Sapiens
  misc_feature (10)..(10): n is a, c, g, or t
  misc_feature (30)..(30): n is a, c, g, or t
tccaggcagnagtttgtgtctacccctganctggctgcccaatctgatttcatcgtcgtggcctgctccttaacacctgcaaccgagggactctgcaacaaggacttcttccagaagatgaaggaaacagctgtgttcatcaacatcagcaggggcgacgtcgtaaaccaggacgacctgtaccaggccttggccagtggtaagattgcagctgctggactggatgtgacgagcccagaaccactgcctacaaaccaccctctcctgaccctgaagaactgtgtgattctgccccacattggcagtgccacccacagaacccgcaacaccatgtccttgttggcagctaacaacttgctggctggcctgagaggggagccgatgcctagtgaactcaagctgtagccaaacagtagagatggagggccgggaagcaaaccgtgccctggtattgtcagacacacccaggcttgatttggatccacaggcagagccaagggaaggtgtgattctctgaggaaagagtgattctgatatatgtacttgtcacattggtgttggacacatttgcgccaaaagtatggtaattctattattaaataattctctgagaaaaaaaaaaaaaaa

SEQ ID NO: 48636 - DNA, 432 bp, Homo Sapiens
gtgttgggattacaggcgtgagacactgtgacccgggacgattttcaatcacagttttttgttacgagtggaaaatgcgtatttataagaatgaagtagtacagacatgaatgtgtagaaatctgtataatcctgccatccaaggatggcacctgttaatgtgtatatcaaggatgtccaatcttttggcctccctgtgccacactggaagaagaagaatcgccttgggccacgcataaaatacactaacactagcaatacctgatgagctaaaagaaaaaaaatcacaaaaaaacctcgtactgtttgaagaaagtttacagatttgcgttgggccgcacgttggacaagactgctatatgtatattctaggttttcccctataggtatacttatgtgaaaatgattattgtgataaattttgttttgaga

SEQ ID NO: 48637 - DNA, 636 bp, Homo Sapiens
agcctccacgactgccaagtgccaagcggctaggaaccttcccttctggccttggggtcaaagctgcctcagatggaagaccctcacagggggaatgtggggaactctctaggtgaggaaaacaggacgctgggatgagcccaggaaaggggacctcaacataggtccacaccattcatcccccctgcccagtgcccccacctcaccaggcacattcttctctgtgaagccctcagtggggcctggcccagcccctgccacactccctggttgagcaggccctgcagagcctgaggtcagtggttgcagggcccctggggcagatgggcccccgtgctttgaaggagacctctggctggctgtggttgggcggctagatgagtagaaagaactcagcgtctgtggcttatgtgtctggctctctcggtccaagagtttgtctaagatctggaagacagaagcagtgacctccagagaagcagtgacaggatgccctttagctcctgacttctattaccttcctttctccttgaaacagccaattgctacatcctcaggggagccttccccacttacaaccacaggatgacctcctggtttacatgtctttttgtaacttatttaaccccaacatat

SEQ ID NO: 48638 - DNA, 843 bp, Homo Sapiens
ggggacatacttcgcgaccaggttcttcatgaacatatccagagattgtctaaagtagtgactgcaaatcacagagctcttcagataccagaggtttatcttcgagaagcaccatggccatctgcacaatcagaaatcaggacaataagtgcttataaaaccccccgggacaaagtgcagtgcatcctgagaatgtgctctacgattatgaacctcctgagcctggccaatgaggactctgtccctggagcggatgactttgttcctgtgttggtgtttgtgttgataaaggcaaatccaccctgtttgctgtctactgtgcagtatatcagtagcttttatgctagctgtctgtctggagaggagtcctattggtggatgcagttcacagcagcagtagaattcattaaaaccatcgatgaccgaaagtgaccaagaccaaggcccaccaaggcagcagactgttaatcagacaaacagatctctgagaaggtgcatcagctgctttgaaggctgaagattgttttgtatgatactgcacagcatcaggcattttaaagcagatctttactaaacaggttaatgagctaacaagcaggttctctcgtctttgggctctttcctttctgagttgcatattctattttcttgtccccaagtagagactagtactacaaaaagggaccacatttttcaagtatttctaagtataaaaaacaaaacaaaaatctcttaagaaatgtctagacctccattcttggattccctttctttccttttattttaaaaaagaacagtaccccctctttttaagatgctgtcttacattaatgagcatctaat

SEQ ID NO: 48639 - DNA, 392 bp, Homo Sapiens
tcaccctgggcgacagagcgagactacgtctcaaaaagacatcagaaagcctgcttgctctctgcaccatgtgaggatgcaggaagaagccagctgtctacagaacaggaagagaaccctacgagaacctaaccatgctggcgacctgttctcagacttccagacttcagaactgtgagaagtaaattgttgtttaagccacccagtctatgatgttttgttatggcagccccagctaatatatggagtggaaagcctagatttatctactgggttcttttcctgtcagcagttcaacatgtgtagtagctttcagtctctgctgtttgtgccaaatatataagaaataaaatcagataacttttttgtaaaaaaaaaaaaaaaaaaaaagg

SEQ ID NO: 48640 - DNA, 412 bp, Homo Sapiens
  misc_feature (378)..(378): n is a, c, g, or t
tgctatccaggatgactgtgttgctgcagtctttgagtggttggagcgctgtaatgtctatgttaatagctgggaaatcgcagtagcagcaaccagaccactccaatggaacaatccaagttggggtaagtttgattgagcaaaaaagtcatgctgactgtgtgatgaagaggcagaactggtaacagtgacaggccctgcagtcagcagctgtggattttatgtgcagggcagactgatctggaaaatgggaagagctgactgccaataacaccttggggggaggtttgttcagtgcatctccctactcctttgtatacctctggattgacatgcagaagcttaggaaataaaacacacttgtaacatcacagggtncaagttaagtacatgtggatgccagtgtagagag

SEQ ID NO: 48641 - DNA, 696 bp, Homo Sapiens
gcccgtggacattgttataagtttggaatgtcaaaaaatttataatcaagtgtttcttctcttattgcaaataaagtgggcaaaatatagtctggatgttttactttttggtgaactggttagtactgcagaaaaaccacgacttaaagaaggccttatacatgaacaagacacagttgctcagttcggaccacaaaaagaaccagtaagacagcagattcatcgcatgttcctcttaagagtgaagctcatgcatttcgtgaacagcttgcacaactacatcatgaccaggattctacacagtacagggctggagtttcaacatcaagtcgaggaagccaaggatttagatcaattgattaaaattcactataggtatctgtcaaccatccatgaccggtgtctgctgagagaaaaggtcagctttgtgaaagaagctatcatgaaggtgttgaacttggctctcatgtttgcagacggttggcaggcaggcctgggcacttggcgaatggaatctatagagaaaatggaatctgattttaaaaactgccatatgtttcttgtaaccattttaaacaaagccgtctgtagaggatcctttccccatttggaatctctagcgttgtcactcatggctggcatggaacaaagttaaatgtcttcagcgtaataaatatctccgactttgtcatcata

SEQ ID NO: 48642 - DNA, 527 bp, Homo Sapiens
gtgactggagtgatttgcacccggatgcctagactcgccatctgctcaaagactgctcagaaagccctcccatgcattcccctgctgcataccagcccactctgcctgcagctgctgtctgcaggacttcatatctatgccacactgtgtaaaagctgtgcttcaagaaatcacaaaaacattttcctgcacctactacacagcctgagtgcggcataagttgaccttgcttgctaagaaatggggcaagaaatgcttttttgtgtgtgtcatgtctgtttgtttttcaattaagagaggaaagcattaggcagatggaatgtacatgtgaggatgaggagacagaaaacaagtagccctttccatcaagatagagggttttctggggttgctggctattgaatgtcactcctgatttctctttccaaggcactgtaccaccagcctactgagattgtgtgggagctttcatgggggttgtatttcactgatgaaaataaattttttgcataatgggaaaaaaaaaa

SEQ ID NO: 48643 - DNA, 894 bp, Homo Sapiens
  misc_feature (872)..(872): n is a, c, g, or t
ccacgcgtccggtccaatggggagctgaaccacctgccgctgaaggagcgcatggtggagatcggcagtcgctggcagcgcatctcccagagccagaaggagcactacaaaaagctggccgaggagcagcaaaagcagtacaaggtgcacctggacctctgggttaagagcctgtctccccaggaccgtgcagcatataaagagtacatctccaataaacgtaagagcatgatcaagctgcgaggcccaaaccccaaatccagccggactactctgcagtccaagtcggagtccgaggaggatgatgaagaggatgaggatgacgaggacgaggatgaagaagaggaagatgatgagaatggggactcctctgaagatggcggcgactcctctgagtccagcagcgaggacgagagcgaggatggggatgagaatgaagaggatgacgaggacgaagacgacgacgaggatgacgatgaggatgaagataatgagtccgagggcagcagctccagctcctcctcctcaggggactcctcagactctgactccaactgaggctcagccccaccccagggcagccagggagagcccaggagctcccctccccaactgaccacctttgtttctcccccatgttctgtcccttgcccccctggcctcccccactttctttctttctttaaaaaaaaaaaaaatacggtggggggtaggggggctggaagagccccaggcccaggactctgcagcctcagagacatcagcccccttggggggtcctcctccaggggacaggcaactatcagaactaagccagcaccgggacccagcctggccccacccacccacttcctgcactttgcgggtccggncatggaccatgggaccggaaaa

SEQ ID NO: 48644 - DNA, 520 bp, Homo Sapiens
ggcacgaggagagccttagtaagtacgtgcctgaaactgaaaccatgtgcactttaatggaaggtaagctgaacttctttcttttcaaacctagatgtatcggcaagcagtgtaaacggaggacttggggaaaaaggaccacatagtccatcgaagaagagtccttggaacaagcaactggctattgaaaaggcgcagttgtgtagcagttgagtaatgctggttagctgttaaggtggcgtgttgcagtgcagagtgcttggctgtttcctgttttctcccgattgctcctgtgtaaagatgccttgtcgtgcagaaacaaatggctgtccagtttattaaaatgcctgacaactgcacttccagtcacccgggccttgcatataaataacggagcatacagtgagcacatctagctgatgataaatacacctttttttccctcttccccctaaaaatggtaaatctgatcatatctacatgtatgaacttaacatggaaaatgttaaggaagcaaatg

SEQ ID NO: 48645 - DNA, 609 bp, Homo Sapiens
aacattcatcattggttattctgggcatatcatgactttattcccgttgcttaccatctacctgggacacatctctctttgattaaatatattctttttctttgtactttttaggtagacagagaatgtagatcattgaaagcattatttattcctaagattggcaggcacagaatcatttttaagaaccaaatacccagtcctgccttaaaggccacatctatgatcatcagctctgttagaaataacagcctggcataattcctaaatacaagtctgtagatatatccaggagatagggttacactgttttctaaccttttttaaatcccttaatcttgaggtaaactgcatgcatttagtcaaacaagcatcataaaatttgtttcctcactgtttgggcttaacctcctgatagcctgttttactgaataacttgaccctaacctgtagagaataagagcattcaaattaggaaggcaggactatccatctttagtgcttttcctgccgttaaacaacaatgtgaacttggtcaagtcatttctgttctttatctgtgacatgaggtaactgtattaaattttcagcatcaaaaaaaaaaaaaaa

SEQ ID NO: 48646 - DNA, 755 bp, Homo Sapiens
  misc_feature (720)..(720): n is a, c, g, or t
acatcccttgctggtgataccagcaatagttcttccccggcctccacaggtgccaaaactaatcgggcagaccctaaaaagtctgccagtcgccctgggagtcgggctgggagtcgagccgggagtcgagccagcagccggcgaggaagtgacgcttctgactttgacctcttagagacgcagtctgcttgttccgacacttcagaaagcagcgctgcagggggccaaggcaactccaggagagggctaaacaaaccttccaaaatcccaaccatgtctaagaagaccaccactgcctcccccaggactccaggtcccaagcgataacactgtctaagcacccccaagccactatccactttgaatcctgctccatacattgggtgtatatttattctgaacgggagaagttatattgttaaaagtgtaaaagaataattgtgttatgaagctgccttattttttttctttttgtaagttactattttcatgtgaatatttatgtagataaaatttgcctcctggtaaccctgtaatggatggggcccagaaatgaaatatttgagaaaaacaagtgaaaaggtcaagatacaaatgtgtattaaaaaaaaaaaagcctattaatagggtttctgcgcggtgcagggttgtaaacctgctttatcttttaggattattcctaaatgcatcttctttataaacttgacttgctatctcagncagataaattatattaaaaaaataagaatcctgca

SEQ ID NO: 48647 - DNA, 412 bp, Homo Sapiens
gatactcattttttctttatcacatggctgctacgggcacaagtgactatactgaagaacacagttaagtgttgtgcaaactggacatagcagcacatactacttcagagttcatgatgtagatgtctggtttctgcttacgtcttttaaactttctaattcaattccatttttcaattaataggtgaaattttattcatgctttgatagaaattatgtcaatgaaatgattctttttatttgtagcctacttatttgtgtttttcatatatctgaaatatgctaattatgttttctgtctgatatggaaaagaaaagctgtgtctttatcaaaatatttaaacggttttttcagcatatcatcactgatcattggtaaccactaaagatgagtaatttgcttaagtagtag

SEQ ID NO: 48648 - DNA, 517 bp, Homo Sapiens
cgagcccggcgcaccgagccggccgtgccaccgagctgcggctctggccccggcgccgcgggtgcgctgcggatgggcttggggcgcacccagcgagcagcgagagtcgcggtgtcccgggcgctcgctggcaccgtggccgcagcggccggcctgggagccaggagggcgaggcggctgcaccttcggggccagattggagttcgaagagtgtttggtaccccagaagctcggggccggggcgatggctgcagcctcgggagggtatcgccggatcgaactccgggaaagggaagcaaaggcatggaacctccgcacactggatgagaatccatcttccattcgagctgggaatagactttgtgaaagatattatgtaatggagtctcgggaaccctgagacctctccagcgaagctgaagtgaattaattaagtgctttaaacggtcttggtgctgtgttacgggagagagtgactggaaagtaacaagctgaatctttctccctggagtaaggc

SEQ ID NO: 48649 - DNA, 696 bp, Homo Sapiens
  misc_feature (666)..(666): n is a, c, g, or t
  misc_feature (668)..(687): n is a, c, g, or t
ggtgtaatcagtgtgggaagtgtttcattcagagctctcacctcatccggcaccagataactcacaccagagaggagcagccccatgggcgaagccggcggcgtgaacaatcctcgagcaggaactcacacctggttcagcatcaacacccgaactccagaaagagctctgcaggcggagcaaaggcagggcagccggaaagcagagccctggctttgtttgacatccaaaaaatcatgcaagagaaaaaccctgtgcacgttattggggtggaagagccttctgtgggtgcttccatgttatttgacatcagagaatccacataggagagaaactttgctgatgacttttaaccacaagtaaaaaatgtggtaagtccacatagtgtactcatggaaggaggggctgggggtagaaatgtcatgggtgacttctgactttctaaggaaatgatgcttcccaagcacccgaggttggttggtcccaaatctatcaaactcagtgccctctttagcgacatattttgtgacattccttccattacaccacagtgagttcacaggtaatataacctacccacctgtgtaatgtcaaaaaaaatcaatatgcggccccattttgtaaaggatcattaaaatgaaagtaatttatggtagagtaacgaanannnnnnnnnnnnnnnnnnnnaaaacatgt

SEQ ID NO: 48650 - DNA, 796 bp, Homo Sapiens
  misc_feature (5)..(5): n is a, c, g, or t
  misc_feature (760)..(760): n is a, c, g, or t
  misc_feature (764)..(764): n is a, c, g, or t
ctttnataacatggaaatcccttgcaaaaaagacaattatagggattcaagtccaaagaatgtcccagattgggatgtatttatggaatctcaacacctatttataaacatttagtctgtgggagcagttgccagggcatgtgggtcagccagagcccaggcctctcatgagctccccaggagtccccgaggatgccgtatgcaagcctgggggacagccagggactcagaggcacctcagaagaagagcttggcattctgacgcataaaaatacagaaagtgaggtgggaagtctgaggtaattatggcctcagaaatgtatggatgtgtgttattttggattcatgcacaggtttccttttgttagactcttagaaatctttttctcccttgagattagtatatttacaaatgagacattgcatgaacggtcttaggaagaaagtgcctgctaaatcttaggtgttctttgttcaaactaagatcagggttgaaaactatggcccagggaccacttccagcctgactgttgttttgtttaatttaaaacaactttatagatagagaattcacatatcataatgtttgcccatttgaactttatgactcagtggtcacaaggtgtacgacgaccatcaccatggtctaatcccagaacgttaccacccagaaaggaaaccctgctcctatgaactcacgttgccttctcccgccagcccttggcaaccacggatccgctttctgtctctatggatttgnctgntctgggcatttcctataaatgggatcatacaa

SEQ ID NO: 48651 - DNA, 460 bp, Homo Sapiens
tatgtcaaaaaaaaaaaaaaaaaaaggaaaagtgaggcatagaactgactttattgttttgactaggaaagagcaaagggtttggaatcaaaagtcccaacttccccaccttcttaatagtgtgtgaatctgagtgccttattaaccttccctggtcccagtttcgtatctgtaaagttagaatagcaatcctgtttaatttgcttctctcaccagggatcagaaggccaaatgagatgatgtatgtaaaattgtaaagtcctccacagatggcacttgccacattacagagaacttgagacccccccccaccaataacgttccaaatcttccacatgcagatctggagtccaggtgtcctggctcctggccctgaactttttggctgggccaaggggcttttcggtaaagtgctttggaataaaacaggatgaacatgaatcataaaaaaaaaaaaaaa

SEQ ID NO: 48652 - DNA, 878 bp, Homo Sapiens
atgacaaccccatctcccgttactatgaccggctggctacggtgcaggcgcggggaacccaagccagccaccaggtcctccgcgacatcctcaaggaggttcagagtaacatggtgccgcgcagcatgctcaaggagtgggcgctgcacaccttccccaatgccacggactactggacgttccggaagatgttcaccatccagctggctctgataggcttcgcggaattcgtcctgcatttaaatagactcaaccccgagatgttacagatcgctcaggacactggcaaactgaatgttgcctactttcgatttgacataaacgacgcgactggagacctggatgccaaccgtcctgtcccatttcgactcacgcccaacatttctgagtttctgaccaccatcggggtctccggcccgttgacagcgtccatgattgcggtcgcccggtgcttcgcccagccaaactttaaggtggatggcattctgaaaacggttctccgggacgagatcattgcttggcacaaaaaaacacaagaggacacgtcctctcctctctcggccgccgggcagccagagaacatggacagccagcaactggtgtccctggttcagaaagccgtcaccgccatcatgacccgcctgcacaacctcgcccagttcgaaggcggggaaagcaaggtgaacaccctggtggccgcggcaaacagcctggacaatctgtgccgcatggaccccgcctggcacccctggctgtgactgtggccgccacggccacccggaatgtgaaggggcgctccggggctctgagcccgccagcttttacgactttctcccctggcctcgtttcctttatatttcacaagaaggcccccctac

SEQ ID NO: 48653 - DNA, 875 bp, Homo Sapiens
ggcccagccctgggattttcaggtgttttcatttggtgatcaggactgaacagagagaactcaccatggagttgggctgagctggctttttctcgtggctattttaaaaggtgtccagtgtgaggtgcagctgttggagtctgggggaggcttggtacagcctggggggtccctgagactctcctgtgcagcctctggattcacctttagcacctatgccatgagctgggtccgccaggctccaggaaggggctggagtgggtctcagctattagtggtagtggtggtagcacatactacgcagactccgtgaagggccggttcaccatctccagagacaattccaagaacacgctgtatctgcaaatgaacagcctgagagccgaggacacggccgtatattactgtgcgaaagaaaatggtgtcagcagttggactttccaagacactaccccaacctatgttgactactggggccaggaaccctggtcaccgtctcctcagggagtgcatccgccccaacccttttccccctcgtctcctgtgagaattccccgtcggatacgaagcagcgtggccgttggctgctcgcacaggacttccttcccgactccatcactttctcctggaaatacaagaacaactctggacatcagcagcacgcggggcttcccattcagtcctgagagggggggaagtacggcagccacctctcacaggtggctggtgcttccaaggaggtcatgccgggcacacgccaacccgtggtgtgcgcagtcacgccccgaggacaagaaaaaacggccttccactgttggctgagctgccccccaatgggcttttttgccccccgcgcagggttttggaccccgaaa

SEQ ID NO: 48654 - DNA, 529 bp, Homo Sapiens
atacaaatactttgaatatgtatcttaatgtaattaatcgttacaaaatatattattattacttaaagatctaggccttgctagtcaattctagccacatttaaattgcattcattttttggtttcagaaatctgatgtacctggagtagtaaaaacaggctccacgaaggaggtaggaattagatataaagaatttacagctggaaggaactttgtaggacattttgaacactaccttaagttacagatacaaaaactcaacactgccctctgcccatactttttctcatacccaggttatgtggtatgcaaaagcccctttgtgggagagctgtagctagccctgaaaagagagcttttctctcaattttaagttatttacattactcattcatttgttctatatagcatgtctatttacttttatcaaaatcaaacttattaaccaagttaattttgattttactatttcttaacatgattcatttctatttcaggtactcccctttactcctgcttctccttacc

SEQ ID NO: 48655 - DNA, 676 bp, Homo Sapiens
gcgtccgagagaacatattggaaggtcactgtttgttaggataaataaatactggataacctcgttagaaaggtggaaagaggagaacgtagcaatctggctattttggacaaagggaaggttattatattcatgtttataacatgaaaatggccttatttttgtttctgacatgagacaataatgagttaaatattttattggaatttcatcaaaaccttatttttactgttccttctaaaaatttgggaggggaatatagtagtaacttctctattgacacttttacctcaccgagggggtaaaagatgtagaactgctgttccctagaatgaaggtctgttgtttggtttttaaaaaaagaagagcagaaaaagtttgacacagtattatatgattttgctggactatttcactagaaaccacgtagaataggactaactgatctcttttgaaaggggctgatttgcttattcatcaataactaatccaatatgtggacagtaatcttaatttcaaagccttttttgaggatactacggtgtagcttaagtgaatttaaaaagagtgcataaaagcttgtttttaattacttataacaaagcacaaattacttctaacaaggcaaatatttattgacatataagacattctgctaggcattgtaaaaaaaaaa

SEQ ID NO: 48656 - DNA, 499 bp, Homo Sapiens
atgacacaggtgaccacatttctctcccacgcctagctacctccactccagttcagcacccagagacctcaggtgagaggtcccaagcacgtgtgactgtctcaggcagcagaagttacccgagccggcctcaggcttccccagaggagatgcaggagccgccagcggccacggaggaggaggaggaggaggaggaggaggaggaggggtctggtgagggcaccacgataagtcctgtaaacttggcacctttcccggaggcagagttttgggccattctcacctctgttccaggcaccatccgtagtggttctctgtctgtagcttccgctcgtctgtgtgggtgatgattaaagcattctcattgcacagttctgtttttaaatacagagtctgatgcctcctatttgtaacaatgggtgtagctcccctgcccatcttggaggtgcatggcccatcagggatctttaaagtgggagcaggaaaggctgctaaaaaa

SEQ ID NO: 48657 - DNA, 363 bp, Homo Sapiens
tttttttttttttttaatagggatggggtttcaccatgttgtccaggctggtctcgaactcccaacctcaggtgatctgcccacctcagcttcccaaagtgctgggattacagacgtgagccaccacgcccagcccaaaaattgatttctatttgccattctccaaaagacaaaaaaagttggtttttttttttttcggtcttttgtttgtttgtttgttttttaaaaaatagggtcttgctttgttgcccaaactggaggtcagtggcttttcacagctgcagttatagcctactgcagcctcgaactcttggcctcaagcaatcctcccacctcagcctcccaggtatctaggcctcgtgc

SEQ ID NO: 48658 - DNA, 559 bp, Homo Sapiens
tgtgtgtatgtgtggttttgatgccagcaatgcaaacaccaatatatctattaagaagtgattgaatttagattggaaaaaataaaatagttacatgtaaagacataaactctttccttcttaaatgtgattttcaactctatgatagaaactccctctaaaaaacaagcagggcaagaacaaacttacttgtaatgggtgagagaaaataagcaaatctcattggctcattcctgtttttaggaagttgcagtgggattaatgtcaattggaagggatgcagcaagtttagagaaggtgttggcactaacgctgcttgtttggcaaatcatcatcactgaggtattccacccagagactttttcaaaaaagtcaactaaagtgctaagtcataagaggagagccactatacccgttgtctttctgggctccttgagtttatctggattccaacagcacttggaaagtaccgccctccactacctcaaatgcaaacacaatctctgccagtagacattggaattagacttagtgaaaaccaggaaaaaaaaaaaaaaag

SEQ ID NO: 48659 - DNA, 312 bp, Homo Sapiens
  misc_feature (294)..(294): n is a, c, g, or t
ctcacccctgcttttctttctttttttgtattgtcaaaattgtatttccatattgaagcagcttgagtttctactgaaaatgagcccgaattatttcactattactgtaaagggttcatcttactctggcattctgagaatcagactgaaagtttaatttctgcagttccctcacattcagattctttctttgatgttataacacaaagtcattcctactcaaatgtaataaaattgaggctccacggaggcccgtgtccacatcagctgcagctcccgctcagacagacggcnctgccccacagcctgccc

SEQ ID NO: 48660 - DNA, 929 bp, Homo Sapiens
ttttaagaaaaaattgaaatgtaaggctgtgtaagatttgtttttaaactgtacagtgtctttttttgtatagttaacacactaccgaatgtgtctttagatagccctgtcctggtggtattttcaatagccactaaccttgcctggtacagtatgggggttgtaaattggcatggaaatttaaagcaggttcttgttggtgcacagcacaaattagttatatatggggatggtagttttttcatcttcagttgtctctgatgcagcttatacgaaataattgttgttctgttaactgaataccactctgtaattgcaaaaaaaaaaaaaagttgcagctgttttgttgacattctgaatgcttctaagtaaatacaattttttttattagtattgttgtccttttcataggtctgaaatttttcttcttgaggggaagctagtcttttgcttttgcccattttgaatcacatgaattattacagtgtttatcctttcatatagttagctaataaaaagcttttgtctacacaccctgcatatcataatgggggtaaagttaagttgagatagttttcatccataactgaacatccaaaatcttgatcagttaagaaatttcacatagcccacttacatttacaaacttgaagagtaatcaatctactcaaagcatgcgaatattagaatcaaacattttgaaagtctgtccttgtaggactaatagaaaagtatggtctaacctttaccataggactttattctttaaactccattacatgtaagggccgttatattttgcagcctccacattaagaatacttggtatgctttctccaaagcggtgagcttatatacaagactggcatattaaaattttccgctacacttactccaagaaagctttggaatagcagtcttatgaactt

SEQ ID NO: 48661 - DNA, 401 bp, Homo Sapiens
  misc_feature (328)..(328): n is a, c, g, or t
  misc_feature (344)..(344): n is a, c, g, or t
ttattaatttgtttttgtgtgagtgtgtgtgtatgtgtttgttttttgcctaaaagtatttaactccccattacaccactgatttcaaagaaaaaaagctgaaatgtaagatcatatgatttgtttttaaactgaacactgtatactgtctttttatttttgcaaaattaatgtagtatccagtgtgtctttagataaccctgtccttaatgatattttcaatagccactaacccttgcctggtactgtttccggggtttaaactaagaacagaaatctaaggcaggctttattagtgcatagtacaaatcaattacatatatatggngatattatttttcccncttcaattgtttttcatgcagcttacccaatataattggtccggttagttgtacact

SEQ ID NO: 48662 - DNA, 498 bp, Homo Sapiens
ccaggaagaaatattattgagtttttaaaaactcagcttattgactcattgttttatataataaaatgcaacagttttaagtgtatatttcaatgagttttaatacatttatgtacttgtgtcactatcctcatagatagagacaaaacatttctatcacaccggcaatttcctatgtgtcccatcccaatcaatcctttcccctttgctggctccaaacaatgactctttcctatctttttagaaagattagaattgcttttctagagttccagtaatggaatcatacagtgtctaagtctgtttgtggtgctgtaacaaaatacctgagactgggtaatttataaattataggaatttatttctcacaggttctggatgctgaaaagtttatgatcaaggcactagcaggtttggtgtctgagggcccagtttctaatttgaagatggtgctttaaacactgtcctcacatggtagaaggggcagatgggcaaaaa

SEQ ID NO: 48663 - DNA, 706 bp, Homo Sapiens
  misc_feature (616)..(616): n is a, c, g, or t
  misc_feature (667)..(667): n is a, c, g, or t
ggcactgtggcttcttctcagtctctgtccatccctggtgctcctgaaggttctgttctcagccttacacacattacctgggtgatctcattctctgccatgacttcacttgccatatatgtgctgattttccccaaattcctatttctcccgacctttacatctattttatttgcaggtcatatatctaataaggaattgatatccagtgtacatgtagaactcctgtaattcaatacagaaaccaaacagtccaattaataaatggagaagagatttgaatgaacatttttctaaagaacatctcaagctcaagatttcccagataacttttctttcttcaaaatctgcttctgtgtttcctcatctgtaggtggcacagcatacatctgatttcccaagccagaaacctcatagttattcttgactccaggaagaaatattattgagtttttaaaaactcagcttattgactcattgttttatataataaaatgcaacagttttaagtgtatatttcaatgagttttaatacatttatgtacttgtgtcactatcctcatagatagagacaaaacatttctatcacaccggcaatttcctatgtgtctcatcncaaatcatcctttctcctttgctggctccaaaacatgactcttcctatctnttagaaagattagattgctttctagagttcagtatggat

SEQ ID NO: 48664 - DNA, 581 bp, Homo Sapiens
gtggcagctgcggcacagccccaggagcgtgtgcgggaggctgcggcaggcggctgtgctggggcttgtgtggctgctgtgtctggggaccgcgctgggctgcgccgtggccgtccacgtcttctcggagttcatgatccagagtccagaggctgctggccaggaggctgtgctgctggtcctgcccctggtggttggcctcctcaacctgggggccccctacctgtgccgtgtcctggccgcccctggagccgcatgactccccggtactggaggtgtacgtggccatctgcaggaacctcatcctcaagctggccatcctggggacactgtgctaccactggctgggccgcagggtgggcgtcctgcagggccagtgctgggaggattttgtgggccaggagctgtaccggttcctggtgatggacttcgtcctcatgttgctggacacgctttttggggaactggtgtggaggattatctccgagaagaagctgaagaggaggcggaagccggagtttgacattgcccggaatgtcctggagctgatttatgggcagactctgacctgggctggggtg

SEQ ID NO: 48665 - DNA, 606 bp, Homo Sapiens
  misc_feature (128)..(128): n is a, c, g, or t
  misc_feature (554)..(554): n is a, c, g, or t
  misc_feature (601)..(601): n is a, c, g, or t
gagcagtgggaattctccaatactgccagggagcatgggcatcaatcccaccacactggaatgcaaaggggcattctgagtagaactgaagatgtgcccatccttgaccccacagttccagccatggnatgcgcatgaatgtgcacacgtgttgactgcggcatttgtttgtaattatgaaaacatctaagtttccatctatgggagaggggataatgtgggagtgcccaacagtggagttctagagagcagtaaaaataaatggactagagctgcacacgtcaaaatggatgaagataaaagacataaggatgggagaagaccacctggccacagaagtatatgtccaatatgatgctggtgtatccagagtgttcaaacaaacaacacaacactactcattgtttccaacgtgagtatgaaagtatggagcagtgcggaagggccaggagtgctgaatccacatggttacttctccaggcggggggccgaggaccagggctggagggtttactccagggagcttcagtgggtgcatgctggaatgttgctgnttcctggggctggggggacagagattgtgcatgctgttaaaccctcnatatt

SEQ ID NO: 48666 - DNA, 746 bp, Homo Sapiens
aaaatgtccattccacaaggtttgtgacatatttctgtgagcaggttctccctaacctcggtaccttgactaccccagtggaaggtcttgatatacagttggaggtattgaaattgttggcggagatgagttcattttgtggtgacatggaaaaactagaaacaaatttaaggaaactatttgataagttattggaatacatgcccctccctccagaagaggcagaaaatggagagaatgctggtaatgaagaacccaagctacagttcagttatgtggaatgtttgttgtacagttttcaccagttgggccgaaaacttccagatttcttaacagccaaactgaatgcagaaaagctcaaagatttcaaaatcaggctgcagtactttgcacggggcctgcaagtttatatcagacaacttcgcttagctctccagggtaaaacgggtgaggccttaaaaacagaagagaacaagattaaagtcgttgcattgaaaataacaaacaatatcaatgttttaatcaaggatctcttccacattcctccttcttataagagcacagtaacactatcctggaaacctgtacaaaaggttgagattgggcaaaagagagccagtgaagatacaacttcaggttcaccacccaagaaatcttcagcaggaccaaaaagagatgccaggcagatttataaccctcccagtgggaaatatagcagcaatttgggcaactttaattatgagcag

SEQ ID NO: 48667 - DNA, 781 bp, Homo Sapiens
cgcgtccgaaaacaacttctatgtgcatgtgaccttactcattttttagctacattctaacctgtcaagggaacacagattatttgctttctttgctacatctagatttgtttagagtcaagcaataggaatacgcattatctatagatttaaaccaaggaattctgtaaagactgtagaggtgattctgatagaagtgtaattactctagttctatgacagaatggattatgcctcatagaagttattggcaatttgtcttaattttcctttccctttgtagaacaagattaaagtcgttgcattgaaaataacaaacaatatcaatgttttaatcaaggatctcttccacattcctccttcttataagagcacagtaacactatcctggaaacctgtacaaaaggttgagattgggcaaaagagagccagtgaagatacaacttcaggttcaccacccaagaaatcttcagcaggaccaaaaagagatgccaggcagatttataaccctcccagtgggaaatatagcagcaatttgggcaactttaattatggtgagcgtttccgtttgggtacaaggaatatgagagattaggcagaaattgtgttatactttattttaattagtaattatatacagtgtcatggttctatccaatgacttttctgaattagcttggagaactagggctgttgaggaaatgatttatcccattcctctctcattcacccttctgggctgactgtattgaacatgcaacattaaacagtaagcacttaa

SEQ ID NO: 48668 - DNA, 768 bp, Homo Sapiens
cgggaagatggcggcggcgggagccctggaacggagcttcgtggagctaagcggagctgagcgcgaaaggccgaggcactttcgggaattcacagtctgcagcattgggactgcaaatgccgtggctggcgccgtaaaatacagtgaaagcgcgggaggcttttactacgtggagagtggcaagttgttctccgtaaccagaaacaggttcattcattggaagacctctggagatacattggagctgatggaggagtcactggacataaatctgttgaataatgccattcgcctaaaattccaaaattgcagtgttttacctggaggggtttatgtctctgagactcagaatcgtgtgataatcttgatgttaaccaatcaaacagtgcacaggttacttttaccacacccctcccggatgtataggagtgagttggtagttgacagtcagatgcagtcaatattcactgacattggaaaagttgatttcacagatccttgcaactatcagttaattccagcagtacctggaatatctcctaattccaccgcctctacagcctggctcagcagtgatggggaggccctgtttgccttaccatgtgcttctgggggaatctttgttcttaagctacctccttatgacatacctggtatggtgtcagtcgtggaactgaaacagagttcagtaatgcaacgattgcttacaggctggatgccacagctatcaggggtgaccagtcccttcagatcgcccctcagtcttgt

SEQ ID NO: 48669 - DNA, 365 bp, Homo Sapiens
gcgtcgacgttggaacagacagcagtggagctggagaagaggcaggagggcaggagcagcacacagacactggaagacagctggtgagtgagcccgcccttgggccccaggagctgccctgcctggacctaggcccagcaatgagatcccccaatgccagtgcaactaagagaagggttccactgggaaggctgagaacccctctcctcatgggttctctacaggcaaaaaggcaatgtaacctagtacgatggttcccagaattcctttcgaatttgccatttcgtttcccatgaatcacctatgctagttcacgcctaatgttattctttatcttgatatagtgacatttattttgctaaaaa

SEQ ID NO: 48670 - DNA, 505 bp, Homo Sapiens
aggctcctcactcttctccatcaggcattaaatgaatggtctcttggccaccccagcctgggaagaacattttcctgaacaattccagcctgctccttttactctaggggcctctgtcagcaagaccatgggggcttcaagagcctgtggtcaggaaatcaggtccagccttccctgtagccagacagtttatgagcccagagcctcctgccacacacatgcacacatatctagcattctttccagacagcatcctccccgccttccaccttggtagatgcaaggtctatctctcccatcagggctgccaaagctgggctttgtttttcccagcagaatgatgccattctcacaaaccaatgctctatattgcttgaagtctgcatctaaatattgatttcacgttttaaagaaattctcttaaattacaattgtgcccaatgcagggtggctctggggggcaagtaggtggtacaggggattggaaacatgctccgcgcctcca

SEQ ID NO: 48671 - DNA, 625 bp, Homo Sapiens
  misc_feature (592)..(592): n is a, c, g, or t
  misc_feature (605)..(605): n is a, c, g, or t
atggagttgggactgagctggattttccttttggctattttaaaaggtgtccagtgtgaagtgcagctggtggagtctgggggaggcttggtacagcctggcaggtccctgagactctcctgtgcagcctctggattcacctttgatgattatgccatgcactgggtccggcaagctccagggaagggcctggagtgggtctcaggtattagttggaatagtggtagcataggctatgcggactctgtgaagggccgattcaccatctccagagacaacgccaagaactccctgtatctgcaaatgaacagtctgagagctgaggacacggccttgtattactgtgcaaaacatggttcggggagttatatcgggtactactacggtatggacgtctggggccaagggaccacggtcaccgtctcctcagcacccaccaaggctccggatgtgttccccatcatatcagggtgcagacacccaaaggataacagccctgtggtcctggcatgcttgataactgggtaccacccaacgtccgtgactgtcacctggtacatggggacacagagccagccccagagaacctccntgagatcaaaganggacagctactacatgacag

SEQ ID NO: 48672 - DNA, 701 bp, Homo Sapiens
  misc_feature (44)..(44): n is a, c, g, or t
gaaagattgactgagtatggttctgagatctctcaggtgattantggcagaattaagttccttttcgattcttggtcttatttcttcacccatctactatagtgcattcttgccatgcagccctttttatggagcaagtcacaatacagcagcttgcttcattagggcaagcaagcaagacaagctgcagcaaatgcaagtaacatggaagtctttataatctaatcatggaattgacatagttaaaaacaaatcattaggtaggctccaaattgatcagaacatggttattggacaaaaccatgactgtcaggaggctgcatcatggggagccattttacaagcagcaccatgggtgttatgggggattttattacatttgttctgctcttaagagttgaaagtctttaaaaatgtgtaagtctgtcgtttgttcttgacttctgtcatgttttcaagaatgcattatgcaatgatgtagaatactgttctgtaaagtagttgtctagactctagtgaaaataattacagataatctcagttcatcaacgaatcggtatattaatgtcatatttaacagttataggaataaactaagcataataataaaaaaaaaaaaaaaaaaaaaaaaaaaaaaaaaagaaaaaaaaaaagagaaaaaaaaaaaaaaaaagaaaaaaaagaaagaaagacaaagaaaa

SEQ ID NO: 48673 - DNA, 696 bp, Homo Sapiens
  misc_feature (399)..(399): n is a, c, g, or t
  misc_feature (424)..(424): n is a, c, g, or t
  misc_feature (435)..(435): n is a, c, g, or t
  misc_feature (520)..(520): n is a, c, g, or t
tcttgttattgatattacctatttacatcaaaaagcttttagaaaatggtatgatgtaagcaattcttgtcctggtgaaatctgatggtgtaacccgttttactattggcgctgcttcataacaaaaatgaaaagctatatacatctacagccagaatggattgtttatgtcatataatttcctttactaagttcacttacattacttacagagttttattcattgccataatagagccatgtaggaaatgcactgactgcatgttattgtggcaagaatatcctaaatgtcattaaaatcctccaacatgatggatctacttatggtcttgtttgttgacatgccaaattaacatagttccatctggaaatgagcatttgaaatgataatccggctgngcacagtggctcacccctgtaattntagcactttgngaggccgaaggggggcagatcacctgaggtaaggagttccagaccagcctggctaacatggcgaaaccctgtctctactacacanacgcgcgtgcgcgcgcgcacacacacacacacacacacacacacacacacacacacacacacttagccaggcatggtggtgcatgcctgtaatcccagctacttcagattctgaggcaggaagaatcacttgccccagaggcagagtttgcagtgagccgagatgcgctactgcct

SEQ ID NO: 48674 - DNA, 632 bp, Homo Sapiens
cacaccacctgagtccttctcaggcccccccacttctcaagctgacttggattatgtggtccctcaaatctaccgacacatgcaggaggagttccggggccggttagagaggaccaaatctcagggtcccctgactgtggctgcttatcagttggggagtgtctactcagctgctatggtcacagccctcaccctgttggccttcccacttctgctgttgcatgcggagcgcatcagccttgtgttcctgcttctgtttctgcagagcttccttctcctacatctgcttgctgctgggatacccgtcaccacccctggtaaatatctcagctctgattcacttaaagacaatagtgatgtgagttcggcccctcttgttttcaaggaggtgttgctcctcatgttcctgagcttgacagagggtcccatgccccacacaactaggaaggtcttcttggtgtcctctctcttacctgccatagccaagcaaattgatccctcctgttggttcccagggttcatggagaggagagacaaggagtcctctaagactccctgtggaaatgctgcatcctcatgagcacatttcttgattttccagtgatggaagtagtaaattgtgaatatataat

SEQ ID NO: 48675 - DNA, 803 bp, Homo Sapiens
cgggataatgttgatgcttttaaaaatacttatgttaaaaaagcattttctcgtatttctggcaagaaaagtcatggaacttttttccttctatctggaacaaggtcagccataaatagtttctaatacatagtgggcacacatttggtaactaagattaattatatctactgaatttactgaattccatgtccttcaagggcagtgactaggtgactttgtatcttcacacaccaatgttgcagtaaatgtttgagtcagattgaagtttcatcccggctaggtaggtgctaacttaatgacaccagtttccacatcttcagctttgatgtttcaacctgcagaaggatttgggcacggaagtggctgtgtcctaattgtcttcaaatatttgaaggtctgtcatgcagcaagggatttcatttattttgagtaattattgagtacagaaaaacagatttcacttctatatgaaggcaaaagttgtttatggtgagaactagcggtggaaagaaggggctgctccttccctaggggcttttgggatcagctggttccccacttggcgtgaatggctattaggaggtatcacagaggtataggagggtctttctgagagggactcctgggtattccgatggcaactatattcgaggacttctgtacttcccttttagcactgtggcttttgttttttgttttcttatgctggcttctagagttgtggacgtagcaacatccgcagacacctacatgaaccctaggaagattttttagtagattaaagacccacctgctatcga

SEQ ID NO: 48676 - DNA, 665 bp, Homo Sapiens
tgcagagcttccttctcctacatctgcttgctgctgggatacccgtcaccacccctggtccttttactgtgccatggcaggcagtctcggcttgggccctcatggccacacagaccttctactccacaggccaccagcctgtctttccagccatccattggcatgcagccttcgtgggattcccagagggtcatggctcctgtacttggctgcctgctttgctagtgggagccaacacctttgcctcccacctcctctttgcagtaggttgcccactgctcctgctctggcctttcctgtgtgagagtcaagggctgcggaagagacagcagcccccagggaatgaagctgatgccagagtcagacccgaggaggaagaggagccactgatggagatgcggctccgggatgcgcctcagcacttctatgcagcactgctgcagctgggcctcaagtacctctttatccttggtattcagattctggcctgtgccttggcagcctccatccttcgcaggcatctcatggtctggaaagtgtttgcccctaagttcatatttgaggctgtgggcttcattgtgagcagcgtgggacttctcctgggcatagcttggtgatgagagtggatggtgctgtgagctcctggttcaggcagctatttctgg

SEQ ID NO: 48677 - DNA, 453 bp, Homo Sapiens
attacgtctcaaaacaaaaacaaaaaacaaaaaaagataaatgagcggtgtatggtgtatttttcaggtgcccaggtctttcatcagagccccatttcaagtgctcagtagcccctttggccagtgcgtcccaccacatgggacagcgcaggtccagtggcctccccagctgaccgcaggcagggaacaaggcagaccctagagggccaggccacagcaggggctgaggatgcctggtgaatggatgcctgggagaatggatgccagaattcacgcatgaggctctgaacagggctgggaaaacttccaaacgaagggaagctcatgtcttggtgcactttgtgatgatgcttcaacagcaggactgagatggggacatttacaataaacagaaatgtatgggctcgagttctggcctctgggaagtccactgtcaatgcaccagcaactttc

SEQ ID NO: 48678 - DNA, 567 bp, Homo Sapiens
atggctttcttatctaaactgcactgatgaactagattaaagccttgggagatttatactataaattcagtgatggcaagaaccaacactgtttttttgtgataattgtcagtgtaactattacctaccagtattgttcagagagattgaaacagaataaacgggctgttcttgaagaagcaaaaccagaatatgcattactttggtttaatacttagtgctaacattgaaactgttggtggtgatggattttgtagcttgctgcttgtttcaccactggtcaaattttaaccattaaattgccattcacttttagaatcttgtatttaagttttgattttcaaatgttctgcttcatgtgtctgtgaagaattgtactttaaaagtgtgtgtcctctgaggtgcttgagaaagtgtacactgcagaactgcccattctcattactgtgtcctattttattcatgcctgtgtgtttttcttaagtatgaattctagatacagctacttatggattcatcaatatcatgagcacttttgctggttccagtcaaatcaatggcatttaa

SEQ ID NO: 48679 - DNA, 600 bp, Homo Sapiens
catgatcatgcagcacaagcgggccatgcaggacatgcagctgctgtgggagaaggcagtccaacagcaccagcacggctatgacagtgatgaggaggtggacagcgagctgggcacctgggagcaccagctgcggcgcatggagatggataagaccagggaatgggccgagcagctgacaaagatgggccggggcaagcacttcatcggagacttcctgcctccagacgagctggaaaagtttatggagaccttcaaggccctgaaggagggccgtgagcctgactactcagagtacaaggagttcaagctgactgtggagaacatcggctaccagatgctgatgaagatgggctggaaggagggcgaggggctgggctcagagggccagggcatcaagaacccagtgaacaagggcaccaccacagtggacggcgctggcttcggcattgaccggccggcggagctctccaaggaggacgacgagtatgaggcgttccgcaagaggatgatgctggcctaccgcttccggcccaaccccctgaacaatcccagacggccttactactgagtgttctggaaatacatactttctgaatg

SEQ ID NO: 48680 - DNA, 880 bp, Homo Sapiens
tggtgcctttaagagatgattagatggttaagagggatgaatgccttactcttgcagtgagttcttgttctctcagttctggattagttcccatgagagtgggttgttataaagcaaggctgccttttgcgttggtctcttttgcttgcccgtccacttttctgccacagtataatgtggcaggaggccctcaccagatgcagctgcctgatcttgaacgtcctagtctctagaactgtgagcctaataaacctctttcctttataaattacccagtcttaggtatattgttatagcaacagaaaacggattaagacatatgttgtacttgaaccttaatgtacttgaacttgaagtttgatggctgcagcagctatagccatcttacttccatgtgaagcctaagaattaagcaacacatggaagggaacacatcttttgagccccaatttggccatgagttgcccttagatttttttagttatgtgagccaatacatttcctaaaacaggtaaaattatgtttttagacactgataaccaaaacaggtcaaactatgcttacggcaatttgctttaaaagagaactagacagagagaatttgttgccttttgaccaatgcttccatgagagagctgatattctgattcctgacctcaaccactatttgatttggcagatgtacacttacacactgcataatgacatttcggtcaatgatgggcgcttgagcccaggaggtcaaggttgcagtgagctgtcatgtgcactggactccaatctaaatgacagagtgagacctgtctcaaaaaaaaaaaaaaaaatccgggtcttattcgggggggaaaaggcggtgaattggccgggtcaaggtctcgac

SEQ ID NO: 48681 - DNA, 465 bp, Homo Sapiens
gtgaaaccctgtctgtactgggaatgcaaaatggctgggcgtggtggtgtgcacctgtgggaggctgaggcggaattgctggaacccgggagatggaggttgtactgagctgagaccttgccactgcgctccagcctggtgacagagttaagtctcaaaaaaaaaggcatcttcctaaagcaattgtatttgtgcttacctgtgccaggcactgttctaggtaagcactaagtgggctttaatacagcatattccaatggggaatcccaggaaccaaaagactaattgtccaagtccacaactagaagtggcacctctgcagaaacaagcatcaaattccctgctcaggaagaagccagatgagtcagccccattcgtctgtatgcccagtcccatccgtgtcctgctgtaactacatagatctcacctgagtaaagtgatttttttctgaaaaaaaaaaaaaaa

SEQ ID NO: 48682 - DNA, 385 bp, Homo Sapiens
gcacgagaagctatcagaatatagaggaagaaattgttgagcttccagatttggattacctgcgaaccatgactcatatagtctttgtagattttgataactggtcaaacttttttggtcatctaccagggcatctaaaccaaggaacatttatttggggctttcaaggtacggttaataagaaaaacaaaagaaaactttttcccacctcttagaatatagttcagtttaaaaggctcctcttaaaccttcctggatagaacataggaacataattggaatattgttcttttgtattatagttactctgctagaatcgttttctttacatgcctctgtggtaaatgttagctctatctggtgactcaaagtttatggatctttt

SEQ ID NO: 48683 - DNA, 659 bp, Homo Sapiens
  misc_feature (13)..(13): n is a, c, g, or t
ttatacttaaagnctgaatgacaattgtgtgaaagttacttgccttcataagatcaagtcaccactgttacacagctgacatatagtgtattacctttgcagctagtaaactataaagtttagatattgaatctcgttacagggttatttatataatgtgacattattcagtactgacagactacatgaagtagttttaaaatctagtgctatttttattttaaaggttagcaatgaggaggaaatgtgatctggctgtgtttgtcttctgtacaaagcctgaagtgcttatggttttttggctaacagccacagagggcaaagtttaagactttcttgtaaggactaactgttcttttcaagctactgtttgtttttctaaaagcaggatttgcttccgtaggaggcaagttccttgatgtggaatagtgcaacctgtatatgggttattataataggaaagacatttgtacttgcacagtttaaatcattcttaaattttgaacatgtgaattgtcccaaaaaatctttaattttttggtaatttttactctttttgtgcacatgttgatttcttaatgggaaatccttcatttaaagatagtgttctctgttgagaatatttacatggaataaaacaatcttttcatggccctgtt

SEQ ID NO: 48684 - DNA, 830 bp, Homo Sapiens
gcactagggatgatgcagagatggtctttcctgtttgtggacaagcaggcaggcaggcagagttcagggtcatgggctagggcagtcatgcctagtggtctctgagtgtaggattcttgaacctgctgatttgcatttcacctgtagttctacagtaaaaaatgattttatataactttggtatataagtctcaaaaagtgtgagtcagaagagatgaaacattatatttaaaatttcatatcaaagcttctaatacaacgttgctagagccatggcttggacataaatcaggaaaaaaccctcaaatacagaatcagttgtgttaatgcactagaacttgccttctgctttaaagccataattaatcatttaaatgctggataaaaacccatgtgtttgtctttagaaaaggtgttgagtggacttcaaggtttagatctgtgctgtcccatacagcagccactagtcactagcgggcctggctattgagcacgtaatatgtggctatgcgatgtgctctaattatcagatacacagccaggattcaaagacctagtacaaacacacagaatctagacatatctccccacactaatcatgtacttcgaccacattttcacaccgaatatgttcgggcctatcgggtttaataaaaacaccatctctacataactttctcaaaacacacttgcacacggctctcgtcagaacctttggacctctctttcatggctcggcagcatggacccgcgaagtggcagcgccgctaatccagacacccccggcgtgaggccgaccactccctcccaaaacaccgctgcgggacgga

SEQ ID NO: 48685 - DNA, 709 bp, Homo Sapiens
  misc_feature (584)..(584): n is a, c, g, or t
  misc_feature (653)..(653): n is a, c, g, or t
  misc_feature (700)..(700): n is a, c, g, or t
gcaaaatgaataaccgtgatctcaaaccccagcctgatatagtcttgcttccgttgcccactgcctatgagctagacagcaccaaactgaagagcccactaattacttcccccatgttccgtaatgtgcccacagcaaaccccacggagccgggaatcagacgggttccgggggcctcagaggtgatccgggagtcgagcagcacaacagggatggtcgtcggcattgtggctgctgccgccctctgcatcttgatcctcctgtacgccatgtacaagtacaggaacagggacgaggggtcctatcaagtggacgagacgcggaactacatcagcaactccgcccagagcaacggcacgctcatgaaggagaagcagcagagctcgaagagcggccacaagaaacagaaaaacaaggacagggagtattacgtgtaaacatgcgaacactgctcacacgcgagttttcacagttatttctatccacgcctatgaatctttggacggtgagatctcacagatgtcagaactgctggaactatgaaatggggtatataaccacgactctggtggggaaaaccgttntttaaaggacacacacacacacagcgatgcatctctctctaaagctcagccacggctgcggcaaggtcncagcggtcgctgggagacagaggttttgtgccctgctgtatcataancacacactt

SEQ ID NO: 48686 - DNA, 803 bp, Homo Sapiens
  misc_feature (1)..(1): n is a, c, g, or t
nttgatgttcagagaattccaacttcttacaagaacagatatttataagaaaacaaggcacattttggaatcctattcagaaaatatactgacttctttttcagtggtggacaatccaatcaatattgtatagcaagaaaaaatgaaacattacacagatgaagacatgttgaaatacatgaagatgacagccacatgtttactcctcccagatgtttttggggatgatcccagcctttttgtcatcatgaatgaacaggtgcaagtgtccacacctgtgttggaagttaaaaaccctttcaacatggaggtctgcgaattttctttatatttagaaagggagaggctcacaaaggtggacgactgtgttacagccttggctgcgctagtagctgcctttcatgtatttagaattgagtgtccaagaagactgtcccaaactttcaacttcctagaaacgctgattttcgatatgcacagtccttattttccttctttgaaagaaaaggaaaacgaagtaggatttcagcacccactcacttaatagcatgccaaatattgtactggaatttacctctgggaaaactgaagcttcataagaaattgtttttgatgtaggggttgtggtagatgtaggtatgagaaaacctctcttgatttacagatgcttatgaattcaatgctttctatctttcacttaaatttaaggtctttgtgagaatttggataaaattgtgcttcgttaaagagagagaaaaatacggactcttggcccaagggggagagttgtgtgggcgctttct

SEQ ID NO: 48687 - DNA, 942 bp, Homo Sapiens
ttacccacgcgtccgcgacccacgcgtccgcggacgcgtgggatcagagaacccatacacaagaaaagccttataaatgtaacgaatgtggaaaatctttctgtgtgaagtcaggacttattttacatgagagaaagcacacgggggagaaaccctatgaatgcaatgaatgtgggaaatccttcagtcacaaatcatcactcacagtacatcacagggctcacacaggagagaaatcttgtcagtgtaatgaatgtggaaaaatcttttaccgtaaatcagaccttgctaaacatcagagatcacatacaggggaaaagccctatgaatgtaacacatgcaggaaaaccttctctcaaaagtcaaatctcattgtacatcagagaacacacataggagaaaaaccttatgaatgaattggatattagaaatttccagccacaagtcagcctccataatgcctcagagtcttcacactgtggagaagggcctgttgacatcctgaatgttcaataactatccacaaactcgccttatgttactccaaagtaacagtaggggataaacccatagactacaacaactataggatggcttttgttacgaagtgatattctgttgaatatcagatggttaatactggcataaaacctcacagatttttttgaatttgtgaaagtttttggctacactaccaataggattatgttagcaattacactgaggagaaaatttgtcattttaagaaatctaaaagtgaaaaattttgctttagaaataaaatatgaccaattcctgtttttgaatttggatgccattattaagttttttaagggtatcttacccattaatttttataagatgcgccatttggtgggaaatggcaaaaggctttctacagaaatattcttcttagggcacaggtaatcaattttaaaaatt

SEQ ID NO: 48688 - DNA, 563 bp, Homo Sapiens
  misc_feature (410)..(410): n is a, c, g, or t
aattcaggtaaaagaaatctgctacttggaggggaggtttttttattcttccccactttctctttctaactccctacaaagctatttctaattatttgcttatgctgggcactgaattttctcttaggctgaccatatattttattaaagtagtcttgaattcaggagtggaaaaaaaaaagttatgttttagacctcaatgtaagctgaaaggaaataaaggaacttctatatttccatttctcaggctgattttccttcccctgttctcttatctgtatcatgacatgagatgtgaacctcagaaatgtaaaaacaaaaagtctagaataaagcattccttgaattttaaatgaacatgcttttagcagctggatacgaagcagactattttcaacaaattgaatgtntcccacttgtgtgagagccaaacaagtgccatacagaaagggacctcttcaatgttaccaaagctttgtggcagcatttaagtgtggtggctccatagaagtcactatagcatggacgagccacttggcttgctttttcctgctaatcaaagt

SEQ ID NO: 48689 - DNA, 828 bp, Homo Sapiens
gctccccaccgtccccgtcactgaggagcacgtaggctccgggctcgagtgccctgtgtgcaaggacgactacgcgctgggtgagcgtgtgcggcagctgccctgcaaccacctgttccacgacggctgcatcgtgccctggctggagcagcacgacagctgccccgtctgccgaaaaagcctcacgggacagaacacggccacgaacccccctggcctcactggggtgagcttctcctcctcgtcgtcatcgtcctcctccagctcgcccagcaacgagaacgccacaagcaactcgtgagcccacgtcggccgtcgggaaagcacggggcctttcccacccaccctcagccagcgccacacggcacccacagactgggtgccccggcggcgccacgcttggctggtcagcgctgcaggtcccgcctgttccagggcaggacccgggcccggcccaccggccccctggcttgggaaggcgtgggccacatggtcccctctggggcgtccccagcctccccgtcctctgtctaacctcaccctctaaacgttcagcggtggaaagatttttataattttaaattattactgctttgaaataaacggacgtttgagctcacgtggcggccatgcatggtttgtggcggaagacggggcccagcggctcccccagcgctgaagcacggggttcagcggctcccccagtgctgcaggtgctgccaggacgggccacgtgggcccccagcctccccctcggcgcctccacgaaccggagtaggggggctcgggaccatgaggatgaccagcaaaattcagaacaaaatggtc

SEQ ID NO: 48690 - DNA, 575 bp, Homo Sapiens
ggtccataactcggtagcatttaatttgaaaggttacccacattgagctcataccagtgtgaaacttccatggcattatcttttaaatccctaagattaaaaccccacacaaatgcactcaaagcaacccaacatcagtatcctgcagtttctatgggccctttctgcagcctttactcatggaagacaagggatctgggtttgtttaggaaacattttgtgagcattgtccaagccctaagtatggttggcctaagctttgctgaagctaagatcagtctgtttatgtttgcttaaaataggaacttaaaggactaaaatgtcatcgttatttatcctgattatagcctaatggtattttattttctctacagcaatatgactgctaaaagaaccaacccaggacagagccacaatcttcctctatttcattgtaatttatatatttcacttgtattcatttgtaaaactttgtattagtgtaacatactccccacagtctacttttacaaacgcctgtaaagactggcatcttcacaggatgtcagtgtttaaatttagtaaacttctttttt

SEQ ID NO: 48691 - DNA, 500 bp, Homo Sapiens
tggtccgagtgcactgaacccaagcacattgtggaatggaatgtatctctgttttctatcctcttggctcttggtggaattgaattcatcttgtgtcttattcaagtaataaatggagtgcttggaggcatatgtggcttttgctgctctcaccaacagcaatatgactgctaaaagaaccaacccaggacagagccacaatcttcctctatttcattgtaatttatatatttcacttgtattcatttgtaaaactttgtattagtgtaacatactccccacagtctacttttacaaacgcctgtaaagactggcatcttcacaggatgtcagtgtttaaatttagtaaacttcttttttgtttgtttatttgtttttgtttttttttaaggaatgaggaaacaaaccaccctctgggggtagtttacagactgagtgacagtactcagtatatctgagataaactctataatgttttggataaaaataacattccaatc

SEQ ID NO: 48692 - DNA, 579 bp, Homo Sapiens
atgtctcagagcaaccgggagctggtggttgactttctctcctacaagctttcccagaaaggatacagctggagtcagtttagtgatgtggaagagaacaggactgaggccccagaagggactgaatcggagatggagacccccagtgccatcaatggcaacccatcctggcacctggcagacagccccgcggtgaatggagccactggccacagcagcagtttggatgcccgggaggtgatccccatggcagcagtaaagcaagcgctgagggaggcaggcgacgagtttgaactgcggtaccggcgggcattcagtgacctgacatcccagctccacatcaccccagggacagcatatcagagctttgaacaggtagtgaatgaactcttccgggatggggtaaactggggtcgcattgtggcctttttctccttcggcggggcactgtgcgtggaaagcgtagacaaggagatgcaggtattggtgagtcggatcgcagcttggatggccacttacctgaatgaccacctagagccttggatccaggagaacggcggctgggatacttttgtggaa

SEQ ID NO: 48693 - DNA, 767 bp, Homo Sapiens
aatattaaagaagacaaaggattctttgtgacactgagaccttctgcagtacccagtggaggaaatgcagtgtacacaactggcctcatttaattcctgggaggagatagtttgggatgcagtgcttgttgttgctgagcaggcgatcacagcatgcactgtgtttctttctttgagaatatttgaatcctgcctgaatactcgtaacagatgagagacgcaggttttgatagcatagatttacgctgtcattagtcatgagctcttgggacgaaagtaattggttttatcctctttagagttagaccctgtggttgggtatgaaagatgagtgtctgtaaaaatccttcttagaaatgtatttcctcaagactctgtctcaaaaaaaaaaaaagaaatttatttcctagttctgtaaaaatcgctatattgagtgttctctatcacttaataatatacttattattaagtggacttaaagatatgcagtgtataaaatcagctaattacgttaaaccatggtatctccctttattgtgttagactgaatagaacaaactttaaaataattttttaaagaatatatttgaattcattttgtttgataatatgtttttattcagaaaagcattttattagcgctaggtgtgaacccgagccttttgctaaataccagcagcaatcatgtcctagagttaaatcccagaaaaattgccatattatatatttaaaggttcaataaattacaataaagttattttttcttt

SEQ ID NO: 48694 - DNA, 649 bp, Homo Sapiens
cagcagaagcagacacctccagtgaactagcaaagaaaagcaaagaagtattcagaaaagagatgtcccagttcatcgtccagtgcctgaacccttaccggaaacctgactgcaaagtgggaagaattaccacaactgaagactttaaacatctggctcgcaagctgactcacggtgttatgaataaggagctgaagtactgtaagaatcctgaggacctggagtgcaatgagaatgtgaaacacaaaaccaaggagtacattaagaagtacatgcagaagtttggggctgtttacaaacccaaagaggacactgaattagagtgactgttgggccagggtgggaggatgggtggtcaggtaagacagactctagggagaggaaatcctgtgggcctttctgtcccacccctgtcagcactgtgctactgatgatacatcaccctggggaattcaaccctgcagatgtcaactgaaggccacaaaaatgaactccatctacaagtgattacctagttgtgagctgttggcatgtggttagaagccatcagaggtgcaagggcttagaaaagaccctggccagacctgactccactcttaaacctgggtcttctccttggcggtgctgtcagcgcacagacccatgcgca

SEQ ID NO: 48695 - DNA, 618 bp, Homo Sapiens
attcggcacgagggctatttaccttctgcaagtgctttatataagacatggaagaaaaaattcagtgaccagagagagatagaaatgtacagggcagaattatttggagtcagctttttggaaagtattgctttgttggaggaaaaataaggcagctatcctgctggtctgggatgctttgcaacacaagtcatcttttgaatatcatagggttgtccttggtttcccatggagcaaatgaataaaatcagatggtaaattggtgtgaattattcatcatgtggtaatacaaggctgtaattcctacctctgacaattgcggcctgtgtcagttccattgtttgtgttattgtactttatgcaccctccagaattatctaccccctccccagtgtaaaccattggttggaacattctgcttcttagaaggcagcagttttgtcttctgcctcttttaacatattctgtctcttaggtctgaattctgaatagaaatcagaactttttcactcccttatgaagcatgttagtgggggatgcttaccttccttaatgaaacttgagacatgcagtcttctttgatttccatatatgattaataaatgttacattcataac

SEQ ID NO: 48696 - DNA, 571 bp, Homo Sapiens
ttacccacctgcatcatctggggttccaatgcagacatatccagttcaatcacatggtggaaactatatgggtcagagcattcaccaagtaactgttgcccaaagctatagcctaggacccgatcaaattggtccactgagatctctgcctccaaatgtgaattcctcagtgacagcacagcctgctcaaacttcatatttaagcactggacaagacactgtttccaatcctacttatatgaaccagaactctaacctacagtcagctactggtacaactgcttacacacagcaaatggggatgtctgtggatatgtcatcttatcagaacactacttccaatttgcctcaactggcaggctttccggtgacagttccagctcatccagttgcacagcagcacacaaattaccatcagcagcctctcctttagaaacaaatcaagcattttcttgaaagccttcataagtgtattattcagtccttgtgataccaacctgaaaatattaaaacttttttccctctcaactcaaaaggaccatgaataaataaagcacaaaaacctcaaaaa

SEQ ID NO: 48697 - DNA, 647 bp, Homo Sapiens
gaaacaggcaagataagtctgtttttccttctggaaccataagggtaaccagattttcatctacagacaagtggtagtcatttgtgtttatcatgcaacttacttacaaacaccaagatattaattgctgcaacttgatgtcaaatcacattactgggtaatttttaagactatgtacccacaccatacatacatacatatatatatacacatacatacaaacctgtgtgccaagtgacagctatttttttatatacatggtaattcattaaaattgccttagtaatatattagaatatacaaatatgtgtgtataaaataaacatacacacacacacacacccctatgtagtttttaaaacactggcaatgacccactccccttggaaatgcatgtatgaactaccctatgaaatgtaagctgcagaatagataaaacacaggtttccactaataaaagacatctgaacgtcctgaatatagagacagaagttttttgttgttgttgttgttgttttaacatgtttaaccaacagaagttatttacagaaattcatatatccaggcaacacaaaactcctttattcaaaatcactgctatctttgggactaaacacaggctactttctgtttactcctaacaaaat

SEQ ID NO: 48698 - DNA, 536 bp, Homo Sapiens
agtgaagaaaaccccactaaaagccacaacaggtcgttcatcccgtcagtcatcctttattgcagtcgggatccttggggttgttctgttggccattttcgtcgcattattcttcttgactaaaaagcgaagacagagacagcggcttgcagtttcctcaagaggagagaacttagtccaccaaattcaataccgggagatgaattcttgcctgaatgcagatgatctggacctaatgaattcctcagaaaattcccatgagtcagctgatttcagtgctgctgaactaatttctgtgtctaaatttcttcctatttctggaatggaaaaggaggccattctgagccacactgaaaaggaaaatgggaatttataacccagtgagttcagcctttaagataccttgatgaagacctggactattgaatggagcagaaattcacctctctcactgactattacagttgcatttttatggagttcttcttctcctaggattcctaagactgctgctgaatttataaaaattaagtttg

SEQ ID NO: 48699 - DNA, 579 bp, Homo Sapiens
gatgtgacgggaggagcatattgtaaagaacctttggattccatgcctaggaatttggactcttctctgagtgaaaaggatgttaaatcagtccccacttcttcagggaagtgacagaaaactggagtgaagtggaggatggattttgagctaggagagccagaagaaatgctgaagagttaggccattgtagtattctgagcaggagatgatgaaggcctggatcagtagagtgattgcagaaagtagagtggagattcacatgagaaattgaagggatttacatagaagaactgcgttagaatttgttgaatccattgcctctaatttcctgatagatatttttagtgtaatccttattggtgaatttgcaatttttcctttcagactatttctgttatcctttgggtatccagttactgtgagagtgtcctacgaccatacaaactaaatttacagaaaaagaaaaagaagaaaaaagaaaccagcatcatcatgccacctgtctttaccagtttccaagactatgttactgggcttcagactttaatttccaatgttgtggatcatattaaaggg

SEQ ID NO: 48700 - DNA, 496 bp, Homo Sapiens
aaatgctgggctggagcaggcctcccatgttttacaacctgcctacataagacataagcatctaggagcagagaatccctcctcctttcaagcagctctttcccaacagaataaagggaagtcactgagctgtgaatgcctgttctattcagatttacctcttagataagttgttccagctaccccgggaaggaggggtaaaggggatgagatgtttgaactgtaacaccctgtacatgggaggaaacaacatgagttgttgatggagcatccttccatcttacctttttggcttttaaaaaactttatgcagtcagaaatattgaaatgttttacaggtttgagcatcccagctctgaaatctgaaatgcccccaaatccaaaactttgagtgctgacatgctgctcaaaggaaaagctcaattgagcattttggatttccagatttgggatgctcaaccagtaagtacataatgcaattattccataatctgaa

SEQ ID NO: 48701 - DNA, 616 bp, Homo Sapiens
gtctttctcccaagctcatgtctattccttcctaaaagtcaaattgacatgaagtgaaaaatgatgtgttgcttctgaagacaatggatgcttggcattgggatctttcctttaaaactgataatgcttccccaattcagttccatctacctgactgactagaacatttactgtggtacattttccaggttgataggaaaatgctaagcgtgtatgacacagatattcttgctcacaggcactctaccagcctttgaaaaagtcaatttaggctggacgcggctgctcacgtctgtcatctcagcactttgggaggacaaggcaggtggatcacgaggtcagttcgagaccagcctgaccaacatggtgaaaccccatctctactaaaaatacaaaaaaatgagctgggtgtggtggtgggcacctgcaatcccagctactcaggcggctgagacaggagaatcgttgaatctgggtggtggagggtgcagtgagccgagattgcgccgtgcactcctgcctgtggcgacagaacgaaaatctgtctcaaaaaaagaaaaaaggggcccggccgggggctcccagatgaatcctctacccttggggagggtgacgg

SEQ ID NO: 48702 - DNA, 815 bp, Homo Sapiens
ggatttatagtgcttacaaccatttcttttttaaaaccccttgtctggacatttttagtgttgcttgctttataggcctaacaaattaggtaatttaccaaaagaaataagtgggataaagataattattgccctccaaagtaggtaatcttccagccttaataaaggtattttatatcttttgataacagcccatttcctaacatgtctggttgtaggtaagccggatactttacagttttgccactgccttccgccgttctgccaagcagaccccactttcagccactgctgcaccccagactcctgacagtgacatctttaccttctctgtgtctttagaaataaaagaagatgatggtaaaggttattttaggtagggaatcttattttattcatgtattaacatgctgtggttcaggggaaattctaggtcagattataactttcataccataaaatgatggcttttaaagggagggcttttaaaaacaaatgtggatgataaaggcatataaatacataaatttaacagaggcaaagtttgaagaattttaaagcaattaaaaaaatgtcatattgggaacatgttgctaccttcttttagtcagataccaagtgggctaactgttcacaaaaatatggccaaaccggcaagggcgcctgttggctcacacctgttaatccccagctctttgggtgggctgaggcggacggttcacctgaggtcgggagttcggagatgaggctgaaccaacattggaaaaacttggtctctaataaaaaattcaaaattagccgggcgttggggtgag

SEQ ID NO: 48703 - DNA, 1100 bp, Homo Sapiens
tttttcgtccgtttggtaggtaaaacccccatcgaaaccctcatccgggatatgttactgtccggcagcagttttaactggccgtatatggcaattcaataaataaataaaataagaagggggagtgaaacagagaaagaaaaggcaaaagactggtttgtttgcttaatttccttctgttaagaaaggatataaaaggatgttacaagtttgctaaaagaagagaggggaagaatttaatggactgtgaatttcaaaaaaaaaaaaaagactgttaaatktkcttttacagaatgcattraaaaaaaaaaaactcctktkttgtgtyagwtywwcttkytwyttwtcatttttgtwtaaaaaggaaattagtctttttctttttttggtaaatttttgaaaaatattgctaaaagtgcatttaaggrgattgggagacaattagcagaatggagaaagtaagtcttttttttttccaaattattaattgtcctgtgtctatgtccctctagctgttcttttttgtacttttctggttccaaaccagtttattctgtggttctataataagttttgatataatcttggcttcttaaaaactgtgtatcattaaaatatatgttctgcaagaattaaaactgagtccatgaaaataccataggaagacataaaactttaaaaggcaactcaaagatgatggaaacgcacttacaagtggtgaccaaaatttttaggtgaagtcgagcactctaattagagaactggaggaaccacatataacacttaacttcccctaccctgcccctccccaaaagaaaccatkaaaaacctagcttttaaaaaatattttaagaaagagaatgaactgtggaaattattggcagcaaggaatgtgtccaagamacatgctgaggktttgaataaaagtgaactttttgttawtttraattgggyccgcttakttcttgaattktawgaaatccyatatykkttkkttwtttkcaaaccyttktwttawaattkttgraattttccyttttaaaaawammattraawaagmtgaaaaaaaaaatkttggmctaagggamgggattattagt

SEQ ID NO: 48704 - DNA, 729 bp, Homo Sapiens
ggtgtcttattgttacaaaaagccttaagatctgttttaatgttaatgctgctcaattgttcctgagttccaaagggaggaatgtgtaatgagacatgtctgaccccctcttcccatcatggcctgaattactttagaatgcccttagttgagaggaggggtccattcagacggttttggagcttagaattttgtttttagtttgcattcctgagtgctggtagacccttcagtgttcattagaactttattgttcagacccaagaagagcaaactttttgatgaagtgttacaagagaaaagataaacagccttctgaagaagcaagttattttgttgtagcaatgtctactaaagaaaccaactggcttcttcctgttcgcccacctttcctttgtttattgatatttccaccagaggaaggaccaggcaaaagggagaataaattcactttttaagataatgcttctgagttttagcacagcatcccatttcccgggaagctttattgccaaggcaataaggagaccatgtgagtaggagttaaatgcacagccatttgtgaagtgagactgcttgggttcagatcttgattctgccctttattctatgttgtggaatatattacattgtgctgtgcctcttttaccttatttgtaaaatagagcaagcaccaactcaagcagttgttgcaagaactgctgctatgctgtttaatacagtatgtgg

SEQ ID NO: 48705 - DNA, 500 bp, Homo Sapiens
aaatgaaggtgaattcaaggctgaaggaaatagcaaattcacctacacagttctggaggatggttgcacgaaacacactggggaatggagcaaaacagtctttgaatatcgaacacgcaaggctgtgagactacctattgtagatattgcaccctatgacattggtggtcctgatcaagaatttggtgtggacgttggccctgtttgctttttataaaccaaactctatctgaaatcccaacaaaaaaaatttaactccatatgtgttcctcttgttctaatcttgtcaaccagtgcaagtgaccgacaaaattccagttatttatttccaaaatgtttggaaacagtataatttgacaaagaaaaatgatacttctctttttttgctgttccaccaaatacaattcaaatgctttttgttttatttttttaccaattccaatttcaaaatgtctcaatggtgctataataaataaacttcaacactctttatgataaaa

SEQ ID NO: 48706 - DNA, 499 bp, Homo Sapiens
aagatttgcattattgcatgaaaacaacaaaacatatcaataaataacaaaaagcttggaattcagacaacagatccaagtctgggcttgatctcaagctagtgttttgatgttgaaaaaatgttatttggtctttctaaccccatttccttatgtaaaattggggatgatgattaaattcactgataataagagttaaatgagattcttgaggagtcagaatggttctaacatgtgtaggtattattagcagtcatactgtagcataagaaaataccgtctgctgaaagagggacaataaagattatctacatggtcatcatttaaaagctaccagatataggaagaaggggccataaaatgataacgttatgatgattaattttgatgcttaggtcagagtccattcttaggatatctgctgcccaaaaacagcagagactcatttctttggaatcacaggacgctgagtgagagaaaaaaaaaaaaaaaaaaggac

SEQ ID NO: 48707 - DNA, 325 bp, Homo Sapiens
ttcttttagatggacagttactccctgtaacttatagctgcctgtacagaaaagaaaatccccgttgtttttcgattgcaagagggttatgatcatagctactacttcattgcaacctttattactgaccacatcagacatcatgctaaatacctgaatgcatgaaaaaactccaaataagagaatctcttcaggattataaaagttgtaaaatgcaactgtattgctgagcaaaaaaaaaaaaaattcaaaacattggattttatagtgctaaaagggctttattctatagttgaatcacctctgaataaagatataaaaccta

SEQ ID NO: 48708 - DNA, 815 bp, Homo Sapiens
cttttaggttttcttaatgtatagaagaaactaggaatattcacaaaggatttatttgaagttacactgggaaacgatttttagaatttgaagctctttgatccctgtgaatctaactttatgactattttattcagctaatctttgagaatatttagagttttgatttgcgtggcactctgcttttaatcccttgttgaataagtgttagaaaccttgatcttggccctatacctgatcacctctaaaaacatgaacagtgttacaaaggcagttgtttagtaagcttttttggattgttttaattggctgactgagggagacaaaattagttttttttttttcctttctagaataaggggtaataaacctgggactttagagttacggctaagattggacttttccattgggggctttagaaatatatggtatcttaaattcaaaagggtactttatctaattgacttggaaatcttaaaatttttgagaaacaaaagtcactttatgtccttagtaaatatttctaagggggtgataggagatctaagtacaaaaacaattttaccattttgtgtattaatctcccctccttaaggaacaattttattaattatcataattataattagttataagaacaattaagttgagtacagggcctcaagcctgtagtcctaacactttgggaggccgggcgggaggatctcctgaagcccggagttccagaccagcctgggcataagttgaaacccaaccaaaaaaaaaaaatacaacaaaaacattttgcgccctctggcctcaaaatttttgaa

SEQ ID NO: 48709 - DNA, 562 bp, Homo Sapiens
ccgtcctgagagccccaggccccccttcgacctctaaacagatccctcctcttctcggagacctccctttccaagcctgcctggacggctgttctgtgacttgacagtggctcccccagccccaaagccagcccccttcatctgtgacttaatctgttgtagtggtgagctgatacattcaggtgtgaccgttggtgaaaacttgtgccccttctgtggtatgcccttgccctgttctataaatatctataaatactcatatatatacacacctacacatggccaaccgcctcgcctctagcgctgggaatcagtcactgtgctatccttgtggagtcttgtggcccaactaccagagaacgctgtcccccgacatcccactccaaagtgtgccacctccagtgagcctccttgtcatgcccggcctgtggacagccagcccccgccatccctcccaccccctaccaagcatgggggtgctgtgcaggcagccgtgtggcctgacagtttctaccagtcctgctgtccctcggctgagaataaaacccatttctggatgatg

SEQ ID NO: 48710 - DNA, 617 bp, Homo Sapiens
catgcccatgcgagtacctgaggaaggtgagtgagtgcagacagatggggcctggtgcccttgagcagttcccgggtctcagctgccacacatctcatagccggtgatgctgggggaagcttacgcagtcacagtactggcttcttcctctttttctttccatacaagtggcttagggatggggtagagtagttgacttatttggatgaaaaccactatcttctgtcagaaactcaaaaggaatcattgctggcatggtaacctaaagaaaaacaaccagacaagtgcccaacgacacttaaaaaggtgatttattatcttgccaagtttaggctgggcatggtgactcatgcctctaatcccagcattttgggaggctgaggctggtggatcaccggaggccaggactttgagaccagcctgaccaatatggcgaaacctcgtccctgctgggagtacaaaaattagccgggcatggtggtgtgagcctgtagtcccagctactcaggaggctgagacaggagaattgcttggattcagaggtggggggttttagtgggccgagatcacgccattgcactccagactgtgcgacggagcgagactctgtcaaaaaa

SEQ ID NO: 48711 - DNA, 539 bp, Homo Sapiens
  misc_feature (25)..(25): n is a, c, g, or t
  misc_feature (231)..(231): n is a, c, g, or t
  misc_feature (354)..(354): n is a, c, g, or t
  misc_feature (372)..(372): n is a, c, g, or t
  misc_feature (505)..(505): n is a, c, g, or t
  misc_feature (513)..(513): n is a, c, g, or t
ggcaaacactctatatcaagacccncctccccgagagctggttgttaaacatttgtcagcacaccactgctgctgggagacagagagaagaaactgatacacgtgagcactgaaacatcttagttccagggaggtagcatttgtgttgtatttctcagaagcaagtgtcctagtgtaatgtgcacaagtggcatgaagtttaacacctaaaagactgcttctctgcttgtnctgtctaatttctgtgatttcaacacttgagaaagatgtttactttgctactaaacttattggagtgatttgtaaagttcactgtcacctgtgggcagtagttcagctaaattcccaccaggnaagtggactgtagctttncctgcctaactggcaaaatgaaaatatgctgaaaagaatacatcttaactagggcaccaggaatagctcatttccaagtggtttatacagcaataacagtgttaacttcttccaacagaggcgaaatcatttnttaaatgnttgttttgctgtttttcctttttatt

SEQ ID NO: 48712 - DNA, 352 bp, Homo Sapiens
  misc_feature (218)..(218): n is a, c, g, or t
cttattaaggaaatactttgcataaattaatcagccccagagtgctttaattctcttaaataccggtgtctttgatcaggatgacatgtgccatttttcagaggacgtgcagacaggctggcattctagattacttttcttactctgaaacatggcctgtttgggagtgcgggattcaaaggtggtcccaccgctgcccctactgcaaatggcagttntaatcttatcttttggcttctgcagatggttgcaattgatccttaaccaataatggtcagtcctcatctctgtcctgcttcataggtgccaccttgtgtgtttgaaggggctttgtacctttagagtgtaggtg

SEQ ID NO: 48713 - DNA, 615 bp, Homo Sapiens
  misc_feature (612)..(614): n is a, c, g, or t
ttcacagataattcagaaagaggacttatgcatttctccaggaaagcttgtctgggttctatactgtgatctcatttgcctcgactacgatggaaacattttggatgcctgcacatttgctttgctagcggctttaaaaaatgtacagttgcctgaagttactataaatgaagaaactgctttagcagaagttaatttaaagaagaaaagttatttgaatattagaactcatccagttgcaacttcctttgctgtgtttgatgacactttgcttatagttgaccctactggagaggaggaacatctggcaacaggaaccttaacaatagtaatggatgaggaaggcaaactctgttgtcttcacaaaccaggtggaagtgggctaactggagctaaacttcaggactgtatgagccgagcagttacaagacacaaagaagttaaaaaactgatggatgaagtaattaagagtatgaaacccaaataaacagccaccacattttcaaaacagatttgtaaaaattgtatttgttaacactgtgcacaaacgttttatactaaataaatatcaaactacattcttctgaaaaaaaaaaaaaaaaaaaaaaaaannng

SEQ ID NO: 48714 - DNA, 859 bp, Homo Sapiens
  misc_feature (221)..(221): n is a, c, g, or t
  misc_feature (596)..(596): n is a, c, g, or t
  misc_feature (604)..(604): n is a, c, g, or t
  misc_feature (676)..(676): n is a, c, g, or t
  misc_feature (680)..(680): n is a, c, g, or t
  misc_feature (682)..(682): n is a, c, g, or t
aaatataaaaaaatatttaaaaggtaaaaatgaaaattawatttawwactggaagtaacagtcaaaaaattcttaaagccactggattagaggcagagagactgaaagaagagaccdgggaagaggttgctacagaaatgcagtctgggctgctaaggmtgatgtgtggagatgccaaagakagcctcargcagtagaagctggggctaggyatggtagcngctcacacctgtaatctgaacaktttgggaggbcaaagttggtggatcagttgagcccaggbgttcgagaccagcctgggcaacatggtgadadsctgtycccacaaaaaatatttaaaaattagctaggyatgataktgtgtgcstgtkgtcccatatattattacttggggggctaaggtgggaggattgctttagtacaggaagcggaggctgcagtgagccaagatcatgccactgcactccagcctgggcaactgagtaagaccttgcctcaaaaaaaaaaaggcagaagctggagatgaggaaaggtagcctcctactgtycagatycaagtcccaccagaatatctcatcctcctttgcawaaaaagnaataatgncctagagcagtgtcctaccttattytactyaccaraatgggaaatahmattactttctaagttgaattgagnttgnantcagaaggtacagctataggctgggcatggtggctcacaactgtaatcccagcactttgggagggcgaggcgggcagatcacttgaggtcagaagttcaagaccagactggccaacatggtgaaaccccatctctactaaaaatacaaaaattagcgcacacctgtaatcccagcta

SEQ ID NO: 48715 - DNA, 731 bp, Homo Sapiens
atgtcattttgtatggttttcttctgtatatgtgcaatatttgtctaggatatatacctagaagtggaattgtgttatagagtgtgtgctttttcagctttaccagatattggtaaattgctgtctgaagcaaatgtagcagttcacactgctgtctagaattttctcatatccttattagattttgaattgtcagaccctgcgatttttactcttatgatggctgtgatatgctttttgttttaatttgtacttcctttattatttatggggataaatatatttccatgtttaataagcatttggatttgttcttctgtcaacaacatatataaatctttgtcaccaaatcagcttttttgaggtatgacttacatgtaataaaatgtgccaattttgattgtaccattctctgagttttgacaaatgtatgaaactatatatccatcaccacaattgagttacaaaacattttcagaatgccaaaaaatgctccattgtggtaactgtcttttcccccattgaattaattgtcttggtacaatcgttgaaaaattggttgaccacattatatgtgaatgtgttctggattcctattctatttctcttggatcctaataaattattgcccaataacccacactggtcctttggattaactgttaaccttttagaaattaaattctctgaacagtagaaaaaacaagcaacaacgaaaagcacaacaacaa

SEQ ID NO: 48716 - DNA, 795 bp, Homo Sapiens
ctgaagtctgacccggccagtgggaaagccacctgcatcacaaagcgaggggcacacctgaaccggggctggcgggaagagaaacagggaaaattgaccaagagattcacaaatacaacaccccaggattcactggttgcctctccagagtccagttcaaccagatcgcccctctcaaggccgccttgaggcagacaaacgcctcggctcacgtccacatccagggcgagctggtggagtccaactgcggggcctcgccgctgaccctctcccccatgtcgtccgccaccgacccctggcacctggatcacctggattcagccagtgcggattttccatataatccaggacaaggccaagctataagaaatggagtcaacagaaactcggctatcattggaggcgtcattgctgtggtgattttcaccatcctgtgcaccctggtcttcctgatccggtacatgttccgccacaagggcacctaccataccaacgaagcaaagggggcggagtcggcagagagcgcggacgccgccatcatgaacaacgaccccaacttcacagagaccattgatgaaagcaaaaaggaatggctcatttgaggggtggctacttggctatgggatagggaggagggaattactagggaggagagaaagggacaaaagcaccctgcttcatactcttgagcacatccttaaaatatcagcacaagttgggggaggcaggcaatggaatataatggaatattcttgagactgatcacaaaaaaaaaaaacctttttaatatttctt

SEQ ID NO: 48717 - DNA, 620 bp, Homo Sapiens
agatgggggtagataactttggggcaggttatcacaacctaagagttggtggagaaaacatgggaatgaattctagagaccacaaaatgaaaacttgaaagtgttactctttctcagcttaacgtttttaaatccaaaaaacaatttttacatttcttgggattcgaagagttgaacttcaggttgccgtggttacagtgtacagtatatattatcagtctgtaccagtagaccagtaccctaactactgaaaagaatatggcagttttccatttgtctagtttctgtatgtacaatttactatccaattaattacttaagtggatttcttgttcttttttaaaaacttattgctacattgataggcagaatagcttctgaaagtgaccagttttcaatttcataggaagaggtgactcattgaaaaatagctcaagcaaagtcagctaaaaaaaaaaaaaaactagggaagctgagtaggtgtggtcaattgataatgagctaacagctgattatcactatattctagaaactggaactttcatttataaaaaaagaggtggccggaaaattcatcctgtcaataacttttaaatttacattggcatggaatttgtagg

SEQ ID NO: 48718 - DNA, 374 bp, Homo Sapiens
  misc_feature (32)..(32): n is a, c, g, or t
ctgggcttctgcgtggaggacggcatcatctncagcctcctccgtggtggcatcgccgagcgtgggggcatccgcgtcggccaccgcatcattgagatcaatgggcagagtgtggtggccacgccacacgcccgcatcatcgagctgctcaccgaggcctatggcgaggtgcatatcaagacgatgccagctgccacatatcgcctccttacaggccaggagcagcccgtgtacctgtgaccacctcatcccttgcctgccactgtgccttcgcctccatggccccggagccccatcctgggcctgccctggctggccaggaccccagcggttcttggtcctgtatgatttcctaatataaaaacagtaaagct

SEQ ID NO: 48719 - DNA, 572 bp, Homo Sapiens
tgaaaacactgtcttgttgcactacacatgtgtaagcatgatataaaaaacagtggtatacaacagttatgtgatgcactgtatctgaacagtagcctgcgctaccttgatgtcagctgcaacaaaataactcatgatggaatggtgtatttggctgatgtactgaaaagcaacactaccctggaagtaatagatctttcctttaacagaatagaaaatgcaggcgcaaactatctcagtgaaactcttacttcacacaacaggagtcttaaagcgttgtcagtagtcagcaacaacatagagggagaaggacttgttgcactttcacaatcaatgaaaacaaatctcactttctctcatatctacatttggggaaacaaatttgatgaggctacgtgtatagcatattcagacttaattcaaatgggttgtctaaaaccagacaatacagatgtggagccatttgtggtagatggacgtgtatatcttgcagaagtctccaatggccttaaaaagcattattattggacatcaacttatggagaatcttatgaccactcatctaatgcagg

SEQ ID NO: 48720 - DNA, 466 bp, Homo Sapiens
ttttttttttttttgttattcagaatattttattttaaactacaaattagcacagctaatttgaatatttaaatttccgtaagcactgtaaattgaatacattttttcttaatgatatagtttttttcctaaaaatcctaggcatattcagacttaattcaaatgggttgtctaaaaccagacaatacagatgtggagccatttgtggtagatggacgtgtatatcttgcagaagtctccaatggccttaaaaagcattattattggacatcaacttatggagaatcttatgaccactcatctaatgcaggttttgctcttgttccagtaggtcaacagccatgaaaaagtagctgtaaaataattttcatacacttgtcttattgtttcacagagattaatattctatagcctattttcttttataaattaaaacaagttacttttttcaaatgtgtaaaagata

SEQ ID NO: 48721 - DNA, 796 bp, Homo Sapiens
  misc_feature (638)..(638): n is a, c, g, or t
gagttaggcagggttccatctgacacacttctacaaataacttccccaaaatcttagaaggttttttagaacatgatataagctttgtgacaaaaacaaatgccattgtgtcccttatttagtcataaaaccttaggattcagctgaatatatattcacacatgtatattacacatatatcactatacagttaacacatgcaccttgcactattagtgacaaataatactgctaaacaaaataggcttcatgcaatctattgccattgctagaagaataaataggcctagcagatgggcaacttgggttgttagaataaggtcattcttgcagaatatggcacttaaattatctccagctgtaatgtcctaccatataatccagaggttgcatagaagcagagttgtcacagtctctgtagcacgtttgtgagaattctctaggcaggcccagcccttctctagaagtttgaatttcactcccaccttgttgctggggtaccttcttcagggtacatctaaacacagtggccttatacagaaatgttgttcaacccacacagtgctttaaaaaattaattgccaacatttaaaaatcagggagtttcacataaaattcagacttcttgtttccctttnaaaatgagaagctaataacatgagttgaattcccacaagtcaacaatgagctggaatctaatatggatgggcctcttatctttaccagtgcacatggtgaaaaaattcaaacagtataataaagtcttctttcaagtcaaaaaaaaaaaaaaagggcg

SEQ ID NO: 48722 - DNA, 681 bp, Homo Sapiens
  misc_feature (343)..(344): n is a, c, g, or t
  misc_feature (482)..(482): n is a, c, g, or t
  misc_feature (578)..(579): n is a, c, g, or t
  misc_feature (617)..(617): n is a, c, g, or t
ttgatctgcagttgtttatttgtttacagttatttccccaacatttggaaaaaaacttcagttatagaagtgtttcaaggctagtaaaatgaatgcacataaaccctttatataaattcatcaattaatattttgccactttgtctatatttacacacagcacatatatgcacaaaatagcctgcccttcccacatgtctccctaaccttttatttttgctgaggcatgtaagaggaaattgcaaatatcagatccttcagacctaaacatgtcagtggatatgtcctaataagtgtatgttttctgcgtaaccacaatataatggccatattcatgatattnnacatagatacattgctgttattttagtctatagtcgtaagtcctcaattgtcccaataatgccctttatagctaccccacaccgtcagcaatccaataaagaatttaatcaggctgggcaccgtggctcacgcctgtnatcccagcactttgggaggcaaaggcaggtggatcacctgaggtcaggagttcgagaccagtctggtcaacatggtgaaaccctgtctctactaannatacaaaaattagctgatcatggtggcacacgcctgtnatcccagctactcggtaggctgaggcaggaaaattacttaaacctgggatgtggaggttgcagt

SEQ ID NO: 48723 - DNA, 693 bp, Homo Sapiens
gtatgaaggaggtatctttaaaaaagcttcctgggcagatctagtaaatgctcacgtggtgccaggctcaggagttgtgaaaggcctgcaagaagtgggcctgcctttgcatcgggggtgcctccttattgcggaaatgagctccaccggctccctggccactggggactacactagagcagcggttagaatggctgaggagcactctgaatttgttgttggttttatttctggctcccgagtaagcatgaaaccagaatttcttcacttgactccaggagttcagttggaagcaggaggagataatcttggccaacagtacaatagcccacaagaagttattggcaaacgaggttccgatatcatcattgtaggtcgtggcataatctcagcagctgatcgtctggaagcagcagagatgtacagaaaagctgcttgggaagcgtatttgagtagacttggtgtttgagtgcttcagatacatttttcagatacaatgtgaagacattgaagatatgtggtcctcctgaaagtcactggctggaaataatccaattattcctgcttggattcttccacagggcctgtgtaagaatgggttctggagttctcatggtctttaggaaatattgagtaatttgtaatcaccgcattgatactataataagttcattcttaaaaaaaaaaaaaaag

SEQ ID NO: 48724 - DNA, 451 bp, Homo Sapiens
ccgacgttggggctggcggggatggtggacagtcaggtgtagctctccctcttctctgctttccgtctggtccaagtcagtgcggtaaattctcaaatacccatccgagctggtagctgtgcaccgcgcacgcagcgttccacagctgaggagctggagcttgtgcttcctctcacctgcaggtcccgcaggccctgcaccgagtcgccttgtccatggcgctgccctgccccatgcttcctgcgtcctgagtaggaggtatctccgagacaggaaaagtggccgctctctctcactttttctggaactcatgatggtctcctgggcttggtcactgtctctcaccagcatgtttctttgtgcggtcaggaattatttccaaatgctcctgaagcctagtgttttagtgaacattagtgattgttagcagtggttcaaaaaaaaaaaaaaa

SEQ ID NO: 48725 - DNA, 493 bp, Homo Sapiens
cacgaggggacatgagggtccccgctcagctcctggggctcctgctactctggctccgaggtgccagatgtgacatccagatgacccagtctccatcctccctgtctgcatctgtaggagacagagtcaccatcacttgccgggcaagtcagagcattagcagctatttaaattggtatcagcagaaaccagggaaagcccctaagctcctgatctatgctgcatccagtttgcaaagtggggtcccatcaaggttcagtggcagtggatctgggacagatttcactctcaccatcagcagtctgcaacctgaagattttgcaacttactactgtcaacagagttacagtacccctcggacgttcggccaagggaccaaggtggaaatcaaacgaactgtggctgcaccatctgtcttcatcttcccgccatctgatgagcagttgaaatctggaactgcctctgttgtgtgcctgctgaataacttctatcc

SEQ ID NO: 48726 - DNA, 381 bp, Homo Sapiens
gacatttcttgtcttcttggggctatcatgtgctaatacccacaataacatcaaaacctttcctgttatcccactgcccttacctattgcttttgtacttttgctttactttagccacaccatgttaccatatgtgcctcttccaggcatggaagctacatataacaccagcggcagtcagacgaggtaagcacatgagactcagcgtgtgtgtgcgcgtgtgcgtgtgtgtgtgcaagagagagagtgcatacataggtggtgtggatcgtctgtggcatgactttgacctcttgtccttgtaaacctgatctatgtctctcagataaacatttctgagattgaaatctgttctattacaagcagcaactaggaatgtgt

SEQ ID NO: 48727 - DNA, 616 bp, Homo Sapiens
cacgcgtccgagaaaataaaaatgatctacttggctgccttcaattttgaggcaattgaaggacgatccctccctcctttgatactaaaaacaatataggaataaaggaaaatagaattaaaaagtcacccatcttttgcctgaacacaaactttttgatttctcaaacttagcatcacatacctcattctagaggcatttatttcccattagaaagagctttataataaaacaaatagaacaaaaccagaaacgggtaggattgttactgtcttgttgggcattttgctctctgcttttgtagtattacttttaaaaccaatactttccacactgtccagaattgcctgaaattgttatgaactgtttgtttatatacgtgacttgatttccccagggcagctccagggcacagagtgtgtggcttgtatgtgttgaactgatccacgtttcccattcccaggcccctatctctctgttcctcttcttttagttgttaaggcaagttgatctgtaccagtgctggccagtagaagtacagcgtgggccacacacagaattttatgttttctgctggatgtggtggctcatgcctgtaatcccaatgctttgggag

SEQ ID NO: 48728 - DNA, 606 bp, Homo Sapiens
tttctagtttgaaaacccctgtaatagagatagaaataagctccaaaaaccaaggacaataattcaaagggagttagaacttacgagagtagggacagtcagttgcatctagtgagcactgataatgcattcttcaggcagaatgtatttccctttgattgtaagttcatggtctttcctgagaaaattccaactgtgtctgatggggagtctggagaataccactgctggaattggtgtctttcagaggctggcagaggaaggagcaacagcatggattgtgtgcagcaggtgtttttattaacacatgcattatcacttttatttgtcacttcatggagtcaagtgacctttcccagggcacatgggcagacttttcccagtggctgttcctgggcttcagagtacacccaggggaaaattatctgttagttactttctccctcttcttgacaccttctgagttccaacgagtcagaagataatcataatcagaataacatctcaaaagagaagctaattgcagttttttcttagttgcaaaagaaatacatggtcactgtagaaatcatgaaacacacagcacaaagcaaaaaaaaaaaaaaa

SEQ ID NO: 48729 - DNA, 472 bp, Homo Sapiens
  misc_feature (446)..(446): n is a, c, g, or t
  misc_feature (448)..(448): n is a, c, g, or t
ttttctcatctataaaatggagatacacccctctcagaggatggttgtggtgattcagcgaggtcgtggctgtgaaagcccctttagacaatacctgcacaaggcggtgtgaatgtcactcctgttttttctgctccccacccccttaactgatatcagctattttggcttaacagcttctttctcatcttaggcctgcctgaaaacgttatagttccctttctggcaggcggtggtttcaatgagtacgtatactttgaattattataaatagttgagggacaggctgcctaaagtctaattggagagttaacctaatgtctgtgaaactaatgaacaaaacgagatagtgtagatcaggaatgtccagtcttttggcttccctgggccactttggaagaattgctttgggccacacataaaatacactgatactaatgatagcntnatgagctaacaacaacaaaaaaaa

SEQ ID NO: 48730 - DNA, 1094 bp, Homo Sapiens
attcccgggatctctgttccctttcgtactcaaagctcgtgcatccagggaggggaaaccggagatagggtcttcgggccccgggcagaccctctgtgccgctgcaaaccgttgcagcctgaggctgtcaggtcctcccccagacacctgcggaccctccctctcctggcttcccgtctggtcatggcgagattctgggtctgcgtascggtgctggcttctttcttgcatttttggttttgcattcgcgtttttgtggctctccagttttgaggaactttacttttgcagtttcctggagaactgagaaaattctttaccggctggatgtgggttggcctaagcacccagaatattttaccggaacaacattttgtgttgcagttgactccctcaatggattggtttacataggtcaaagaggggataacatcccaaagatattagtgttcacagaggatggatatttcctacgagcctggaattatacagttgacacacctcatggtatatttgcagccagtactctatatgaacaatccgtctggatcacggatgtaggaagtggtatgtatagtaatatctattaaattatcttactggaaatcacatctttgcacatgtccttgtttgtattgtttaamatcagagttgctgaatctaattgtaatttctttaacgattcatgaaatcacatgtttttaacaaactttattttgtacttctgtggaattaagaaatttaacaagggctggacgccgtggctcacgcctgtwatcccaaagtgctaggactttgttcttaggtcacttaacagattaaaagactgcttcaagcaatgtagtgtaaggctacggcaataaagtcctattttgttttgcctttgctgtttttaagcacttttgcatttgaaaacaggacagattggatagwcagcattaaaatggaaactcaaatttttgctttttaggcttaccaaataaatgagagttttaaaagtcyaawttwttactttaatttgttgtattcyctgcatwtatttcagcacawtaaaawcaaatatcwytttttgttcagtaaagtttgggmacaac

SEQ ID NO: 48731 - DNA, 580 bp, Homo Sapiens
ttttttttttttttttttcagcaacgtccttagacgatttggcctcttacaaagaatgaaaagtatcaagacagttatcaaccaaggagggtaccagatgacagattcacccaacactcatctgaggtttttttgtttaaactggtaactgctggaccatggttgggttaggatttgtcaatgtttgggagtgtgattaggtttatcccggcctttcagattctaggggctgtttccatggaggcagagaatggacgcagtcggtattttgaggcctcccccacccccaatccctccctgctcactctcttggcttcctgttcttggattccaaagacgtcttgggtggagatgtttcctgggacaggctcactttaacatctctggttgggggattccaatgctgaaaaatccacagatggagggtatggaaagtatatcaaattgtacccaaaatggggcaacagtctgcttgctttctaggaagggttaacctagagccagacgtaacttctacagaattaaactggacactgagcatgacgtaccatcttccactaagataatgttcttggttgta

SEQ ID NO: 48732 - DNA, 545 bp, Homo Sapiens
tgggtgaatctgtcatctggtaccctccttggttgataactgtcttgatacttttcattctttgtaagaggccaaatcgtctaaggacgttgctgaacaagcgtgtgaaatcatttcagatcaaggataagccagtgtgtacatatgttcattttaatctctgggagattatttttccatccagggtgccatcagtaatcatgccactactcaccagtgttgttcgccaacacccacccccacacacaccaacattttgctgcctaccttgttatccttctcaagaagctgaagtgtacgccctctccccttttgtgcttatttatttaataggctgcagtgtcgcttatgaaagtacgatgtacagtaacttaatggaagtgctgactctagcatcagcctctaccgattgattttcctcccttctctagccctggatgtccacttagggataaaaagaatatggttttggttcccatttctagttcacgttgaatgacaggcctggagctgtagaatcaggaaacccggatgcctaacagctc

SEQ ID NO: 48733 - DNA, 830 bp, Homo Sapiens
ttttagttgaagagtctcttcccctttcagagctcacagagacttcaaatgcactaaaggttgctgactgtgtagtgggcaaaggatcaagtgatgccgtttcgcctgacacgttcacagcagaagtgagctcagacgcagtccctgatgtcaggtcaccagctactccagcctgcaggagggaccttcccacccccaagacctttgtacttcgttctgtactgaagaaaccctctgttaagatgtgtctagagagcttacaggaacactgtaacaacctctatgatgatgatgggactcatccgagcttaatctcaaatctcccaaactgttgcaaagagaaagaagcagaagatgaagaaaattttgaagcacctgcctttctaaatatgaggaagaggaagagagttacttttggagaggacttaagcccggaagtgtttgatgaatctttgccagcaaatactccattgcgtaaaggaggaacacctgtttgtaaaaaagacttcagtggtctcagttccctgctgcttgagcagtcacctgttcctgagccattacctcaaccagattttgatgacaagggggagaatcttgaaaacatagaaccacttcaagtatcatttgccgttctcagttctcctaataaatcatcaatctctgagaccctttcaggcactgatacctttagttcttcaaataaccatgagaaaatatcctctcctaaagttggtagaataacaaggacttctaacagaagaaatcaattggtcagtgttgtagaagagagtgtttgcaacttattgaatacagaagttcagccttgtaaa

SEQ ID NO: 48734 - DNA, 693 bp, Homo Sapiens
cttcaagtatgtccaggcagaagggctgcctcacagagaattctgccataccacatgggaattgaagtcacagacatctctaaccctcaagcctgaaaccaaaagactgaaaaccaacactacagtggacaaagaacatctctgaacttgtgtggggaccagtgacacaaggacctaaggtctctctcttctcatcttggcacttcagaagtctccccaatcttgacaaagccctggagaaagggccgggcctcccgttgataagaatatcactgcagataaatggaggtttcaaattgaaagaaaggaggagggcctcctgttgataagattattgtcactgcaggtaaatggaggcttcaaatagaaatacatttcagttacagaaaaaaaaattatctttgttacacatttgagtttgcaggcctaaggttactcccgctacactatcatctgtaaccataacgcactcaacattttaagctaactataaggattgttgcttcactcaaagatcctgaggttttattcactaacatttttatttggtgactatagttgacaagaacaaagctgtggggaaccaacaaacactgcaatgcctggcattgtcacctcactagattgtgagttcctctgggacagggtccgtacattttcttagaatccctcacttagccattagcctgcaca

SEQ ID NO: 48735 - DNA, 855 bp, Homo Sapiens
ggggaggagtagattggctgaggacaagcccagactttcgtcacagggacagaccaacgtgttaacacaaagggagaacacgggagcatcctgcaccgtgcatttcagccacagatcacatggcccctccgcgggcccagcccacgccctgaccgcccggcctggccaggtctccgtatctctctgccccgccgcccttcccaactgcggacatgctgggtggatccggatcgcatggaagacgcagcctggccgcgctctcccaaatcgcctaccagaggaatgacgatgatgaagaggaggcagcccgggaacggcgccgccgagcccgacaggaacggctgcggcagaagcaggaggaagaatccttgggacaggtgaccgaccaggtggaggtgaatgcccagaacagtgtgcctgacgaggaggccaagacaaccaccacaaacactcaagtggaaggggatgatgaggccgcattcctggagcgcctggctcggcgtgaggaaagacgccaaaaacgccttcgggaggctctggagcggcagaaggaagttcgacccaacaataacagatgcaagtctgtcgctccaagcagaagaatgcaaatgacacagcagaaatgaaactaccgagaagcagaacacagtgaagtcgcagaaagatacgagatagggaacgaacgtcccagtctaccgagatgtggcggtgctgagaaacacgaagagccaggaagggggggagaggaaccagggggctggaatccagccaaaaaaaaaaaagtggcggcccgaattaattgggggccaaaaaagttcaaaggcaaggtcaaacggcgggacagtgtggaacagt

SEQ ID NO: 48736 - DNA, 648 bp, Homo Sapiens
  misc_feature (641)..(641): n is a, c, g, or t
aaaacccaaagtattctttataagtctaattaaaattatatgttagttttgttccttttaataccttcagcttctcttccatgccactctcccagaacaaaagaagaaaagctctaatgaagaaatactgttgaattcttaatgccatatttacactttaaacttgatgtcactatgcctgagtctaggcctaaagttcttgtgtgtgtttttcagtgctgatctgattgttttaatttagcattgcatggaaacagtgaaatgttaagagacaaaacatacataatgggtggaggcatatgggattttttttgaagcatattgtagtggccttttaaaaaaacaatttaaactagaagaaattttctgtaaaattaattttgctatttctttgcattttgtcttaatcatttatattttactttgtaccacaatggacttgagccacctaataaaaatacagtgcaaacatatgcaacttatagttgatagcgtggaatcaagatgaagaaaaaaataaggaaaatcttactttgtaagtaaaatgtgcaaagtgatttataagttaagatggaattttagagtttccttttatttgatgtatttcttgatttctagtattggtaagattatctttaagncatgatt

SEQ ID NO: 48737 - DNA, 454 bp, Homo Sapiens
ttttttttttttttttttagctatacctcagccttgcctcacaagctttctgcccaccttttagtgcagccatcgctatggcaactatctttacacagatgtaacatgacagcacccaccccagcgataccacgtatctcttcatttctgcctcagaactaagcattcatgcatgcacagccacaccccacaggatcgcttcccaaagtaatctccctacacacaagacctcatggctctgctgtcactcagctcgattcaaggaatagcgagcaagcaccctgacaagtactgtatcagtcaggactctgcgagaagtgctagaacttggcagaggggcagaaaatccactcagattcactaacaaagacgtcacatgcttgctttggcaggacacatactaaaattggaacgatacagagaagattcacaaaaataaaaaaaaacctcgtgc

SEQ ID NO: 48738 - DNA, 771 bp, Homo Sapiens
  misc_feature (598)..(598): n is a, c, g, or t
  misc_feature (707)..(707): n is a, c, g, or t
  misc_feature (749)..(749): n is a, c, g, or t
gggggtgggtccaggaggcagaactctgggtgtctcaccatggcctggatccctctacttctccccctcctcactctctgcacaggctctgaggcctcctatgagctgacacagccaccctcggtgtcagtgtccccaggacagacggccaggatcacctgctctgtagatgcattgccaaagcaatatgcttattggtaccagcagaagccaggccaggcccctgtgctggtgatatataaagacagtgagaggccctcagggatccctgagcgattctctggctccagctcagggacaacagtcacgttgaccatcagtggagtccaggcagaagacgaggctgactattactgtcaatcagcagacagcagtggtactttgtggtattcggcggagggaccaagctgaccgtcctaggtcagcccaaggctgccccctcggtcactctgttcccgccctcctctgaggagcttcaagccaacaaggccacactggtgtgtctcataagtgacttctacccgggagccgtgacagtggcctggaaggcagatagcagcccccgtcaaggcgggagtggagaccaacacaccctccnaacaaagcaacaacaagtacgcggccagcagctacctgagcctgacgcctgagcagtggaagtcccacagaagctacagctgccaggtcacgcatgaaaggagcaccgngggagaagacagtggccccctacagaatgtttcataggtttntcaaaccctcacccccaaccaa

SEQ ID NO: 48739 - DNA, 742 bp, Homo Sapiens
  misc_feature (663)..(663): n is a, c, g, or t
ccttttcacctgtcctcactgaggatgatgaacaaaaggatgaggatcaagtggacagagatatcaactgtctatgctgggccatttagcaaaaattgcaatctcagggctctgaagaggctgtttaaaagctttggcccagtccagtcaatgacttttgttcttgaaacccgtcaggtgcagaggcctgtgacagagctcacgcttgattgtgacaccctcgtgaatgagctggaaggagattctgaaaaccaaggctctatatatctgtctggagtgagtgaaaccttcaaagaacagctattgcaggagccccgcctctttcttggcctggaagctgtgatcttgcctaaagatcttaaaagtggaaagcagaaaaaatactgtttcctgaaattcaaaagttttggcagtgcccagcaggccctcaacattctcacaggcaaggactggaagctgaaaggcaggcatgccctaacccccaggcacctccatgcctggctcagaggcttaccacctgaatcaacaaggctcccagggcttcgtgttgtacctcccccctttgaacaggaggccttgcagactctgaaactggaccacccgaagatagcagcctggcgctggagcccgaagattggaaagctctacaacagcttgtgcccnggcactctctgcctcatcctgctgccaggaaccaagagcactcatgggtcactctctggtctaggactgatgggaataa

SEQ ID NO: 48740 - DNA, 582 bp, Homo Sapiens
  misc_feature (552)..(552): n is a, c, g, or t
aactgaaacaatgaatgtagttatggagaccaataaaatgctaagagaagagaaggagagactagaacaggatctacagcaaatgcaagcaaaggtgaggaaactggagttagatattttacccttacaagaagcaaatgctgagctgagtgagaaaagcggtatgttgcaggcagagaagaagctcttagaagaggatgtcaaacgttggaaagcacgtaaccagcatctagtaagtcaacagaaagatccagatacagaagaatatcggaagctcctttctgaaaaggaagttcatactaagcgtattcaacaattgacagaagaaattggtagacttaaagctgaaattgcaagatcaaatgcatctttgactaacaaccagaacttaattcagagtctgaaggaagatctaaataaagtaagaactgaaaaggaaaccatccagaaggacttagatgccaaaataattgatatccaagaaaaagtcaaaactattactcaagttaagaaaattggacgtaggtacaagactcaatatgaagaacttanagcacaacaggataaggttatggagacatc

SEQ ID NO: 48741 - DNA, 417 bp, Homo Sapiens
cgtgacccagggcagactggtagcaaagcccccacgcccagccaggagcaccgccgaggactccagcacaccgagggacatgctgggcctgcgccccccactgctcgccctggtggggctgctctccctcgggtgcgtcctctctcaggagtgcacgaagttcaaggtcagcagctgccgggaatgcatcgagtcggggcccggctgcacctggtgccagaagctgggagcggctttgggtcctccagcccacgccaccgcggcgagcagtccccggaggagaagccgggtggctcccgtctgtcctcggactgagcagggtggccaggccccaggtggaaactaccttggtcaggctgggttttttccctcccctttctggaggttttcagctcctctgaaataaacacctttcag

SEQ ID NO: 48742 - DNA, 513 bp, Homo Sapiens
  misc_feature (114)..(114): n is a, c, g, or t
ggaatttgagagtttaggaattgtatttattattcaggcccttcactctcagactaccctgctctatttgaataatgaggcttgtggtggtctgtggaaaagtggacagagtanaatttgggcagctgctgaaggtttggtctctggaatgagtccacgttaccctaaggacagtaatcccaaattgagacaaaaactttaagaaaaccaatgtttggggccaagcaatggggagcttggccgacctttttttttagtgattttgaactcaatctttaaaatcctggaagagaaggaaaaaaagggtgtatattcgtgtaatgacatccagatctcactgttctcttggctcctagtgatgggggaaaaaaggtgcgcccagggttgacccttcagtaacacctgcagccatgcatcatgacctccaggtgttcagaggccctgcccatgtgacacgtgcctggtacttcccatacatgtggctctttaatcctaataaacctggggtgaaat

SEQ ID NO: 48743 - DNA, 499 bp, Homo Sapiens
ctcagctcagagggaaagccttacgtgaccaaggaggagctctaccagaacctgacccgggaacaagccgactactgcgtctcccacatgaagccctacgtggacggcaagggccgcgagctccccaccgcgttcgactacgtggagttcacccgctcgcttttcgtgaactgagccactccctgggtcacccacccctcgctgcttgccctgcgtcgccttgctgcatgtccgctcctctgtgtgctctcactttccactgtaaccttaagcctgcttagcttggaataagacttaggagaaaatggtgcttcactaacccgcttccggtccagtcacaatcatcatgtcactgtggggacccagatctgtgtcttgaagcagctgccctcattccgacttcagaaaatcgaagcagctggctcctccccttgttctctctcccaccctcccccaaatctgttttcatgtaaaagacaaataaatgatgacttccccc

SEQ ID NO: 48744 - DNA, 580 bp, Homo Sapiens
  misc_feature (526)..(526): n is a, c, g, or t
ttgttggattcactccttctccagttgcacagccacacccttcagctggccttaatgttgactttgaatctgtgtttggaaataaatctacaaatgttattgtagattctgggggtggacttctcaaaccaacagtggcctctcagaaccagaaccttcctgttgccaaactcccacctagcaagttagtatctgatgacttggattcatctttagccaaccttgtgggcaatcttggcatcggaaatggaaccactaagaatgatgtaaattggagtcaaccaggtgaaaagaagttaactgggggatctaactggcaaccaaaggttgcaccaacaaccgcttggaatgctgcaacaatgaatggcatgcattttccacaatacgcaccccctgtaatggcctatcctgctactacaccaacaggcatgataggatatggaattcctccacaaatgggaagtgttcctgtaatgacgcaaccaaccttaatatacagccagcctgtcatgagacctccaaaccnctttgcccctgtatcaggagcacagatacagtttatgtaacttgatggaagaca

SEQ ID NO: 48745 - DNA, 803 bp, Homo Sapiens
  misc_feature (606)..(612): n is a, c, g, or t
  misc_feature (615)..(645): n is a, c, g, or t
  misc_feature (647)..(676): n is a, c, g, or t
  misc_feature (679)..(693): n is a, c, g, or t
  misc_feature (698)..(705): n is a, c, g, or t
aaaatactgtagataattaaccaaggtagaatgaccttgtaatgtaactgctcttgggcaatattctctgtacatattagcgacaacagattggattttatgttgacatttgtttggttatagtgcaatatattttgtatgcaagcagtttcaataaagtttgatcttcctctgctaaattgatgttgatgcaatccttacaaatgattgcttttaaaattttaagctaggaaaagaaatctatagaaagtgttctgttacaaaatgtaactgttaccattggaaatttcacgtcataggaagttagcctttatctaccaactttcaagaacttgtttaataaagcgaaaaactcaaccaaatggtacaaaaccacagtgtaccattaaaatatgcactaagtctcttttttacaaaggctgtattcagcaaggcgctaacttgcttaaatgtgaattactaacttctaaaactgtactttgattcacatgttttcaaatggagttggagttcattcatattacaatatttgtgtgctaaacgtgtatgtttttcagttcaaagtcatgatgtttttaaaatcttattaaagtttcaaaaatctgnnnnnnnaannnnnnnnnnnnnnnnnnnnnnnnnnnnnnnannnnnnnnnnnnnnnnnnnnnnnnnnnnnnaannnnnnnnnnnnnnnggggnnnnnnnntaaaaaaaaaaccccattttgggggacaaaagtggggccgccaaccgggattccgtttataataaggtgggccccttgggggcggggctttttatata

SEQ ID NO: 48746 - DNA, 765 bp, Homo Sapiens
  misc_feature (725)..(725): n is a, c, g, or t
  misc_feature (746)..(746): n is a, c, g, or t
atcgatctggatattttagcaaattttgacttttcaaagacaaagtttctgtcttgtaatgtttcttgggccggctatactgcctttcatctaaaactcactacagttcactgggccgtttggtaacagggtaacctgggcataattaggtgcttgattgacaagagagttaccagtaccagaagtcaggttctattttaaccccatcatttccaattgattgtttttctctccaccattattcactgtctctcaagtgttagcactctgagttgttgaacggaggtttgtatgctgcgcagagccctgtcgcaatgccccagcaagcttcttgttggcatgtggccactctaaattgtgctccaggatctgctatgggtccatgcttgcaggagaaacagctgtgtagaatttcctattgcatttcatttgtgggtttagaactcggttgcttatttcatattgtctcccttttcagtccttcaaggtacatttttccaacttctctaatgaattattacatttctgagtagctgatatgtttttatcttatctaagcagtatatttataattccttctttgcattggctaatctgattagtagttcagaacccaattttcagattgtctatagcaaactgtgaagaactgtgctgtcaaatagaaatagaatataagccacatatgtaatttaaacttttctaataccacattaaaaactatnaaaggggaggaaatggaaaantagtaaaaaaaaaaaaaaa

SEQ ID NO: 48747 - DNA, 580 bp, Homo Sapiens
  misc_feature (11)..(11): n is a, c, g, or t
  misc_feature (16)..(16): n is a, c, g, or t
agcctcttggnaaggnaatctcactaggggcttgactgcgtgggtctgtagcgctttcactgtaagaacgcaagatgcattttagaaactttaactacagttttagctccctgattgcctgtgtggcaaacagtgatatcttcagcgaaagtgaaaccagggccaaatttgagtccctctttaggacgtatgacaaggacatcacctttcagtattttaagagcttcaaacgagtcagaataaacctcagcaaccccttctccgcagcagatgccaggctccagctgcataagactgagtttctgggaaaggaaatgaagttatattttgctcagaccttacacataggaagctcacacctggctccgccaaatccagacaagcagtttctgatctcccctcccgcctctccgccagtgggatggaaacaagtggaagatgcgaccccagtcataaactatgatctcttatatgccatctccaagctggggccaggggaaaagtatgaattgcacgcagcgactgacaccactcccagcgtggtggtccatgtatgtgagagtgatcaagagaaggagga

SEQ ID NO: 48748 - DNA, 664 bp, Homo Sapiens
ggtccgaccctgctgcagaaccagcagggtgtcccctcgggcccatctgtgtcccatgtcccagcacccaggcctctctccaggtctccttttctggtcttttgccatgagggtaaccagctcttcccagctggctggggactgtcttgggtttaaaactgcaagtctcctaccctgggatcccatccagttccacacgaactagggcagtggtcactgtggcacccaggtgtgggcctggctagctgggggccttcatgtgcccttcatgcccctccctgcattgaggccttgtggacccctgggctggctgtgttcatccccgctgcaggtcgggcgtctccccccgtgccactcctgagactcccaccgttacccccaggagatcctggactgcctgactcccctccccagactggcttgggagcctgggccccatggtagatgcaagggaaacctcaaggccagctcaatgcctggtatctgcccccagtccaggccaggcggaggggaggggctgtccggctgcctctcccttctcggtggcttcccctacgccctgggagtttgatctcttaagggaacttgcctctccctcttgttttgctcctggccctgcccctaggtctgggtgggcagtggccccatagcctctggaactgtg

SEQ ID NO: 48749 - DNA, 602 bp, Homo Sapiens
tgaggctggcaaaggaggaggtgagccggcaggagctgaggcagcgggtgcgcatggctgacaacgaggtcatggacgcctttcgcaagatcatggctgcccggcagaagaagcggactcccaccaagaaagaaaaggaccaggcctggaagactctgaaggagcgtgagagcatcctgaagctgctggatgggtagccctcacccctgcctcaggctgattatctggcctaggggaggggaagggaggcccacttccttctttgggcacaggaaacattggcctgtggctgtccctcaaatggcggcagtctctagagggccgtggcccttcccctgaggtcttttggcctagctctgtacaaccaggacacaggaagccctgctgggctagcctgaggcctagtctctgcttggtccccgagatggggttggaggggacttcgtttctgggtcttcctcttcccctctttaccatcccccactccctaatcccctacccctgtctccccttcaaggacttctcccttgtggttttgtaaagtgcaaacttaagaataaagtgactgctgtggtttttcaaaaaaaaaaaaaaaaaaaaag

SEQ ID NO: 48750 - DNA, 480 bp, Homo Sapiens
ggaagctgtaaaaacataagcccaagtattttgtgtcatctgcatatgtcaggatgaagaccaggcatgtaagaaatatcctaaagtagccaagtgataatctcatgaaaaaatatgagaatcgtttttacagagtgagttctcttttgaatggttttgactatgcttttaaaaacatttttaaaatgtacttacatctttttcgatagcccacgtatttcagaatatcctcttgatagaataatatcactcagtgtgatttttagaaaaagaaaaactcggtggtctcatatcttttgacagttgtttgtgaataataccctccccaacaaccttcccagtactcaactgctatgtaagaatgctttcttatgtggtaaatgtctcagtattttgctgcctggtatttgttcagtttccttgtatatctcagggtcagaaggaatcaggctttctcccaactctgaaacattcagactt

SEQ ID NO: 48751 - DNA, 660 bp, Homo Sapiens
  misc_feature (8)..(8): n is a, c, g, or t
tggcaganagctccaccatttggtgctaaaaaaaaaaacgtcctgaggttcatcccccacccmtccmstttctggcctttacacagtcacctttcactgaggtcaggagcccctgagcagtggctgctccctgacaaccacagccatttctctgcacgggggtcattcataggactaatgtatttcatgatctactgtgcacatccaggcctgtggccacagtcccctgctaaagttgctcaggtgttctagtcctgacttcacctttttgatttggtgtgttccctagggtatgtacccttccccatctkagcctcggtgtgtccatgtttytggcgggggatgggtggactgtatgatttccaaggactctaccagtaagtggttctgatgtmatcgggtggaggtggtgttctatacctaaaggatgacctgctccagaaacagcaccagcacagcatgtwttttcttctctyctgaaagttctggcttgtagacccctcccctcctttgcaaaggtatgggatagaggggtcagatgcagatctctactgtaaaatgggctccctggtatctcctgtcttccctactgctccaaaccctaaattttggttgtacattttatttgaaaggaaaataaattttttttttgggccaaca

SEQ ID NO: 48752 - DNA, 1022 bp, Homo Sapiens
  misc_feature (886)..(886): n is a, c, g, or t
  misc_feature (905)..(905): n is a, c, g, or t
  misc_feature (924)..(924): n is a, c, g, or t
  misc_feature (954)..(954): n is a, c, g, or t
aaaacagaagcttggcatggtggaatggattgaacctcctaaacgagaacgcaaagcaaactacgcagtggatgcctactttagagaggctttgcgtgtcagcgagccaaagattccaaaggctccacggcctccaaaacagccaaatgttcaggattttcaatttttcccaccacgcttatttgagctcctggaaaaggaaattctttattatcggaagacaataggctataaggttccaaggaatcctgatatcccaaatccagctctggctcaaagagaagagcaaaaaaagattgatggagctgaacctcttacaccagaagagactgaagaaaaggaaaaacttctcacacaaggtttcacaaactggactaaacgagattttaaccagtttattaaagctaatgagaaatatggaagagatgacattgataacatagctcgagaggtagagggcaaatcccctgaggaggtcatggagtattcagctgtattttgggaacgttgcaatgaattacaggacattgagaaaattatggctcaaattgaacgtggagaagcaagaattcaacgaaggatcagtatcaagaaagccctggatgccaaaattgcaagatacaaggctccatttcatcagttgcgcattcagtatggaaccagcaaaggaaagaactatactgaggaagaagatagattcttgatttgtatgttacacaaaatgggctttgatagagaaaatgtatatgaagaattaagacagtgtgtacgaaatgctccccagtttagatttgactggtttatcaagtctaggactgccatgggattccagagacgctgtaacactctgatttcattgattgagaaaagaaatatggaaaatganggaagagagagagccgaanagaagaaacgggcaactanaactcccaatgtccccgaaaaagaaaagcngagtccagctactgtagagctcttggaaagaaagggaggtccaggaaggtggaaaatccttaaagcca

SEQ ID NO: 48753 - DNA, 536 bp, Homo Sapiens
cactgaactaggtaggcactgaaataacagcagtgggcataccaaattctctgacctcttggagcttatattttaccagaggagacagataaatgaagtgatgagtactgtgaagaaaaataatggaaaaaaagggaatgcaggagtgatgttgtatgctattttacataggaatggtaagggaaggccaccctatgtaaagtagcatctaccccctcctcccactgctacactactctgtctttgcttttgttcaaagcatttttgttgtgttcttaacttaaaaatgggagaagcaaaataggaaaccttgaaggaatcctagataaacttattttttttagaattgccccaatatcttctaaaatttattacagaatgtaaaatgcttattacccatcaaatgtatctgttatgttttgatttatttttaaacaaccatataaagaactttggaagagatcagctggaaatatatctcatttattttatgaataaatatgaaaattctctttagtatgaaaaaaaaaaaaaaa

SEQ ID NO: 48754 - DNA, 447 bp, Homo Sapiens
ggattacaggcatgagccagtacacctgttccccttcagctcttttgaggagttttgctgtcaatatgaacactggaacagtggctggggaggatgagatctcaatacttccctgacatcccttaagactcaagtcttgatactttgtctgctctctggctctttctttgtcattactattatttttatcttcttgatgttgactcttgctaaaattttttgtcttccttattgttaatgcttatagaaaatgattccttgttatcttttagcccatgtcatccgaatcatttgctgtttctagcctaggtgctttgactatgccagcttgtatttcttcagaattttcattaactatatgtgtggtattgtaggcattacatattttaaaataaatttagccattgcttcaatcacaaaaaaaaaaaaaaaaaaaaaaaaaaaaat

SEQ ID NO: 48755 - DNA, 859 bp, Homo Sapiens
  misc_feature (633)..(633): n is a, c, g, or t
  misc_feature (681)..(681): n is a, c, g, or t
  misc_feature (711)..(712): n is a, c, g, or t
  misc_feature (720)..(720): n is a, c, g, or t
  misc_feature (726)..(726): n is a, c, g, or t
  misc_feature (736)..(736): n is a, c, g, or t
agttgtcccttgcattcaccaggggactggttcccggacaccttgtggataccaaaacctacagatgcccaagtttgttatataaaatggtgtagtagttgcatataacctatgcacaaccttctgtatattttaaaccatctctagattttttataatacttaatacaatgtaaatgctatgtaaataattttatactgtattttaaaatttgtatttttttactgtcattgtgttttttctgaatatttgtgcattgctattggttgaatctgcatatatgaagagctgattacatatactactgaatttcttgcctacaagtgctatcaattactgagatataattgtggatttccaattatgcttgtggatctatttcttttgttctgttagtttttgcttcataaaatttaacactctcattataggttcatactagcatacatattcctgatgaacacagtcatgtgtcatgtaataacattttactcaatgatggacacatatacaatggtggtcccataagattacaatggagctgaaaaattcctatcacttgtggacgttgtcatgcaacatatcactcaggtgtttgtggtgacgctgctgtaaataaacctactgtgcttncagttgtataaaagtatagcacatgcaattatgtatagtacgtaatangtgataataataagtgattacattactagnntatgtaanttattngactatttgnattattattttagactgtactcctttctactattaaaaaaaaaaagtactgtaaaacaacctcagcaagttcttcaggagtatccagaagaagcatttgtttaatagggatgacagctcctgc

SEQ ID NO: 48756 - DNA, 371 bp, Homo Sapiens
gtctcccgtgcaaagaaaacaaatatgtgggggtatctgctgcctaagaaatggtgctgtgtggaatttcctgtttaagaagagatacgtgttagaagaatggcttctgattctcttggctgtgtcttgctgtgtaattcaagttggctgcacagcaatttaatgagttagaacaagaaccaaaagattattgaaagtggctgatggccataatctagataattcctactgtgtccccatccatctgccactttaaaatgaaaatagcaaggcaaaagaaagataattggaaggcattatggtgtcttgcaccctcattcagccattctacaaatatctattaggtaccttccatctgtcaggggagaaga

SEQ ID NO: 48757 - DNA, 1164 bp, Homo Sapiens
  misc_feature (1094)..(1094): n is a, c, g, or t
ggcctgcaggggatggaaccttccagaagtgggcggctgtggtggtgccttctggagaggagcagagatacacctgccatgtgcagcatgagggtctgcccaagcccctcaccctgagatgggagctgtcttcccagcccaccatccccatcgtgggcatcattgctggcctggttctccttggagctgtgatcactggagctgtggtcgctgccgtgatgtggaggaggaagagctcaggtggagaaggggtgaaagatagaaaaggagggagttacactcaggctgcaagcagtgacagtgcccagggctctgatgtgtctctcacagcttgtaaagtgtgagacagctgccttgtgtgggactgagaggcaagagttgttcctgcccttccgtttgtgacttgaagaaccctgactttgtttctgcaaaggcacctgcatgtgtctgtgttcgtgtaggcataatgtgaggaggtggggagaccaccccaccccgatgtccaccatgaccctcttcccacgctgacctgtgctccctctccaatcatctttcctgttccaaagaagtggggctgaggtgtctccatctctgtctcaacttcatggtgcactgaactggaacttcttccctccctattaaaattagaacctgagaaaaaaacaaaaaaaaaaaaaaaaaacctcgaggcattctatggtcgggggcggaaaaagaaggtaatgaaatgggccctgggccaaagcttggttcctgaccccagctttttttgtaacaaaggggtaaaatttggcccggttctccctataagggaagccctatttaatttccaaaaaagccagggttaaccctgccattaaagaaaacgggctggcaataaccccggggaattttaaccccccctaatgagaccggggctttttttttctggggatcccaaaggaatctttccttagaaaaccctctttttagtctggggaaaaacatccggcgtggcttgggctacaaccaaaaaacaccccccgcccaaacaggggggggagggttcttttttttcgcgggatatatacgaaactttcaccaccgctcttttnttctcccaaaaggggaaaagtggtgttctcggcgacaaagggcgcaaatacagcccaaatcgttgtgttc

SEQ ID NO: 48758 - DNA, 654 bp, Homo Sapiens
tatggagtggtctacagagcaaaagacaagaaaacagatgaaattgtggctctaaagcggctgaagatggagaaggagaaggagggcttcccgatcacgtctctgagggagatcaacaccatcctcaaggcccagcatcccaacatcgtcaccgttagagagattgtggtgggcagcaacatggacaagatctacatcgtgatgaactatgtggagcacgacctcaagagcctgatggagaccatgaaacagcccttcctgccaggggaggtgaagaccctgatgatccagctgctgcggggggtgaaacacctgcacgacaactggatcctgcaccgtgacctcaagacgtccaacctgctgctgagccacgccggcatcctcaagcctcccacagcttcgcgggcactggccttcctgaacacctctcctggcgtcttaggaatactccacggccgtggacatgtggtcagtgggctgcatcttcggggagctgctgactcagaagcctctgttccccgggaattcggaaatcgatcagatcaacaaagtgttcaaggagctggggacccccagtgagaaaatctggcccggctacagcgagctcccagcagtcaagaagatgaccttcagcgagcacccctacaacaacct

SEQ ID NO: 48759 - DNA, 416 bp, Homo Sapiens
gataaatgcatttaggctcagaaaattaatgattaatatttgaacttaagtggggagcaaacctggcttgatggcattttgtcagaaaaagacctgtgtttccattgaccaaagttgtaatgtgacttaatgtaatgctgcgtggcattaaggttctggcacagagaaaaagcggggctcatccaggattggtggtgtgctcgttgcatatacagtgtccagggtctcacctccagagatgaagatttatgaagtcagtgaagggtcctgagaatctgcatgcttgataagcatcacagatgatttcagtgcaggtgattcagagacctcacttgaaaatatattgatttacaagatatgttgcatctgttgatgacaattgatatctatactgttcttttctgctacagagatca

SEQ ID NO: 48760 - DNA, 933 bp, Homo Sapiens
  misc_feature (727)..(727): n is a, c, g, or t
  misc_feature (755)..(755): n is a, c, g, or t
ttggctgcagtggcagtgctttctcttctgctcacggggacccgctcaggctggaggccagccagctcttgccgccacctcggtcgcgatgggggcgcaggaccggccgcagtgccacttcgacatcgagatcaaccgggagccggttggtcgcattatgtttcagctcttctcagacatatgtccaaaaacatgcaaaaacttcctttgcttgtgctcaggagagaaaggccttgggaaaacaactgggaagaagttatgttataaaggttctacgttccatcgtgtggttaaaaactttatgattcagggtggggacttcagtgaaggtaatggaaaaggtggagaatcaatttatggtggatattttaaagagaatgtggtcttttgcaaaatgaaaagatgaaaactttattctcaaacatgacagagcgttccttttatcaatggcaaatcgagggaaacataccaatggttcccagtttttcataaagagtgttacaccgtgcgctccaaagtaccacaaagcctgctccacacctggatggggtgcatgtagtctttggactggttatttctgggttttgaagtaatcgaacaaattgaaaatctgaagaccgatgctgcaagcagacaatatgcagatgtgcgagttattggactggtggagtacttgccacaaaatcaataaaaagatgttttttgagaaaaaaaggaagaaaccaanctcattcagaaaggctcggattcctctntcaattcctcctcttcttcagatcatcttcagaaagtgactttgacatgagagaagcagaaggagaaacctaagaggagccaaaaagttaacgttctaaaaaagagcgaaaaggaagcaagcagttcaaaagagccaagggattaacatgcaaatgaacccaaaagtccccctcctga

SEQ ID NO: 48761 - DNA, 588 bp, Homo Sapiens
tatgttactactaaaagtgactgttctaaggctgtttgtgtgaagtattaaatatatgttcttttcctcaaggctttaattagtatcttttggcctttttatgcttttgttatttgattagcttaaatttttcttttctgagtgttcagtcaagttatctgtactgaccagaagaggaatttcatcttttgctttctatttattacttgaacattactttaaagtgacttataattggagactgacaaatttgtgttttcttcaaacagatgaaaactttattctcaaacatgacagagcgttccttttatcaatggcaaatcgagggaaacataccaatggttcccagtttttcataaagagtgttacaccgtgcgctccaaagaaattaaatgggcctggtggcgcatgcctataatcccagctactcaggaggctgaggcaggagaatcacttgaatccgggaggcagaggttgcattgagccgagatcgtgccatcgcactctagcctgggcaacagagtgagactccatctcaaaataaacaaacaaataaaaataaaagcactctttacatctttcatataa

SEQ ID NO: 48762 - DNA, 765 bp, Homo Sapiens
gatgagaaggactcacttaagaagcagctgagagagatggaactggaactggcacaaaccaaactgcagttggtggaggccaagtgtaaaattcaggaacttgaacatcagagaggagcccttatgaatgaaatccaagctgcgaaaaactcttggtttagcaaaaccctgaactctatcaaaacggccacgggcacccagccattgcagccagcaccggtcacccagccacccaaggagagcacatagttccagccttacccaagcacaagagcacaatgttcaaaccaatggaaatctgggaggattcttcctggtgtccctttgaaggaaagtcaaggaggccagaaaacaagccagaatttttcagtagctctcactctttcttgtatgacacttttcaaagggatgctatttaaactgacctgttctatgttgaatacctattttccagcttctggaaggccatgttcagatccatcatagtattacacattattttgtttgcctgatgtttagttggaaataagtaattcagaactaaatgcttttttatttagaattattcataattatttttatcttacataaaaatggagacatctgttattccaaggttgaagtgataagaagatctttgtcacaggaaaaaaaaaattgaaacctaaacatcttaagttttcaggatttattcagataaagcacactgtggggccaggcatgaccactctcagggtttcctcctgagcctgattcccagggaag

SEQ ID NO: 48763 - DNA, 707 bp, Homo Sapiens
  misc_feature (679)..(679): n is a, c, g, or t
  misc_feature (685)..(686): n is a, c, g, or t
  misc_feature (688)..(688): n is a, c, g, or t
agactttgaggaagaggagtttgaggaagaatttgaggaagaagaaggtgagttagaggaagaagaagaagaggaggatgaggaggaggaagaagaactggaagaggtggaagacctggagtttggcacagcaggaggggaggtagaagaaggtgcacctccacccccaaccctgcctccagctctgcctccccctgagtctcccccaaaggtgcagccagaacccgaacccgaacccgggctgcttttggaagtggaggagccagggacggaggaggagcgtggggctgacacagctcccaccctggcccctgaagcgctcccctcccagggagaggtggagagggaaggggaaagccctgcggcagggccccctccccaggagcttgttgaagaagagccctctgctcccccaaccctgttggaagaggagactgaggatgggagtgacaaggtgcagcccccaccagagacacctgcagaagaagagatggagacagagacagaggccgaagctctccaggaaaaggagcaggatgacacagctgccatgctggccgacttcatcgattgtccccctgatgatgagaagccaccacctcccacagagcctgactcctagccatcttctgcaccccactctttgtttccaataaagttatgtccttagatagccganaaaaannanaaaaaaaaaaaaaagggcg

SEQ ID NO: 48764 - DNA, 864 bp, Homo Sapiens
cgatttcgaatcaaagggaaagtgcaggatgccagagagatgttgaactctcgcaagcagcagaccacggtgccccagaagccccgccaggttgctgatgcccgggagaagatcagcttgaagaggagttcccctgctgccttcataaacccacccattgggacagtgacccctgctctgaagctcaccaaaaccatccaggttccacagcagaaagccatggcaccacttcatccccatcctgccggaatgagaatcaatgttgtcaataaccaccaggccaaacagaatttatatgacctggatgaagatgatgatggtatagcttccgttcctactaaacagatgaagtttgcagcctcaggcggctttctccaccacatggctgggctaagcagttccaagctttccatgtccaaggccctccctctcaccaaagtggttcagaatgatgcatacacagctcctgctctcccttcctctattcgaacaaaagccttgaccaacatgtcccggacactggtgaacaaggaagaaccccccaaagagctgccagctgctgagcctgttctcagcccattggaaggcaccaagatgactgtgaataatctgcaccctcgagtcactgaggaggacattgttgagcttttctgtgtgtgtggggccctcaagcgagctcgactggtccatcctggggtagcggaggtggtgtttgtgaaaaaggacgatgccatcaccgcatataagaagtacaacaaccggtgtctggacgggcagccgatgaagtgcaaccttcacatgaatggggatgttatcacctcagaccagcccatcctgctgcggctgagtgacagcccatcaatg

SEQ ID NO: 48765 - DNA, 625 bp, Homo Sapiens
tgcaactcaagaaggaaaagaaataacctgtcgaagttatctgatgacaaattacgaaagtgctcccccatccccacagtataaaaagattatttgcatgggtgcaaaagaaaatggtttgccgctggagtatcaagagaagttaaaagcaatagaaccaaatgactatacaggaaaggtctcagaagaaattgaagacatcatcaaaaagggggaaacacaaactctttagaacataacagaatatatctaagggtattctatgtgctaatataaaatatttttaacacttgagaacagggatctgggggatctccacgtttgatccattttcagcagtgctctgaaggagtatcttacttgggtgattccttgtttttagactataaaaagaaactgggataggagttagacaatttaaaaggggtgtatgagggcctgaaatatgtgacaaatgaatgtgagtaccccttctgtgaacactgaaagctattctcttgaattgatcttaagtgtctccttgctctggtaaaagatagatttgtagctcacttgatgatggtgctggtgaattgctctgctctgtctgagatttttaaaaatcagcttaatgagagtaatctgc

SEQ ID NO: 48766 - DNA, 699 bp, Homo Sapiens
ttttttttttttttttttaggaagcagaaaatcaatcatgcctctttctctttcccagcgtggctggccaccaccaaaaacaggtatttcttttttaagccgatgacacacagtattacaaagacagagataactgccctgggtcatgggaggaggggaggctttataaccaagtaaatttggagaaatactggattaaaaaaagctaagcaagtttctttactgaagggcttcttagagccattaataagcttattaataagcttataggctccttcgttctctaagaggggaacatttcgtcatggaatccactcctcatagagcatctcggaggaccaagttttcactttgagaaacacttccagaaacccagcccgttatcatccctggctcaggaggggtggtcctgaagctgtggttcttggctacgctgctctggggacttgcagaatcccttctcctgaagagtatgttagttcgcatgcacccacatcgaaggatactataaggcccgactctataaaactcattattgtgagctcaattaggttttaggagatgaagtcctctgatgtctctcaactttcaatgccaggaaaagctggttgattcttatgttttggggcactgaaaatcttataactgactctgacaggtttttgctttgcctgccagggaactcaggtctaaatttag

SEQ ID NO: 48767 - DNA, 494 bp, Homo Sapiens
tgggtgaatgttgttgcccctgctggcaagccaccttgagacctcaccgggcctgtgatatttgctctcctgaactctcactcaatcctcttcctctcctctgtggcttttcctgttattgtcccctaatgataggatattccctgctgcctacctggagattcagtaggatcttttgagtggaggtgggtagagagagcaaggagggcaggacacttagcaggcactgagcaagcaggcccccacctgcccttagtgatgtttggagtcgttttaccctcttctattgaattgccttgggatttccttctccctttccctgcccaccctgtcccctacaatttgtgcttttgaggttgaggagccttcacctctgttgctgaggaaatggtagaatgctgcctatcacctccagcacaatcccagcgaaaaaggtgtgaagcacccaccatgttcttgaacaatcaggtttctaaataaacaactggaccatc

SEQ ID NO: 48768 - DNA, 515 bp, Homo Sapiens
cagagggagaccctgtctctaaataaaaaaagaaaagaaaaaaaaagcttacaacttgagattcagcatcttgctcagtatttccaagactaatagattatggtttaaaagatgcttttatactcattttctaatgcaactcctagaaactctatgatatagttgaggtaagtattgttaccacacatgggctaagatccccagaggcagactgcctgagttcaattcttggctccaccattcccaagttccctaacctctctatgcctcagtttcctcttctgtaaagtagggacactcatacttctcatttcagaacatttttgtgaagaataaattatgttatccatttgaggcccttagaatggtacccggtgtatattaagtgctagtacatgttagctatcatcattatcactttatatgagatggactgtggttcatagaaacccaatgacttgattgtggctactactcaataaataatagaatttggatttaaaaaaaaaaaaaaa

SEQ ID NO: 48769 - DNA, 580 bp, Homo Sapiens
gcacgagcggcacgagcggacttccaatgaagttcagtatgaccaaaggctcttcaaccaatccaagggtatggacagtggatttgcaggtggagaagatgaaatttataatgtttatgatcaagcctggagaggtggtaaagatatggcccagagtatttataggcccagtaaaaatctggacaaggacatgtatggtgatgacctagaagccagaataaagaccaacagatttgttcccgacaaggagttttctggttcagaccgtagacagagaggccgagaaggaccagttcagtttgaggaagatccttttggtttggacaagtttttggaagaagccaaacagcatggtggctctaaaagaccctcagatagcagccgccccaaggaacacgagcatgaaggcaagaagaggaggaaggaataggcacaggtctctccaaagtgaatgaactcttacccataaccctaatgatgcaagtcatatgggggaacactttgtaaatggtcaggataaaaaccaaatctgggtgccagatcccagcactactttttattactggagaaatggggggga

SEQ ID NO: 48770 - DNA, 791 bp, Homo Sapiens
ttttgctcctctgatccgccctgccattcagagtcaggaaaatcaagacttgtccagttacgtaagtataccaatctttacttattttatcttttagatcttttctctctggttagattttaaaaggaaacaaaatttacaacaaaccttttgatattaaaaagcaccactcccatgctgaaactgtaaaattctacaagcaatttcaggcattataaaaattataatctatttttaacctatttcaggtaattttagccgtcttttaaatctacaaagagctgttgccggtcacaccattgaaagccgaggacgcacataaaagggagctcattttgccatgtgggagacttagcctatttgccgcctccactgggaggggcttacagaaagagccatcagccagagggctcctacagagtcatggggcttctgctccccagggcgccaagcgcctgctgcctcatgggtagacaaggttagagaacacattccagctaatctgctggggtgtggataggagactttccgtggaaccttacacagccgagcctttgtgtttcactatttcaggatgcaaactgagcaaggaactgataccagggccagcacgacagcaaaacctcctaatgttttaaaatttaaacggctcacacagaaatgagagttccaattgattttatttaaaataaaactatcaggatgctctctgatcatttagaaaatttggaaaatgcaaaaaataataggaaggggaaaggtttgcatagtcttacaaaaaaaaaaaaaaa

SEQ ID NO: 48771 - DNA, 1158 bp, Homo Sapiens
  misc_feature (864)..(864): n is a, c, g, or t
  misc_feature (870)..(870): n is a, c, g, or t
  misc_feature (881)..(881): n is a, c, g, or t
  misc_feature (1088)..(1088): n is a, c, g, or t
ggaccggtccggattctccggaatcgtcgaccacgcgtccggtaagaagaaggggaagaaaagaaggggaagaagatcaaaacccaccatgccccaggctcagcagggagctgctggatgagaaagggcctgaagtcttgcaggactcactggatagatgttattcaactccttcaggttgtcttgaactgcctgacttaggccagccctacagcagtgctgtttactcattggaggaacagtaccttggcttggctcttgacgtggacagaattaaaaaggaccaagaagaggaagaaaaagggccagtgtctcccaggaatctgcaggagtctgaagaggaggaagtcccccaggagtcctgggatgaaggttattcgactctctcaattcctcctgaaatgttggcctcgtaccagtcttacagcagcacatttcactcattagaggaacagcaagtctgcatggctgttgacataggcagacatcggtgggatcaagtgaaaaaggaggaccaagaggcaacaggtcccaggctcagcagggagctgctggatgagaaagggcctgaagtcttgcaggactcactggatagatgttattcaactccttcaggttgtcttgaactgactgactcatgccagccctacagaagtgccttttacgtattggagcaacagcgtgttggcttggctattgacatggatgaaattgaaaagtaccaagaagtggaagaagaccaagacccatcatgccccaggctcagcagggagctgctggatgagaaagagcctgaagtcttgcaggactcactggatagattttattcgactccttccagttatcttgaactgcctgacttangccagncctacagcagngctgtttactcattggagaacagtacccttggctgggctcttgacgtggacagaattaaaaggacgaaaaagaggaagaagacccagacccccatggccccagctcaccagggagctggtggaggtaataaaacctgaaatcctgcaagactccctggatagatgttattcaactcctcccagtgtctttgacaggcctgatctggncagcctaatggaattccctttatgtcatgggaggaaaaactggtgggtttttctccttgacgggggaaaa

SEQ ID NO: 48772 - DNA, 453 bp, Homo Sapiens
tctaaaataagaactcctataaaccttcactgataaaatcccttcagttttctccagttatcccagtaacgtcctttatagcaaaaggatccggttcaggatcactcatacccagctgtcatatctttccagtctccttcattctagaagcattcttcattcttccttcatctttcatgacactgacacttttaattacaggccagctgatgtgtagaatgtccttccttttcttaggagatgttttctgtccttccttgaaaaccccactagtgttacctgccacgaggagagctaggcgctctgccccctaccccaagctggttgctctctcttacaacgcttcattaatcaagtacccttttttggagcattgatgatattcattcatccttttagccagtaaatattttttgatgtctattacgtgccaaatgggatacatttaagaac

SEQ ID NO: 48773 - DNA, 668 bp, Homo Sapiens
  misc_feature (8)..(8): n is a, c, g, or t
aagaaatngtagtttcacatgagtctggcctggctgcagagcagcaagcaccctaaagtggtggagaattagtggccaggcttcccttcactcttccacttctctatcctggcagccccccacaaaggatacctttagggtcataatcatccatattacatgaaaagaatcttagtcattgtgaggaaaagatcagctagaaggggatgaaggtgaagagaaggttctttggagaggttcttagagacatcagatttcctgagaatctgatgaaatcagatctctattatacagaagccatggatgttacttttttttgagtagagagccatgatgtagaaagccatgttttcttttcattcttggcccctagtattcgagggtatcatctttctcagtcacagcctttcctaacctctgccctcttccaggaagaaagggatttggttacacacagatgatttcccagtcaccttgtttccatgagtgatcttgtcatttttaagctcaattgatgtattaggtttgaatttgtttgccagatacttgaaattcacttttctttggtatactggttttttagcattaacatggattccaaacaaacttggttctgccaaagaaaaccagagctggacagttgttaaaacagtaaaaaaaaaaaaaaa

SEQ ID NO: 48774 - DNA, 774 bp, Homo Sapiens
  misc_feature (699)..(699): n is a, c, g, or t
gtacagactgaatccagcagatgagtagaaagaaaaccactccaatatttaatcatttgttgttaaggaatttatccattaacaaagtttttagacagagttgtttatatctactcaaggtgtcattatgcacatctgtttcttgtacctcaggttcatcctatagaaaatcatgctaactcacaagtcatgcagtgttttcaaaaagacaagtcatgcagtgttttcaagttcagagagtagcaaaggatgcaaatctaatttctttaccatttgctaccatctgaagttagtaacattttttggctaatcaccaagcacccagaaagaaagaaatagagcaaatttggtgcatcgtttgtcttccgtatctcctttcgaagtcatttccacaggataagtgccaaagcacagaaaagaagctaggccccacttttactctcatgaacaaaagtcttcccatagatttttacatagctgctgcatttgtcatccctttcctgaagagctttgttgctgtggtcttgctctagggctgctttcagcaacatttctgacgcaggtttaatgctgattagccctaaaacaattctagggcagggctccctgccaggataaagaatgaacaaaattggtttgcatataggccagctgcagttgctgcagctagagtctgtcaaactaggaccattttcttgnttaccaagatgagggtaaattagcacagcatgaggcaaaaaaaaaagattttaaaaaacccagaaaattagctat

SEQ ID NO: 48775 - DNA, 695 bp, Homo Sapiens
agatggacagtcatcaactggcggatatagcggtacatatgatccttagccaccagggcacaagcttaccagtagacaatacagacagagcttttgttgagctgtaactgagctatggaatagcttctttgatgtacctctttgccttaaattgctttttagttctaagattgtagaatgatcctttcaaattgtaatcttttctaacagagatattttaatatacttgctttcttaaaaaacaaaaaaactactgtcagtattaatactgagccagactggcatctacagatttcagatctatcattttattgattcttaagcttgtattaaaaactaggcaatatcatcatggatacataggagaagacacatttacaatcattcattgggccttttatctgtctatccatccatcatcatttgaaggcctaatatatgccaagtactcacatggtatgcattgagacataaaaaagactgtctataacctcaataagtattaaaaatcccattattacccataaggctcatcttatttcatttttagggaaaggaaattacatgtctatgaaatttcaattttaggccctattggttttcaggaccataaattattttttaagaaataaattaaagggtcaattatatgcaatggagggatttttaatgaataaaaaagtggttcaatccct

SEQ ID NO: 48776 - DNA, 849 bp, Homo Sapiens
tggtgggaaggctgggggagaaaggtgagaagtgattgggggggcttccctgatgagtcctcatggagggtgctgaggcagggaacaggggtgcagggacagtgatcagggcacctggtaccctgaccaacttgatgatggcatctcttttaagatgcccaagtctgcgcacttttattcctttattcggcccctagcaccccctccccaccccaaagaaggtcagttgcatgcgtgtggggatgtagctcaaaaaagaaataagatggagtggaaaggaaagaaaggaagaagcaggaattcaaggtgggtgggctgagcttggggccacctagcccacctgctccaatcaagggctggaacaaacctgaggccacttggagaggcagggctgggcagggacagggggtgggggccgaaatcacagcttccccatcagagccagatgtgtgaaggaaatgtcccagatggcagtagtttctcggcaaggaggggaatcctggagatggttcatgtctgtgatcccagtgctttgggaggctgaggtgggaggattgcttgagcccgggagttcgagaccagccctgggcaacatggcgagaccccatctctacagaaattaaaaaaaaaatttaccagttgtggtggccagcacctgggggcccagctacttgggaggctgatttgggaggcttatctgaccccaggaagggaaagctgcaaggagccctgattaccctactgaacccccgcctgggcaaaaaaaccaaaacccttgcctcaaaattataaaaaaaaaaaaagggggggcccgggccccatgggtttttttccctggtttttccccgc

SEQ ID NO: 48777 - DNA, 575 bp, Homo Sapiens
tccttgcgggagcgagcgcgtctgggagcccgcggccggagaagggctgcgggttagggggccggcgcccgcggttcaggattccagaattggaaataacgggagggaggacctggtccagcttcccttcctcaaataaggaaattgacacctggcgtgatacatgtctttgtccagagtacctgtggagaagaaacaatggattccttagaccatatgctgacagatcctctggaacttggtccgtgtggagatggccatggcacgcgcatcatggaggattgcctcctgggaggcaccagagttagtctgcccgaggaccttctggaggatcctgagatcttctttgatgttgtcagcctctcaacatggcaggaagtgttaagtgattctcaacgtgaacacctccagcagtttctgccccagtttcctgaagacagtgctgagcagcagaatgaactcatcttagccttgttcagtggggagaacttccgctttggaaaccctctgcacattgcccagaagcttttccgagacggacactttaaccccgaggtggtcaagtaccggcagtt

SEQ ID NO: 48778 - DNA, 1091 bp, Homo Sapiens
  misc_feature (557)..(557): n is a, c, g, or t
  misc_feature (762)..(762): n is a, c, g, or t
  misc_feature (825)..(825): n is a, c, g, or t
  misc_feature (846)..(846): n is a, c, g, or t
  misc_feature (914)..(914): n is a, c, g, or t
  misc_feature (953)..(953): n is a, c, g, or t
  misc_feature (973)..(974): n is a, c, g, or t
  misc_feature (978)..(978): n is a, c, g, or t
  misc_feature (1015)..(1028): n is a, c, g, or t
  misc_feature (1030)..(1031): n is a, c, g, or t
  misc_feature (1033)..(1044): n is a, c, g, or t
  misc_feature (1055)..(1057): n is a, c, g, or t
  misc_feature (1059)..(1060): n is a, c, g, or t
aggcctgggtggcgattcggacgaggatcaaccccgaccacttgtcttatttccactttgtggggcggatcatggggctggctgtgttccatggacactacatcaacgggggcttcacagtgcccttctacaagcagctgctggggaagcccatccagctctcagatctggaatctgtggacccagagctgcataagagcttggtgtggatcctagagaacgacatcacgcctgtactggaccacaccttctgcgtggaacacaacgccttcgggcggatcctgcagcatgaactgaaacccaatggcagaaatgtgccagtcacagaggagaataagaaagaatacgtccggttgtatgtaaactggaggtttatgagaggaatcgaagcccagttcttagctctgcagaaggggttcaatgagctcatccctcaacatctgctgaagccttttgaccagaaggaactggagctgatcataggcggcctggataaaatagacttgaacgactggaagtcgaacacgcggctgaagcactgtgtggccgacagcaancatcgtgcggtggttctggcaagcggtggagacgttcgatgaagaaaggagggccaggctcctgcagtttgtgactgggtccacgcgagtcccgctccaaggcttcaaggctttgcaaggttctacaggcgcggcagggccccggctgttcaccatccacctgatagacgcgaacacagacaaccttccgaaggcccatacctgnctttaaccggatcgacattccaccatatgagtcctatgagaagctctacgagaagctgctgancagccgtggagggagacctgncgggttttgctggtgggagtgaaagcaaccaaaggcaacagagtctagctcatggccacccagaccanagcatccagcttctgtgcacctcctggcaaagctggcanaaggccctggaatccagacnncccngggggggggggaaaggggtgtctcctctttcctgtgnnnnnnnnnnnnnngnngnnnnnnnnnnnnggggggggggnnntnntttttgtggggggggggttttcccccacccc

SEQ ID NO: 48779 - DNA, 795 bp, Homo Sapiens
  misc_feature (21)..(21): n is a, c, g, or t
  misc_feature (23)..(23): n is a, c, g, or t
  misc_feature (36)..(36): n is a, c, g, or t
  misc_feature (46)..(46): n is a, c, g, or t
aggcaagggcatgagtaccgnangtccggaattccncgggattaanttttgtaaatcatggctctttacacagagtaccacttatttaataagacgggatgtaaatttacaatgacaaatgtgtattttaagaaagaaaatgacattattttgaatggtactttgtggaaagaggggagaataaagttatgctgtgtacatcacttgcagatcaccaaaaacactccgctgcccgtgaccgccggtgggtgtgtccccgctcccgtcgtcccgcccacctcaaaccccgcaggtgtgcctcccagcggattatttattgtagaaagtgtattcatttgctttataatgaaaaatacatttgcaaaggtatattgatatgcatttttatacaggcacataaaaattcaacttggcttgggagcagaatgcattgcattgtataaatgactctggcctgtgtgtactttgattttataacttgtaatcttttgtttacaatgaggggctttctgtaacttgttttaatttagaacactttggtagcaatagaaactttggatacatttttgtatggtacctgtgatgtatatagaattagtactttatttttatttttaagaggtaaagcattatgttggggaaagtagggtgggtttccaaatttgcattttttatattaaaaataaagtcaagatttggaaaaaaaaataaacaacacaatatataaaaaaacaaaaaaaaaaaaaaaacaaaaaaaaaaaaaaaaaaaggggggccccctgggctccccgaggc

SEQ ID NO: 48780 - DNA, 630 bp, Homo Sapiens
ccacgccgtccgccctctgactggaaaacagactctacatgtaggatggtaacctcagaaagcaagaatgtgaagctcactgtgagcaatgtgctgaaagagataaaaattcttaacatctttggagttattaaaggctttgtagaaccagatcactatgttgtagttggggcccagagagatgcatggggccctggagctgcaaaatccggtgtaggcacagctctcctattgaaacttgcccagatgttctcagatatggtcttaaaagatgggtttcagcccagcagaagcattatctttgccagttggagtgctggagactttggatcggttggtgccactgaatggctagagggatacctttcgtccctgcatttaaaggctttcacttatattaatctggataaagcggttcttggtaccagcaacttcaaggtttctgccagcccactgttgtatacgcttattgagaaaacaatgcaaaatgtgaagcatccggttactgggcaatttctatatcaggacagcaactgggccagcaaagttgagaaactcactttagacaatgctgctttccctttccttgcatattctggaatcccagcagtttctttctgtttttgcgag

SEQ ID NO: 48781 - DNA, 781 bp, Homo Sapiens
  misc_feature (757)..(757): n is a, c, g, or t
  misc_feature (760)..(760): n is a, c, g, or t
caaggaaaagactttgggtgatgagattaagcgtatttttgctgttttatttttccctgtctggattgtgtaaattttttttctatgaaaatgtgtatttgtgataaggaaaatattttttttaagatcccagaaaataccggaagaaaagaataacaatgagatttttcttttaaattttgccttattgttaaactatagaacttgattatacataaaatgaaatatgcaagccttaatttttttctttgtatgcttagaaaaggtgaggtaccttattacatatgatttttattagtttctggaggcaaatttaatttttattttaaaatcaaaatctattttaaaagaaatagttctcaaaaagacaatgatgactgggtgtggtggtgtgtgcctgtagttcaggctgctcaggagacagaggcaggagaaccacttgaggccagttcagtctagcctgggtaacatagcaagaccctgtccctaaaataataaaaaatttaaaaaccacaataatgtgagttacaaaaaagtgtaacttatgaaaagtcgtatttatattgacctttgtaagagctcaattatttcaggaagcaaggaatatcaccattctgagtaatacaatttcaactaatctttatttcttctacttgaagtcagtgcctatctaccacaaacattcctatatcagtgtgcaaattaatttgtagacaataggctttttacgacaatgaattggttaacttttaaaagntgntttttatctcacattttataa

SEQ ID NO: 48782 - DNA, 420 bp, Homo Sapiens
tttttttttttttcttgtgtccatatctagttttggtatcagggtaatgctgccctcacaggatgagtttgagaactggtatgagttcttctttaactgttcagtagaattcagcagtgaagccatcagggcctggacttttctttgatgggagactctatattactgatttaatctcattactcatagttggtcttttcaggttttctatttcttcttggtccaattttggtaagttgtatctgttcaggaatttatccatttccatttggtttccaatttgttggcatatagttgttcataatagtctctaatgatcctttgtatttctgtggtatcggtttaatgtcttctaggcccctgctgctttcaacaccctgtaataccaacacttcgggagatagaggcaggaggatctct

SEQ ID NO: 48783 - DNA, 665 bp, Homo Sapiens
  misc_feature (638)..(638): n is a, c, g, or t
tctggaccatctgtggcttcctgctctgaacagtacttcctcactacgtgggaggaaagacttgtcagaggatccaagaaccataggcagtcaggttctccatggggaccctaaatgttgtctggtctagccctgcatcctgtgtctaaattcctggagaatattccttctgtcctagcactcatctggcctccccatccccttaggtaggctagtccatgtgtgtgttacaggggctgctagaaagttcctccctattttgagcagaaatcatctttatagtttctacccattgatcttaggtctaccctcacaactgtcctctaggtttctcttcagatatctgaaaaatgccagtctctgccccttgcatctccccttttccttgttttagtactgatttttcagaaattgtcctgatactctttttttagagcttcattcactatttaatgaatatttgttaagagtttactgtacattagactttgttcttgaatgggagggatacagtgattaataagaccaatttacccacatagagcttacattctagtggaggggaggaacagacaaaagcaagtaataatataaatgtgaaaatctcaattaggaacaaatccattgcagaaatgtanaataaagtgatgaaaaaaaaaaaaaaa

SEQ ID NO: 48784 - DNA, 455 bp, Homo Sapiens
tcagactgagtatctatggaaacatcacccatgtgaatatagccagtatcccaacagccccttctcccaagcacatgctcctctgagtaacttagaggtaatcattgttctgatttttctttagttttactatctatttatatattcctaaaacatttaagtttcaagtttttttctgtttttgaactttatcaatctgtatgtattttttatcttgtttctttcacctctctgtaacattcttccaacattcttccaagttactgcatttttcaagttactgcattcttccaaattagtagtagaacattcttccaagttactgcatttatttctagttcattcattcttgttactctataactctatgaccctgtgtagggccaggcacggtggcttacacctgtaatcccagcactttgggaggctgacgtgggtggatcacgaggtcagaa

SEQ ID NO: 48785 - DNA, 687 bp, Homo Sapiens
ccacttcttgttctctctgaagaggaccactctgaaccttggatctgttccatcctgcaggaatgcctgtcttagatggtcagtccttgagacactaaaggactgcagtgctctctctggagttgagccattagacttctcatcacagagcttcctagctcatctgactttatgcagcctcttgcttgcccctccacccgaagctcattttagtgtaaaggacagagcagcctgctcaatgggaaagcaagcttcaggacttgaaagagggaagggaggtgtctgtaatccaaggagggtctgatcattggatgtcaagttttgtcacacatgcatttctgagaagagagactagttgtgtttatcagattcttaaaaggatgtaaggcctgaaatttaaggagcattgacatagggaaagagaaagtatatccagtaaagcatcagtcacttcccaatgtcctgcatatggtggagcccctgcccggccttaccataccatttcgttctcaaagtactgcagaacagcagctacaaagttgtctcaaagccgatcttgatagattactgtatacatgaatgtgaatttaaataactaactacagtcagtcctctgtacccacgggttctgcatctgcagattcaaccaatcaaggatcaaaagtatccaggaaaaaaaaaaaaaaa

SEQ ID NO: 48786 - DNA, 884 bp, Homo Sapiens
ggctgccagccactgacagcaacaagcagaacctgcggcagtactttgaagaggcttttgagttcattgaggaagctcaccagtgtgggaaggggcttctcatccactgccaggctggggtgtcccgctccgccaccatcgtcatcgcttacttgatgaagcacactcggatgaccatgactgatgcttataaatttgtcaaaggcaaacgaccaattatctccccaaaccttaacttcatggggcagttgctagagttcgaggaagacctaaacaacggtgtgacaccgagaatccttacaccaaagctgatgggcgtggagacggttgtgtgacaatggtctggatggaaaggattgctgctctccattaggagacaatgaggaaggaggatggattctggttttttttctttcttttttttttttgtagttgggagtaagtttgtgaatggaaacaaacttgtttaaacactttatttttaacaagtgtaagaagactataacttttgatgccattgagattcacctcccacaaactgacaaattaaggaggttaaagaagtaatttttttaagccaacaataaaaatataatacaacttgtttctcccccttttccttttaagctatttgtagagtttatgactaaatagtctgtgcaggttcatagaccgaagatactacaccctttaaaccaattaaaaagaacccaaagtaatagaaaagacattgaatccccaaggcctggggataacctggggctggtccccccagaaaacaaaaacccaacccaaaccaaagccctggttgtggctcacctgggggccaaagaagaagatccgggggcagccttaaagtggggcctaaagaaaccctttcaggc

SEQ ID NO: 48787 - DNA, 600 bp, Homo Sapiens
gttttatttgaaagcactacctataaaagtagtaaggaaattattaaaatctgtattttaatcaagctgctatgaaaaacaatcaaaattctgaacaatttcttaacaagtctagaatgatatcaacccacttactgtccctttctagcaggcagaacttaataactatctcaggaactgattcctccatcctgaaacaccttaacaaccggaaaatagccaagaccagacaagtctgctgtggggacaattagataaaaggaggctgcacagtggctcacacctgtaaacccagtgctctgggaggccaaggtggaaggactgcttgagcccaggagtttgagaccagcctgggtaacacagcaagaccccatctctacaaaacatttttaaaaattagttgggcatggtggtatgtgcctatagtcctggctactcaagaatctgaggcaggaggatcactggagcccaggagtttgaagttgcagtgaactataatcatgccactgtactttagcctggacgacaaagggagactctgtctctttttagaaaaaaaaaaaaaaaaagaggaggcaaaagtaggatgtgaggatgact

SEQ ID NO: 48788 - DNA, 608 bp, Homo Sapiens
agtaatttatgatttagaaacatcacagtcattggtgatactttcatcacaggtagattctggtttacaatctaataatcatatcaacagagtagtaagtcatcccacacttcctgttacaataactgctcacgaagatagacacatcaaattttttgacaataaaacgggtaaaatgatccattctatggtagctcacttggatgctgttacaagtctagcagtagatcctaatggaatctatttgatgtctggaagccatgactgttccatcagattatggaatttagacagcaagacatgtgtgcaagaaataacagctcacagaaagaaattggatgaatcaatttatgatgttgctttccactcgtcaaaagcatatatagctagtgcaggagctgatgctcttgccaaagtatttgtatgaatcaacaaaaacttgcatcgtaacaagatttgcttggacagaaagagggtctgcatcactgccatcagaaaggttactgatatgacactacatgtgatctgcctggtgaaggctatctggggcaggcacaaattggtggaaatcacatcttaatgtcaagctcattaagttaactgtaatt

SEQ ID NO: 48789 - DNA, 745 bp, Homo Sapiens
  misc_feature (633)..(633): n is a, c, g, or t
  misc_feature (718)..(718): n is a, c, g, or t
aggtaccggccaattcggcctttacggccggggtggtcatgttgccaactaatgaaaatgtgctctgaaatccagtcagctgggtgggcctgaggcataccgtgggaaagtttcccacaggctgattttctgtccatctcaagaacctgtatgttctcttctttccctttccccaggtgccccctgctgaatttagaaaagtaacaatatatcaatcaatttaaaaagggtagaatattttggaatgacgggttgtagtgttttctagagtgctttagttttgacattttatcagtattttccagaggtaaataaattttggaaggattattacttctctgttggggccctagaacaatttagtcttttatggaaaagctgactatctgggatcatatgctcagtttgtatatttgagatccgagagatcacgttctgaagtcttctcatatttagtacacctctgattctcactagttgaatgcaagaacttgaaaggttcaggtaagtgttttgaaaaattttgactttccaaacttttgccacttgctatctgaaactcaggaatcaaaaaataccgacaggcactgttactttcaaaattctttctataagttgagaatgggacagatntgcagagcaagggaaacttgaacagttacttctagtggtaggaaatgaggtggctaggatattacccagctggtgggtgacttgngcagtgtgttcctgctttcagtggtta

SEQ ID NO: 48790 - DNA, 384 bp, Homo Sapiens
attcaggccagagttgtgggccgccgtcggcagcaagaacagagagagaggtggacagatctgagagatactgagattaaaaggagcccaagccccatctcatcctagcacaccctcctccactgtcctggcagtagcagtccctgcactaggtcagacaatcccctttggggtacaggaaacaaagcaggaggagtttgaggtccctacactgcagcagaagaagaggaaggagtggggcctgaattgaccataaaggatgtaggggccacgttgttccactgtaatgtcaaggagggggtggccattgtttgtcccagcctggggctccccctctggtttcctatttgtagttactagaatgaaaaaaaaacatgatagata

SEQ ID NO: 48791 - DNA, 536 bp, Homo Sapiens
tttgtctttaagaaataagttcttactaggcactcccaaaccttgctgttttcacccagcaggcaaaataggtataaacgtgtgcatatgtaaacatgcatattactttaaaacttactgatatcttatagctatttacagttgaagaaatgatgcctcatattcaacatctgaaaggagcacatagtaagaacttatttcttaaagacaaaaagaaaaagaattattggctggtgacagttcttcatgatagacaaattaatttaaatgagcttgccaagcagttaggtgttgggagtggaaatctgcgatttgctgatgaaacagccatgctagaaaaactaaaagttggtcaaggctgtgccacacccttggcacttttctgtgatggtggagatgtgaagtttgttctggattctgcttttctcgaaggtggacatgaaaaggtgtactttcatccaatgaccaatgctgcaaccatgggattgagccctgaagactttctcacatttgtgaagatgacaggacatgatccc

SEQ ID NO: 48792 - DNA, 969 bp, Homo Sapiens
  misc_feature (754)..(754): n is a, c, g, or t
tttgtttttctttgggggttttgtttatttttggggctggcaatccaaaatagaaaatctgatcctttgaggctctaaaggaaaatcagctgcctctaccaaccaccctctatcagcagtggcccaggaaggaggtcaagcatcttcggccgatatttaaacatgggcagcttccttcaggatgatcaccgaggctcccgtgactttgaactccctactctccagaatccaggggctatagcgatggggactgcggaattacgagggctggctgttttacaccggtcacattttctattggcagtgactgattcatgggaaagggctttgaaggaactacttcagtgcacacacaaggtacgaacctctcaggcctttcgaagaactttcataattcatgaaagcccagttctgaagattcacgtatccatctggagacctacaggaagaaagtgattgggttcctctggttcttgcctgcttcactgtggatgggaagaggtgacaacctcagtctccctttgggacctgtccaagggtaggcaaccaccttcaccttcacacagattgaggagacactggactttttacccattttctttaatcttcaatattaatattgtgtttacattgatgagaacaagagttaatgccctaccctctgctgggctgtttgtattgagttgcaatgtgaccagcgaaagctgcatttaataaatgaaagtacagactgtttaaaaaaaaaaaaaaaaanaaaaactcgagggcatctatggtcgggggcggggagaaaggagggaattgaaatggggacctggggccaatagctggtttcctggacccagcttttctttgttaaaaagtgggagaaaaatctggcccggatcctcccctaaaagaggggggcccctaatataactttcgccaataaagccccgggggttaaaccctgcgcaatataaaagggag

SEQ ID NO: 48793 - DNA, 911 bp, Homo Sapiens
  misc_feature (602)..(602): n is a, c, g, or t
  misc_feature (721)..(721): n is a, c, g, or t
  misc_feature (811)..(811): n is a, c, g, or t
gaaaaggaagatagagcaggctgaacatgtcccagacagtaactttggtgtaaatgcttcctgtttttctgccacaagccctttggtcttacccactacctcagagcacactgctaagaaaatgaaagccaccaatgagcccagcctgacacatatggactgctcgacagagcagcctgggagcatcctgggccccgaatgtgcctcctgcaaaagagtattttctccctacttcaaaaaggagccggtgtaccagctgccctgcggccacctcctgtgccgcccctgcctgggtgagaagcaacgctccctgcccatgacgtgcacagcctgccagcggccggttgctagccaagacgtgctgcgggtccacttctgagtgactgacctccactggaggagacccattgctgggaggagctgagggggaacaggagcagggccacagcacccctgaggtctggccaggccccaggcacagagctgcctgctccctcccggggctcttcttcatcacctcacggtatagcacattgcttctgcgctggtggcaatagggcaacaaagccataggccagaagcccgggggggatgtccctgcnctccctgccaccccccctgcctgagcccaggacccactggagccagccccaccctaggcaggaagacccctgctgagggcccccccgtgcagtccgcatacccccctgtccagcagggncactggtgggtggctcacccctagattgtggcccagatctcaagagtctctgccttcagggtcatccaaaagtggacctttgggaacaangggggggtgtctggtggaagtgcatggactcagccccccccgaactcgccagccctttaataaaagccgatgggttggacgtttctgcaaaaaaaaaaaa

SEQ ID NO: 48794 - DNA, 602 bp, Homo Sapiens
ggtctttttttgctttgggagtataaacatttttatatctatgctttaggtacatgtctcatgaatttgtgctgaataattacttgagtgtgaaattgttatgttatgcgatatatagtagtcaaatatagaagataatgcaaaacaatttaaagtgattgtagcagtttgctgtattctacagcagcagattgtagcagattactgtattctacagcagcagcatgtgagattgccagttgctcaaattcgtgccaatacttggtattttttatcttttaattttagacattctggagagtgtgtagtaatttttcatcttggaaaattacattaaattagtatccatttctctaattttgataacattttcataagtttattgttattagatattttctttattttgaagtgcttattgtccattttacattgggtcatctgttattgaattgtaaacattccttgaatatttaaatatgagtgcttggtcagtttttgtcacaaatatcctcttttttcactttttgcccttttattattctgaaaatgccaattgattaaaattaattttactattgttcaataaaaaaaaaaaaaaa

SEQ ID NO: 48795 - DNA, 664 bp, Homo Sapiens
agagagcggcagcccggcccagctgctggcccagaagggcctgttttacagactggcccaggagtcaggcctggtctgagccaggaccctcaaccgtaccccagttggaccagcccgcacagcctgcagtgctggagatggaagtgacccgtggtcatcgatagctccacacgatattgagtctagacctgtgtttgctctctgggaggaaaatggcagagaaagtggccaattatcacagagcatcagagccggaaggacctagcaatacacaggtctgcccgggcagggcccatctcgccctgtccaccctgcagccaatgtcaacagcgactctcagccccgctgtactctggactcacctgggggcctcaagcacatgcccaggctcccggctagacccttaaatcagaatctctgaggctgggaactgccatgctgtgtgtactttttacaaattaacacttttattttgggataatcccagactcacatgcagttaaagaaacaataatatagagagattcgtgtacttggtaccccatttcacccaatggtaacatcttgcaaaactctaggataaagcatcacagccagggtgttgacattgacacaacaatcttgctcgatttcccgttttacctgcaaaaaaaaaaaaaaaaac

SEQ ID NO: 48796 - DNA, 579 bp, Homo Sapiens
  misc_feature (497)..(497): n is a, c, g, or t
  misc_feature (511)..(512): n is a, c, g, or t
ttaaagtcttgcctgaggtcttggaaaaacattgtggatataagctgttcatttatggaagggatgactacgttggggaagacattgttgaggtcattaatgaaaacgtaaagaaaagcagaagactgattatcattttagtcagagaaacatcaggcttcagctggctgggtggttcatctgaagagcaaatagccatgtataatgctcttgttcaggatggaattaaagttgtcctgcttgagctggagaaaatccaagactatgagaaaatgccagaatcgattaaattcattaagcagaaacatggggctatccgctggtcaggggactttacacagggaccacagtctgcaaagacaaggttctggaagaatgtcaggtaccacatgccagtccagcgacggtcaccttcatctaaacaccagttactgtcaccagccactaaggagaaactgcaaagagaggctcacgtgcctctttcgggttaaggcccnaaattttggggggnnaaaaggggaaaaaaaaaggggttttttttggggccccccccccaaaaaaaaggggggaaaaaagggg

SEQ ID NO: 48797 - DNA, 599 bp, Homo Sapiens
tttgtctaattgtgtctggtttttaaaaagcgatgtgaagtaatggtggtgccagtgcctcactgtttctaaagaccacatctggaatggctgtgacgtttcatcccgttgctttcggcttccatggacgtgactgcctggtttttcgttgattccccttgtctgtggcatcttgctgtggagtctgttcctgatgtttcactcggatatgtagttttctttgatcatgctctcagggttaggctttggtaatagaatgctggcttcatggagaatttggaagctttcctccttttcctaggctgtggaacagttaacttagccctggaggcagctggtccttaacaggtctggccaaagtcgcttgttctttttttgcagggattgttgccccttgctggcttcctcaggctgctatttgttattttatctacttggattttctgtctcctggggattcgttttgataattcttattttcccagaaagccatttactcatctaagttttcagatttggagattttaaaaattcaagaaatagaaataatttctgaatagattatagtgactaaagaaactattaaaaaaaaaaaaaaa

SEQ ID NO: 48798 - DNA, 511 bp, Homo Sapiens
taagatgaattaatttgattacaggacatgctaaatttgaggtggacacaccacaaaacatacagactgaggtgtgttgcttttaatcatagataaattttagaatcgaacttttgaggcattgacttaaagggtaaaattgaatttgttagagttgatagagacagggaaaagagaaacctgaggaaaaggatatagtacttcaggtaatttttgttgtctttgttgttgtttacatttaaaacattttttttccctggcaaccttcatttaactcaaagctttaggtaatgttaaaggatatggaacaggaggagggaatacaaatctttaaaccaagtcataaggaacagtgaaggatagttatgaaaaggattgagacagtgtagttgcagaaaccacgggaaatatggtggatttggttagcatgggtcagtagtgtgatggaaaagtcaaaaagttttgaaaagctgagagaaaaactttgaattaggcaaatggtaagcttgag

SEQ ID NO: 48799 - DNA, 798 bp, Homo Sapiens
tccggccactctagaatctttttaagcaggtcagccagtatttgcaacttccacaggatgaattgcttgccaagtttctggcactcttgtctggttggaagagtacatccaaagggtacttagtgatcctttgctaagaagttttttgctgtttccgggttacagatttggccatatatttctaaacagcccctgtaaagttgaaagaaaaagtttataacagtgaacttctgaggtttagttactgcaggctttgttgagaagagattgttacagtgtgatttatggatgatcagggatgactttcccctagcaaatatttggatgcctcctgtttgtcaaatagaatgaatggtgatggtgatgggagggatagttaaacgttttctctgctaggttaacttcttacaggtataattacaatgcctgaaattctgtagtttcatttctttggattagtcgttgtcttttccagattgtacacaatctgatcaacacaaaggtagttagtagatcattaacctcaattgcaaggttataatttctcaaacattaagcatattatcagtcatgtggattcaaacacagtataagaaaatcctcaaggctgggtgtgatggcttatgcctgtaatcccagctacttagcaggctgaggcaggagtattgtttgaacccaggaggcagagttgcagtgagccaagatcgtgccactactccagcctgggcaaaatagcaagacccgaccccccatctctactaaaaagaaaaaaaaaaaaagatctttaattaagcggcc

SEQ ID NO: 48800 - DNA, 459 bp, Homo Sapiens
cgatatcgagctgttgcgcaaacacagctccacagcctgctgttgcctcgtgctaaacccagcactagccactggggagcagcctgtcgctgtccctcaggcctgcgctagcttccagggaattcttggagctgtactaatactgcagaaaaactagtttagccttggctttcagaagatgccagtgacaatggagtacattgccctaaagcagtattttcaaaatgtgcattgtggaatccatttggtctaagatcaaaataaatttttaatgaaacagaaaaaggtcagagtgcatcacacatatcatggataaaccagattttggtttctaataccactcccattaaaagaagccagggctccttgcagaaatagctgattccagggctagggcaggataagcacaagataagcctgaagcatcttgttaggatagaaataaaaatgaagtactct

SEQ ID NO: 48801 - DNA, 888 bp, Homo Sapiens
  misc_feature (770)..(770): n is a, c, g, or t
  misc_feature (843)..(843): n is a, c, g, or t
  misc_feature (855)..(855): n is a, c, g, or t
gatctttgtgttgccaggcaggaatgggctgcttggggacccagtgagctccgagggcctttctgctgcttcctgtacccctgtatttcgctcagctctctgacttgactcagctccagaaatattctttcattaatattacatgcttatggaactttacctattgattaaagacatctacccctggagaaagagcccaatgagaagtaatctctgaagcccagatttcctaaggatgaagcttcaggagaggccttatcaatcctgacaacaaacttttctcgtcaatttagtttcatttaatggaagttttaaatgtgtaaagttcagaaggctattaaaattggttccagctatctaagatacacacacaaccacacacgcgcacacacggtagagataaatatgttcgaaaatccagctcaatgttactagaaaatttgatcagaatctggtgaaataaatagtaaacttactaaaaatgccaaatatcccagaagctgcttaacatttgatcaaaagctctgtccagtcaattcctgcttctttcaaaaatactctgctgaaaagccaaaggagaaatggggctggtaccttcaatatagagaattccaagtaagattagatcccagaaggcttagtgtggctttctaggactctcactattaggcagtaacctaccattcacctctgtttcccagattcaccttgttataccttataacttaaaatataaattccaacaatgtactgcactcaaaaaaattatnttctcaattttgtttgctcatactaattggattttttttctagaaatctaaaataatttgtgaaattaactantgaattagcagntatgccacaaaacaggtaaagtgaaaattcagt

SEQ ID NO: 48802 - DNA, 764 bp, Homo Sapiens
atttaaagctcagttcacaagcagttcaattctgctggcatcagaaaaggagattctaattaaacattcttagggaaggacatcaaatgaggttaatgggaaacgttaccagattaaaagcagttttttgacaaagtaacagatttggaaattctgactctctgaaagccttgatttgaacctcaaacttgatttcaccatgagaagtggggatcaagggcctgcgcagttcttttcctaaatcgattcggtgctccccaccccgacgcaggcacaggtccgcaaccagatagggagatgcctgaatttcaggctacctttgacaaagctttcttcctccctccctccctttgcacgctgcatcccacgctgcctgcttaaagcgccctcatgtgtctacagatggtaaaacgtttatttctcaacagacattccagtgatagcatccaatgacctatgtaacggcacccttttttgctgtacgcgttttttgagatggagtctcgctctgtcgcccaggctggagtgcagtggcgcggtctcggctcactgcaagctccgcctcccgggttcacgccattctcctgcctcagcctcccgagtagctgggactacaggcaccgccaccacacctggctaatttttgtatattaagtagatacaggttttcccgtgttagcaggatgggtttgatctctgacctgtgatcaccccctgggtcccaagtgggggttccggggggcctgggcggccgcctgtttagt

SEQ ID NO: 48803 - DNA, 805 bp, Homo Sapiens
  misc_feature (680)..(680): n is a, c, g, or t
  misc_feature (695)..(695): n is a, c, g, or t
tttactgtgtattgttgctgtcttgctactgaggagtactgaccagaatcatctgcaactcttagttggcagagaggaccactatggcgggtagctcttttctttcctgccattgtggggatgattccaggccaaagatgatggagaagtatggaaatcatctgaaaggttgaagcttggcacgtgaagccattcatgactttgtaaggcagttttgctgaaggccagttctgccctgggagggacggaggtgaatcctcctgagtacctgtggttttcttacttcctgctgaatttacctaagtgcctgttgtttgcttgctgtggaggctttctggtatttcatttcaggtgcagatgccttcactttcccacaaaaaaaaccccaacaaaacctaagaccttactgcaactaagtctccaagtactttttaacccaatgggatgaacagcctgtggtctgctcagatcaccctgagtgcgtgtgagaaggcctgggctttgccaggaaatccaggaaggcagggccgggctgtgttggaagctggcttagctggtggggcagccttatttcaattaaaagggcattgactgggagcagcagtcctggagtttgttgcatttcctattgccctcaaaatgagaaaccaggaaaatagcagattggagccttcgagaangcagtaaatggctgnttttattgacaaaaggaaaacattttactgccatctcactgatggcatctcactgacttaaaatgaaggcaggttgtagtaaaaaaaaaaaaaaaaaagatctttaatta

SEQ ID NO: 48804 - DNA, 481 bp, Homo Sapiens
cgagaggaggggcaggaatgtctgaggtggcatcacttctcttcagccagacagcactggccagtttggagtctgtccatcctgcaggccacaagctctggatgaggaacttgaggcaagtcaccagcccctgatcatttcgcctaaaagagcaaggactagagttcctgacctccaggccagtccctgatccctgacctaatgttatcgcggaatgatgaggctgccagtgcccagcagtgagggacctgacctcaggggcagagacaagagaggcaccaaggaggatccaagagctgactatgcctgcattgctgagaacaaacccacctgagcaccccagacaccttcctcaacccaggcgggtggacagggtccccctgtggtccagccagtaaaaaccatggtccccccaaaaaaaaaaaaaaaaaattttattaatgcggcccgaaattgagctcacttgggcaattcgccctta

SEQ ID NO: 48805 - DNA, 461 bp, Homo Sapiens
gagtcaaaatggatactatctggaaacaactggttcaactgttgcctcctgactaaatgtcagcccagggtatagtaaccatgacacagtactatccttggtgaagagttgggaataggattaattgcggaaaaaatatatataaatgccataggacacttttagcacaaaagtagttgtttacctcccattctcctcctttaatctcagtgcttttactatttggtttcttttttggcattttacaaaagggaagaaatggaaaacataccccttcttggtcattgggtaacagcaccatttcggtaacagtcatacttgatgacaagtatgatgatattttaaggacatgaacatgggtgaaatcaatgtgtagatggtacaaattaaccgaattctttttaaagcatttcctgtggatcccaggatcatgaggacataacagaagaataaggtctgaa

SEQ ID NO: 48806 - DNA, 641 bp, Homo Sapiens
  misc_feature (589)..(589): n is a, c, g, or t
cctgtgataggcgctgggagctatggcttacagtttgagcctgagcctcaccatctgtcaaatggctggtggtgttaccccatcatatggaggaggagatggaggcccagagatctaataagcaggggattaggggggctaatgagggggactaacttgggggagccaacttcagagccttactgcccatgagcctcccacccgctctgttgtatgttttttaaaaatcagtttttgaataaggaatatatttacatattaaaccctaattgtataaacaggtgtttgtaatggagtggaggcccctccctagtcttctagttactcttctcaatttattctttaccttagccgggcacagtggcatgtgccaattgtctcagctacttgggaggctgaggtaggaggatcatttgagctgaggagttaaaatatagcctgggcaacacagcaagacccagaaaacaaactaaattagagaaagtacaggcccttagatatggggaaagcagtttgttccaaagctgcttgaacttgcaagactaccaggagtccattccctctaacctctaatgtaccccagacacanattaaaaaaaaaaaaaaaaaaacacttaatgggcggccgcaagcttattccc

SEQ ID NO: 48807 - DNA, 575 bp, Homo Sapiens
tgacctgacttaggtgttaacaggttcctctgaggtgtgtggggaacagactgaggggtttcaggggacatctgttctcaccacaaattgccccccaaccagccccagacatgaacagtctcccgggagctccctctagccttctcgtatatcccagccctgcctcatgtcacaatttgtaatgatgtgtttggcttggtgacattttatggccatctgtctccctatcccctataatgtggtttgccgaaagcaaagcccaggactgtctcggccatctgtgtctccaggatcacccctcactgggcatggagtatgtgtccagttaacgcttgctgagtgaatgaatgaatactccatcctctgcctggagaattacgcactttagcatatccaaggctctgacaagtcctgcataaaagagcattattgttttctttctttctttccttctttccctcttcttttctttctgactataggatattgattatcaatctggcaatagtcaagattggcagtctggtgtattagtcaaaggttttcagcctacaaaagacaaaaagaaaaaaaaa

SEQ ID NO: 48808 - DNA, 296 bp, Homo Sapiens
aggaaggggaggaagggctgaaatgctttctattggatactatctgggcatattacttcctgtggttcactgtctgggtgacaggattcatagaagcccaaactttagcaccacgcagcatacccttgtaacaaagccgcacacgtacgccctcaagctaaaacaaaagtggaccgggagccgaggtgggggatcatgagggtcaggagtttgagaccagcctggcagataacggtgaaaccccgtctctactaaaataccaaaaaaggttagccgacatggtgcaggtcctttag

SEQ ID NO: 48809 - DNA, 688 bp, Homo Sapiens
  misc_feature (5)..(5): n is a, c, g, or t
  misc_feature (163)..(163): n is a, c, g, or t
gattncgaacctcgagcttgcagtgagttatgggcaagccaggcctcagccactcacagggcctcagttttcccatctgcacagggagaagggaaggttcagtggccctgtgagctttgctagcaggtggtgatggggtgggtcatctgaatctgagtcaggnggaatcttccccaacctgggctttggtttcattttgttgttatcctttaaccttacctgctttccaagagagattttatgttttcttggttttttttgtttgtttgtttgtttgtttttagggtagggtcttgtagaatgcaatggtgcaattatagctcactgcagcctccaacttctgggttcaagtgatcctcccgccttgttttttgttttttgttttgtcttgtttttttggtagagacagggttttgctgtgttccccaggctgctgtcaaactcctgggctcacccatctcggcctcctaaagcgctgggattacaggcacgagccactatacctggccaagattttatattttctaattgcttcacatactgaatggaaaatagcatgacagttataacagaagtaaagaaagtcacatgagagtccaccacctaaaatataacttcctttttctttggtctggcctggcttgggccgtatgtatttgttattgtatctcttaaaaaaaaaaaaaaa

SEQ ID NO: 48810 - DNA, 443 bp, Homo Sapiens
ttttttttagtttttactggttcctttattatattgggatctgcaaaactatttgtattcagccaagtatctatgtccagttttaataaaatagtagcctaagcttacaaaatagacaaattaagcagcaactgttgattctgagtaagtctgtatgctatcaagaacacaagaatgcaggatcatgggaaatgcacgcaaatcctgttgaagcaatgcatgcttcaacaaccactgaccactttgcataattgactccatcaatgaatctgtaatttagcttctaatttttcataattgtgcatttatggtagtatgcttcactaactttaaagttaaatgtaaattactgttataataaaaacatctgttgtacaaataactttaaaggattctaaatatctacatcaagagatatctatagatttacatattaaatgaat

SEQ ID NO: 48811 - DNA, 626 bp, Homo Sapiens
gacgtggcgagtctgcggacaccagaactgacctgggagcgagtgagatctcaagttgaccatgtgatatggcctgatggcaagaggatagtactgctggcagagggccgcctgctgaaccttagctgctccacagtgcctacatttgtgctctcaatcactgctactactcaggctcttgccttgatagagctttacaatgctcctgagggtcgctataagcaggatgtctacctgttgcccaagaagatggatgagtatgtggccagcctacacctgcctacctttgatgcccacttgacagagctgacagatgaacaggccaagtatctgggactcaacaagaatgggcccttcaagcctaattactacaggtattaagttcctgtaactcaaaccagaatttttaaggaatagaactccaagccttttctccactactatacaagaaagaattcagcaagctgcttctccaatcaaagctgcctgccgtgctcaccctgtgtgtaggttatttatttattaaaatcaagaatcctgtgcctgtagtgttggcccagagtgtggttactgccctgagggccatgaaagccacagaggatgggctgaggaaggaaagaaatggg

SEQ ID NO: 48812 - DNA, 716 bp, Homo Sapiens
  misc_feature (686)..(693): n is a, c, g, or t
  misc_feature (695)..(715): n is a, c, g, or t
cctttctcgccaagaaagggtaccggcatgacagcccgaccattttgttcaggaccctgcagtgctgagagagaaggcagaagccaggcgcatggcctttctcgccaagaaagggtaccggcatgacagctcaacagcagtggccggcagcccccgaggccatgggcagagccgcgagacaacccaggaacgcaggaagaaggaagccaacaaggcgacaagagccaaccacaaccggagaaccatggccgaccgcaagaggagcaaaggcatgatcccatcctgagacctggtgcagggccagtggggaggcagcggcaccagactcaccaggccgtgctcccatcgcctggggcctcctcactaggggccccaagttcaactcaacccctcaacagcctcagctttgcagcccctgagaaggccgcctctcatctaccagccagccatgagcgccttcctgcagaacacacagtgccttatgccacagccgaagaatccgtggggccggcaagcaggcaccttcccccagctgcgctagcgggaaagagatggggatggagtcccaaggcaagcgccccaaacctcgggccacaagacaccacttcccctttaccctggacagcaggaaacctgtatattcaaaaacacaaaaagtcctgctaataaaatttttgaccctttcnnnnnnnnannnnnnnnnnnnnnnnnnnnng

SEQ ID NO: 48813 - DNA, 483 bp, Homo Sapiens
ttcggaacaggcagtttttctttttttaacagacaatagtaaaatactacagtcagctcactatacacacaaatcatgaacagcagcttttcattaaggtttccaatatcttactcatttaccaactcgaagaatttaaaagaaaaaaggtacagcaggctctacgcattctctctctcttgctctcacaacacatttatagctgtacatccagaccgattatacaggcatctacagaataggtacagaaaggaattttgtaaaaatttccatacacataatccttcaatgtctccatttgtaggagaattttacaaatgaagacacgacagcagggtcatctgtattcgatcatctcctgcaaacatggtaaagggtgaaccattgaacttcatagctcagtccatctcctcagcattttccagaatcaagcaaaataacaacagcaaaaccacgccacagtgaaacctaccaatccaaaac

SEQ ID NO: 48814 - DNA, 635 bp, Homo Sapiens
cccaggtagctgtcaggggccaccgagagtgtcgttaaaaatgggcatcgttgtaataaaggaggaaagtgcgacttttgaaatgtttggaaggtttatttctcatgcacattccagggaaaagcagagagtaaattagagacgggataggaaggccgtgggagaactcgatcctagcctgtgtcagctggatgtgtttacgtggagaggcgtggccactttttaggtcacctgaagcagtttagcctttggatagaggaacctgcctgaatttatggcattagtggtggcatttttttgtgtacaagatgtgggtgatggaggggctgtttctttttccgtgtgggtggttaataatcgtcagtctcggagggcgatgctcgtaggatatttcaggtgagtcagggttggatggtcatcggctttcagagggagaccacgggaatgttcagggaaacaatgtcagcttctctgaggaccagaattcatgttcacgggcagtgatgagttggcttatggagtgagtccagtctggaattccgccgtgcattctagcctgtatcatctcatttggacaaatgctggcacgttgaaattaaaatgttaaaaaaccaaaaaaaaaaaaaaaaaaaaaa

SEQ ID NO: 48815 - DNA, 708 bp, Homo Sapiens
tgacgttggttcagaggttggtagcacttggggagagtatcttaacacagtttcttgacagcagctctggaacttagtatttctgccccgagttttgccacactgagactttgagtagctcctggtggactcaaccctgttcaactcagagacgggcctcctctcactgatgcaaagctttaaggcttctctgactgttctgaaactcttcgtattcttgtcaagtctaaagagactgaagaaaagatttaaatactaataaaaatcagtagataatttctgtaggttctgctggaggaatacaaactgtttggtgttttaaatttaagtgtagaaattgtagaatgtggaattagcacagatccttcctggctttctgtttcacttgatcatttagcccagaccacccaggatgttttccaaaatgttccacaggcgtgtcccgctggatccatttgtccttgtcacttggagaaaggccagtccctgtgacggggcagccctctctgtccctcggtcagctcgtgtgaatcctgggacctcttccggtcggctctgcccgctgttctggggtcgactgccacgacttttgattcaagaagcttcctccaggcgggagcggctatttttcctaaatgagaattgttacattgcaaattgttgaataaaatattttgcgctccttcaagcaaaaaaaaaaaaaaaggg

SEQ ID NO: 48816 - DNA, 493 bp, Homo Sapiens
gtcgggaaaccttcccgaaagacggcggtcgggtcgggaaaccttcctgaaagacggcgcgccagcccgtcttgcttgctcgccgcctgctgacttccttactttgcacacggaaggggcaggaaccgcaagcgtgcaactagcctggagctacccgtctggactcgcaggccctgtggctgtttcccacagctgctacggcctctcttgctccttgacaccgaggaggaccccactaggatccgagcgtcgtgaactcacctgaactttggaaggttggcactggggggccgcatccccctgggaaatgactgaacgcggggtttcagtgggtcccgcctgggtctaaggacccagtttcttctgtgagcacgggcagtgggaggccggtggaaaggcgcaggggcccacctacgcgtctcacatcttcaggggcgcatttctacaataaaaactcacccaattaaaaaaaaaaaaaaaaaaaaaaaaaggg

SEQ ID NO: 48817 - DNA, 608 bp, Homo Sapiens
tgatgcatgcttttcggggaaaacttcattcacaagtattccagacaccaggcttcaggcatggccatgagcaagaccagcaaataacagctttttgccttgcagccctgaccccaatgtctgctgtttccaacactggtgatttctaactacggcccacagcagatgctgttgaataacaccatggcttcatcagaggatgtggggttgtagtacctctgggtgatgaagttgttttagtaaatccatttttaaaaaaaaaaaaggacttgtttttacttttttctaaatgtctctgactactgactgttctatacatagattatttttccttttttaatatacatatatgaatatataaatatatatatttactgttaccagcagcatatgacagagtttcaacatcaaaaatccatttgggggcttgctatttcttttttgctttaaaaaaaaaaatcccattccttctttgtagtacaaggagttagcactccctcctccatcccaacctgaccagatcttccattttgcttttgttcatatagataattatatgtcctttgggtgttgggacttgtccctgtctggtgggaaaacttggtctc

SEQ ID NO: 48818 - DNA, 462 bp, Homo Sapiens
  misc_feature (437)..(437): n is a, c, g, or t
gtagatatggagtcttgccatgttgcccaggctggtcttgaactcctagcctcaagtgatccacccacctcagcctccgaaagtgctgggattataggcactaggcggcatgcctgggccctctactctgttctgaataaaaagtctctggggatggaccctaggtgattcataggcacactgaaatctgagaaccaggtacaggaaataaaattatttgaaatgcaaaccattgaattttatgactttttcattgcttttggtaagaggctggactgtggaggagatgaaaacttgaccaaaaatggatttctgtgagcaccacagaatttggtgaggtttagtaggactccggaggaataacattcgggaaggacaggatgtctgaactgtatgaccagtcctgtcctttttgctgttctctccctgagactctnttttcacctggatgattccttccgc

SEQ ID NO: 48819 - DNA, 787 bp, Homo Sapiens
gaaaactacagaatcaggagttactttaaagaagcagagttgaaggatctccttttgcaagttggccgaggcttgaggtatattcattcaatgtctttggttcacatggatataaaacctagtaatattttcatatctcgaacctcaatcccaaatgctgcctctgaagaaggagacgaagatgattgggcatccaacaaagttatgtttaaaataggtgatcttgggcatgtaacaaggatctccagtccacaagttgaagagggcgatagtcgttttcttgcaaatgaagttttacaggagaattatacccatctaccaaaagcagatatttttgcgcttgccctcacagtggtatgtgctgctggtgctgaacctcttccgagaaatggagatcaatggcatgaaatcagacagggtagattacctcggataccacaagtgctttcccaagaatttacagagttgctaaaagttatgattcatccagatccagagagaagaccttcagcaatggcactggtaaagcattcagtattgctgtccgcttctagaaagagtgcagaacaattacgaatagaattgaatgccgaaaagttcaaaaattcacttttacaaaaagaactcaagaaagcacagatggcaaaagctgcagctgaggaaagagcactcttcactgaccggatggccactaggtccaccacccagagtaatagaacatctcgacttattggaaagaaaatgaaccgctctgtcagccttactatatactgagctactcctttcc

SEQ ID NO: 48820 - DNA, 871 bp, Homo Sapiens
tggactacagcgactcactgacggagaagcagtggctcaagaccctgaaggccatcgaggagggcacgctggaggagatcgaagaggaggtccggcagaagaaatcatcacggaagcgcaagcgagacagcgacgccggctcctccaccccgaccaccagcacccgcagccgcgacaaggacgacgagagcaagaagcagaagaagcgcgggcggccgcctgccgagaaactctcccctaacccacccaacctcaccaagaagatgaagaagattgtggatgccgtgatcaagtacaaggacagcagcagtggacgtcagctcagcgaggtcttcatccagctgccctcgcgaaaggagctgcccgagtactacgagctcatccgcaagcccgtggacttcaagaagataaaggagcgcattcgcaaccacaagtaccgcagcctcaacgacctagagaaggacgtcatgctcctgtgccagaacgcacagaccttcaacctggagggctccctgatctatgaagactccatcgtcttgcagtcggtcttcaccagcgtgcggcagaaaatcgagaaggaggatgacagtgaaggcgaggagagtgaggaggaggaagagggcgaggaggaaggctccgaatccgaatctcggtccgtcaaagtgaagatcaagcttggccggaaggagaaggcacaggaccggctgaagggcgtgccggcggtcggccgagaccgaagggtccccgaacccaagcccgggtcggtgaggttgaacaatggacaagtgaagggagggaaccaaggagggagggacccgcctccaggggaagtttgggccagccgaaaagaaaggaactgagagccccccca

SEQ ID NO: 48821 - DNA, 482 bp, Homo Sapiens
tccagaggagggaggaggaagggaagaccccagtggtgggaccctggaccaggccatggatgaaggacaaagaccagggcaggtcacgggtttcccaattccccagcaattaagatttcgagcagaatttatctaaatgtgtttcaaggaaacacaatcgctgaaccaaaacgtactgcagccgagccccctccgtccatcctctgcccctccccctggcttctttctcttgggaaaacgggcaaaataattgtgctggattctcacacacacagaaatatcgaccatcaccctcccccgcgtgaactgggatgcaagttgctaaccgatgtgaacgcaaaatgccttgttcattattcctgacgagatcttgaggttgtttgatgctttaaattttttaattatattattttctaggtgtttattggtacattgcagtttttttttttgaaatttaaaaatttctgtaaaactttgtcttc

SEQ ID NO: 48822 - DNA, 1012 bp, Homo Sapiens
  misc_feature (919)..(919): n is a, c, g, or t
cattttgctaggcagcggcagtggcggcggcagcggcggctggagcctctgattgggtttcggagtccggtactggagccaatcagcgcgggcagcgaaccgggggagcgaggcacggagtgtacctcacagccttctaggatctccagagtggacaggaatctcacttggagggaccatggagcagtatacagcaaacagcaatagttcgacagagcagattgttgtccaggcaggacagattcagcagcaggtccaagggcagccattaatggtgcaggtcagtggaggccagctaatcacatcaactggccaacccatcatggtccaggctgtccctggtggacaaggtcaaaccatcatgcaagtacctgtttctggaacacagggtttgcagcaaatacagttggtcccacctggacagatccagatccagggtggacaggctgtgcaggtgcagggccagcagggccagacccagcagatcatcatccagcagccccagacggctgtcactgctggccagactcagacacagcagcagattgctgtccagggacagcaagtggcacagactgctgaagggcagaccatcgtctatcaaccagttaatgcagatggcaccattctccagcaagttacagtccctgtttcaggcatgatcactatcccagcagccagtttggcaggagcacagattgttcaaacaggagccaataccaacacaaccagcagtgggcaaaggactgtcactgtgacactaccagtggcaggcaatgtggtcaattcaggagggatggtcatgatggttcctgggggctggctctgtgcctgctatccaaagaatccctctacctggagcagagatgcttgaagaagaagctctctacgtgaatgccaaaccataccaccggtattnctaagaaggagcaagcccggagctaacctagaggcagaagggaaaattcccaagggagaggaagaaatacctgcatgagtctcgggaacggca

SEQ ID NO: 48823 - DNA, 668 bp, Homo Sapiens
cacgaggtggtctgctggtataaagtaccatgaagagtccatccacgccgcttacgtccatgtgatagagaacagcaggcactatatctatatcgaaaaccagtttttcataagctgtgctgatgacaaagttgtgttcaacaagataggcgatgccattgcccagaggatcctgaaagctcacagggaaaaccagaaataccgggtatatgtcgcgataccacttctgccagggttcgaaggagacatttcaaccggcgggggaaatgctctacaggcaatcatgcacttcaactacagaaccatgtgcagaggagaaaattccatccttggacagttaaaagcagagcttggtaatcagtggataaattacatatcattctgtggtcttagaacacatgcagagctcgaaggaaacctagtaactgagcttatctatgtccacagcaagttgttaattgctgatgataacactgttattattggctctgccaacataaatgaccgcagcatgctgggaaagcgtgacagtgaaatggctgtcattgtgcaagatacagagactgttccttcagtaatggatggaaaagagtaccaagctggccggtttgcccgaggacttcggctacagtgctttaggtctaaaatgactccaggtgtcgaagatc

SEQ ID NO: 48824 - DNA, 828 bp, Homo Sapiens
tgtctgattcctctgctggaggggaaagcccgctcctgttttgctatgaccgagccccaggttgcctcttcagatgccaccaacattgaggcttccatcagagaggaggacagcttctatgtcataaacggtcacaaatggtggatcacaggcatcctggatcctcgttgccaactctgtgtgtttatgggaaaaacagacccacatgcaccaagacaccggcagcagtctgtgctcttggttcccatggataccccagggataaaaatcatccggcctctgacggtgtatggactggaagatgcaccaggtggccatggtgaagtccgatttgagcacgtgcgtgtgcccaaagagaacatggtcctgggccctggccgaggctttgagatcgcccagggcagactgggccccggcaggatccatcactgcatgaggctgatcgggttctcagagagggccctggcactcatgaaggcccgcgtgagtgctttcccccgcacccagcactgactcagaaccaccaccttctgctttgctgtcggacttcaattcctacctgttttctgagtgcagtcctagcaggtgaagcaaggtgatgtccttgccaagaagttgcattcctgtctgctttgcatctgctactttgctgcagtttggattcagagcagaatggaccccactctgacgaggtgacctgtagggaaaacccaggctctgttccattatagggcaggattcaaggggtaaggttctgctgtttctccatattgaaaattactctgtggtgaagtggttatccctgagattacagtactttttgagatc

SEQ ID NO: 48825 - DNA, 361 bp, Homo Sapiens
aaaactctgtctcaaaaaaaaaaaaaaagaaaagaaaagaaaaaaaagttgtatcaccagatgaggataggtgtgtttcataaaacaggcagtgaactgaagtagctggtacatgtttgaggtgtgtgcagatatacattttgtgtattcctacatggctgggttttgttgggtgcagttttttgcatccatctagagtctctcacagataaaatcatgcataagcaaatgccaagttgtgttgtgctcaaattgttcctttaacgtacaaatcatgttgaaacagttccagcaagcgttatagcagaactgatgattctcttgatctgaattttgaggcccatccaaaaaaaaaaaaaaa

SEQ ID NO: 48826 - DNA, 427 bp, Homo Sapiens
tttgctggaaataatttcctgccctgccaagagctctatggtagtttgataataaactactaccccagtattcttaggaactgtgttactaagtcttttctgcctgatttgtactttatttccatagacccctcagatatgtgaggaatcaagccataaatgtgcatttgctggacattatgtaccatgtcatctctatgactacagatttcaaggataatttttacatctaacaatttcactgtaacagtgaccgataatgtgagaaatgtgctttttacagtgctgctggtgggtagacaagtgcttgctgcagttgtttctgaatctagccagatgctggagtcgtgaagctgtaagctccgcgggagcagggaccatctctctttcttgcactacaggcactcaataaatacttgtggctgtg

SEQ ID NO: 48827 - DNA, 773 bp, Homo Sapiens
  misc_feature (711)..(711): n is a, c, g, or t
tcctcatagtttacagcattccccatggtatccaggccctgagcaccccaatcccggaaagccgttcactgccagagggtttccccgccagtgctaccttccagacaacgcccagggccgcaaggtcctagagctcctgaaggtggcctggaagaggcggctcatcttcacagtgggcacgtccagcaccacgggtgagacggacaccgtggtatggaacgagatccaccacaagacagagatggaccgcaacattacgggccacggctatcccgaccccaactacctgcagaacgtgctggctgagctggctgcccagggggtgaccgaggactgcctggagcagcagtgacctcgcaccccagcacgcccgcctctggtggccaccccgctgcccatggctggctgggtggccaggcaggaagtgcccagcccgagaggctgggaggtttgttgagggtgtggggtgtgccccacctgaagccggggctccccctgcctgcctctctctcctcctcccctctgggaattgggcagccctgggcagttgtactcatgggggcttaggatgcagctacctcagtgcgcagggcccgtctgtcctctgggggctgcttcgggccgcggtgctcggggctggtgtggggcgagtagagacttcccccaggcctggacgggcgtgggttctgcgtcaagcttcttttacctcanttttgttggcataaatgctctatagcccaaagccaaaaaaaaacacacaacaacatatatac

SEQ ID NO: 48828 - DNA, 529 bp, Homo Sapiens
cgtgtgtggtgaggacggccagttcacctactgctggcacgatgacatcatgcaagccgtcttccacatcgccaccctgatgcccaccaaggacgtggacaagcaccgctgcgacaagaagcgccacctgggcaacgactttgtgtccattgtctacaatgactccggtgaggacttcaagcttggcaccatcaagggccagttcaactttgtccacgtgatcgtcaccccgctggactacgagtgcaacctggtgtccctgcagtgcaggaaagacatggagggccttgtggacaccagcgtggccaagatcgtgtctgaccgcaacctgcccttcgtggcccgccagatggccctgcacgcaaatatggcctcacaggtgcatcatagccgctccaaccccaccgatatctacccctccaagtggattgcccggctccgccacatcaagcggctccgccagcggatctgcgaggaagccgcctactccaaccccagcctacctctggtgcaccctccgtcccatagc

SEQ ID NO: 48829 - DNA, 864 bp, Homo Sapiens
gtgtacggcttcggcctctccaactaccatcagcttggaactccgggcacagaatcttgcttcataccccagaacctaacatccttcaagaattccaccaagtcctgggtgggcttctctggtggccagcaccatacagtctgcatggattcggaaggaaaagcatacagcctgggccgggctgagtatgggcggctgggccttggagagggtgctgaggagaagagcatacccaccctcatctccaggctgcctgctgtctcctcggtggcttgtggggcctctgtggggtatgctgtgaccaaggatggtcgtgttttcgcctggggcatgggcaccaactaccagctgggcacagggcaggatgaggacgcctggagccctgtggagatgatgggcaaacagctggagaaccgtgtggtcttatctgtgtccagcgggggccagcatacagtcttattagtcaaggacaaagaacagagctgatgaagcctctgagggcctggcttctgtcctgcacaacctccctcacagaacagggaagcagtgacagctgcagatggcagcgggcctctccccagccctgagcactgtgtcagttcctgccttttctcatcagcagaacagaatcctttcctcttttcttcctcctcttggaatttcctggacctacaaataaggcggggaggacaggggtcttcaaagaacatgctcactcgactatatgtagactttctccctttcctacttcaaggccgatggactggttactataaaacaaattcccctggtttggcccccgaaatgggcttactcctcattgtcctcgtcatctccgaaatgagataattaaaacccatagta

SEQ ID NO: 48830 - DNA, 448 bp, Homo Sapiens
gaatatttgattcttatgaacaaggcattactcaccagagaagatttttttgttctaccaggtgcctaggaatgctaacagtctgggaccacatagaccaccaggtgatgagacaatcctgggagtcctgttttactttggcccatcttttctcccaaccctgtgggaatagtcattcatatcctagctgcaagctagaaggtggtttatcagagcccaacttcgagggctctgggctttagctactgtcaccccatcataactgagcttcatggattgattctctttttatctttcagattttcttttaaaaatctttgttttttttttttcttccgaaagattcccccaacattaccattccccaccttccgttgaatttttttggctctcattttgaatttttcaagagctcatgttctttgtcttcattaaaaaaaaaaaaaaa

SEQ ID NO: 48831 - DNA, 534 bp, Homo Sapiens
ccagcctattcataaaaattgcagttgtttccacataagaactttggatatttaaagaaaaatgtaatttgaaatgaaaagcccttataaatccctttatactcatcagtcattataacagtaaatgaaatgaagaaaaagcatttgatctcactcttctgtgctgatctctttaactcctgaatatcctcaatttgatgagcccactatccaatgagactggatagttatcagcacaattgattcatggggttgagatgtttaaatctccttcatatttaaaatgatcgattttaaacttgatgatgttaattcttcttagttcctggtaagcagctcatcttagtgctaatgacaagttcagatgttaaaaaaatctttatcatttatggctaattttatcctttgccaaatcatatctattttcttcaagagagcaaaatacatttcctgattttaaagtattctatttttaaatatatcttcacattcctgtagtaaaagactgcaaaaaaaaaaaaaaaaaaaaaaaat

SEQ ID NO: 48832 - DNA, 583 bp, Homo Sapiens
  misc_feature (559)..(559): n is a, c, g, or t
atttaagtgcgttcattctcactgctgttattgttttctgacagcatgcctgaaccagctaagtcagctcctgctccgaagaagggttccaagaaggctgtgaccaaggcgcagaagaaggatggcaagaagcgcaagcgcagtcgtaaggagagctactccgtgtatgtgtacaaggtgctaaaacaggttcaccccgatactggcatctcatccaaggccatgggcatcatgaattccttcgttaacgacatcttcgaacgcatcgcaggcgaggcttcccgtctggcccactacaacaagcgctcgaccattacctccagggagatccagaccgccgtgcgtctgctgcttcccggagagctggccaagcacgcagtgtccgaaggtaccaaggctgtcaccaagtatacaagctccaagtaaatgtgtgcttaggtgctttaaaactcaaaggctcttttcagagccactcaagtctcacataaagagctttaatattgaatttcaccgttttctagggaataatttttccgattttgtaatcccagcactttgngaggccgaggcgtgcggatcgaga

SEQ ID NO: 48833 - DNA, 680 bp, Homo Sapiens
gtttcggtccggaattccgggagattttgaaagtagaacagaaatataacaaactccgccaaccattttttcagaagaggtcagaattgatcgccaaaatcccaaatttttgggtaacaacatttgtcaaccatccacaagtgtctgcactgcttggggaggaagatgaagaggcactgcattatttgaccagagttgaagtgacagaatttgaagatattaaatcaggttacagaatagatttttattttgatgaaaatccttactttgaaaataaagttctctccaaagaatttcatctgaatgagagtggtgatccatcttcgaagtccaccgaaatcaaatggaaatctggaaaggatttgacgaaacgttcgagtcaaacgcagaataaagccagcaggaagaggcagcatgaggaaccagagagcttctttacctggtttactgaccattctgatgcaggtgctgatgagttaggagaggtcatcaaagatgatatttggccaaacccattacagtactacttggttcccgatatggatgatgaagaaggagaaggagaagaagatgatgatgatgatgaagaggaggaaggattagaagatattgacgaagaaggggatgaggatgaaggtgaagaagatgaagatgatgatgaaggggaggaaggagaggag

SEQ ID NO: 48834 - DNA, 451 bp, Homo Sapiens
tgttcgacttctgttaccacctgctaaaagtgcagaggcaggacgggaaggatgaaatcattaagaatgtgcccctgaagaagatggccgaccggatcaggaagtatcagatcttgaacaatgaggtttttgccatcctgaacaaatacatgaagtccgtggagacagacagttccactgtggagcatgtgcgctgcttccagccacccatccaccagtccttggccaccacttgctaagcagaagatcctgcagacccttatctggaggaggaagagaagcaggagagagaaagccacagccagcctgccataggatccaactggacaacgtgtgggatggacctggaaacaagcacctccccaaacacatcaccactccctagggcggggcctgtgcatgctctcccatgacatctccatgctggtttctccatagcataaatgaaaaa

SEQ ID NO: 48835 - DNA, 581 bp, Homo Sapiens
gcctgtgctccggagccttccttcagacccttcctccacgtgcccacttgggatgcagaatgcagcggagctaggaccccctccacggcctggacctcggctgcagtaaagttacgtgaggcctgtctctcggggcctggaagtggcagccatcagttgctcttgctgacccctcggagcaagcgccgcacaggtggtggctgagacagctggcgcggggggccccaagctgcgccggcctccagcccacccacagctgttgctgaagtcaggcctccctccccagcactggtatctgagtaacggctaagaacctccttcctctggttttgaaaagcagttcgggttgtccaattctgtaacattcatctccattttttaaaaaggtttctctgacggccccacggcccgagccgcggtgagcgtcgtgttgcatgagcctgggccccgggcttcccgtgcgcctctgccgcaggtgcttctgggcacccatcctctgcgtttcatttgcagtcgactgtacagaaggcactcaccacaataaacctttcctgaaagcaaaaaaaaaaaaaaaaaaaaaa

SEQ ID NO: 48836 - DNA, 520 bp, Homo Sapiens
aggatacttgaggtaagaaacgttttcactatgactgcgaaagagggaagaaagaaatcgatccgtgtcttggtggctgtggggaacggaaaaggagctgcaggtgaatggggagtgatggcatcacagtggcggtggtgtgcagggaaaggcgtggcacgggccatgctgtggagcccatgggctcatgctgctggccggactttttccattgattaaaccttttagtggtttgggttcacaaagcttgtggtaagtccatgacttcccttagagagaaaagagagaatagattctactgtacttgccttttcctctgaggaaaaggaatattataaaaggctgaagacattattttattatgtataatagtggaaaattagggagaaaaactaaatgttcaatagggccatggttataaaaacagtgtagccatacactgtaatattctgtatccattaaagaattatgggaaattagttttaaaataatgctaagttaaaaaaaaaaaaaaaaaaca

SEQ ID NO: 48837 - DNA, 755 bp, Homo Sapiens
acccacgcgtccgcggacgcgtgggtctgactgatggcgggatgtacgtcttccagctgtttgactactactcggccagcggcaccaccctgctctggcaggccttttgggagtgcgtggtggtggcctgggtgtacggagctgaccgcttcatggacgacattgcctgtatgatcgggtaccgaccttgcccctggatgaaatggtgctggtccttcttcaccccgctggtctgcatgggcatcttcatcttcaacgttgtgtactacgagccgctggtctacaacaacacctacgtgtacccgtggtggggtgaggccatgggctgggccttcgccctgtcctccatgctgtgcgtgccgctgcacctcctgggctgcctcctcagggccaagggcaccatggctgagcgctggcagcacctgacccagcccatctggggcctccaccacttggagtaccgagctcaggacgcagatgtcaggggcctgaccaccctgaccccagtgtccgagagcagcaaggtcgtcgtggtggagagtgtcatgtgacaactcagctcacatcaccagctcacctctggtagccatagcagcccctgcttcagccccaccgacccctccagggggcctgcctttccctgacacttttggggtctgctgggggacgaggggagaaagcaccatgagtgctcactaaaacaactttttccatttctaataaaacgccaaaaatatcacaaaaaacacaaagaa

SEQ ID NO: 48838 - DNA, 881 bp, Homo Sapiens
  misc_feature (591)..(591): n is a, c, g, or t
gggctttaacattgtcaagacggccacactgaagaagctggtctgcctcaacaccaagacctgtccctacgtttccttccgtgtgccggatgccagtcaggatgatgggcctgctgtggagcgaccatccacagagctctgaggggcaggaaagcagcattctggaggggagagctttgtgcttgtcattccagagtgctgaggccagggctgatggtcttaaatgctaattttctggtttggcatggtgagtgttggggttgacatttagaactttaagtctcacccattatctggaatattgtgattctgtttattcttccagaatgctgaactccttgttagcccttcagattgttaggagtggttctcatttggtctgccagaatactgggttcttagttgacaacctagaatgtcagatttctggttgatttgtaacacagtcattctaggatgtggagctactgatgaaatctgctagaaagttagggggttcttattttgcattccagaatcttgactttctgattggtgattcaaagtgttgtgttcctggctgatgatccagaacagtggctcgtatcccanatctgtcagcatctggctgtctagaatgtggatttgattccttttcctgttcagtgagatatcatagagacggagatcctaagggtccaacagaatgcattccctgaatctgtgcctgcactgaaaggggaaggaggtggggggttcttccttgggacccccactaagaccctgggcctgagggatgtcaaagaaaagggggccgttgtatcaccccattgggttggaaaccttccaaagctctatccccccatccgggttttgggactcatggccacctggattctcta

SEQ ID NO: 48839 - DNA, 731 bp, Homo Sapiens
  misc_feature (437)..(437): n is a, c, g, or t
  misc_feature (454)..(454): n is a, c, g, or t
  misc_feature (520)..(520): n is a, c, g, or t
  misc_feature (550)..(550): n is a, c, g, or t
  misc_feature (588)..(589): n is a, c, g, or t
  misc_feature (626)..(626): n is a, c, g, or t
  misc_feature (640)..(640): n is a, c, g, or t
  misc_feature (650)..(650): n is a, c, g, or t
  misc_feature (673)..(673): n is a, c, g, or t
  misc_feature (724)..(724): n is a, c, g, or t
gggagtttgggtgctagaggagttaggaagcttgatgctgttgttggccgtgactttggtgacagtgtgaccttggacaagttcctttatctctagggtctcagcatcttcatctgaagcatgaaaagtttggggtggtcccttccttctttaacctcccgagactctgtgcctctcacatgtatagattccctgtttgtagacagcagtgctgttatggggacctctgaaggctatctgaatgtgcctgcatttagcaagtcaaggccagaccctccagatgcactggactgtggggacattttgtgtgaatgagactattaagaatttagcagttcattctgacagcttgatagatggagtggttttgcatggcatccatgtaggaattgactaaaaaggaaacattttctgagagtccggctgtgtgtgcatgnctggaggtttttctcanatcagattttaaaactttgctctgaaagaccaacaacaataacctaatccaatatccttgtatatntgattctactgaccataacatttcttaatntctgcttttggcttctgtagcctaatatactaatgatnnatagtaatagtgtgtattttagaggtgatgcattatncctcttgcattcgntgagtctagnttagggatagaaaccatgctagnttagctgtctgcttaatgagtagccatctttatttctttacttttttatanacttgcc

SEQ ID NO: 48840 - DNA, 460 bp, Homo Sapiens
ctatttctaaagctgtgatacatagaaaacaagttatctgtttctgagatgcaatggtgggacaggtgaagaagcattcccattccaaaagagataaattggaaggagaaaaggggtttaaagcaggtttgtaagtctgcaggacaaattccattcagttctgagacttgaaaatagttctctgtggcttgatattccgttctctaggtgcattgacacggccttaccccttggtcctggattggcagcctgcccattttttttttttcttatgactgcttagttcctattttttgttttttttatttctacctttttaatcttaagtacagatgcttcttgagttatgatgagcttacattctgataaggcaggagtattatttgagtccaggagtttgaggctttagagtgtgattattgcacctgtgaacagccacttcactgcagcctaggcaaca

SEQ ID NO: 48841 - DNA, 613 bp, Homo Sapiens
tgcaaatcctcacaggattcctgtgggtccagctttggaactgggaaacctttcttcggatccgcactcattccactgatgccagctgcccctgaaggatgccagtactgtggtgtgtgagtctcagcagccgcccacacgctcctaactctgctgcatggcagatgcctaggtggaaatagcaaaaacaaggcccaggctggggccagggccagaggggaaggccctggattctcactcatgtgagatcttgaatctctttctttgttctgtttgtttagttagtatcatctggtaaaatagttaaaaaacaacaaaaaactctgtatctgtttctagcatgtgctgcattgactctattaatcacatttcaaattcaccctacattcctctcctcttcactagcctctctgaaggtgtcctggccagccctggagaagcactggtgtctgcagcacccctcagttcctgtgcctcagcccacaggccactgtgataatggtctgtttagcacttctgtatttattgtaagaatgattataatgaagatacacactataactacaagaaattataaatgtttttcacatcaaaaaaaaaaaaaaaaaaggac

SEQ ID NO: 48842 - DNA, 741 bp, Homo Sapiens
gcagttctggggaaaccattagtaatttgtgatcgtagagatttgtctcccagtattccctagggcaaaaatattgggagttcctagtcacctaaatgaagaaccttatttttagcagtttccctttcagggctctaacaggactgtggagtaatgtacggggttatgtaggagcaatgcagagccacttttgaaaaacagtagccaaggttctactggctgccttcttaggacattattaaatatcataaacacaagtggaatttaacacccagccagtttgtgttcaaccagacagcgtcattatgaacaaagattatataacgatagctgatattaagtaagttttaaaagttgacatcccaagagtgaagcctacttattcagtacagatttgttgaatgaaattcgtagttttattttacggcataatgaaacagagttccagacatgtacctgccaaatttggttctggttgtcttatcgtatgcaggctggatacctgctactgtgcttctacaggatgttaacagtgtcccctgagtaaaacagttccacggtcagtacatttgggaaccactgagttaaatgggttttatcactgcagaacagacacaagaacaatgtgtgctgtaaatcactgtttgcaggggaaggtggcagcaaatggcacagaaacccacctgaccacagactgctttcttctgggcgttcacgcactgtgctccacaggatactctt

SEQ ID NO: 48843 - DNA, 608 bp, Homo Sapiens
tggaggacatttcgtgtctgtaaagtaccatcacccttttctataaagtagtgcatcatgtggaggacatttcgtatctgtaaagcaccatcacccttctccctaatctgtgcatgtgtgtatctgtagaagtgtgcgtgtgcgagaatccacccttcatgatttaattgaaatcacagagcagtgatcagcagcagcgaagatgaccctcacagctggggagcccatgcttgatgtggtcagcattgcctccctgcaggagggcccggctcagggagtccttctcagacccctctgtcttccctatggtctattaatctccccatgcaagggaagatgatggacatcaaatcgactgtaggctgtgctcctctgtgcgctctcacgagcactaacacctcccagcatgattctccaggactgcggctccaagaggaaagctggccccagaagcaggctgctgttcagggcctccttgcctggtccagtccttgcttaggtgaactccagctgaccaagataagcattcactgcatttggtttaagcagcctttcgtgtttattgtgttagtgggtgcttttctttctaaagcaaaaaaaaaaaaaaa

SEQ ID NO: 48844 - DNA, 448 bp, Homo Sapiens
  misc_feature (416)..(416): n is a, c, g, or t
  misc_feature (442)..(442): n is a, c, g, or t
cgtttttgtgtttgagatatgagctcaggtcaattccaaagagtaccagattctttcaaaaagtcagatgagtaagggatagaaaagtagttcatcttaaggaacagccaagcgctagccagttaagtgaggcatctcaattgtagattttctctgcatcggtcaggttagtgatattaacagcgaaaagagatttttgtttaggggaaagtaattaagttaacactgtggatcaccttcggccaagggacacgactggagattaaacgtaagtaatttttcactattgtcttctgaaatttgggtctgatggccagtattgacttttagaggcttaaataggagtttggtaaagattggtaaatgagggcatttaagatttgccatgggttgcaaaagttaaactcagccttcanaaatggatttggagaaaaaaagattnaattgc

SEQ ID NO: 48845 - DNA, 723 bp, Homo Sapiens
aacaagtgttgtcctacagatgtccaatttatttgcatttttaaacattagcctatgatagtaatttaatgtagaatgaagatattaaaaacagaagcaaattatttgaagctctctaatttgtggtacgatattgcttattgtgactttggcatgtatttttgctagcaaaatgctgtaagatttataccattgatcttttttgctatatttgtatacagtacagtaagcacaattggcactgtacatctaaaaatattacagtagaatctgagtgtaatatgtgtaaccaaaatgagaaagaatacaagaaatgtttctggagctagttatgtctcacaattttgtagaatcttacagcatctttgataaacttctcagtgaaaatgttggctaggcaagttcagttaaaatatagtagaaatgtttatcctggtatctctaagtatacatttaattgtacagaaaatttacagtgtaacattgtgtcaacatttgcagattgactgtatatgaccttaatctttgtgcagcctgaaggatcagtgtagtaatgccaggaaagtgctttttacctaagacttccttctcagcttctcccataaagagaccctaatatgcattttgatttgtaattggaaatgtaactttcactgaaagtgtcatgtgatgtttgcattacttttaactgctatgtataaaggaaagtgtgtcttttgactt

SEQ ID NO: 48846 - DNA, 388 bp, Homo Sapiens
ctcagagaaaaagctcaaaacgtctttgagaaaaagtatcatcaagtagacgtcagattcccagccgagatgcaaaagcatgtgggaactctggactctgtgcccatgccggtagttggcatcttgggggagcctcgatgtctattcaacccacatacgcttcacccccttgatccagaagaaaacacaaaatcatttgggagatatccttccttgatggaaaacaataacatgaggattcaggatacactggacttggtcatgaaaacactgtcctctcatacatcatgccctaagtaacctggtacattccatatctcaagtaaactactttgactttaaaaaaaaaaaaaaaaaaaaaaaaaaaaaaaggaaaaaaaaaaaaaaa

SEQ ID NO: 48847 - DNA, 487 bp, Homo Sapiens
acagggcatccccaagcagaaaggcaaccatggcaggtgggctagccaacctccaggatttggaaaacacaactccagcccagcctaagaacctgtctcccagggagcaggggaagacacagccacctagtgcccccagactggcccatccatcttatgaggatcccagccagggctggctatgggagtctgagtgtgcacaagcagtgaaagaggatccagccctgagcatcacccaagtgcctgatgcctcaggtgacagaaggcaggacgttccatgccgaggctgccccctcacccagaagtctgagcccagcctcaggaggggccaagaaccagggggccatcaaaagcatcgggatttggcattggttccagatgagcttttaaagcaaacatagcagttgtttgccatttcttgcactcagacctgtgtaatatatgctcctggaaaccaaaaaaaaaaaaaaaaaaaaaaaaaaaaggg

SEQ ID NO: 48848 - DNA, 1013 bp, Homo Sapiens
ctgagtgggattccgacgaggggacatacagttcgtgtctgggatgtccggccatttgcccccaaagagagatgtgtaaagatatttcaaggaaatgtgcacaactttgaaaagaaccttctgagatgttcttggtcacctgatggaagcaaaatagcagctggctcagccgacaggtttgtttatgtgtgggataccacaagcaggagaatattgtataagctgcccggccatgctggctccatcaatgaagtggctttccaccctgatgagcccatcattatctcagcatcgagtgacaagagactgtatatgggagagattcagtgaagatatggactggaagactccaaggccgcttgtctttgagacctcagactgcataagtgatgccaaatgttggatgtccaggctagcaccctcccttcagatgaccattgctagcaagaaacaggaggcggtggccatattccaaaaaccacttctgtcccatttcaccaggatgactaaggcaagctccctgtggcctctaaaaaccacctgccagatttcagggactgcttttttttttctttttcttttttcctgttttctaatgcaggcccaatgtgacaaatttgttggttgggatttttttttttttttttggaactgggcttgaatgaaaatttttctttctgggatttcctcaatattccttttgggaattaaaagcccaaataagatgcccttttcttcgccccgtattacctcgccccctgtagcaccaaaaacctcgagggtcttctttggtcggggggccgggaatacaaaggggtaattaaaaatggcccacctgggcccataaacttgttttccctggaccccaacctttttcttggaacaaagggtgggaaatatttgcccggttcccccctaataaggggaccccgtatataatttcttccaaaaaccagaggtttaaaccctggatttaaatggaaaatcgggttcgaaaaaaccgcggggaaatc

SEQ ID NO: 48849 - DNA, 493 bp, Homo Sapiens
taactgtaaatatacttaaaacaattgaagtctttaaattggtgaactttatgacatatatctgaataaaattgttaattaaaactactgtgagatatcattacatacctattagtgtggctaaaatggtaatagaatgactgaccgtaccaagtgtttgtaaggaggtagagcagttggaattttcatatactgctggtgggagtgtaaagtggtacaccacttcttctggggagcagaaagcaaccttccgggtacaggtgagccaaggttgatgggcagttatgcagagggagttgggatatcactgtgtgtacctgtgcaagtcctggagtgtgttgggtcctcatcagcagggctgtatgaaggtgttcattaaaacaaaactactgatagtgtggcaggagctagaaaacacccctttcttcttagatatccctccagcaccctctactggcaaagtttaactgcccctagccaaaaaaaaaaaaaa

SEQ ID NO: 48850 - DNA, 820 bp, Homo Sapiens
ctcatttttccatggacaaaagtattctttatgtcctagtgcacttacaatttggtattacctgggagtgaaaagaaatattacagccatgcctaactgacttcttgaggtaagattgttctgtcagaaaaccctctcccagttcccctgcagctcttcaggaatccacatctctccagagctctttgttctcatgggtggcacctccagagtgaagaagatcctttgtcaagaagggaaacagaggggaaatgagagggtcctgcaggcagagctggaatcaacttccactctgcctcttgcaagctgtgtgaccctgggcacaatttctccttcctctggaaacctctgttttcttagatttggagcagggtggtcacactgaccttgcagagttctgagaatcagagacagaacataaaaggcctggaaaacattctccaaaaagaagctgcaacatgtgtggacaatgggcttttcatgcctctcttactgtctcttactgtctattgacctggtgcaagaaacatgctctggtgatggctgtgagggaggaatgaggatagacatagacactcctgtgtctcaaacatgcttctttattactctgttatgactctgtcttccctggggcaggaccccagcctgcctacatttgcagacagacacagtggcatgtggagacaacagtgtgtcccaatgacttttctttaccccctagctgtcggcagtactcagtggaagggtgatattatgacactgacactgctattttgaaacctggaggatggaaaggtgcaaaaatctatcaccagcaaca

SEQ ID NO: 48851 - DNA, 703 bp, Homo Sapiens
ggtaaatgatgctcagctaagctggttcttgtgtggcctctgtaccttcaaaagctgccgagtcctatgattacacgtgatgggacttgtacacttgaagtgaaacacagttttaaaacttgctttgtttagaattcccacctcatttttccatggacaaaagtattctttatgtcctagtgcacttacaatttggtattacctgggagtgaaaagaaatattacagccatgcctaagtgacttcttgaggtgagattgttctgtcagaaaaccctctcccagttcccctgcagctcttcaggaatccacatctctccagagctctttgttctcatgggtggcacctccagagtgaagaagatcctttgtcaagaagggaaacagaggggaaatgagagggtcctgcaggcagagctggaatcaacttccactctgcctcttgcaagctgtgtgaccctgggcacaatttctccttcctctggaaacctctgttttcttagatttggagcagggtggtcacactgaccttgcagagttctgagaatcagagacagaacataaaaggcctggaaaacattctccaaaaagaagctgcaacatgtgtggacagtgggcttttcatgcctctcttactggctcttactggctgttgacctggtgcaagaaacatgctctggtgatggctgtgagggaggaatgagg

SEQ ID NO: 48852 - DNA, 459 bp, Homo Sapiens
aatccacttcagcaagcattctgaaaagcaaattgtcattggaaccgtagcctccaaaagaacaggctgtacacgcgaaacctaaacagggtgacagcctgctcaaatagaggatttaacacttaacaagatcagtcttctaacataatatccaaaatgcccaggatactgcagaaaaattacccgtcacaccaagagcaccgaagatcaatgatttgaatgaaaaaagacagcagaaggcccggcgcagtggctcacacctgtaatcccagcactttgggaggccgaggaggacggatcagatcacctgagatcaggagttgaagacgagcccgatcaacatggagaaaccccgtctctactaaaaatacaaaatcagccgggcatggtggcacattcctgtaatcccagctactagggagggtgaggcaggagagtcacttgaacccgggaggcgga

SEQ ID NO: 48853 - DNA, 789 bp, Homo Sapiens
gggagttcccctcaggtttgattccaccttcaaatgagcctgctactgaacatccagaaccacagcaagaaacctgacaatatttttgctctcttcaaaagtaattttgactgatctcattttcagtttaagtaactgctgttacttaagtgattacacttttgctcaaattgaagcttaatggaattataattctcaggatagtattttgtaaataaagatgatttaaatatgaatcttatgagtaaattatttcaattttattttagacggtataactatttcaatttgattaatccactattatataaacaatagtgggagttttatatatgtaatcttgcaggtggggaggctttaaattctgaagtctgtgtctttatgccaagaactgtatttactgtggttgtggacaaatgtgaaagtaactttatgcttaaataaattatagttgatttaaagatttgtttggcattgataataataaaatcagtagtttttctataactatggctctattaattaacttttttccttttaccaataactttgaggtgcaaaactcaaacttatgtgggtcttttgggttcaattatgttatgacaaatgtgctctctttcttgtaaatagacatgagtggccccaaagcacaaattaataccctttttaaaagtcaaaattgattatatttttaaagaataccagggatattaatctaatgggtgaattggtagaaatttggatctttctttattccctgaagttttcttgccacggttttccttaata

SEQ ID NO: 48854 - DNA, 605 bp, Homo Sapiens
  misc_feature (565)..(565): n is a, c, g, or t
  misc_feature (603)..(603): n is a, c, g, or t
ggcgagcaggttttaagggcaagtctaaacccaatcttctaaaacacgaaaccagcagcctgtcctgttgtttgaggatcctgtttcgaatgtatgttgatgagaaccgcagggattcctgggaagaaatacagcagagacttttaactgtttgcagtgaagctcttgcctatttcatcactgtgaattctgagagccatcgggaggcctggacaagtctcttgttgttacttctaactaaaaccctcaaaataaatgatgagtttgacctgatccctgagctccgagcagttctgcggaagttcttcctacggataggtgttgtgtataagatatggataccagaagagccatcacaggtaccagcagcactgtcaccagtgtggtagccctggctgtccaggccagtgctgcagctctgcagaatgttcagcatgccatttctgactggcacatatcgtgaagtttcatagaaacaaggagttggcatcttggatctcagaatggcctgtaaacggatggcctctacgctgttccatcacagtctccaactaaggcttatggnatttcattaaactgttgcatacccagttagcacagtangt

SEQ ID NO: 48855 - DNA, 595 bp, Homo Sapiens
ctatgacaaggaaattatggaaattttaaatgagcatttgctggacaaattatgcaaagaaatagagaaagatctgcgactttctgtgcatactcatttaaagctggatgaccgaaaccctttcaaagttggcatgaaagacctggctctttttttctctctgaatccaattcggtttttcaatcgtttcattgacattcgggcttacgtaactcactacctagacaggactttctacaatctaacaactgtagcccttcatgactgggccacttatagtgagatgagaaacttagctactcagcgttatggactggttatgacagaggcacatcttcccagtcagactttggaacagggccttgatgttttagaaattatgagaaacattcatatatttgtgtcccgatacctctataatctcaacaatcagatttttattgaacgaacaagcaataacaagcatttgaatactattaatattcggcatattgctaattcaattcgaacacatggcacgggaattatgaatacaactgttaatttcacctaccagtttttgaaaaagaagttctatatatttagccaatttatg

SEQ ID NO: 48856 - DNA, 710 bp, Homo Sapiens
  misc_feature (674)..(674): n is a, c, g, or t
tggcctcactcagttcaccaataaatgccatattgcttttgctgcattagaagctgtttgtttccaaactcgagagattttggatgccatgaatcgagactgtggaattccactcagtcatttgcaggtagatggaggaatgaccagcaacaaaattcttatgcagctacaagcagacattctgtatataccagtagtgaagccctcaatgcccgaaaccactgcactgggtgcggctatggcggcaggggctgcagaaggagtcggcgtatggagtctcgaacccgaggatttgtctgccgtcacgatggagcggtttgaacctcagattaatgcggaggaaagtgaaattcgttattctacatggaagaaagctgtgatgaagtcaatgggttgggttacaactcaatctccagaaagtggtgaccctagtatcttctgtagtctgcccttgggtttttttatagtgagtagcatggtaatgttaatcggagcaaggtacatctcaggtattccataaaacctaccaactcatggattcccaagatgtgagctttttacataatgaaagaacccagcaattctgtctcttaatgcaatgacactattcatagactttgattttatttataagccacttgctgcatgaccctccaagtagacctgtggcttanaatcaagaaaatgcagcaaaaagaatgctaaaaaaa

SEQ ID NO: 48857 - DNA, 552 bp, Homo Sapiens
ttttggctgtcgtgactggagggaagtggtgctcctacatctaatgcgaggaggacagaggtgctgctaaacatcattcccacacaggacagcctcccgcaacaaagaattgcctggtccaaaatgggtgggaaagcctgacttagaggcttagggagttttcccctcctgctaaatgacttgaagcgattgccacatgggttacacataaaatgtgtccatggcatacagttctgactgtaaaatgagcgtcactcaatggtgacaggaaactggaagcactgttaaaatgggaagatatgaaccaatccttatctacatgacacctacacatctagaactttacgaatttctctcatgggctcctggatctggacatttacatgatgccaggcatatagctgtgtggcttcttgcaggcaaaattcccaagtgattgactacatctcttatttttcttccaggtgtttgtgtacagtttaagcaatcacagtctctgcgtagaaagatcttctcaaatatactactgcaaaaagcaaaaaaaaaaaaaaa

SEQ ID NO: 48858 - DNA, 437 bp, Homo Sapiens
caaaacaaactgaattctgatggactttccacttatcaccaccaccaccacctccaccaccaccaccaccacaggtgttgagacaaagcggcttgcggtgtttcaaaaatcaaaaatttggtgattttgtctctgtacactaaaaagaacagcaaattattgaactttgaaatgttggttgtgcttttttaaaatgaaccgaaagtatgtaaacgattgaatccaaacaaccagaagggaaagataagatggatgtttggtgcccttgtcaatctctgtgcttcatagctggtctaatgtgggcccttagttctcaccatgtacactctttagagatgtgatttgtgtctgtgtgatgcaggctggtctgttctccagcttccttgccttcttctccctggtgaaggtaaaatacataataaagctgatcctaaggc

SEQ ID NO: 48859 - DNA, 566 bp, Homo Sapiens
tttttttttttgaggttgacattttaacaataaacattggatgagtgaataaacttgtccttaagccgtaaatctgctgagtggatgtattccgtaaactaaaccatagatagcatcagatgctgtttgaatctgaaattatgtgtgtcatctcaacatgcaactagatagtagattcactgccatatccctgctctttctttccctttacagttttatactgggtctatttcagagacctaatggtggtaaataaatagtaaactctcagtgttacagctcatggttttccttccctgtagaacttgtaaacaaaaggaaaatggcaaggatctattgaagggcgaagttactgttaagatctactgtgctgtgtcaaatgtgtagcactccacagtgattaaacaggcttgacaattatttttagctcagatttgttcacagcactccatagaagcaaaagttgcttttctccattgtcttccaaaacgcttagcacaaaagtcgcattctagtggagaaacaaactgtaattttcttacttgaagtagaaaaaaaaaaaaaaa

SEQ ID NO: 48860 - DNA, 704 bp, Homo Sapiens
cggacgcagggcaggatgtacacgctgctgtcgggcttgtacaagtacatgtttcagaaggacgagtactgcatcctgatcctgggcctggacaatgctgggaagacgaccttcctggagcagtcgaaaacccgatttaacaagaactacaaggggatgagtctatccaaaatcaccaccaccgtgggcctaaacatcggcactgtggatgtgggaaaggctcggctcatgttctgggacttaggagggcaggaagagctgcagtctttgtgggacaagtattatgcggagtgtcacggcgtcatctacgtcattgactccaccgacgaggagaggctggctgagtccaagcaggcgtttgagaaggtggtgaccagcgaggcgctgtgcggtgtccccgtcttggtgctggccaacaagcaggatgtggagacgtgcctctcaatccctgacatcaagacggccttcagcgactgcaccagcaagatcggcaggcgcgattgcctgacccaggcctgctcggccctcacaggcaaaggggtgcgcgagggcatcgagtggatggtgaagtgtgtcgtgcggaatgtgcaccggccgccgcggcagagggacatcacgtaggcgcagccgcgctgccgtcgggacggctggtcccctggtgctggaggaatggcctcctgttggctcccatgctgctgatctgg

SEQ ID NO: 48861 - DNA, 668 bp, Homo Sapiens
ccgcccgtacccagtagcaggtggggagtgtggatacttgtgcgggggaagaggcggcctcaggtctaggctctttggggaggggacgctttcgaggagagtttggaagccgacttctgtctgttcttaatttggaggggtacccactccaaggaaaagctttccacgttgacagacaactgctgcgttttgagactctttctttgacttggtaaaactttggaacgtggggttttcaaataggctgcgagggttttctatttcgataggggaaaatgctagtttaacatgattctatcctttttcctttccgttgtgtgttttaaaggtgtgtgccctcttcctgattctggagaaaaatgccggtccggaagcaagatacccagagagcattgcaccttttggaggaatatcgttcaaaactaagccaaactgaagacagacagctcagaagttccatagaacgggttattaacatatttcagagcaacctctatcatgctgtaatagatattcaagaatcttatgaagtgaccttactggataatccttaatgtatagatcggtcatagtcgtctgtaccatctcaacctgtgaatacttgggagatatgcagtctttcaagctctactgtgacttcagagacactgcctagcattcatagcccg

SEQ ID NO: 48862 - DNA, 460 bp, Homo Sapiens
tttttcaattaaaagagatattttataaattattcacggaaaaagataaacagaccacaagtaaacccaatctgcataaggggcccaatatctttgtttttactatacaacagtaaccacgacccaaatctagggtagaggagagctgctaatttctaccccaatgctcgaaatcttgtcaggttttgtgtcagggtagaacacatttatgctacaactaggttatcagagcaatacacacacaaaaaaacataatggtgggttgatttggactattttatttttgtccttccccaaaccatctggcgtgttagtgtaggggtattgatcagggatctgtgagctgcagaccccatgccaatccatagcgtttctggcaatcagcgtcgcccatgaattgcagctgtctgtgcagctcctcaacagaaatcttcaaaaaaaaaaaaaatttccctccctt

SEQ ID NO: 48863 - DNA, 717 bp, Homo Sapiens
gggtgcatgggaaatagttttggtgtctctcctaccatggacaaagaatacatgaaaggagtgatgagaacaaaggtggatgactgccagtttgtctgcatagcccagcaagattactgccgtattctcaatcaagtagaaaagaacatgcaaaaagttgaagaggaaggagagattgttatggtgaaagaacaccgagaacttgatcgaactggaacaagaaagggacacattgtcatcaagggtacctcagaaaggttaacaatgcatttggtggaagagcattcagtagtagatccaacattcatagaagactttctgttgacctataggacttttctttctagcccaatggaagtgggcaaaaagttattggagtggtttaatgacccgagcctcagggataaggttacacgggtagtattattgtgggtaaataatcacttcaatgactttgaaggagatcctgcaatgactcgatttttagaagaatttgaaaacaatctggaaagagagaaaatgggtggacacctaaggctgttgaatatcgcgtgtgctgctaaagcaaaaagaagattgatgacgttaacaaaaccatcccgagaagctcctttgccttttatcttacttggaggctctgagaagggatttggaatctttgttgacagtgtagattcaggtagcaaagcaactgaagcaggcttgaaacggggggga

SEQ ID NO: 48864 - DNA, 619 bp, Homo Sapiens
cccacgcgtccggttaaaaattttgttatggttgctgacttttaaatgctgtttattctctgaaggcagttttatgatgcatttagaaaaaaggtaagagagatgtaggcattatactggttcatcttttacctaatgcatgaccagtatactagaggaagttgtgatggaccagagtctttttgttttgtaatcaaatgaatagttccttcataaccaggacagctagtgtgtgcttgagaatgtctccctcaactatatgatctgggatattctgcattaaaaggactcccttcccagtattgggagaaagagagataaattgacacatttttactctgactccttcatttatcttcccacatacaagatcattttgtcttttaaaatgtacaaggttacaataagttaaatgttattagtggccttctacatttgatcagtaatgtagatggctacttttatttacttgatgttgcattttgtttttttaactataagtttcaatacactaatctgactggcacaagttgcatatagttcccagtggtccacagggttcatcattccaaaaatatttattcataacattgaatggctcagattacataaaattcta

SEQ ID NO: 48865 - DNA, 678 bp, Homo Sapiens
  misc_feature (8)..(8): n is a, c, g, or t
  misc_feature (673)..(673): n is a, c, g, or t
ttcacttnggctagaaattacactgtgctcaatgccttaataaatccctgaaagaaataaaaaccactgtgtgcaatgccttgctgtggcccccaaccactgcttaggcctcccaacttctccccaggccaagtatggggccctggctgtgttctggaagttcaagacacttagtcctccacagtgggtggaagagtgcaaggtctgccaggtcagatggagacgcagaacctgctggtgcaagctgggcaggtcctgaccaacctgcatcaggggatgccctgagctccacaggtcttcatgggcaggggttgtgggtcctggtgaaggaagtgcatcctcaggcctgggctgtagcaagctgtctgcccttgggttcaagaaccagactgtggagccaaaggtgaccgcagggggccccagggctggagccacaaggataccctcactttgcatgaggagctgaaactgaccagtgtccagtgttagcccccacatggggctgctcttgcttctactaaaagatacagcagttacccccttatccacaggggatacagtggatatctaaaaccagacccccagtggatgtctaaaaccacagataataacaaaccttatacatactgttttttcctatgcatacatacctgtgattaagtttatgaattangcact

SEQ ID NO: 48866 - DNA, 680 bp, Homo Sapiens
  misc_feature (502)..(502): n is a, c, g, or t
  misc_feature (527)..(527): n is a, c, g, or t
  misc_feature (635)..(635): n is a, c, g, or t
  misc_feature (642)..(642): n is a, c, g, or t
  misc_feature (646)..(646): n is a, c, g, or t
  misc_feature (658)..(658): n is a, c, g, or t
aaggttgtcaggaagcaattttaaatttctaatatgtaaacatcggggctttggcatattttgaaccattttgatgataggaatggaggtggtaggagccaccctgattaagttcttgttgagaataaactggtgcaccagacatttacataggctgaatcaatgttgatggcagccgtgtttttaatccatgggcctaaaacagtgtccctcatacctgtctcttgctgaggcccctgtcgcaggtgagccatgtctgacttccgagccttccatcgactgctcagtccacgtcttcagccctatttcccaagcttacctagtgagtcctccttgactcaggctggttcctccattgtttctgccacctgcaggccattggtgctccttgaataccctgtggtgtcatcgctgactcgtgcctccagggctttcccgctctgacggctctgtgtttcctattgcttcatatagcttgcttctgaattagcatgcgatatgngacactcatatgttatgtatcttgntttagtttttacagaaagatgaaagactcttaaaagggatcttggagttgttcttgtacatcttttatatctcctaagcctttgatgggcacttgttccaaatgggancgaaaanaccncccttcaaaaanagatctttaattaagcggccgg

SEQ ID NO: 48867 - DNA, 524 bp, Homo Sapiens
tctagcacagcattgcccaatagaaatacaatggaggtcacaaatgtgacccatatagttaattgtaaattttctaatagccacattaaaaagaaaacagcacaaataaacaaatgagaaaatctatttaactcaatatattcaaaatatttcatcatgcaatcaatataaaaaatttctttttgttggtcatgatggcctgcgcctgtaatcctagctacttgtgaggctgaggcaagaggattgcttgaggctaggagtttgtgactagatgggcaatatagtaagatgtcatcttttaaaaatgaaaaaattagctggccactgtggcacacgcctgtagtcccagctacttgggaagctgaggtaggaggattgcttgagcccaggagttcaaggctgcagtgagctatgattgtgcttatgaatagccactgcactccagtctgggcaatagtgagtcggtcaaattccatttccccctccgccccatacctcttcaaatgtttaaaaaaaaaaaaaaa

SEQ ID NO: 48868 - DNA, 884 bp, Homo Sapiens
tttcagggagctcagacgtcacaggagggagcgggagcaggatgtggccctggcctcgccagagcacctgaagaagcaggccgtgagcgaggctgcgagtgccctgggcgccgtttctcacgcagtgaatgcttttccaggcctctgttgcttcctgcaccacacctggtggggtgggagcgtcctctaggtgcccctagttctttgtcctgcctcccagagggaggaaaagcccctgggggcttctggctccctgagattgggctctgagacgagacgggttcccaaggccctggtggggctggagtctcacctgtttgcatggagaaatgggctggccccacagcctcacaggagcagtttgtgggctggtttccccaggaatccagaccctaacccgtgagaatctggattttggcttgtgagccctgcttatttggagccgggtctagagggaaccctctatcagcctcaggaaaacaagacctctgtgcacctcacttttggctcactgcagcccttgtccttcacctccacacaggaccagctggaagcagaaagaagaaaggccaatttcacagggcaccaaacaagtatgaaatgtaaatcagaaatgcagacaccccagacgagagcctcacaggagggagggggccccacaagctcccccagaaggtcgtggcttttggccaaagccaaccttaatttgtcccctgcctcctctgtctgaagccatccctgctaaccttggtttttttttgttttcatactggaaatttcaaaaaaaaaaaaaaaaaaaaaaaaaaaagggcggcccctttttataacccccagaaaaagggccccctttttggggggccacaatttaaaaaaccaaggccact

SEQ ID NO: 48869 - DNA, 691 bp, Homo Sapiens
tttagggttaacggaatatgatatgcaactgaatcacaagaggtttaggaaaaattatagagagagaaaatggtagagtaaatggggtcagatgttaaccttggaaaatctatgtcgaggtatatggatacttgtactgtttgcagatttactgtaaatctggaatcatttcagaatagaaagttaaaaatagctttgttctaactaattggcatgtgggtcaaaggaacatggcgagtatggataaaggcctggggcaaatctttatagcctttctctgcctcagctttaccatctgaaaaatgggaaataatagcacctatgtcatatatggttggagaggaagttaagacacttaaagtactgagaactcatccaggcacaagtatataaatatatgtgtagtaggctgaataatggcccccaagacatcaggtcctaatccatgaaccctatgttaccttacgtggaaatgaggtgttgcagatgtgattaaatcggagatcttgagatggggagattttcttggattatctaggtaggtcctaaatgcaatcacaagtgtctttaatcagaggcagggagattgcagacagaagaggagaaggcagtgtgatcatgaaggtgaggactgagtgatgcagcacaaaacaagggaatatccagtagccacaaaaaaaacaacaaaaca

SEQ ID NO: 48870 - DNA, 513 bp, Homo Sapiens
  misc_feature (450)..(450): n is a, c, g, or t
gagatctgcgatcagcaaacattctagtggggaatggactcatatgcaagattgctgacttcggattggcccgattgatagaagacaatgagtacacagcaagacaaggtgcaaagttccccatcaagtggacggcccccgaggcagccctgtacgggaggttcacaatcaagtctgacgtgtggtcttttggaatcttactcacagagctggtcaccaaaggaagagtgccatacccaggcatgaacaaccgggaggtgctggagcaggtggagcgaggctacaggatgccctgcccgcaggactgccccatctctctgcatgagctcatgatccactgctggaaaaaggaccctgaagaacgccccacttttgagtacttgcagagcttcctggaagactactttaccgcgacagagccccagtaccaacctggtgaaaacctgtaangcccgggtctgcggaaaaaggccttgtcccaaaggctgcccacccttcccattactttcaatt

SEQ ID NO: 48871 - DNA, 907 bp, Homo Sapiens
  misc_feature (711)..(711): n is a, c, g, or t
cagtagtatttattgctttagagattgcttgtcgtacctgtatgtcgtccctttttaaatatgttttcctttttcttgaaactgtataaagtttttttcccccttagcataagcatcttatatataacaactcatttgtacaaggtttttaagtttatatataaaatgtgtatatatatttttgtttcccctttttgacttttttttttctgtatgaaacccagatgtcaccaaatggacattaatagttgcattaaggatcagtagcattaacaaaagttgctttaaaagccattatgtaaaacaagacttgaaaatgagtgagggaattttagcgacactgtctgagcagcagtgggaaccatcttcgtttcccctttgaactcccagtgggatgccctaccctgcgcccttaggacccggactgaccgtgtacaaaactttacgtgccaaaattctcagtgaatttagctttctccctctttttgatgctgtaatttttgttcatcatgttttgctgtgatgttacataggtagatttgtatgtagttttaatgtcacctataacaaaatgtgtttggtagcagattgtccagaaagcattttaaatgaagaggtataaacccttaagggccaaaattctgtatattagattactcttaaacgaaaaaccagctgccgcttttatgtacacatattacatacgagtangcagcagactttaaaaataaaaaaacctaggcatgttgatgttgcaaaatgctgtataaagctgaaactggtcattcagtgccattgtagttgacatgaagcgattgtaaaactgtctccgatttttctctggttttattaaaatgctaactataacatttttttggggttacttttgaatgtttccctaacattg

SEQ ID NO: 48872 - DNA, 610 bp, Homo Sapiens
taagtggtctctgcccagcctgccaccttcctggcccgtagccctcacgtgggtgtgaaggacgtggagtgtggggaaggacacttctgccatgataaccagacctgctgccgagacaaccgacagggctgggcctgctgtccctaccgccagggcgtctgttgtgctgatcggcgccactgctgtcctgctggcttccgctgcgcagccaggggtaccaagtgtttgcgcagggaggccccgcgctgggacgcccctttgagggacccagccttgagacagctgctgtgagggacagtactgaagactctgcagccctcgggaccccactcggagggtgccctctgctcaggcctccctagcacctctccctaaccaaattctccctggaccccattctgagctccccatcaccatgggaggtggggcctcaatctaaggccttccctgtcagaagggggttgtggcaaaagccacattacaagctgccatcccctccccgtttcagtggaccctgtggccaggtgcttttccctatccacaggggtgtttgtgtgtgtgcgcgtgtgcgtttcaataaagtttgtacactttcaaaaaaaaaaaaaaa

SEQ ID NO: 48873 - DNA, 583 bp, Homo Sapiens
  misc_feature (569)..(569): n is a, c, g, or t
taggaagtattttggaggagtgttggagtattttatgattcaagccttaaatcagaagacaagtgaaaaaatgaagaaaagaaaaatgagcaactcctttcatggaattagaccacctcaacttgaacaaccagaaaaaatgcctgtcttaaaggctgaagcgtcacattataactctgacttaaataacttgctgttctgctgccagtgtgtggacgtggtattttataaccccgatttaaagaaagttgtagaggcccacaagatcgttctctgcgctgtaagccatgttttcatgctgcttttcaatgtgaagagtcccactgacattcaggattccagtatcatccgaactacccaggatctttttgctataaacagagatactgcatttccaggtgctagccatgaatcttcaggcaacccaccattacgagtcattgttaaagacgccctcttctgttcttgtttatcagacatccttcgcttcatttattcaggtgcttttcagtgggaagaattggaagaagatatcaggaagaagttgaaagatttgggggatgtttcanatgtaatcgagaaa

SEQ ID NO: 48874 - DNA, 664 bp, Homo Sapiens
tagatgtctgagtgttgtctggagacctatacgtatggttaaaaagatttatgttaatgtatgtgctccaaaacctttcgtgtatgcattcacattgagtgtggctcattttctttccccgaacgccatgactgttcagaagcacaatactatctcctgaaagagataagagacattccctagattcaaaggcaaaacagaagaaacaaacaaacaaacaaacaaagcttgcaaaatattttatggtttccaagcttgatatcctttaaaattattttcattgatggaactggagttgttggaaaaacatagatttaaaatgatttttgatagctgacattgtgatgttgatgtatcacatcagtaataggaccagctttgaatttctgacattggtgtggggatacagtctgtaaatgtttattgagaacatcttgcacacaatttgaattatgtagaatgtcaatcaagtttttgtatatttaaaagttggacatcaattttttcccctgatttcatcaagttatctctgccaagtgctcttgataatttcttcagatttttggaaaaaaacactatataaatgcaatccatgcttttttaaagaacaacattgccagagtatgcttgttctaacaatatagatatataaaccttaaaaata

SEQ ID NO: 48875 - DNA, 256 bp, Homo Sapiens
agatactccctcaggaacagcagaaatccaaagcagacaccacctccacccctcacatcagccagacctggagagaacgatcatcttgaatgacaatgatgaacacagcgctccctattttgctaagcgctgtgctaaactatatgccttaactcatcttaatgtctacaacagcttatatgagggctttaaaccaaggcttggtaaactactgcccatgggccaaacctgggccatcatctagttctgtatagcc

SEQ ID NO: 48876 - DNA, 523 bp, Homo Sapiens
agtgcccagggcgtccaggcaggcgtccgttcaacagccatcctacctgagcagcagcagcagcagcaacagcagcaacagcaacagcagcagcagcagcaacagcaacagcagcagcagcagcagcagtaccacatccggcagcagcagcagcagcagatcctgcggcagcagcagcaacagcaacagcagcagcagcagcagcagcaacagcaacagcagcagcagcaacagcaacaacagcaacaccagcagcaacagcagcaacaggcggctcctccccaaccccagccccagtcccagccccagttccagcgccaggggcttcagcagacccagcagcagcaacagacagcagctttggtccggcaacttcaacaacagctctctaatacccagccacagcccagtaccaacatatttggacgctactgagccacctggaggaactgcttgtgcactggatgtggccccaccctttcctcttaattcccaatcccattcctgggctagcaccagtagt

SEQ ID NO: 48877 - DNA, 689 bp, Homo Sapiens
acatctcagaacttaaaactgagagttacctttgaggagcctgtggtgcagatggagcagcctagccttgaactgaatggagaaaaagacaaagataagggcaggactctccagcggacctccacaagtaacgaatcgggggatcaactgaaaaggccttttggagcctttcgatctatcatggagacactaagtggcaaccaaaacaataataataactaccaggcagccaaccagctgaaaacctctacattgcccttgacctcacttgggaggaagacagatgccaagggaaaccctgccagctccgctagcaaaggaaagaataaggcagcataatgacatcaatagaaaaatgaagaaatcctacagcataaagcacattgctgagccagagtcaaaagaactcttcttgtaaatcactttttaaattttctctcactgatgccctttggaaattattggaaatttctggactatcctctttggaaagagaaccatgaaaacaatgcctcaccagcagaagaacagaatatcaggatgccttaaatttatagtagtagactgtaaaagattcattttggggtgatatctgtatatataacttgtttttttaaaagatgccgtttaaaagcatgattgggaaaatgtacgttttttaagagtagattgattcaccctacccacag

SEQ ID NO: 48878 - DNA, 519 bp, Homo Sapiens
tgggaaaagaaatgtattgacaggagggagagtccacgataccactgataaggttccagcaaagagattaggacacagcacagactttctaaatgctggggtcatttccaaagcagtccaggggaatactttctgattccctctgccaatcaaaatagatagaatatgatattctccaattttttttctgtttgatgtcaaaatggcctttacctatttcttcagtaatatacctgatctgttcatgcactaaaggctctggagccaggaatgtctgaatttggccttcacctggtatcacagaaagacaactgggatattggtgttaaggggcatatcggctgtatgttaggttttctttaatcctcacatcgtgccaaacttagtctggttactaagcctaaaaacaccagtattgcaacaacttctgaaactctgaagtggactatatgtttctcacagtttttgtttatgctcagcaaagtatgtattttaggtaaagcttctcttgttatctgt

SEQ ID NO: 48879 - DNA, 854 bp, Homo Sapiens
gaaagaactagtttctttttaaagaagttaagtgcttacataaacatggaacatataaatcattcattcaacctaattatctgtgatatgagagaatcatttcagtttccattgagagctctgttaaaggtatcttaggagtgcagattatatgcagttccttagagaatctgtttgattctgggctgagttattacagttatggtatgaccagtgagagcgattgtgtcctttcttatgaaccttcctgattttttaacttagatttctcactaagtttcctgagttattagtaagatgctccctaaatgtaaccaggatttttccattatgttcccttttataccatttaggtgtgagttccttagcttctgcctataggaacataagtaatgaaaggtcatctaggtgtgtgttggaatttttttctttgtttttggaaaatggaaagaacaaggcaaggaaggaaaattaatgagggagctgggggggagggaaatgactaatgaagctaattaaaagaagcattcaaatctggtttctacctcattaacaattagcagggcactggccagagtttgtaccctgtgttttaccttaacaaattctattgctcttgtattttaacgtgtgtagggaacgtgttcatcaaaactgaccctgagataaggaagagatggggcttgggaattctatcaccaaccttatggtttccgtcaactacacgttgttgcctgtagggtggcccaagtgggtccctgccagaaaacgcatgggccaacaacttggggaaatggccctgtggtggaaacccctttttgggggcgaaaacctctcgtttgcaactcgggtgt

SEQ ID NO: 48880 - DNA, 655 bp, Homo Sapiens
cattctgcaaacataatgtgaatatactatctgcttctatgaacttgccttgatttatttaaaaggaagaaaattatgagagtcgtaattattttcttccagtgaatggaattgtccaaaatataatatgcattcattttacatttgccattatctgtcacagtgacttatcaggctgagccctgtctttgttcatataatccaaatgattgtagagtaagatgtaaagaaaactaagtaggtagttttcttaaaagggtgtaatttagaatacagtgttcatctggtttcatctttcatgccttatctaaactttacatataataaaagctttatggctgggcacagtggctcatgcctgtaatccgggcactttgggagaccaaggtgggagtatctcttgagcccaagagttaaagaccagcttgggcaacatagcgagtcgtctctacaaataattttttttttttttaaattagccaggcgtggtgggtgtactcctgtagtcccagctactcgggaggctgaggcaggaggattgcttgagcccaggttggttgaggctgcagtgagctgtgattgtatcactgtactccaccatgagtgaccgagtaagaccctgtctcacaaaaaaaaaagcacaaacaaaaaaaac

SEQ ID NO: 48881 - DNA, 593 bp, Homo Sapiens
  misc_feature (485)..(485): n is a, c, g, or t
gccggggaggagcctggcgcggcgggagcggcggcgcaaagtgaaactctgctccagaagaaaaggaagtcattaaaggacagtatggcaagctcacggacgcgtacggctgcctgggggagctgaggctgaaatctggtggcacgtctctgagcttcctggtgttggtgacaggctgcacatctgtgggcagaattccagatgctgaaatctacaaaatcactgccactgacttttaccctcttcaggaagaggccaaggaggaggaacgcctcatagctttgaagaaaatcctcagctcgggggtgttctatttctcatggccaaacgatgggtctcgctttgacctgactgtccgcacgcagaagcagggggatgacagctctgaatgggggaactccttcttctggaaccagctgttgcacgtgcccttgaggcagcaccaggtgagctgctgtgactggctgctggagatcatctgcggngtggtcaccatccgcaccgtgtatgcctcccacaagcaggccaaggcctgcctcgtctctcgcgttagctgtgagcgcacaggcactcgcttccacacccgtggcgtg

SEQ ID NO: 48882 - DNA, 1118 bp, Homo Sapiens
caagacccacccctttgacagtgccagctttccaacacagagagctgagtatgggtctaggaagtgagagcaatgtaaaacaatagaaagcaacagttcagagcactgcatcaagtgtactgtgctggaaaggtccgccataggaaatatggtcctccatactcctcagacaacagccttccgaaagcaaacctgtccctacctgcagatgattaaccatctatgaaccggctgggtaagcaacaagtgccatctttcatggagctgagccttaaagatcctccagtcctaaagctgacgggaagaaggtaggtgggagcagcgctgaggtttttggaacgtcctcaagtgctgtgacaccgataaactcatctttggaaaaggaacccgtgtgactgtggaaccaagaagtcagcctcataccaaaccatccgtttttgtcatgaaaaatggaacaaatgtcgcttgtctggtgaaggaattctaccccaaggatataagaataaatctcgtgtcatccaagaagataacagagtttgatcctgctattgtcatctctcccagtgggaagtacaatgctgtcaagcttggtaaatatgaagattcaaattcagtgacatgttcagttcaacacgacaataaaactgtgcactccactgactttgaagtgaagacagattctacagatcacgtaaaaccaaaggaaactgaaaacacaaagcaaccttcaaagagctgccataaacccaaagccatagttcataccgagaaggtgaacatgatgtccctcacagtgcttgggctacgaatgctgtttgcaaagactgttgccgtcaattttctcttgactgccaagttatttttcttgtaaggctgactggcatgagggagctacactcctgaagaaacaaaggctwcaaaaatgcatctccttggcttctgacttctttgtgattcarktgacctgtcatagccttgttaaaatggctgctagccaaacmacttttyttcaaagacaaaaaccagcycatccycmgcctgatggggagacaaagtctgggggggggggkttatgtctaactgcttktwtgctgtttataaagggagaagghawaaaa

SEQ ID NO: 48883 - DNA, 356 bp, Homo Sapiens
cgaggcacaggccggggtgtggtggagtactttggcctggatcccgaggatgtggatgttatgatgggaacgttcacaaagagttttggtgcttctggaggatatattggaggcaagaaggagctgatagactacctgcgaacacattctcatagtgcagtgtatgccacgtcattgtcacctcctgtagtggagcagatcatcacctccatgaagtgcatcatggggcaggatggcaccagccttggtaaagagtgtgtacaacagttagctgaaaacaccaggtatttcaggagacgcctgaaagagatgggcttcatcatctatggaaatgaagactctccagtagtgccttt

SEQ ID NO: 48884 - DNA, 358 bp, Homo Sapiens
cacgaggggggcttctgctgctctggctcccaggtgccagatgtgccatccagttgacccagtctccatcctccctgtctgcatctgtaggagacagagtcaccatcacttgccgggcaagtcagggcattagcagtgctttagcctggtatcagcagaaaccagggaaagctcctaagctcctgatctatgatgcctccagtttgaaaactggggtcccatcaaggttcagcggcagtggatctgggacagatttcactctcaccatcagcagcctgcagcctgaagattttgcaacttattactgtcaacagtttaataattaccctcatggcaccttcggccaagggacacgact

SEQ ID NO: 48885 - DNA, 556 bp, Homo Sapiens
atgccacagaacctctcctcttctccccactccccatggcagggaccggacctccctacatgcaacatgctgttcctccagcccctcccattgccatggcaaaacaggtacctttggggcatgggggcattacatgggatgcttgtgtaatcgaccacctagccttctctctcccctcccgtcctcccccagaatcacttcctaggacacccgagctgcttgcccagggtcctgtttccctgctaactccagagaagcatcccagggctttgtgacagtctctaattcccttcccttctcgttaagaatcatattgtatagtagctttcagaccatacagtattcattgggttactcctattattatcaagtagctggaattgtgaaggtcggagtagttagatctttagcttttattccttatttttttgtattactctccatgtgtataaattattgatcatgttgctggcttttataaactctaagcgaaggaggagcactgcctcagcctttgcacatggtaatgaagcactgtttttaaataaaagagaga

SEQ ID NO: 48886 - DNA, 570 bp, Homo Sapiens
ttcctactttaccaacctcagagtatttcggcccgtatcgaacttttgttctcagtgtcagcccatggtttcaggatcaaagctgtcatgttggagattggtaatggctttcctgtctttgtacagttgaattcctagtcttccttcatccttgccctctgttggcacaggcattatctctgcaattttagaaaatgacaagtagagaatactacattgagaaactaaaccctcttcttggggtcctgatactcattcccatttgtcccagtgctgacaacccaatcttcccaaactttcaggcctgctctacaaaagtacctgttcttgtagaaattttacagtctgccattttgggtgcccaccccaatttttaccttttagtaagttggcatgaaattttggtaaaatctgaaaatcacatttcagaataaaacaattgggcaaaactacctaggctttactcttgagtgtctccttttgatagggattgtttctggaccagtttgtctaagtcctggctcttattggttcatatgaaataatgttaacttcacttctttgtatatt

SEQ ID NO: 48887 - DNA, 582 bp, Homo Sapiens
ttagatgcccttgcccggactgctaaagatgcagctatttacagtggacagaaactgaaggggtgaaagaaaacccaagatgccagaccagtttgaccaggcggttgtgctgaaccagctgcggtactcagggatgctggagactgtgagaatccgcaaagctgggtatgcggtccgaagaccctttcaggacttttacaaaaggtataaagtgctgatgaggaatctggctctgcctgaggacgtccgagggaagtgcacgagcctgctgcagctctatgatgcctccaacagcgagtggcagctggggaagaccaaggtctttcttcgagaatccttggaacagaaactggagaagcggagggaagaggaagtgagccacgcggccatggtgattcgggcccatgtcttgggcttcttagcacgaaaacaatacagaaaggtcctttattgtgtggtgataatacagaagaattacagagcattccttctgaggaggagatttttgcacctgaaaaaggcagccatagttttccagaagcaactcagaggtcagattgctcggagagtctacagacaatt

SEQ ID NO: 48888 - DNA, 469 bp, Homo Sapiens
aagtacgaatgttaggcagtatggaatgttcttatttagcttatcataatctactttgtaaaacatgctgaaacctcactgtggagaaccagaatttggtaaaatctagatcctatctaaaaatatgtagttattaaacattctgtggatatttgtgaataaggtagttgctatggtccgaatatctgggcctgcccccccaaattatgctgaaacctaatcaccagtgtgatggtaataggaggtgggactgagctctgatgaatgagattagtgcccttataaattatgaccaaaagagctcttcactcctcctaccatttgaggatacagtgagaagccttcatctatgaaccacaaagtagccctcatcagacactgaatcagccagtgccttgctcttggacttcccagcccccagaactgtgagaaataaatttctgttgtttataagctaaaaaaaaaaaaa

SEQ ID NO: 48889 - DNA, 497 bp, Homo Sapiens
atttcttgaaaagctggatcaattggagaagcagagaaaggatttggaagaaagagaaatgttacttaaggcagccaagagtcgttctaataaagaagatccagaacagctgagattaaagcagaaagccaaagagttacagcaattggaacttgcacagatacagcatagagacgctaatctcacagctcttgcagctattggaccaaggaagaagagaccactagaatctggaattgagggcttaaaagacaaccttcttgcttctgggacatccagcctgacagccaccaaacagttgcatcgtccaagaatcacgagaatctgcctcagggacttgatattttgtatggaacaggaacgggagatgaagtattctcgagctctatacctggcccttctgaagtgaccactccactcttccatccagatccttgctatttactgccaaagaagacacaaagcattgttgcactgtcctgaaatttcaatttctg

SEQ ID NO: 48890 - DNA, 963 bp, Homo Sapiens
  misc_feature (761)..(761): n is a, c, g, or t
  misc_feature (768)..(768): n is a, c, g, or t
  misc_feature (892)..(892): n is a, c, g, or t
ctgggtggcgggcacgaggcaggaaatgatcctgagcagtgccacggcggacaggatccccattgcggtgagcggggtccggggcatgggctttctcatgagacaccacatcgagacaggcggagggcagttgccggccaaactttccagcctgttcgttaagtgtctgcagaacccatccagcgacatcaggctggtggctgagaagatgatctggtgggcaaataaggacccactgcctcccctggacccccaggccatcaagcccatcctgaaggctcttcttgacaacaccaaggataagaacaccgtggtcagggcctacagcgaccaggcaattgtcaacctcctcaagatgcggcagggtgaagaggtgtttcagtccctctccaagatcctggatgtggccagtttggaggtgctgaacgaggttaaccgaaggtccctgaagaagctggccagccaggccgactccacggagcaggtggacgacaccatcctgacatgagaggcctgggccagcagcagcattgccgctccacatctttgctcaatgttttcatttttgaaaatacatttgttccaatggggagcttggaagatggcgttcccagaaagtattttaatatcaatagaccacagcccaagccttaaatcaaacccacacacaactgaaaattgcctccctcatctctcaccttttcctgtggaggagagaaagaaaagcacacgcatgcgccctcagcaaatggcagccccangagctgntttgtccagtttagccatggctagggtcctggaactataataagcaagggtccagactggtggggtttcctcctttctcctgtggcttggaacctcttgggtttgaaaagctgggcgcctaccnaaaccctttttttccctataatccccggaattggggggcaacagaacggttggggaatctcctggcccccc

SEQ ID NO: 48891 - DNA, 433 bp, Homo Sapiens
cacgaggcgagtcgttcttgctcttcgagggcgagaagatcaccattaacaaggacaccaaggtacccaatgcctgtttattcaccatcaacaaagaagaccacacactgggaaacatcattaaatcacgtgcctgcttccccttcgccttctgccgtgattgtcagtttcctgaggcctccccagccacgcttcctgtacagcctgcagaactctgccccagagcacatcagctatgtgccccagctctcaaacgacaccttgtccggggaggctcaccctgtccaccttcacgctggagcagcctctaggccagttcagcagccacaacatctctgacttggataccatctggctggtggtggccctcagcaacgccacccagagcttcacggccccacggacaaaccaggacatccctgctcctgccaac

SEQ ID NO: 48892 - DNA, 650 bp, Homo Sapiens
aaattattttgtgcctatttatgaataaatattacaaattctaaaagataagtgtgtttgcaaaaaaaaagaaaataaatacataaaaaagggacaagcatgttgattctaggttgaaaatgttataggcacttgctacttcagtaatgtctatattatataaatagtatttcagacactatgtagtctgttagattttataaagattggtagttatctgagcttaaacattttctcaattgtaaaataggtgggcacaagtattacacatcagaaaatcctgacaaaagggacacatagtgtttgtaacaccgtccaacattccttgtttgtaagtgttgtatgtaccgttgatgttgataaaaagaaagtttatatcttgattattttgttgtctaaagctaaacaaaacttgcatgcagcagcttttgactgtttccagagtgcttataatatacataactccctggaaataactgagcactttgaattttttttatgtctattctgtagtatttttatttggatatttctagtatggcacatgatatgagtcacttgctttttttctatggtgtatgacagttagagatgctgattttttttctgataaattctttctttgagaaagacaaatttaatgtttacaa

SEQ ID NO: 48893 - DNA, 747 bp, Homo Sapiens
  misc_feature (588)..(588): n is a, c, g, or t
gggctctgccatgggtgtgggcagcccatcactggccgttgtatcagtgccatggggtacaagttccatcctgagcactttgtgtgtgctttctgcctgacacagttgtcgaagggcattttcagggagcagaatgacaagacctattgtcaaccttgcttcaataagctcttcccactgtaatgccaactgatccatagcctcttcagattccttataaaatttaaaccaagagaggagaggaaagggtaaattttctgttactgaccttctgcttaatagtcttatagaaaaaggaaaggtgatgagcaaataaaggaacttctagactttacatgactaggctgataatcttattttttaggcttctatacatttaattctataaattctctttctccctctcttctccaatcaagcacttggagttagatctaggtccttctatctcgtccctctacagatgtattttccacttgcataattcatgccaacactggttttcttaggtttctccattttcacctctagtgatggccctactcatatcttctctaatttggtcctgatacttgtttcttttcacgntttcccatttccctggggctcactgtcttacaatcactgctgtgggaatcatgataccactttttaactctttgcatctttccttcaagggaatttttggttttccagaagaaagtagattttaactgggaccaattttgaatacttgaatccattgaa

SEQ ID NO: 48894 - DNA, 853 bp, Homo Sapiens
tctagcgagtgacagcgtagaacaaggattatttttcaaaactatatggtgaaacatatggtgatatgatagacttatggtttttctgtttgctgggattgggtctgctttttgcctatgtgtaaggcattttaatcattgtgaatataatagattccttaaaataagaaaattaaaaatcagaaacttcccttggagtagagacatttcagttgcaagcataaagatttttaaatatataacactaggttatataattcatatatgtgtggttttgtattaataatcaaattaataaaaacatttcattttctaccattgtatgaacgtaattttattttttaataaccacactcatagatggttttgattgttccagttgagtgattgtgtatgtacgcataggaatgttttgttcagttgtactttgtatttccaataatcagaaatcttacctttatgtataaaaacccattatgtaatgtaaaatgtataatattgtacataatattcagaatacaattattttggtaaattagcttgtatttttaatgtcccagttgcagtatttaattatttgaaccatactgaaagttggtaatagtcaataaagctaaaaaaaaaaaagcgaacaaaaaaaaaataactctccagcgcttggatccggcccataaggggcctgatcccttccgaagggggggccccggttacccacccttatttgttccctttttagtgaggggtttaattttccgaagctttgggctgtaaattccatggttccatcagccttggttttccttggggatgaaaaatttgttttattcccgcccttcacacaattttcccccaa

SEQ ID NO: 48895 - DNA, 514 bp, Homo Sapiens
ggcaaagctggggcagtgtctgacttggcggtggtcatgtgtactgatttaggggaaagatcttgaggttttctcaaataattcacctatccccgtgttccctcaagaaaggtcatgttgacctggaaccataggggaaattggtggggtgtgatcagggtcagccccagctgttgctgcccctgcagtgttttgtccagagcacttgcctgcaggtcaggataggatttcaaggccagttcaggagaaagtcccaacccaccagtgcaaccaacaaaagagtaagttttacctacagcctgggttttcacaagtagcatttttattcctcctgctgtctgacatctgagctccaagctctaaacccaacctgtattatatgcagcagcaggttatctttgttttaaatcacatttgttattctgtacttagtcacctttccgtgtgatctgcatttgaaatgttgtaccttggtcagtatctccattaaaatatcagggctaaaaaaaaaaaa

SEQ ID NO: 48896 - DNA, 524 bp, Homo Sapiens
gagactgtgagccaaagtgtagggtgccaaaaagagctttgtgggatgagattttagggcaaagctggggcagtgtctgacttggcggtggtcatgtttactgatttaggggaaagatcttgaggttttctcaaataattcacctatccccgtgttccctcaagaaaggtcatgttgacctggaaccataggggaaattggtggggtgtgatcagggtcagccccagctgttgctgcccctgcagtgttttgtccagagcacttgcctgcaggtcaggataggatttcaaggccagttcaggagaaagtcccaacccaccagtgcaaccaacaaaagagtaagttttacctacagcctgggttttcacaagtagcatttttattcctcctgctgtctgacatctgagctccaagctctaaacccaacctgtattatatgcagcagcaggttatctttgttttaaatcacatttgttattctgtacttagtcacctttccgtgtgatctgcatttgaaatgttgt

SEQ ID NO: 48897 - DNA, 606 bp, Homo Sapiens
  misc_feature (6)..(6): n is a, c, g, or t
  misc_feature (41)..(41): n is a, c, g, or t
  misc_feature (100)..(100): n is a, c, g, or t
  misc_feature (336)..(336): n is a, c, g, or t
  misc_feature (529)..(529): n is a, c, g, or t
  misc_feature (598)..(599): n is a, c, g, or t
  misc_feature (601)..(601): n is a, c, g, or t
  misc_feature (603)..(603): n is a, c, g, or t
gctgtnggtttagccaggcttttacagtatttaattttaangtatcctataactatcaacttcccaggttgaagacgatgtgttgagtttcctactgatngattgattcctgtcctccccagtgtttccgtcactggttcactaaaacagtatttatatagctccactggctctaaagctcttagtccttctaatattttggattttacaagtaaaaatggaaaaaaaatagaaaagagacaatcaaatgcctggagcttaaaacaaagtatgtgcaacctaccatctcacttgaaatttaataaaataataagtaattatgtaaatataacatanagttatagatttatattttgttcataacacatagtgtaatataagttgtatattttcatgtttttggttttatgttatcattcatgccacaataaaaataaaacaggagtttatgtgctcttaaaaaaaagatgtgggttgccaccaacctgtttttcgtttttggtttttggttattttattttattttttngcattctcctttttcagtattactgccatgcaaggcaccaataaaaacagcaaatgtgttcttcaaaanngngncgt

SEQ ID NO: 48898 - DNA, 659 bp, Homo Sapiens
cggacgcgtgggatccaacagcagctccactgtgcagaagcagaatgagccaggctacagacagaggatgtgcagaagccaccacttcagatggacaacagcgtctttctagatgacgacagcaatcagccaatgcccgtgagccggttctttggaaacgttgagctcatgcaggacctcccacctgcgtcttcatcttgtccttcaatgagcagacgagagttcagaaaaatgcatttcagagccaaagatgatgatgatgacgacgacgatgatgcagaaatgtaggggccatacaaaataatgtccttgagtatttagtaccattaacaatttgacaatttagcacattacaagatttatataaaatgtatctccaagagaatgtcttaatcaaacttcagaactgacccatctaagtcaatagtgcaaagcacccaatacctgtggaggatgtactcatgggaactaaaactcaaaccatctttgaggttgcaaagctgctgtactgtgccaatgtcctttctttttttttttttttttttcccttggagacagagtttctctcttgtcgcccaggctggagtgcaagggcgcaatctcggctcactgcaacctccacctcctgggtccaaggtgattctcctgcctcagcctcg

SEQ ID NO: 48899 - DNA, 585 bp, Homo Sapiens
tagccaggagaaagacagtaacatgtgttctgtactttctgggaagatccctgaagccatcacagaggctccccaacttctgagtcgcccatctgttgctgtgggagtgtgaacggatcgctgaaggagagggagctttgctctctctaggtgggcaagtttcctgggctctctgtgttgcctccctctggcttcttcctcccgtgccctctccccgtgtgccccagggggatcagggatcctcaccctcctgaggcccagtggggaagaatgaacatggcttcatccaggttaactgatgctgccatttgcccagcctcttccatcccagccctgtcagtgagcccaggtctggtgcaactgctgcaggatgcctgtagtagggaactctggaagtgtattgggctgaggtgggattttccctccccacagtgcactgagcaatggagggtggtgagggagccatgctgctgaattctggttggcatttccccattatgtaaaatggggtgttgggtagggcagactctgcttgggtttggttgtaagataaacctggaggaagagcacagttgtcccattgaa

SEQ ID NO: 48900 - DNA, 803 bp, Homo Sapiens
catcctccatcaccatcagcctgccaggcacagaccctcaagacgccgagcggagaaggcaactggccctgaaggcactcaatgagcggctgaagagagtggaagaccagtccatctggcccagcatggatgatgatgaagaggagtctggggccaaggtggacagccccctgccctcagacaaagctcccacacccccaggaagggggctgccccagaatccagtctaatcaccttcgaggcagctcccccgacgctgtaactccaggccctcatctgaggtaagaatgtacatcagctggcagccccaagcaagtggctgcagggacactgatgccacagctcctgggccggccctcacatctgaaactggttgccgagagccctgagccaaggcaaggatttgccaaaaatgttctgggggcccagcaaatgcaggagccgacctggggctgcacatccctgcccatccccagaaagactgttcctgtcaggattgtttccctctgctgtggcggtgactgttctggaccagaacagctccagctcccaggtattttctacaggaccacttgagtgggcagcaagccagtcgcagtatcataaagcagttctctgaaaaaaaaaaaaagggggcgttaaatatctgagggcaagttaggtccagttttggtcaaggccctaagggggcgataaagaagatggcggttcaagcggatggaatgcatggttgggagacttttggggctttggatccagattagtagaataattgggtagggaagtgtgggatgtgttgatag

SEQ ID NO: 48901 - DNA, 695 bp, Homo Sapiens
ttttttttttgtttttctgctttagacttgaaaagagacaggcaggtgatctgctgcagagcagtaagggaacaagttgagctatgacttaacatagccaaaatgtgagtggttgaatatgattaaaaatatcaaattaattgtgtgaacttggaagcacaccaatcttactttgtaaattctgatttcttttcaccattcgtacataatactgaaccacttgtagatttgatttttttttttaatctactgcatttagggagtattctaataagctagttgaatacttgaaccataaaatgtccagtaagatcactgtttagatttgccatagagtacactgcctgccttaagtgaggaaatcaaagtgctattacgaagttcaagatcaaaaaggcttataaaacagagtaatcttgttggttcaccattgagaccgtgaagatactttgtattgtcctattagtgttatatgaacatacaaatgcatctttgatgtgttgttcttggcaataaattttgaaaagtaatatttattaaatttttttgtatgaaaacatggaacagtgtggcctcttctgagcttacgtagttctaccggctttgccatgtgcttctgccaccctgctgagtctgttctggtaatcggggtataataggctctgcctgacagagggatggaggaagactgaaag

SEQ ID NO: 48902 - DNA, 489 bp, Homo Sapiens
atctctttaaaattacctcctgtgtaaccaccaccaaatcctatcttctaccacaattaccccttcccccaatgccaagaccaaagcacaataatgaatatttttattgaagttcgatattcataaataagttgcaaaataagagttggatatatttttaattcacaatagaaaaagttgacaacatagaaaatgctgctttgcactgaaatacttaaaattatgaaagttttcaagtaaagaaattaaagccttttataaaatccaaccaacattcttgatttttcatttttatgaacttgatcagaaaaattcatcttttttaaccctgccctaatttttcttgaggaattaaatagagcaaactattttcaggttatgcttacaataaaatatacttaagaaaatgactgaagatgtatgtttttgaatgttttgattaaataaatgtacacatttagaacaaaaaaaaaaaaaaaaaaaaaaaag

SEQ ID NO: 48903 - DNA, 860 bp, Homo Sapiens
gtggctcctggagttggcttggctcctggagttggcgtggctcctggagttggtgtggctcctggcgttggcgtggctcccggcattggccctggtggagttgcagctgcagcaaaatccgctgccaaggtggctgccaaagcccagctccgagctgcagctgggcttggtgctggcatccctggacttggagttggtgtcggcgtccctggacttggagttggtgctggtgttcctggacttggagttggtgctggtgttcctggcttcggggcagtacctggagccctggctgccgctaaagcagccaaatatggagcagcagtgcctggggtccttggagggctcggggctctcggtggagtaggcatcccaggcggtgtggtgggagccggacccgccgccgccgctgccgcagccaaagctgctgccaaagccgcccagtttggcctagtgggagccgctgggctcggaggactcggagtcggagggcttggagttccaggtgttgggggccttggaggtatacctccagctgcagccgctaaagcagctaaatacggtgctgctggccttggaggtgtcctagggggtgccgggcagttcccacttggaggagtggcagcaagacctggcttcggattgtctcccattttcccaggtggggcctgcctggggaaagcttgtgggcggaaaagaaaatgagcttcctaggacccctgactcacgacctcatcaacgttggtgctactgccttgggggaaaaagtaaaaccctttgtaaccccttcccatgcccctcgaactccccacccccaggaagggaacgggcaaggccgggccggcctttgaaaaacccac

SEQ ID NO: 48904 - DNA, 620 bp, Homo Sapiens
  misc_feature (582)..(582): n is a, c, g, or t
atttggatgctgtcagctaagttcacttctgaactaaggggttcctccaaatgttggctgaaattcatcccaaggctggtctgcaaagtctgcaattcataatggagctactgtactggctattggaaggaggagattctgaagataaggaggtaaaacctgtttagaaattaaaaatgagttacgatttaaagaaaattcagatgactcattgtgagtgctagttctcttgtaggatgccactggaaatgttgaaatgaaaaatattcagccgttggtctttgaaatttcctgtgatgtgtttcaatctagatgcaaagaacatggaaaaatcaaagtgctcgagtggtttaaatatgttttgggtattcctgtttatagactataatacttttccaattaaaatcctcagttgtcacgcagaagaaggttaagctgtatttgattgccagttttactgaaaatgcttagtattttacagtatcaccaaatatattttgtttagccaaggtataggaaaaataaaataaattgtataggttgacttttttctaaaatgtctttattggattgaatgaatgnttatacctgaaaaaaaaaggttcaaaaaaaaaaaaaaa

SEQ ID NO: 48905 - DNA, 946 bp, Homo Sapiens
ctcgggcccatggaaacagtggcatggttcgtgccaaattccgaagcaatcttcctgctaaggccattggacacagaatccgagtgatgctgtacccctcaaggatttaaactaacgaaaaatcaataaataaatgtggatttgtgctcttgtatttttaagtggattaaaaaacttactaccttaaattgatttgctacatgcttaaaatgatagaggttgctcagcatttttggagtacaagggggtcagagagacatgtgatgaaaattacagggcgagtacagagatttagaagggaacgggttttaatgcgagtttctttgacagagtcttgctctgttgcccatgctggagtgtagtggtgctcgctgcagcctcacattcaaaggctcaagcaatcctcccttggcctttgaagtagctgggaccacaggctcatgccaccatccctgggtcatttttaaattttttgtagagagggtctgactcttgcctatgctggcttcaaactcctgggctcaagcaatcctccttccttggcctctcctgaagtgctgggatacagttatgagccaccacacctgccaagtgctttgtgatactatgcatttgttcaatgcagattgggaaacttaaaatttgaatggagattatgttgatgggctttggcagttcatttggatagactgggatgagaagctcttgggacttgtgactggacaaagcattccagtatattaaaataaaattaagccatattactccactcataaaaagcaatcctatggtaggtacatggaggttgggaatagtgcacggaaaggtggcagctttctttggcttcatgttttaatctggtaaagttcaagattgcactttaagcaggcctcctaaatattttagawttcttggggatatgctaaaataaammactaargcatca

SEQ ID NO: 48906 - DNA, 874 bp, Homo Sapiens
ttaggctagtacgagctgggtgtctaatcggccgaggcatgtgtggggtggggagtgaagctcccacatgtggaatggaagccctttgcattggccaagggcagaggtgggagattgatggttcatttttccttggccctagcccttagctacagggaggcctagagagaggacacttggcaagtttaggatgggaaacaaggttaagcctggctttgctattcagacctgtgcagccctgattttggggactgggcccaaggagccatgagtcttaggcttgacactaggggccttacatggccaggtctcatatgggatttggagaaggcatttttcctaacactgatactacaagtcaccaatactcttgatgccttaagatgctagaaagccttggagagtggaggcagcagagatgggaatggaggtctgaagaagcttgctgctgttggggaatgtgtttgggaaagtcaagagtggtaggattggttggctgggcgcggtggctcacacctgtaatcccagcactttgggaggccgaggccggtggatcacttgaggtcagaagttcgagaccagcctgcccaaatggtgaaaccccatctctactaaaaatacggaaaaaaaaaaaaaggagtgctaggtttgggccagttacgaacgcgggggagacctggcggggcttggtgggctcacacctgtatttctagcacttggggaggctgaggcgggtggcctcatgaaggtcagagtttagaccatcctggctactggggaacctgtctctcctaaatcaaatgcctggctggtgtggggcctgtttcccgtatcggggctaggcgggatcgtcaccagggtgagtgctggccgt

SEQ ID NO: 48907 - DNA, 393 bp, Homo Sapiens
gtcgacctcaactctaattacatctaagttagtcttgctcacgttcagtttgtacagttgtgtgttgacttactatgttttgaaagtggtgacttctaccgaatgagtggaagttcccattgtcaaaaaaaataaagacctgcttgcagtattcatgttgacaacagagtaaaagagaatactgtaaagaattactgcaaatatttcctgtttatgttatttgccgttgtttgaagatattataaagggttaattgtatatttatatcatgtgctttatcgttttcccctcatgtatccaagtaatttttatttacatacaactaaataaatgttgtcctctttgaaaaaaaaaaaaaaaaaaaaaagtcgacgcggccggcaatttagtaga

SEQ ID NO: 48908 - DNA, 440 bp, Homo Sapiens
agccccgatcatgggcaagggcagcctttcaactgtttttgaacaaagaagacagtaattactaaatatgcagtgttaacatgtatatccagattctgaaaatgtgccctcaaaaaaaaaaaaagatcttcccaaactatcattccacacatttaacctccttccataccaaatctttctcataaggaaaaaaaaaaaaaaaaaaaagcgaattttattccctcttccctaatttcttgctatgaaggattggatacttatcacactaaaaaaattatgctgaaatgtaatccttaaggggcattttaatttctcattttttatttcaaaactgccaaacagaaatgcgaatttcagatatttaaagccagcccatagtgaatacagtgctacatcaagaggaaaacggccgggcgcggttgctcagcttttgatgtgtt

SEQ ID NO: 48909 - DNA, 886 bp, Homo Sapiens
gtccggaattctcgggatctggatttggtgttttcttcaaccgaggagaactggagactttagggactacatatcctgcagagactttatcccctggaggtaatgctactcagagtggaacaaagacttctgctagcaaaactggaataccaggttcatcgggattaggcagccctcttggccgaagtcgacatagtagtagtcagtcagacctgaccagttccagcagtagttcatctggcttgagcttcactgcatgcatgtctgacttttccctttatgtatttcatccatatggagcagggaaacaaaaaactgctgtttctggcctcacacctggatcaggaggattagggaatgtggatgaggagcccacttcagtcactggtcgaaaagattcactcagtataaaccttgagtttgtaaaagtgagtttgtcacggatcaggcgttcaggaggtgcctcattttttgaaagtcagtctgtaagcaagtctgcaagcaaaatggatactacgttaataaatatatctgctgtttgtgatatagggtctgcctcctttaaatatgatatgcgccgactcagtgaaattctggcatttccaagagcatggtatagaagaagtattgcaagacgtctattccttggagaccaaactataaatttgccaacatctggcccagggacacctgattccattgaaggggtaagccaacacctttcccctgaatcatcaagaaaagcttactgcaagacctgggagcagccaagtcagtcagccctccttcacccacatgcctcagtcaccctaatgttggttcatgagcatatggacaaacagcacccatgtccaccagggaacaggtaggaacaggagccctaaaa

SEQ ID NO: 48910 - DNA, 587 bp, Homo Sapiens
gcacgaggttgaaccaaacacctgtattccaacattttacacagcggtctgggcaccctgtgcctaggagagccagctacgtgtctacctgagtctgacctgggccaggggctgttatcttgggaaagccagaatgtcattaagaaagggacaaataggcagttgcttgtgtagcaaggcagccaccaggttgctcaaagggggttctgcataaaccaacatattttgttgttgcttccagggcagcagaagaagcctttgtaaatgacattgacgagtcgtccccaggcactgagtgggaacgggtggcccggctgtgtgactttaaccccaagtctagcaagcaggccaaagatgtctcccgcatgcgctcagtcctcatctccctcaagcaggccccgctggtgcactgaagagcaccctgtggaaacactacatctgcaatatcttaatcctactcagtgaagctcttcacagtcattggattaattatgttgagttcttttggaccaaacctttttgtctttagagttgttcattgtttgtgattgcatgtttccttccttcaactgtgttctccctggcat

SEQ ID NO: 48911 - DNA, 654 bp, Homo Sapiens
aacccacgtctggctggagagataagaccaattataatcagcaagacatggccaggagctaaattataaggaagaaactgctactgagggggatcaggaaaggatgcagaaggatgtgctggaaaaacagaggagggtttctcagaaaaagcatcttccgtccaaagaaacagtgtttgtacaggatgaaaagtctgaggaggtcatcttgggcaaaggaaacggcagctataaatatttgtgaattaacagatatgcttccctgcacaatgaattaccctttttgtctccagtaagcacccagatcttaatgtcagcttttgcaagttttgaaatggtttctggaactccatcctgtagcttgtcttcaatagctgtagctcccaggagctagaatgtatattacaaaaacaaaaaacaaaagggaatttagcaaacaaaccaaaagtttttctgtaattccgggtttgccaaccctgttaaaaagaagggctaattatacatccgggtgagcagctctccgggggccaagggccagtgttaacagcgaaggctgccatgtttcacaattactgcaaaccaacacaagttaaaaatctttttcccctaaaggatgacctatttcacttctaccaagacaaaattgccacgtcc

SEQ ID NO: 48912 - DNA, 703 bp, Homo Sapiens
gaagtttaataacacattgcagagtgattcttgaagaacattccacttgtgaaaatgaagttagtaaaagcagacaggatttacttaaatccattgtttcaagaatgaaaaagggagtagaagatgatgtttttattcctctgtatccaaagagtgctgtagaaaacaaaacatcacctcattcaaagttccaagaaagacagttctggtcaggcctaaagctcttccgcaatattcttctttggaatggactccttacagatgacaccttgcaagaactaggactagggaagctgctaaatcgttaccttattatagcacttctcaatgccacacctgggccagatgtggttaaaaagtgcaaccaggtagcagcatgtctaccagaaaaatggtttgaaaattctgccatgaggacatctattccacagctagaaaacttcattcagtttttattacagtctgcacataaattatctagaagtgaattcagggatgaagtcgaagaaataattcttattttggtgaaaataaaagctttgaatcaagcagaatccttcataggagagcatcacctagaccatcttaaatcactaattaaagaagattgaataaactttattggaaaatgctaaaattttaatatagttacactcagttcctttgtttgagaaaaagctggtgcctctctcttctttattcc

SEQ ID NO: 48913 - DNA, 672 bp, Homo Sapiens
aattcccgggataggacccagtttccagagagcaggcggggccgcccagtgggtcaggcacagggagccccggtcctatcttagagcccctgagcttcagggaaggggcgggcgtgtcgccgcctctggcatcgcctccggttgccttacaccacgccttcacctgcagtcgcctagaaaacttgctctcaaacttcagggttttttcttccttcaaattttggaccaaagtctcatttctgtgttttgcctgcctctgatgctgggacccggaaggcgggcgctcctgtctttgtgctctttctaccgcccccgcgtcctgtcccgggggctctcctaggatcccctttccgtaaaagcgtgtaacaagggtgtaaatatttataattttttatacctgttgtgagacccgaggggcggcggcgcggttttttatggtgacacaaatgtatattttgctaacagcaattccaggctcagtattgtgaccgcggagccacaggggaccccacgcacattccgttgccttacccgatggcttgtgacgcggagagaaccgattaaaaccttttgagaaactcctcccttgtctagccctgtgttcgctgtggacgctgtagaggcaggttggccagtctgtacctggacttcgaataaatcttctgtatcctc

SEQ ID NO: 48914 - DNA, 577 bp, Homo Sapiens
aaaagttcgtagtagcatagacacaacagtgataagagaatcttactaggagctgtgttgttaataggctctttaggctgctctctagtggaaatgctgtgaggctgtggcctgcactggctcatttggagttgacagtgatggggagcttggtaagggattgatgcttacaatggccgtaccttcatactgggattctttggaaaataaaaagccctgttgcttcatatcacattgttcatagtaatctcactctctgggagagtcattttcttgaagcaccaggaagtagctatcacaaatccagaagaggatttgaattcaacccccactccccaatttcttctccactctctttcacactttagctggccacactggccttttgtttcagtttcagtctccctgatgtaaactgccttcttgattgcttttttacttttaaccacctctgctgtgatttgtattgttgaaataacttctacccactccaatagaatgctaaatgttagattaataagaggaatgcctgtttctggctcaaagaattagtggttagtgcaaaaaaaaaaaaaaa

SEQ ID NO: 48915 - DNA, 567 bp, Homo Sapiens
ggtaaacatgaacattagaacacttaatgtgctgggccttttataggttaacactgacatctcaggctgaactatatacattttccttcacaaccatatcaatccttataaactatggatttatgctccttaaaacaatatataatgctgatcactactataaatgcgtggttttaaccaactgtactgaaacagctttgagtttatattctgtttggatatttggagaaaacaacaagtgctctcaagagtatttgcttagaggccggctgtgtgagtggataactttgaaagctgcttttgagacgccagtgtctggcatttcctgcattctggcctggaggccggacgtgaatctgacttctagtaaaaatacacggttcccttgacaaagtcgagctgtttatcccagagactgcacaattttccgttgataggcatggaccaatgctaactggaaatcattgcaaaaagtttttttgtcgggcggagggtgtggtgttaagataaacagtgtgcaacagaagaaattaaaactggaagaaattaaaagaaaaaaaaaaaaac

SEQ ID NO: 48916 - DNA, 793 bp, Homo Sapiens
aatatcattcatgttttcattaacctaaaataagttttcttgctgcttatcatccttcagctcttgtccatattcatacatagcattatgttcagtatttcattcaaccaatatgggtatttattgagaacctactacgcctcctgttatgttcctgtgccaggcacataacaggaaaaataactgtaaacaaaacagacaaaaatctctgccctggtagacattgcattataataatcagtagatatatgtattttatgcattctgcttttttcatgtatatttcaaacatttccccatttttacttgtcctcataaatactttaaatggctgtgtagcatgccatctgtgttttttgaactgtaatttgcttaagctttctgcatgggcatttaagtgagtacctatatattacagttgttgggggactggttacattgttgtgaatgtctttatggatatgacttttatgtctgttgggccttgtccagagtctgggctagtgggtccagatgatgggttccagtccattttttccatttaatataatatgacctcagataagtctgtcagcatctctatgctgaagttcctcatctgtaaatatgataacacctcttccacattaatgggtgatatgctcagaaaaaaacaaaaaaaaatgttgggggccggccgaaagttttaaacatcgttgggcgggccagtaggactggccaagggccaagagccggcagaacgggggtccccaaaagcggggcacggcggaaccaggggggcgggtaggccgcg

SEQ ID NO: 48917 - DNA, 619 bp, Homo Sapiens
aaatacttactaaatgactaaacaaataaaagatagtctctaactttcatcataatctcaaagagcttcatctggaagaagtttagacacaaatgggtaggcaaagtatttcttaattgctggtgcaagaccttacccttgtcttaataattatcctgtctaagtaatacaccttttaagaaacccctgaaaggaagatgatcgtccttggtagatactgaaatctgaggtaaagtggcccataaactgttttgaaatagagaatttctaaaatatgtagggtattttgaatatagctgagaaagctgctatgaactgaaggtttacgtcccctacaacattcacaaatcccaaatgtgatggtatttggagatagggcctttgagaagtgattaggtcatgaggatggaaccctcatgaatgggctgcatggaaaaggacccacagagatgccttgtacttttcccatgtgaggacacagcaagaaagcactgtctttatgaacagaagtgggccctcaccagaccccaagtctactggcaccttgatcttgaagttcccagctcccagaactgtgagaaataaatttttgttaatacaccacaaaaaaaaaaaaaaa

SEQ ID NO: 48918 - DNA, 569 bp, Homo Sapiens
  misc_feature (440)..(440): n is a, c, g, or t
ggatactgactgcccggcagtgcttctcctcctgccatatgcctctcacgggctatgaggtatggttgggcaccctgttccagaacccacagcatggagagccaagcctacagcgggtcccagtagccaagatggtgtgtgggccctcaggctcccagcttgtcctgctcaagctggagagatctgtgaccctgaaccagcgtgtggccctgatctgcctgccccctgaatggtatgtggtgcctccagggaccaagtgtgagattgcaggctggggtgagaccaaaggtacgggtaatgacacagtcctaaatgtggccttgctgaatgtcatctccaaccaggagtgtaacatcaagcaccgaggacgtgtgcgggagagtgagatgtgcactgagggactgttggcccctgtgggggcctgtgagggtgactacggnggcccacttgcctgctttacccacaactgctgggtcctggaaggaattataatccccaaccgagtatgcgcaaggtcccgctggccagctgtcttcacgcgtgtctctgtgtttgtggactggattcac

SEQ ID NO: 48919 - DNA, 562 bp, Homo Sapiens
ggtccacccaggattagtgaccaggttttcaggaaaggatttgcttctctctagaaaatgtctgaaaggattttattttctgatgaaaggctgtatgaaaataccctcctcaaataacttgcttaactacatatagattcaagtgtgtcaatattctattttgtatattaaatgctatataatggggacaaatctatattatactgtgtatggcattattaagaagctttttcattattttttatcacagtaattttaaaatgtgtaaaaattaaaaccagtgactcctgtttaaaaataaaagttgtagttttttattcatgctgaataataatctgtagttaaaaaaaaagtgtctttttacctacgcagtgaaatgtcagactgtaaaaccttgtgtggaaatgtttaacttttattttttcatttaaatttgctgttctggtattaccaaaccacacattggtaccgaatgggcagtaaatgttagccatttacagcaatgccaaatatggagaaacatcataataaaaaaatctgctttttcaaaaaaaaaaaaaag

SEQ ID NO: 48920 - DNA, 554 bp, Homo Sapiens
tttttttttttttttttataaaaagaagtctgaaaatcattatggtatataatctacccttaacagagcttttcttattacagtgctaaaatgatttctgataaaatggtccctaactcaactagaaggctaaaaatacaagaatgaaagaataagcagagtactcatgatgcctttgagaaaaatcaaaacatcatgtagggtgacctagtttccaaaccaataaataagtagtattgtaatattaaaggaaaactgttccaatcatttaaaagtacttattaagtactgctttttacagttatgacaactgtttctttctatgcatataaatcaaggaaccaaatatctgtagccatggaaatgtctgactagaaatatttatattgaattctgaatacaaaatgtccctgtggtagaaaacttactctttatgcctggtgcagtataattcccaagtgtactgtctaccagaaaaaaaaaacaaaactaataaaaaatgaaatatgaaaattaaaaaaaaaaaaaaaaaaaaaaaaaaaaaacctcgtgcc

SEQ ID NO: 48921 - DNA, 654 bp, Homo Sapiens
  misc_feature (8)..(8): n is a, c, g, or t
  misc_feature (544)..(544): n is a, c, g, or t
  misc_feature (550)..(550): n is a, c, g, or t
  misc_feature (581)..(581): n is a, c, g, or t
agtggttnatttagaaagggtttcaggccaggcacggtgactcaggcctgtaatcccagcactttgggaggccgagacaggcagatcacttgagaccagtagtttgagaatcagcctggccaacgtggtgaaacctcatctctactaaaaatacaaaatttagctgggtgtggttgcgcgtgcctttagtcccagctactcgggaggctgaggcaggagaatcgcttgaacccaggaggtggaagttggcagtgagccaagatcacgccactgtactccagcctggccgacagagcgagactctgtctcaaaaaaagaaaggttttctaaactaatggttaaaacagaattttcttgtaaatagggaagttggagcattctggttaattgagattttgctctgtattgacacagctcgcaccagtttggttcaggagctacctccttgtcattgaattgacgagttacaatgtttggtattcggatacattcagcaagaacacttgaaaactcctcaccaactatttttaaaggcttactttgnttttgnttttattttttcactggctattttggataanaggatgtttacatcttaatgtaaaaaaatgaaaacaggtataaatgttttatgtatagaaaaaaaaaaaaaaa

SEQ ID NO: 48922 - DNA, 573 bp, Homo Sapiens
ggcaatgaggccctgcacagcctgacacaggcaggtgactactccatgcgcgtggacctgcgggctggggacgaggctgtgttcgcccagtacgactccttccacgtagactcggctgcggagtactaccgcctccacttggagggctaccacggcaccgcaggggactccatgagctaccacagcggcagtgtcttctctgcccgtgatcgggaccccaacagcttgctcatctcctgcgctgtctcctaccgaggggcctggtggtacaggaactgccactacgccaacctcaacgggctctacgggagcacagtggaccatcagggagtgagctggtaccactggaagggcttcgagttctcggtgcccttcacggaaatgaagctgagaccaagaaactttcgctccccagcggggggaggctgagctgctgcccacctctctcgcaccccagtatgactgccgagcactgaggggtcgccccgagagaagaccagggtccttcaccacccagccgctggaggaagcttctctgccagcgatctcgcagcactgtgttacaggggggga

SEQ ID NO: 48923 - DNA, 709 bp, Homo Sapiens
caccaccatgcccagctaattttgtatttttagtagagacagggtttcaccatatggtcaggctggtttcgaactcctgacctcgtgatctgcccgcctcggcctcccaaagtggtgggattacaggcgtgagccagcgcacccggcaacaataacatttaataggcatgtctcattctaatgatatataccttctacctagtgggcacttgtacatatttattttttattttatttattcattttttttgagacagagtctcactctgtcaccaagttggagtgcagtggcacaatctcagctcactgcaacctccgccttccaggttgaagtgattctccagcctcagcctcccgagtagctgggactccaggcacgtaccaccatacccagataattttgcatttttagtagagacggggtttcaccatgtggctaggatggtctccatctcctgacctcgtgatccgccaccttggctcccaaagtgctgggattacaggcatgagccacacagctggccgtaaatattttttgaatttgaatctgttttggaagccaaatatgtttggaagccaaacaattaagagaagtaaaattttaaccctagtaggtttcgcagattcatccccagatatgtttgttggttgtgttatcaacaaataaatgagtgtctttcaaaaaaaaacaaaaagggggggggggttg

SEQ ID NO: 48924 - DNA, 462 bp, Homo Sapiens
acaagttgtgcaaagtgagaaagatctttgtgggcacaaaaggaatccctcatctggtgactcatgatgcccgcaccatccgctaccccgatcccctcatcaaggtgaatgataccattcagattgatttagagactggcaagattactgatttcatcaagttcgacactggtaacctgtgtatggtgactggaggtgccaacctaggaagaattggtgtgatcaccaacagagagaggcaccctggatcttttgacgtggttcacgtgaaagatgccaatggcaacagctttgccactcgactttccaacatttttgttattggcaagggcaacaaaccatggatttctcttccccgaggaaagggtatccgcctcaccattgctgaagagagagacaaaagactggcggccaaacagagcagtgggtgaaatgggtccctgggtgacatgtcagatcttt

SEQ ID NO: 48925 - DNA, 353 bp, Homo Sapiens
tttttttttttttataatgtaatatgtagtctgggagaaaacatctcccaagttctgttgggccattctccctattggaagtatactaatagtatctgctcactggaacatgccatatatgtcacctgccccacatactgatatcacaataatatgtaaaaccttcatttaaattgtttttgaatgtgtatatcaattgttacagcatatgactgaacttttttcatccttaaaaatttttttaagcaatatgacacaaccactaatgaagaaaaataaagattactgattgacattaaaaaaaaaaaaaaaaaaaaaaaaaaaaaaaagcctacagccgcggccctcgtgcc

SEQ ID NO: 48926 - DNA, 817 bp, Homo Sapiens
ttccagttcacctaaaggctgattgtgcaggcccagcactgtggctggactgccgcgccacgggcaccaggacccctaagaccaagtgacaactgggagagcctcagcatatactcttctcctccgatctcacagcctgtcatgctgctcagtgtggttctcacccctgcaagctcaaattcagttccctgaatggagtcaggtgctggaggccgtggcagcggagggtggttggggttggggctgggggtggactggtgtgagggcagaccagggccaggtagacggggctgtttggtgcctgaaggatggcagacgcctggtgtcaggaggggccgccaccaaggagcagcagctggggcagaggagctggggtcaggggccacccctctctgccgatctccctgcctgggctggctgtgaggccacctttgtcccaggcccagcctcaaggcaaggagggcgcttcactgaggtgtgaattgtacgtacaggctttttatataccaaaagtattttttgactagaccattcaaagctacccgaactatgttggaaattttttttttctcattaaaatacaggcccttaggctctatttttcatgtatgagtcgtgtgtaatttatgtaaaaatgtgtgtacagactcactgatgcagcactgtagcccatcaccttggagcactgactgtacatagtgtggtgaagaaaagtgaacgcccttgtagagcagcccgaccacaggagcatggccgctgccagcccagacgctgctgacgctgtgtaaatgtgcacaataaacccgtctcaccccgg

SEQ ID NO: 48927 - DNA, 916 bp, Homo Sapiens
aaagggcatacatagagagaaaccctatgaatgtaaggaatgtggaaaattcttcagctggcgctctaatcttactaggcatcagcttattcatactggagaaaaaccctatgagtgtaaagaatgtggaaagtctttcagccggagttctcacctcattggacatcaaaagacccatactggtgaggaaccctatgaatgtaaagaatgtggaaaatccttcagctggttctctcaccttgttactcatcagagaactcatacaggagacaaactgtacacatgtaatcagtgtgggaaatcttttgttcatagctctaggcttattagacaccagaggacacatactggagagaaaccctatgaatgtcctgaatgtgggaaatctttcagacagagcacacatctcattctgcatcagagaacccatgtgagagtgaggccctatgaatgcaatgaatgtggaaagtcttacagccagagatctcaccttgttgtgcatcatagaattcacactggactaaaaccttttgagtgtaaggattgtggaaaatgttttagtcgaagctctcacctttattcacatcaaagaacccacactggagagaaaccatatgagtgtcatgattgtggaaaatctttcagccagagttctgcccttattgtgcatcagaggatacacactggagagaaaccatatgaatgctgtcagtgtgggaaagccttcatccggaagaatgacctcattaagcaccagaagattcatgttggagaagagacctataaatgtaatcaatgtggcattatcttcagccagaactcttcatttataggtcatcaaatagctcacactggagaagcagttcttaccatgcaatcaatggtgggacagcgcttgtttaatacctctaaactt

SEQ ID NO: 48928 - DNA, 684 bp, Homo Sapiens
  misc_feature (2)..(2): n is a, c, g, or t
tntttttaagggaagaagaaaaaaaccctctcctttcttgaaatctagattctatttaagtgatactatttgtctatgaaaaatacaatgagctatggtgaagtgatttgtgtaaatgatctcattcaggaggcactgaagggacagacacttgtcattgccaagtaagtcacatttaaattccctcaagccttgagaaataatgtgagggaaagtgcaaaaatagcacagtcattcctttggactaagtcaactcctaggcctcctgagagcactgtagctgtgtgttcatctatatgcaaagagaaataaaaagaatcaactatatttgtcacagggtactttcctatataccagcgtacacctctatcaatacattttatgctgagactttcggtaaggaaagactgaccatacacactgcctcatgcacagatatagacacatattgaagatactttctttcccctgcaatgcagaaaattgcatgagcacacacaaccacactaaaccaaccagaatgaaactagaggcagctgtatctgattgaaactggtgagaattgagattgacagagttacagggctaggaggttaatgagtccatactcctgcctccagtcagaactgtcctaagccattccaagtaaatgacagctcagcctcttggaaaaaaaaaaaaaaa

SEQ ID NO: 48929 - DNA, 781 bp, Homo Sapiens
ttaggaaacgcgacttggttttttcaccacctacttcttgcccctggctaacaccctgaagagcaaagccatggacctggctcaggcaggcagcacagtggaatctaagatctacgacacactccagtggcagatgtggacactcctgcctgggttctgcacaaggcctacagatgtggccatctccttcaaagggctggcacggacgctgggcatggccatcagcgagcgtccagacctgagggtcaccgtgtgccaggccctgcgcaccctcatcaccaagggctgccaggcagaggctgaccgtgctgaagtgagtcgctttgccaagaactttctgccgatcctcttcaacctgtatgggcagcccgtggcagccggggacactccagcccctcgccgggctgtgctggaaaccatcagaacttacctcaccatcactgacactcagttggtgaacagtctcctggaaaaagccagtgagaaggtgctcgaccctgccagctctgactttaccagattgtctgtcctggacctggtcgtggccttggctccgtgtgctgacgaagctgccatcagtaagctatactccaccatccggccctacctagagagcaaggcccacggggtgcagaagaaggcctaccgagtgctggaggaggtgtgtgccagtcctcagggccccggggccctcttcgtgcagagccacctggaggacctgaagaagacactgctggactcgctgcggagcacctcctcacccgccaagaggccccgtttg

SEQ ID NO: 48930 - DNA, 585 bp, Homo Sapiens
tgcactccagcctgggtgacagagcaagactctgtctcaaaaaaaaaaaaaagaaagaaaaaagaaaatacagtgaactccagatgccactggaacatgggttccagcagcctggccaagctatgtgtcattctttttcctcatgatacccaggatgggctttgtgaggaggcactgtgcggttccagtggctttctgttacagctggccacaccatacaagcaagtacatcatctgcatgcactgctcctcacaggagcttgcacttcattcatatttattctgccctcatttaaggtataagcttagtgtcctaatatatttatttttggaaagggccaagttacaaaacatcttttttttgaggctgcactgttgatatgtcatgcagtggccaccaagaaagtatatactcgtgttagatactgattacatcatttacatcacgctcagtatttggaattaaagatgtgaatgttctgtgaccagagtagggttgacacaaatggaatcagctcctggtggactaagaatcttgaaaaaatctggccacctcatccactacatctggattgagtgtactgc

SEQ ID NO: 48931 - DNA, 583 bp, Homo Sapiens
gatatcgaattcgtatcggccattatggccgggagagttctggggtgtctccaccatggcctggacccctctctggctcactctcctcactctttgcataggttctgtggtttcttctgagctgactcaggaccctgctgtgtctgtggccttgggacagacagtcaggatcacatgccaaggagacagcctcagaagctattatgcaagctggtaccagcagaagccaggacaggcccctgtacttgtcatctatggtaaaaacaaccggccctcagggatcccagaccgattctctggctccagctcaggaaacacagcttccttgaccatcactggggctcaggcggaagatgaggctgactattactgtaactcccgggacagcagtggtaaccatgtggtattcggcggagggaccaagctgaccgtcctaggtcagcccaaggctgccccctcggtcactctgttcccgccctcctctgaggagcttcaagccaacaaggccacactggtgtgtctcataagtgacttctacccgggagccgtgacagtggcctggaaggcagatagcagccccgtc

SEQ ID NO: 48932 - DNA, 862 bp, Homo Sapiens
tctagcgaggtgacagcgtagaaccagggaattatatatacatgtatatgtatagatctgttttgtttgtttttccccaagggtttagactcccttttatgctttttgaagcttcaaagacattcttggactattgggaagctgtaagaagcagcaaggttcagaacaaaaagcatgtattcagggagtcagttagaattaacccggatccacctttaattataatatagggataatggcctccaattctttatttagtatggtaggagatctttcaaatgatattgcatataaagtagctggcacttaagagctaatatttacaagggcctgttttctcttccctccttaaaacagatttattgtccatcagctaacttgtttaactttttaattacaataagtccttagtggagaccagattattaggtgcgagtatatcatatcaaatgctattacatttaaaatatctgaatgagagagatatttcccaatcttgtataaaaagtaataatagctagatggcagagtcacagtacattaaaaatatatgtccccaaaagtaaaaaaaagaaaaaaaatattttgtcccaattccccctcaccagcatatacacagttcattggcaataatgtgggaacttaaaaaaaaaaagggattttttccctcccataaggggaaaaaaaaattgtggcccccaaaattccaaatgtattaaaaatcaaaaaaatccgttatttaagtataaaacctttgggaattttttttttaaaaaaatgtgaaaaaaaaattttttttgggaaccttttctcagtggaaaaattttttaatttttccacccttttttttaaacaattggga

SEQ ID NO: 48933 - DNA, 522 bp, Homo Sapiens
  misc_feature (61)..(61): n is a, c, g, or t
ctcatttgtcctgtcttcttcactcactcttggaaaagtcccaacagagatgaagacgtgngaaaaaaaaatcggggtcggggtgtgctggtggggagagggcagagatccggtgaggaatggcttccaccccctggcccattcccctgcaggctggaagatctttctcctgtctggcttctcttcttttcaattcgctgcaccaagtgcttccagtggcccaaaaatgctttttgaagtgtgttttgaaacagcccccaccaacatacaccccaccaggagtactgatcctgcctcccttcatgtctaggggaagcattcgcctttgagcacttgtttgcaaatctggggagtttgagacctcctagcatctcttcccttctttccctgcagtctattcactcccgcagccaaaaaatctctggcgttcaggttagcagtttctgggttggtttgtgtgggtttttgttgttgtttggggcttatttttttcaaaaagtgataaagacgggtgggttggag

SEQ ID NO: 48934 - DNA, 804 bp, Homo Sapiens
cttgatgacctaccggggccacggagtgctgcacaccctcatccgctgccggttctcccccattcatagcactggccagcagttcatctacagtggctgctccactggcaaagtggttgtgtacgaccttctaagtggccacattgtgaagaagctgaccaaccacaaggcctgtgtgcgtgacgtcagttggcacccctttgaagagaagattgtcagcagttcgtgggacgggaacctgcgtctgtggcagtaccgccaggctgagtacttccaggatgacatgccagaatctgaggaatgtgccagcgcccctgccccagtgccccaatcctctacacccttttcctcaccccagtagatccaacctccagccccatatagggtgaacctcttgataagctctctgcctcctcctccctttctcccttgtggggaatgtttggaggaatcactggcatttgatggggaataacataagcctgggctctgagcctcagctgagccctggaagattctccccatggggcagagtggtctccttacgtgctcacacccagtcagcttgggtccctatctctggccagagtttggcaggactgccattatctggggtgtggcctctgccagcaagagaagtgtcctgggctgttcttcaatcatgtctgacatgttaggggttggatcctagagtagatgcctgaggccacatctgaacagacctgtcagccaggcctgccaggtcttcacgttgaggattcaactggccaatcacaggacaggtgtcctggcctttcttcctga

SEQ ID NO: 48935 - DNA, 462 bp, Homo Sapiens
agaccctgtgccggagccacccagccgagccactgctgagatcctgaccctcagaaacagaagtaataaatattgttaatttaagctcctaaattgggggcagtttgttacacagtgatagataacgaattcatactccgtaattcccctcgcacatttgtggtgtctttttaaaaataccaattctcatatacacagtggtctgtttctgatcgctctgttgtgtttctcaggtatttttgtttctgtgcccgaactgataccgttctcactgttgtggctttgcagcctatcttaatatctggcagggtcggcctttcctctttgctcttatttttaaaaactgacctaagtttgggaggatggcttgagcccaggaggtcaaggctgctgtaagctgtggtcatgccactgcactcagcctggatgacagcaagaccctgtctcaaaaaaaaaaaaaaa

SEQ ID NO: 48936 - DNA, 931 bp, Homo Sapiens
aggtctctcgcatggtgcacgccatcaagatgggctggatccagcctcgccggccccgagaccccacccccagcttctatgacctgtgggcccaggaggaccccaacgccgtgctcgggcgccacaagatgcacgtacctgctcccaagctggccctgccaggccacgccgagtcgtacaacccaccccctgaatacctgctcagcgaggaggagcgcttggcgtgggaacagcaggagccaggcgagaggaagctgagctttttgccacgcaagttcccgagcctgcgggccgtgcctgcctacggacgcttcatccaggaacgcttcgagcgctgccttgacctgtacctgtgcccacggcagcgcaagatgagggtgaatgtagaccctgaggacctcatccccaagctgcctcggccgagggacctgcagcccttccccacgtgccaggccctggtctacaggggccacagtgaccttgtccggtgcctcagtgtctctcctgggggccagtggctggtttcaggctctgacgacggctccctgcggctctgggaggtggccactgcccgctgtgtgaggactgttcccgtggggggcgtggtgaagagtgtggcctggaaccccagccccgctgtctgcctggtggctgcagccgtggaggactcggtgctgctgctgaacccagctctggggggaccggctggtggcgggcagcacagatcagctgttgagcgccttcgtcccgcctgaggagcccccctkgcagccggcccgctggctggaggsctcagaggaggagsgcaagtgggcctgcggstgggakckgcacggcgagcvagtgacsmggtgacykgcacggcgtggggactactggccgtggkckggcaccaaggcacaccagggckgakcacarcgascgtcgcgca

SEQ ID NO: 48937 - DNA, 871 bp, Homo Sapiens
cccttccagtatttcagtgacccacggctgatcaaagtactgttcccttcacttatcgctgcttgttacaacaaccatcagaacaagatcattctggagcaagagatgagctgtgttttactggccactttcattcaggatttggcacagactccaggtcaagcggaaaaccagccttaccaacccaaagggaaatgccttggttcccaagactatcttgagctggctaacagatttcctcagcaggcctgggaagaagctcgacagtttttcttgaaaaaagagaaaaaataaatgttttggttgattctgtatttgagtacccttgttaatattttaaattgtccaaacaaacattctaattgttccttaagaactcattttcccatgtttatactcttcccacactgtagatatggcatgtactttacactatttataatgactgtagatacttgaatgttctacttgctaattttgcaagttgagtttatttcatttatgcagagtatcttggagtttggtaatttccatcttatgataatatatactttgcatttgtgatatgggtgaaaggagacataaaattagcaagtctgttttgttcttgtaataaagtaacttattctgttttcattggtttggactttttccattgttcaaggaaaatacgaatcttgaaagaaaaatggtttactcccagctctgaagtttctttaataaggacttattaagtttaccacacaaaacaacaggggggcccccttttttttctccccccacccctcccaacacccaaccacccctccccacaccacacatcacacccatcaccccacacccccacctaacacccaccctcaccaacacc

SEQ ID NO: 48938 - DNA, 481 bp, Homo Sapiens
tgcggccgccaactgtggcagaacttgggaccatgcattggaccacacaaataaggcaaatgcccagcagtagccaatcaagcagtcatgcaccgctaagagcagtcatgcactgctaacaacgtttcagtcaatgatgggccacatgtagatggtggtcccgtaagattataataccttattttaactgtaccttttctatgtttagatgtgtttagataccattgtgttacaatggcctgaagcattcagtacagtcacatgcgagcaggtatgcagcctaggagcaataggccacaccacacagcctaggtgtgcggcaggtgtagcgcactctgatgcctgcacgacgacaaaatcaactaacagcaaactcctcagaccgtatccccatcattaagcaacacatgactgcagtttctttctttgcttctaggctcagcctacaaaagcttgctgctcatgctgccggagcagagct

SEQ ID NO: 48939 - DNA, 654 bp, Homo Sapiens
  misc_feature (489)..(489): n is a, c, g, or t
  misc_feature (609)..(609): n is a, c, g, or t
  misc_feature (616)..(616): n is a, c, g, or t
ggagatcactaggaatttactcagctggtgcgctcagtatagcctggctcttcagggaggtcttcttataacatgatggattgaatggatgtttgtttttatatttccaatctcaggtgccagatgtgacatccagttgacccagtctccatcctccctgtctgcatctgtaggagacagagtcaccatcacttgccgggtgagtcagggcattagcagttatttaaattggtatcggcagaaaccagggaaagttcctaagctcctgatctatagtgcatccaatttgcaatctggagtcccatctcggttcagtggcagtggatctgggacagatttcactctcactatcagcagcctgcagcctgaagatgttgcaacttattacggtcaacggacttacaatgcccctcccacagtgttacaaggcataacataaaccccccaaggaagcagatgtatggggctggcctgccccagatactcctncctactgcctcagctgctcagagggtttctcatattccagtcaagctttgaaaagtcactgaaaagttttgatggaaggggccatgaagactctgaaactgcctttgcaatcatctgagntatgacngtgggagatatacacaggcacctctgtgtgattctctt

SEQ ID NO: 48940 - DNA, 882 bp, Homo Sapiens
ttcatctgtaggatatggataacaatagttaagagttgtgagaattagaagttagagaccttactcagaatactagggagcaggtgttagggattttggagctttaccttttaagaacttttgtccatatagtagacaacatactcaccagtgaggacctcaaatagcaatatttctgtggtgaaatttggggatatttatgttaaataaacagcatgtcagtcaaggttgggttttcctgacaaaatttgaaagaatttctctggattttggttttcaggactggtgtgacttaacatacatggcatagatagtatacgtctgttaagtcagtaattacacttacttgagcacaggtactgttcaaggtgctgagaatacagtatagacaaattcctacccttatgaagctgatgttgcaaaaaaaaaaaaaaaaaaagcaattgacaaataggtggcagttgcccataatcatagccctggaaataatccgtataatacaagcgtggtctggttgatgggtatttttagatggttcttatgtctatagtaggaggcttaacattttagcagaatctgaacatctgagcatttagcctaaggcagttaactcctacaaagtgtccatgaaaccaatacatctgaaaaggcctatgctccaatgcagatctggaatccatgagcagttttggagtaccgatcagattaatgaagatactttaacaacctgccacctaatctggtggtaataggtaacgttacccctgaatttggcggaattggccaaggaaaataaagatggcaagcttacatcaaattttaaaagtatgggagggatggattatgtgggaataatgggtctcaaagggggttttccacaga

SEQ ID NO: 48941 - DNA, 775 bp, Homo Sapiens
  misc_feature (499)..(499): n is a, c, g, or t
  misc_feature (584)..(584): n is a, c, g, or t
ctttacttattatcttacagcgtatgtgtatatgattattttctagagggtcgtaccctttattaagctgtgagcttcttagggcaaggactgcaattcattaatcattttggagaaaagtgaataattctgaagaattcggtggttcatgagcttgcctggtatttgtttctctatggcttatcatctaagtgagataacagatagtagataattgataaatttaatctgttacctaattactgagaggattcgattcttgctttatgttattactgaaacagactgcccagtaatcttctctagagagcaattaggtttgcaatgagttattttattgagaatgctacttgaaattaaatgtttatagcactatcttgatataatttaaatataatttaaatgtgctgaagtatcttcattcagataacttgttaccccttaacaaaaggctgcttgagtattgtttctctcccatttggcaaacaccagatgcagngattaataaaggtcattatgctacttagtcatggagcgcttttaatgactgttacctgaacatctgctagattcacgatggcagntaccagaaacatctaacaaaatatacatgctgtgctttgaaaatctggcttggactaatctaaatgactacctaagaacatttgaatattccctgaagttttattaattgtgagaaagcccttatctttctgtaatgtgaacaatccaaaatgtcaacaaaatgctaatttggaatggctgtccttgacaa

SEQ ID NO: 48942 - DNA, 660 bp, Homo Sapiens
ctaagtgaacttaaaccacgtcgtggactcagctttactgtcttgttgttaccttcctgtactttcttaggccagtgatcagcaaaggtttcctttaaagagccagagagtaaaggttcccagctctgcgggccacacagcctctcacagccgctcagctctgtgctgtgtgaaagcaccaccagccagtgtgtaaatgcatgggccaggttgtgccagtgaggcctcatttacagaagcagtcagtggcgagatttgatctgtgggctacagtttgccgacccatgcatgaggcagtaaaaggccaagagcctggtataaattcataacgagaaaccaaggctctgaatcagccccgaagtgtaagcagcagcataatgatctggagcagcatcttggcgttattaaattcaacccattccgatggctgcgtcagcatctattgctctgtttattgtttttccttaagcaagcagttccatttctagaaatttatctcaagcacataaatctagagggggcacatcggtgttatttatgacgggaaaactgggaacagacacagccctaggctggaagaggcacagagtgatgtacagcatgggccagtggttaggagcagactcaggagccaggggacacggctccaattctagctct

SEQ ID NO: 48943 - DNA, 543 bp, Homo Sapiens
  misc_feature (487)..(487): n is a, c, g, or t
  misc_feature (490)..(490): n is a, c, g, or t
  misc_feature (492)..(492): n is a, c, g, or t
  misc_feature (516)..(516): n is a, c, g, or t
actcactatagggaatttggccctcgaggccagaattcggcacgaggcggcacgaggactttatagatctgatatctaagggacttattctgttgtaaagaaaactgccatttatttaaaataaatttaaaaatatttcagaagaaaaaagtgtttataaacattcttggcagagaagtcacaaactggccgggtctccaccactcctcgctacattcaaattactgttcagagcctaaagacactcaagtttgtcagctctggtagagtttcccactggcaataataattatttttcctgcatgagtttcaacactaaaagtgtcttatagccagaggtgttaagataccaaatctttgtgtgtgagcaaatcttgtatgacctggagttcttgtgcagttgtcaccatcagcacccagccagcttcttatattctcactgcttttatgacctactgttatgattaaaaaccaaccaacccaacancananaaaaaaaaaaaaaaaaaaaaaaancacttgcggccgcaagcttattccctt

SEQ ID NO: 48944 - DNA, 437 bp, Homo Sapiens
ctactactactaaattcgcggccgcgtcgacgtaattttgtttatagcaagacttggttaacaatcgtgcccctcctctatccccaccctggtcatttgaaagcattatgcctagcataagtccctgtgagatttatacatagcaaagagggatctgaaggactgaggcaagccactaattttaagcagatgattccttaaacactttggagaaatgagaaacagcatgataatcttagtgtaaacattgggctttgaaacataaagttctaaaactgatggtctcattgatttcccaactctgaggttcttggagcttggttagccacagaattgggcacattaaatgttatttcgcatgtgtattgtaaaccattttgagcttgatggaaaaggtaatgtaaaaactaaggatttaaaactgcaatgtcattttc

SEQ ID NO: 48945 - DNA, 563 bp, Homo Sapiens
ggaagactcctagctgtcctttttcctctccacacagtgctcaaggccagcttatagtcatatatatcacccagacataaaggaaaagacacattttttaggaaatgtttttaataaaagaaaattacaaaaaaaaattttaaagacccctaaccctttgtgtgctctccattctgctccttccccatcgttgcccccatttctgaggtgcactgggaggctccccttctatttggggcttgatgactttctttttgtagctggggctttgatgttccttccagtgtcatttctcatccacataccctgacctggccccctcagtgttgtcaccagatctgatttgtaacccactgagaggacagagagaaataagtgccctctcccaccctcttcctactggtctctctatgcctctctacagtctcgtctcttttaccctggcccctctcccttgggctctgatgaaaaattgctgactgtagctttggaagtttagctctgagaaccgtagatgatttcagttctaggaaaataaaacccgttgattactaaaaaaaaaa

SEQ ID NO: 48946 - DNA, 677 bp, Homo Sapiens
tagtggatccccgggctgcaggaattcggcacgaggagaaagccttcagtgactgctcagctcttgttcagcatcagagaattcataccggagagaagccctcgaatgcagcgactgtgggaaggccttccgtcacagtgcaaacctcacgaaccatcagaggactcacaccggggagaagccctacaagtgcagcgagtgtgggaaggccttcagttactgcgcagcgttcattcagcaccagaggattcacaccggggagaagccctcagatgtgccgcgtgtggtaaggccttcagccagagtgcaaacctcacaaaccatcagaggactcacactggggagaaaccctacaagtgcagcgagtgtgggaaggccttcagccagagtaccaatctcataatccaccaaaagacccacaccggggagaagccatataaatgtaatgaatgtggtaaattcttcagtgagagctcagccctcattcgcatcatataatccacaccggagatagtcagcattagagaattcacacaggcgttgaaccctactaatgcagcgagtgtggtaaggccttccggtgcagctcttgcttccgtagaccatcgagacttcacgccggagagtaactatgtaccatggtataagttgacagaagtcccgacatgccgacttag

SEQ ID NO: 48947 - DNA, 645 bp, Homo Sapiens
atggacctcctgcacaagaacatgaaacacctgtggttcttcctcctgctggtggcagctcccagatgggtcctgtcccaggtgcagctgcaggagtcgggcccaggactggtgaagccttcggagaccctgtccctcacctgcactgtctctggtggctccatcagtagttactactggagctggatccggcagcccgccgggaagggactggagtggattgggcgtatctataccagtgggagcaccaactacaacccctccctcaagagtcgagtcaccatgtcagtagacacgtccaagaaccagttctccctgaagctgagctctgtgaccgccgcggacacggccgtgtattactgtgcgagccaaccttgggagctcccgacggtgggtttgttctactggggccagggaaccctggtcaccgtctcctcagggagtgcatccgccccaacccttttccccctcgtctcctgtgagaattccccgtcggatacgagcagcgtggccgttggctgcctcgcacaggacttccttcccgactccatcactttctcctggaaatcaagaaaactctgacatcagcagcaccggggctcccatcatcctgagagggggcagtacgcagccactcaaggtgct

SEQ ID NO: 48948 - DNA, 608 bp, Homo Sapiens
attactctcctttccaccccttctgttttttagctggacttggaccaacatagtatcccaggtggtctccttccttggttacatgatagaagacagggaggatatggattagtcaagatatttttgctgtgcactttggctcccatttatcacacctcaatctttagccatactaacctgtcattcctcagtctgaaatccttctcccttttatttaaaatcacaaacctgacttaccctgcttcttatattttaacatcatttgtctctcaagttgaaatggaaacttgttacttacctttgtaggccctctagtaactagcttgtcagtgttgaaataaaatctctcacactttaacgtttttaatggggctgggtgggaaaattttcagtgataagtgtggaccttgctctgatgccaaagtttggcgatctgaaagggaaaatgagacaaattgtgaacatcttgtaattctgtctagagcctagcagcaatatatttaactaggactgcgatggaggatttataacttttggcttcttccactctgcttttgtaaaaatctcacatcacgaattttattcctttcactctggaatgagaaaaa

SEQ ID NO: 48949 - DNA, 785 bp, Homo Sapiens
ggccacagaatcatgaggaataataagttattgtttaaggccactacgtttttgggtggtttgttactcagcaatggatgactgaaacacatggtgtaggtatgaaagtgacaccttcattctctgttttgctgtgcacactcatgtcttgaattgaactgaatggatttgagacgtttctgatggtgtaatgtaagagttttggcaaagtcacttaatttccacatgcagtcatgcctagagatgtgctcattgggcttatgagaattagtctttataagacatttcatttaatatcctgacatgagcttacgaggtatcttaacatgctgacaaatttttattttgcttgccttgctaatggtgagcactacaagaggaaaaccagtatgtggtcatcgtcatagtatatagacaggatgcattacagtaaattctcctccctaaggaattttgctaataagtagcagttatattcttgtgcatcatattctctaaaatgccttttgtgaattttttgggtttattggtcattggttatggggttttcaataaagactggatttaccttgccatataattccgtaggtcattcccttacccttacataaaataattttttgtcccatgacccataactccttacatgttaaggggccaaagaatattccccaaaaatattttttataggcccgggggaaaaaaatcaccgcccctttgaagtaaaagggaaaattgtgccctcccaaagggtgtggggcctggcactttgccccccaacataa

SEQ ID NO: 48950 - DNA, 581 bp, Homo Sapiens
acgccaagtgacgctccgaggaggaagcgcagcccccttcccctccctcgctgcccctggcccagcgggagccccccctccccccagtgcgcctgtgcggaggccctcttgattatgtgtgccctctccgggcgcccgcgttagcggccgggtggaggtggggagggaagacgctgaggaggaggaggaggcggaggaggcggtggaggggaggtggggggaatcagcaaggacatggctcctgactcctgtgcggaacgtgagtgactgagcggcaaagcccgaatggtctctagcgaccggcccgtgtcactggaggacgaggtctcccatagtatgaaggagatgattggaggctgttgcgtttgctcagacgagagaggctgggccgagaacccgctggtttattgcgacgggcacggctgcagcgtcgcggtgcatcaagcttgctatggcattgttcaagtacccactggaccgtggttttgcaggaaatgtgaatctcaggagagagcagccagagtgagatgtgaactttgtccccataccgatggagctttaaaaagaacagataatggggg

SEQ ID NO: 48951 - DNA, 469 bp, Homo Sapiens
  misc_feature (52)..(52): n is a, c, g, or t
gcttcaataccctgtctcactgtgggagggagcagaggatggagctgccttnatccttcagggcctgggcttccggcaggcttgagctccagaatggggtgggatcaccttcttggagataagacctggacctggctttacccaaaccccaccagtgccctactcccgcaatcccccagccccagcacccactcccagcttccagcacagctgtaattggggctgagggtaacgaccagcgccaaccccagctgcggagggcctggcatgtgtgggaaaaagccggaaaaatacattttcccctaaagacttgtaagaaaattctcactgatttttttccttttaccccaagctttcacagcactaaatatgccacacttagtaattttacgagcaaaccaaactatacatcacacggttttatgttcctaaattaacaaaaggactttaaatctatatggcgctctta

SEQ ID NO: 48952 - DNA, 844 bp, Homo Sapiens
  misc_feature (658)..(658): n is a, c, g, or t
ggacgttctgataagaggaaggaccgagtagaaatttctccagagcagctgtctgcagcttcaacagaggcagagaggttggctgaactgacaggccgccccatgagagttgtgggctggtatcattcccatcctcatataactgtttggccttcacatgttgatgttcgcacacaagccatgtaccagatgatggatcaaggctttgtaggacttattttttcctgtttcatagaagataagaacacaaagactggccgggtactctacacttgcttccaatccatacaggcccaaaagagttcagagtcccttcatggtccacgagacttctggagctccagccagcacatctccattgagggccagaaggaagaggaaaggtatgagagaatcgaaatcccaatccatattgtacctcatgtcactatcgggaaagtgtgccttgaatcagcagtagagctgcccaagatcctgtgccaggaggagcaggatgcgtataggaggatccacagccttacacatctggactcagtaaccaagatccataatggctcagtgtttaccaagaatctgtgcagtcagatgtcggcagtccagcgggcctctcctacagtggttggaagaccgactggagcaaaaccaacagcatttgccnggaataccaccaagaaaaggaagagcttatgcaagaacttttcttctctagaataaatcaggaaaccaaatgggggaagatagaaatattccagtgtaaaggtacttaagctaaaatcatttcaaagaaggaaaaacttgggaggactccttttccctgacttccagactttactattaagctttt

SEQ ID NO: 48953 - DNA, 1142 bp, Homo Sapiens
  misc_feature (548)..(548): n is a, c, g, or t
  misc_feature (801)..(801): n is a, c, g, or t
ccggtgttgcatccttggagagagctgagagctcgagtacagaacctgctaaggccatcaaacctattgatcggaagtcagtccatcagatttgctctgggccggtggtactgagtctaagcactgcggtgaagaagatagtaggaaacagtctggatgctggtgccactaatattgatctaaagcttaaggactatggaatggatctcattgaagtttcaggcaatggatgtggggtagaagaagaaaacttcgaaggcttaatctctttcagctctgaaacatcacacatctaagattcaagagtttgccgacctaactcgggttgaaacttttggctttcgggggaaagctctgagctcactttgtgcactgagtgatgtcaccatttctacctgccacgtatcggcgaaggttgggactcgactggtgtttttgatcacgatgggaaaatcatccagaaaaccccctacccccaccccagagggaccacagtcagcgtgaagcagttattttctacgctacctgtgcgccataaggaatttcanaggaatattaagaagaaacgtgcctgcttccccttcgccttctgccgtgattgtcagtttcttgagggctccccagccatgcttcctgtacagcctgcaaaacttacagaacctgctaaggccatcaaacctattgatccggaagtcagtccatcagatttgctctgggccggtgggtactgagtctaagcactgcggttgagaagatagtaggaaacagtctgggatgctggtgccactaatattgatctanagcttagggactatgggaaagatctcatttgaaagttcaagcatgaatggggggggtaaaaaaaagaaaaactcccaagggctaatcctcttttcgctctgaaacatcacacctcctaaaatgccagaagttgccgaccctactcgggttgaaatttttggcttttcccgggggaaaagcctcggaaccccctttgggcactggaagggtggtcccctttttacccgcccatttcgggggaaaggttggacacccccacggggggttttgacccccccagggggaaaaatcttcccaaaaacccccccaaccccccccccagagggaccccgctccacggg

SEQ ID NO: 48954 - DNA, 449 bp, Homo Sapiens
cgattaacctaaatctaattcttcctgagtagcttctgaaactctttttaaaatctcaaagctttatttacttagggcttcctgtcctcagtgggaatgctattaggccacgctttgcaattggcctgaggatgacactaatgtttactattaaggtgtactgtataaacatcctcttcctagcctggactctcgcattttatatttttaccagaagaaaggtgagttaaattttagaggcattgttttccaaccacctactaaagattctgttgagtatcagtcaggctttatccttagccagacagctactagaaagctgaccatcaaaagctaattacagtgttgaaggggatatggtctgaagcaaatattgccaaggtgaactttgtacaaatgttatttgaaggagtaaatggcactgataactgcttcacatattttagaag

SEQ ID NO: 48955 - DNA, 383 bp, Homo Sapiens
cacgaggcctgagattcccacgtgtttccattcagtgatcagcactgaacacagaggactcgccatggagtttgggctgagctgggttttccttattgctattttaaaaggtgtccagtgtgaagtacagctggtggagtctgggggaggtgtggtacggcctggggggtccctgagactctcctgtgcagcctctggattcacctttgatgattatggcatgagctgggtccgccaagctccagggaaggggctggagtgggtctctggtattaattggaatggtggtagcagagattatgcagactctgtgaagggccgattcaccatctccagagacaacgccaagaactccctgtatctgcaaatgaacagtctgagag

SEQ ID NO: 48956 - DNA, 1125 bp, Homo Sapiens
gtccctgcgggagcggggctcagatgcctcaggccagctgtttcatggccgagcccgggaaggctcctttgaatcccgctaccagcagccgtttgaggacttccgcatctcccaggagcatctcgcagaccattttgacagtcgagaacgaagggccccaagaaggactcgggtcaatggagacaaccgcctctagttgtaccccagcctcgttggagagcagcaggtgctgtgcgccttgtagaatgccgcgaactgggttctttggaagcagccccctgtggcggccttccgggtctcgcagcctgaagcctggattccagcagtgaatgctagacagaaaccaagccattaatgagatgttattactgttttgggcctccatgccccagctctggatgaaggcaaaaactgtactgtgtttcgcattaagcacacacatctggccctgacttctggagatggatccttccatcttgtggggccaggaccatggccgaagccccttggagagagaggctgcctcagccagtggcacaggagactccaaggagctactgacattcctaagagtggaggaggaggaggagccttgctgggccagggaaacaaagtttacattgtcctgtagctttaaaaccacagctgggcagggtgagaagctagatgcccctgcagtttggccctggagccagggcagaggaatgtagggcctgcatggagaagggttctgccctgcctgaggaggaggacacagcacaagggcacattgcccatggctgggaacatgacccagcctgaaagatacgggggatcatgttaaaaatagcagtattatttttcgtctcaatggtattgtaactaagttatttactcctcctgctcctcacccctgtagggaaaccttgaaaagagagtggcaggggggctgcctgctgtgtttagaggaactagtttgtgatgtaaggcactgtccgggatgggggggcgggcccaggggggggaagaaaaaaaaataaccaaagccctttttgggggaaggttttttggtttttaaagtcaaaagaaaaactccagtatggctttctccgggaggaaagtgaaaaaggggaatttgagggattt

SEQ ID NO: 48957 - DNA, 393 bp, Homo Sapiens
cacgagggcagcctctggattcaccttcagtaactatagcatgaactgggtccgccaggctccagggaaggggctggagtgggtctcatccattagtagtagtagtagttacatatactacgcagactcagtgaagggccgattcaccatctccagagacaacgccaagaactcactgtctctgcaaatgaacagcctgagagccgaggacacggctgtatattactgtgcgagaggcgagataacaggaatttttggggaatatagtgactacgactactggggccagggaaccctggtcaccgtctcctcagggagtgcatccgccccaacccttttccccctcgtctcctgtgagaattccccgtcggatacgagcagcgtggccgttgg

SEQ ID NO: 48958 - DNA, 822 bp, Homo Sapiens
taacctttgacgaccatgactccgtggataagattgtcattcagaaataccatactgtgaatggccacaactgtgaagttagaaaagccctgtcaaagcaagagatggctagtgcttcatccagccaaagaggtcgaagtggttctggaaactttggtggtggtcgtggaggtggtttcggtgggaatgacaacttcggtcgtggaggaaacttcagtggtcgtggtggctttggtggcagccgtggtggtggtggatatggtggcagtggggatggctataatggatttggtaatgatggaagcaattttggaggtggtggaagctacaatgattttgggaattacaacaatcagtcttcaaattttggacccatgaagggaggaaattttggaggcagaagctctggcccctatggcggtggaggccaatactttgcaaaaccacgaaaccaaggtggctatggcggttccagcagcagcagtagctatggcagtggcagaagattttaattaggaaacaaagcttagcaggagaggagagccagagaagtgacagggaagctacaggttacaacagatttgtgaactcagccaagcacagtggtggcagggcctagctgctacaaagaagacatgttttagacaaatactcatgtgtatgggcaaaaaactcgaggactgtatttgtgactaattgtataacaggttattttagtttctgttctgtggaaagtgtaaagcattccaacaaagggttttaatgtagattttttttttgcaccccatgctgttgattgctaaatgtaacagtctgatcgtg

SEQ ID NO: 48959 - DNA, 806 bp, Homo Sapiens
tggacgggcattttgttcccaacatcacctttggtcaccctgtggtagaaagccttcgaaagcagctaggccaggaccctttctttgacatgcacatgatggtgtccaagccagaacagtgggtaaagccaatggctgtagcaggagccaatcagtacacctttcatctcgaggctactgagaacccaggggctttgattaaagacattcgggagaatgggatgaaggttggccttgccatcaaaccaggaacctcagttgagtatttggcaccatgggctaatcagatagatatggccttggttatgacagtggaaccggggtttggagggcagaaattcatggaagatatgatgccaaaggttcactggttgaggacccagttcccatctttggatatagaggtcgatggtggagtaggtcctgacactgtccataaatgtgcagaggcaggagctaacatgattgtgtctggcagtgctattatgaggagtgaagaccccagatctgtgatcaatctattaagaaatgtttgctcagaagctgctcagaaacgttctcttgatcggtgaaaccataaggagcccagtgttcctgttcatgaaatctcccttttactggaaaacaggaatattgactaccaaatcacaatgcaattgaagccgtactgcttttttgagcagttattcattccagtgattaaaactgattgtgcagaatattctaagaggtcagaaattggtgtgtataactacatttttagtgatgcaatttattgattagtgagtaagatactgtttttattg

SEQ ID NO: 48960 - DNA, 351 bp, Homo Sapiens
ggggcctcgcgctgggtcgcgcgtcatcggcaaagtctccgccccaacttgctccatcgacggccgcagagcggctggcagtttcttcgaggacctcagcaagaccccgggcccctgcgcctatcaggtcgtgagtccaggggtctacaagtcccgggccccccagttcacgattctggcgcggacttcgctcccccaagacaacactcggaagccagggcccgcggcctacaacgtggatcagcaccggaagccccgcggctggagtttcgggatccggcactcggactacctggccccgctggtgaccgacgcggacaactgacccgccaggcgggagcggccccacac

SEQ ID NO: 48961 - DNA, 418 bp, Homo Sapiens
cacgaggtggggctcctgtgctctggctctcaggtgccagatgtgacatccagatgacccagtctccatcctccctgtctgcatctgtaggagacagagtcaccatcacttgccaggcgagtcaggacattagcaactatttaaattggtatcagcagaaaccagggaaagcccctaagctcctgatctacgatgcatccaatttggaaacaggggtcccatcaaggttcagtggaagtggatctgggacagattttactttcaccatcagcagcctacagcctgaagatattgcaacatattactgtcaacagtatgataatttccccccctttttcggccctgggaccaaagtggatatcaaacgaactgtggctgcaccatctgtcttcatcttcccgccatctgatgagcagtt

SEQ ID NO: 48962 - DNA, 689 bp, Homo Sapiens
ggcacttttgctttgtgttaaatgtagatgtgctaaaatatatagatctatcatattttacctacatatgtatgtcattccagtataaaacattctcctctacccaagaaccatagccatgattgttataaatcaatgaagtgtaaacatacattattaaaaaaccacttctgacattccattatgtgctattcaaagatggactattgaactatagaaaagacagactgtgcatttgttcgttgatcctcatcttattcctgacatgtaaaaatcaattttacgtagagtcaacattgtaggtaggttaaaataccagtggcaaatttggaaattcagaaacttataaaccacgagaaatatataggcttgtctctttggtcttttatttggctctatagggggaatctatttcctattccataagtaagtatacctaacatgctgtggaatcttgagtttccaacaccgtgctgcttgatagaatgactttgaggtccttggataaaatgtgatatatgcaagtacagatatgttgcctattactattgcacggaataataaactactcacacagactgtatatagcacttagtaagtacttcatctatgcatgtatttgagttgactgatacccaagactgaacacatgaggttaattgaacacacataccctctgaaaagggatc

SEQ ID NO: 48963 - DNA, 507 bp, Homo Sapiens
agagaacgtggcagacccaagacctctcagtgctgagcccatggaggatgccccaggctggcgggactgggaagcagagggctggtcttaacacaggtgtgtccagtgctggaggcaagtccttgtcgtgactgtccagcgccactccatgtctctcctgtccttggatgttggggggctcagcctcttgcatgggtgtcctgctgggcgctgggccccgccactggccccctgcttgctttggggtctgagttagctcctggctccactgagcaggccgtcagctgccagcccaccacgcggatacccaggccctgttccgaggcctggaacagctgcttccgaagaaggggctgccttcagggaaatgcgtgcaccgtgcagcctgtgctgtgcccagggaggcctcttcagcgggattggcagttgctgtgccctgagaacaggcagaactgtgtgatccctgaatgtgaacctgaagttcaaaggaaaaaaaaaaaaaaaaaa

SEQ ID NO: 48964 - DNA, 813 bp, Homo Sapiens
cttggccacagtcgcagccccggcgccccgaagcgggaaaaaggctgggtgccgccgtcccccagctgcgcaaccctaggaactctcgggaacttggctgtgttgtcctgcctcagagacaaattcatctattgtaggcctagcccctgcctttgaaaacaaggaaaggttggtagaacatcaacacagcatggaatttccagggaggtctcatttcaaaacttcataaagaacaagaaccacctggacttctgtgagggcgatgattaaactggcctgagtttgaatgaaaggataatgtatgctcaacctgtgactaacaccaaggaggtcaagtggcagaaggtcttgtatgagcgacagccctttcctgataactatgtggaccggcgattcctggaagagctccggaaaaacatccatgctcggaaataccaatattgggctgtggtatttgagtccagtgtggtgatccagcagctgtgcagtgtttgtgtttttgtggttatctggtggtatatggatgagggtcttctggccccccattggcttttagggactggcctggcttcttcactgattgggtatgttttgtttgatctcattgatggaggtgaagggcggaagaagagtgggcagacccggtgggctgacctgaagagtgccctagtcttcattactttcacttatgggttttcaccagtgctgaagacccttacagagtctgtcagcactgacaccatctatgccatgtcagtcttcatgctgttaggccatctcatcttttttgactatggtgccaatgctgccatt

SEQ ID NO: 48965 - DNA, 583 bp, Homo Sapiens
aggcctgttttaagtctccagtaaccgagcggaggcccggcaggcgcgacccgggctgcgtacgtcagagctgcctccgaagtggtaaaatgtgctgcgagaagtggagccgcgtggcggaaatgtttctcttcactgaggagcgggaggattgtaagatactgtgcctttgctccagggcatttgtggaggatcgaaaattgtacaatttgggattaaaaggctattacatcagagacagtggcaacaattcaggagaccaggcgacagaagaagaggaaggtggttattcctgtggtactgcagaatcacatgacagcaaaggcataggcctggatgaaagtgaacttgattctgaggctgaactcatgagaagtatgggattgccacttcaatttggtaggataactgcacataaggattttgaggtatctatgaatactagaaataaagttaaaataaaaaagaaaaaacatcaaaagaaatacttagatgaaattgtgcaagaatcttggagaaaagaatatgaagaagacgacattttggcttcagatgatccatcttcaattgaacagtatgagaa

SEQ ID NO: 48966 - DNA, 505 bp, Homo Sapiens
gagacggtgcgcctggagctggtgcttaaggaccccaccgacgagagctgcgtggagttcagttacccggagctgctgctgtgcggagaacaacggaagaagctcattcacacagaagacccatttaatgatgaacatcaggagaggcaagaggtggaaatgttggctaagaagtttgaaatgaaatatggtgggaaaccccgtaaacaccggaaggatcggctacaagatttaattgatataggctttggctatgatgagacagatccatttattgataactcagaggcttatgatgaattagttcccgcttctctaacaacaaaatatggaggcttttatatcaacactggcactctacagtttcgccaagcttcagatactgaagaagatgatattacagacaaccaaaagcacaagccacccaaggtccccaaaataaaagaagatgatattgagatgaagaagcggaagcggaaagaggaaggggaaaaggagaagaagc

SEQ ID NO: 48967 - DNA, 272 bp, Homo Sapiens
tgcagcacgtagttggagaaggtgagggcgatgacagcctggttggtggggtagatcaccagcacagcaatccacagcctcaggaacccagccagtcctccgaagatgtccttgacataggagtagtcacctccagatttggggatggtgaccccgagttcagcatagcagagggctcccacaactgtgatgaagcccgtcacaatccagacgatgagagcaaggcccacagaaccagcattctccagcactccctttggccggacgcgtgg

SEQ ID NO: 48968 - DNA, 398 bp, Homo Sapiens
tgcggccgtggttggtgggggggcaggaagctgctggtggagctgcagcatccttcagtctcaggcccctgggagggggaggggaaagaaccagggctgagctgtggagtgaaggggagccatttctctccaccgactgcaacctccgtgctcacagctcacggttcaccagaatccaggggcttggtcggcctaggaatccacaatgctggatattttcatcctgatgttctttgccatcataggcctggtcattctgtcctacattatctatctgctctagtggcctggagctgcggccggagcctgctggagaacagctcagaaggaaggatggagctgaatggccgagtgccctgcttgctgacgcaccggtggatttttgcttctgctgttat

SEQ ID NO: 48969 - DNA, 548 bp, Homo Sapiens
  misc_feature (3)..(3): n is a, c, g, or t
agnatcttttttttttccttctgcataacaagttagtgtcttgtcttatacagtattacttcctattcccaaggaagtattgcattataaaataaatgtgctagaacgttaactaactgaaatattgaattaattctattcctcctcattcccccactccagggaaggaaccaatcatttgctctttacaaaaagcaacacatttctacaaaaccaacagcatgggaaattcttcaaataagctcttccaactgggcacagtggcccatgcctattataatcccagcactctggaaggccaaggtgagaggatcgcttgggcccaggagtttgagaccagcctgggcaacacagcgagacctgtctctacaaaaaaaaaaattaaaacattagccgagcatggtggcatgtgcctgtagtcccagctactccaacaggctgaagtgggaggactgcttggcccaggggattgaggcagcagtgagctgcaatcgtgtcactgcaatccagcctgggcaacaaagcaagatcagaaaaaaaaaaaaaaa

SEQ ID NO: 48970 - DNA, 603 bp, Homo Sapiens
aacaccaaattattcctcccttctcgtataaatagagtgactatccacaggagaaaagtgtgtgctttagtattagaggagataggcagagaagtcttgcttagttccttcgtgcagcttcttgcccctgttgacgtggaatgctgtgtctgctttagcacgcacgctccgaatgactcctggtgctaggccatgctggctgctgtcactgagcgggactcaggccaagaggcgtgacctcgggccagcctgtctgttgtgcagacgcctcctctgcagaacgcatcagtttctattctgcagttgcagagccagccccgcgtgagaacgtgcataatgagtgcacaccatcatgtcaaggtgcatacttagtgagcgccatcctgctgaacgtgtatttcagtgtttcacttactggacggataacaagaaaaaaatcctaacacaggcagtcaccagaaataaatgtctcagcaccttacagatgactaaaaatgttaattttatgacttagccaaatatgttctaggttgcatatatcccccatgtgaaagtgatttcttcccaagcttctcaaactgttagctgctgtctgacttcatc

SEQ ID NO: 48971 - DNA, 707 bp, Homo Sapiens
ggcacttgctctcctctccccatgctcgttgcaccctgttctggcgaagggctgcgccatccacagcggcgctcaggccaggaccagggggtccttggtttcttcctctccctccctcaacacatagcctgttcccagggttctagctttgtctccctgttgctactgccagggctctggtctggccaccatcatcttctcccgactctgtccacagcctcctccctgtctccccgtctccacgccattctcttccacatgtagccagagggacctttctaaaacgcacatctggctacttccctccactccacaaatccttcgggacgccctgtggcctgcaggacaaagccccacctctgcgggagtggcgtgtgaggctcttcaccaacgggccttgcccgccctgtgttctcctcctgcccgcccccacacatgccctgtgctccagccacacccagcgccttgcagtctaaggagagcccatgcctttggacatgctgttccttctgcctggaatttccttgtccgcctggtgaactcctcgttctgcaagactccgctcaaaacagcaccttcgagaagactgccctgccccttccctgccttgccccatgtccccctcccttgggtccccagagccacgcacatccagccctgcttcccacacacggggccgtgcgtgcctttcttcaccactgagctcc

SEQ ID NO: 48972 - DNA, 275 bp, Homo Sapiens
cggctgcgagaagacgacagaagggagtatagaagaagagggagttacagcaaaacaaaaccgtcaagaaaaagcctcatccacattacttattagctttgttccttagaacttgaaaacatccgctgaggaagacacagggagttggaaatgatggacccccttgtatgaaaacagttactggctctactaaaattcagttttaaatgttgagttgagcaagctatacactacttaaggaagaaaccttagaagtcagaatttaccctggttat

SEQ ID NO: 48973 - DNA, 463 bp, Homo Sapiens
agaattatttgcaaaagctagacagcaaccagcagaattggcccaacaggaatggcttcaaatgcagcaagctgcccaacaagcccagcttgctgctgcctcagccagtgcatctaatcaggcgggatcttctcaggatgaagaagatgatgatgatatctgaaattcaccagctgagtttctatttcttctataaatgtttttccctgcacaacaaaaacagtgaaagaaatgcttatctgtaattttgtatgcatcttggtggacttgtcattggtattctagggatgtctgctattaagtttcatctattgtgtgctatacatgtaaaaactgtctctttgaactattgaaaatttaaggttcagtataatatcaattttgaatttttaatggtgtttatgaaattttagatagcagcgagtccttcgtttgatcaataaacagtgttacagataacttc

SEQ ID NO: 48974 - DNA, 1760 bp, Homo Sapiens
tcaatggattctcttgtggtccttgtgctctgtctctcatgtttgcttctcctttcactctggagacagagctctgggagaggaaaactccctcctggccccactcctctcccagtgattggaaatatcctacagataggtattaaggacatcagcaaatccttaaccaatctctcaaaggtctatggccctgtgttcactctgtattttggcctgaaacccatagtggtgctgcatggatatgaagcagtgaaggaagccctgattgatcttggagaggagttttctggaagaggcattttcccactggctgaaagagctaacagaggatttggaattgttttcagcaatggaaagaaatggaaggagatccggcgtttctccctcatgacgctgcggaattttgggatggggaagaggagcattgaggaccgtgttcaagaggaagcccgctgccttgtggaggagttgagaaaaaccaaggcctcaccctgtgatcccactttcatcctgggctgtgctccctgcaatgtgatctgctccattattttccataaacgttttgattataaagatcagcaatttcttaacttaatggaaaagttgaatgaaaacatcaagattttgagcagcccctggatccagatctgcaataatttttctcctatcattgattacttcccgggaactcacaacaaattacttaaaaacgttgcttttatgaaaagttatattttggaaaaagtaaaagaacaccaagaatcaatggaaatgaacaaccctcaggactttattgattgcttcctgatgaaaatggagaagctaaagtccaggaagagattgaacgtgtgattggcagaaaccggagcccctgcatgcaagacaggagccacatgccctacacagatgctgtggtgcacgaggtccagagatacattgaccttctccccaccagcctgccccatgcagtgacctgtgacattaaattcagaaactatctcattcccaagggcacaaccatattaatttccctgacttctgtgctacatgacaacaaagaatttcccaacccagagatgtttgaccctcatcactttctggatgaaggtggcaattttaagaaaagtaaatacttcatgcctttctcagcaggaaaacggatttgtgtgggagaagccctggccggcatggagctgtttttattcctgacctccattttacagaactttaacctgaaatctctggttgacccaaagaaccttgacaccactccagttgtcaatggatttgcctctgtgccgcccttctaccagctgtgcttcattcctgtctgaagaagagcagatggcctggctgctgctgtgcagtccctgcagctctctttcctctggggcattatccatctttcactatctgtaatgccttttctcacctgtcatctcacattttcccttccctgaagatctagtgaacattcgacctccattacggagagtttcctatgtttcactgtgcaaatatatctgctattctccatactctgtaacagttgcattgactgtcacataatgctcatacttatctaatgttgagttattaatatgttattattaaatagagaaatatgatttgtgtattataattcaaaggcatttcttttctgcatgttctaaataaaaagcattattatttgctgaaaaaatctagtagactaaaaaaaagatctattaattaacagtcaagactataaattaataggt

SEQ ID NO: 48975 - DNA, 330 bp, Homo Sapiens
  misc_feature (221)..(221): n is a, c, g, or t
agtcagtcagacgctgcaggcaccactatcaccaggagtggccaagtaaaccgagacaccagtaacagcagggctggacttcctccagcgttttgggaaggaaagagatgttcccctgagctgattcccagtgacagtgcagcaagactagtgggactcctctttcccacattttgcttttttttttttctatgcaaaagtcagatgcttctatccattgntttctgtgattagggcggccctgcagcatatctcacagcagacacagtgttcataacaaagaaaggttgtgccgggcacggtggctcacacctgtaatcccagcccttt

SEQ ID NO: 48976 - DNA, 468 bp, Homo Sapiens
agagagttggatatggaatgtgctcttttggatggagaacagaaatctgaaacaactgaacttatgaaggagaaggagattttggatcatctaaaccggaaaatagctgaactggaaaagaacattgttggtgaaaagaccaaggatgctgacctgttggatgttgaaagcaaacactttgaagacctggagttccagcagcttgaacatgagagccgtctagatgaagaaaaggagaacttgactcaacagctcctgcgtgaagttgctgaatatcaacggaacatcgtttctagaaaggaaaaaatttctgcattgaaaaagcaagccaatcacattgttcagcaggctcagagagagcaagatcattttgtgaaagaaaagaataatttaataatgatgttgcagagaagaaaggagaatctttgtaatttggaaaggaatactccagcctctctgggaggaaag

SEQ ID NO: 48977 - DNA, 413 bp, Homo Sapiens
gcactttgagcccgtggggtgaggagttggcaatttggagagacaggatttgggggttctgccataataggaggggaaaatcaccccccagccacctcggggaactccagaccaagggtgagggcgcctttccctcaggactgggtgtgaccagaggaaaaggaagtgcccaacatctcccagcctccccaggtgcccccctcaccttgatgggtgcgttcccgcagaccaaagagagtgtgactcccttgccagctccagagtgggggggctgtcccagggggcaagaaggggtgtcagggcccagtgacaaaatcattggggtttgtagtcccaacttgctgctgtcaccaccaaactcaatcatttttttcccttgtaaatgcccctcccccagctgctgccttcatatt

SEQ ID NO: 48978 - DNA, 486 bp, Homo Sapiens
  misc_feature (13)..(13): n is a, c, g, or t
gtcctgttcccanagccccctcgtgtttgatgttggccaatgccgccagcatgatctagcaggccaaatcctaatctaccattctctgacaccagctggtcccctgggtcgtccacccgatgtcccccattctccccacttggcctcccccacaggctctcggcaaaggaccgtgggaggcacctgtgacactgcccttttcctgtgcagctgtttttcttcttcattcttttcactcctcgttactcttttttttttcactctcagcccacacaaaactaggaactttgttattctacttatttttctgtactctgtctgtttgcacacagatggatatctgagagccagcgaactttctttacctcctagtatcatttcatgaaaattagtagcacctgcacaatggggccttggagacaggaataaaaggaaaaatctggaatggaatcacatgacgcaacaggctatgaagactccctgccc

SEQ ID NO: 48979 - DNA, 707 bp, Homo Sapiens
  misc_feature (521)..(521): n is a, c, g, or t
  misc_feature (647)..(647): n is a, c, g, or t
ctgcaggattcggcacgagggtaaatggccatacacagcagggtattttttattattattttcagggccctcagcgcgtttaccacaaagctgtgcatataggtggcaccatatatggcgtaccttgacctcgaagagaatctacatggacttttatggacctacgtacacaattttagaaatcataataaatgaatgctggagtcctcaagaccccttccagatttgatttgctaggaagactcacaggactcagcattttgtcatactcaatggctatgatttaccacaccgaaagaatccagagcaaactcagcaaaaggctcaaacccaagtccagaggaaaccaggcacaatctttgagaatcttaatgaaatcacacaggatgtgcttcattgaagctccatctgggacttaaaacaacacacgtgagatgtgttccaggaagtcgtcttgagcacccattgctcagagattatattggacttgctttctagcacataccacaattgtagacctncagaagaacaggaggtgttcagcgtaagacaatgtatgcacacggagctacttctcattactgcgaacaatgggaaacttcccataacctaaagtacagacttcagccaagggatgaaccttgcangatcaaagaatagcagtctctggcctgctctggtctccttttgacagtaacttatatgga

SEQ ID NO: 48980 - DNA, 1064 bp, Homo Sapiens
agattggaataattggtggaacaggcctggatgatccagaaattttagaaggaagaactgaaaaatatgtggatactccatttggcaagccatctgatgccttaattttggggaagataaammatgttgattgcgtcctccttgcaaggcatggaaggcagcacaccatcatgccttcaaaggtcaactaccaggcgaacatctgggctttgaaggaagagggctgtacacatgtcatagtgaccacagcttgtggctccttgagggaggagattcagcccggcgatattgtcattattgatcagttcattgacaggaccactatgagacctcagtccttctatgatggaagtcattcttgtgccagaggagtgtgccatattccaatggctgagccgttttgccccaaaacgagagaggttcttatagagactgctaagaagctaggactccggtgccactcaaaggggacaatggtcacaatcgagggacctcgttttagctcccgggcagaaagcttcatgttccgcacctggggggcggatgttatcaacatgaccacagttccagaggtggttcttgctaaggaggctggaatttgttacgcaagtatcgccatggcgacagattatgactgctggaaggagcacgaggaagcagtttcggtggaccgggtcttaaagaccctgaaagaaaacgctaataaagccaaaagcttactgctcactaccatacctcagatagggtccacagaatggtcagaaaccctccataacctgaagaatatggcccagttttctgttttattaccaagacattaaagtagcatggctgcccaggagaaaagaagacattctaattccagtcattttgggaattcctgcttaacttgaaaaaaatatgggaaagacatgcagctttcatgcccttgcctatcaagagtatgtkgtaraaagacagacattgtgtgtatagrgmycctgaatgattagacacttcaaatacagaggaagcaatgaywrtaammtgkggraaaawwtwchtttagggggraaamaaccccc

SEQ ID NO: 48981 - DNA, 863 bp, Homo Sapiens
  misc_feature (727)..(727): n is a, c, g, or t
ttcctccgggagcttcctgagcccctgctcacctttgacctctacccccatgtggtgggcttcctcaacattgatgaaagccagagggtgccagcgacactgcaggtcctccagacgctgcccgaggagaactaccaggtgcttcgtttcctgactgctttcctggtgcagatttctgcacacagtgaccagaacaagatgaccaacactaacctggctgttgttttcggccctaacctgctgtgggccaaggatgcggccatcaccctcaaggccattaatcccatcaacaccttcaccaagttccttctggatcaccaaggggagctgttcccaagcccggaccccagcgggctctgaacctggcccctgccccaccagccccttctctggtagcccgggtttggactcttcctcctggcatcaggggccatgaagccccctggagagagatgttggagccacccatcaggcatgctctcccccacctctgtccagcccgcctcacggccctggcggcctcgctgttaccagaagacgtttttctctgccttacacttctcactgcctctctggacaccgggcttttgctgggctctccagagctgggcttggctcttccagctggagaaagactgagccccagtaacccctttcctgctttttcctgcctctgtttccctagcaagtgtggatgaatcaaatgactgcccggctgggctggtancaggggccagtccctccccctcttgattgctggggaatgagcagctgaagctctttggggggggacaccggccccaaagctgaggtggcctcccctatcctggtaagctgcccctgcttttgcagaagccccccct

SEQ ID NO: 48982 - DNA, 572 bp, Homo Sapiens
ttttttttttttttttttaaaagtttttttaatttatttagggggaatgatggttgtgttctttgtcatgtatgcttaaatatacagtggattttgaatgcaacaaataaaactgaaaacagccatttggttgtgtcatgacaatcataatataggatataatatttactttttttcaaaaacatcctgcattcattcattcttagcatacctttgaaaaagaaaaaaaaatccataggttgatacattgacccattgaagtacttcattacgtatttattgaaaattttttttaattgttgaaattgggaccactttttataattggtttcaagaaaaaaaatgaacagacttccagtgcttttctgttcaaataaactccgattcaaatttcagttttgtttgttatatactttttgtgagtgttaaatgatatgggaaggatttgtctttcattaaccatatggaaaagatgtcttcctgaattacatagcatttcatggttacagattcttcctaattaatgtttgcaccatatgaaactcataggtaacaaacacaaaggagaaaag

SEQ ID NO: 48983 - DNA, 1062 bp, Homo Sapiens
  misc_feature (692)..(692): n is a, c, g, or t
  misc_feature (697)..(697): n is a, c, g, or t
gggggtgcctccagaggacaaataaaactccaaatgaaagataaattgagtcctggagcaccccgtctgtagacaataagcagaatttgtcttagaacttttgtcccagatatcttaatttcctgtttttaacaacattaaatcagaagacatgttctgattttttggatcatggaacaagaaatctaaaactctagaatttggcagtaaacaataaaaggtaaagattttctaatttgtaaataacacagaaattacacaggtgattttttttttttaatcactggcaaaagctaaaggactttagaaaggtatactattcagctgggcgtaatggctcacacctgtaatcccagcgcttttggagggccgaggtgggtggatcacccgtgtcagggagattgaaacccatcgtgtgcttaacacagttgaaaacccctgttctcttggttaaaaaatttaaccaaaaaaaatttatccccggcgttgggtgggccaaaaccgccccctataatttccccaagcttacatcttttttaagggcccgtaaaggtcaaggggaaaaaaattcccctctttggaaaacacccaccactaaatgaggcaagaagagaggttttgtccacattttgggaagtcccccccaaagagatatccatatgtttcccaccctttggcgaactttctcttangtccncctgtgagggttgggatacaaagcaaaaatccgcttagaacaatctcatttgtgtcctccccgtagttatgtcaacgttcggttgttgggtaagtactagaaagggaggacgcgtggttttcttctagaaaccccgtgggtgtaaaaaatatatcccaaaaacggggtggagaaaaaaataaatatcttcaacagtggggtgtgtaaagatatagcctttactctgaatacatgagagcagaatatatgcgatcggcagactaagccactcacttcagagagggggctctctccaagaggagaaaaagatacactcttttatgtgggggggggaccttacttttccactacactttctatctctc

SEQ ID NO: 48984 - DNA, 779 bp, Homo Sapiens
  misc_feature (431)..(431): n is a, c, g, or t
aaaaactttacggctaggtacgaggccgggtggcgggaaatatctgttttcttattcttgcttcaagactatgacagatttgaaagagaattctaaagcagatttagagaacctgcttctcttcttatctcctaatccctaaatgtaatttagctcttatctgtatgttgtttgtttggtaaagggatgatttttacattgagttttaaagtagaataagaaaagcttctaaaaacttgcatgtgctagggatctgccctgtatctttgcctctggtgtttcgttgttgttgttattgtttgtttgtttccaaagaagttggagttaaggacacaatatatttgtacccctagactgaatgggtgagtattccatatgaggatctgggtaatcctctttgcaacccacatttggtcttcagagacactggncattttgaagaaacatatgatatagctgtttggaaataaattcatctatgttactttttttttcttttttttttttttatgagcgaggagaatcttaatggacagaaaactcatggggggtgggaggggccaaggggcccgggaaaagagtttccagtaatcagaagaatggtgatcggggtaatggtaatcttatggcacattccatgggtcttggccaagcccaagaagccaggtggtggtccatgggctaccgaactctggatcagatttacccagctttcctatgtcattcgggacttcatggacaactttgtaacacctggagtcgcgttgcagccctgtgcg

SEQ ID NO: 48985 - DNA, 774 bp, Homo Sapiens
ttatgaaatattttaaaggcatatttttttaaatatcaaacggggctattcataaaataaactgattgtatgtcaagatgtcctaatttaaaagagtagttttataaatcatggtcaacattccatgtaaatatttgagctttacaaagatagatccaagtgtgcgatctgtgcactgcacatttgatagcattattcactggttttccttcatacttgtcaagttcatattagaagcagagacaaaaaccactccaatggccttgacacatagtcacaccaaaatagataatcagactaagtattatataacaacgtgatccagacagtgagttctaagtgtattaattaaatagcaaaaaattttgtttttaaaaaatgaacagagggagggttgccaacctgaagtcttaagtagatcgtcgggtagcatgtttccttctttgaacattgtctgaaattttctataaatcaagacttcttgtaccaaagaatgatgggacatatgtaataattcaggcaatcacctgagtactttaggcagtccaaaattctttaccctgaaatacccacattttaaaaacaattgcagataattgcttcagttatttactttggggaacagagatataagtgtaaagtggggagaaactgagtcctatttaggtggtggtactaataaagatgtataaaaatataacattttaaaacagacaggtccagaccttaggcgcagaggtagaacatatttttaaataaatggggggaaaaggg

SEQ ID NO: 48986 - DNA, 752 bp, Homo Sapiens
gggggctgatggaaacaaaaggaaacagtatgaagagttccttaatcatttttgaaacaaaaatgttaagggattttaaacatatgattatttttaattttatgccttttcagtactaaacacccatttcattgctgattcctgtctaagaagccattcacgtcagcatggcgatagaaagaatgaaaaaaccctgctgaatcatacagtaattttctttaaagcacatagtagttacataaatatatatatataaatatatttttgtttataactaacacaaggcaggatcttgtgactctaagagtgcgttttgtcatcaagacaaaacagatgcaagatgcatcactgcattacttccatagagttgtaaaataatccttaatattagaatatttttctgtcacttagcaaaagtggttcagttcattgccgcgcccatcatgttcttgactatttgatccactttttcgtttatgtcaaccccttccctctctggctaaataaagtggatgcagaaagctccttaaatggagatatcgattgccttggaatcacaatcctgattttgaaaattcctcatgaatgaagaaaggaatggcatcccttgagaaggaaagtggttaatatacatactgagctccctaagtttaaattcaggtactgagtgtacaatttcaccaacattctaacccatgaaacttttacactctgtgcccaagaaactgtttggctttttggtaaggtacagc

SEQ ID NO: 48987 - DNA, 390 bp, Homo Sapiens
aaattacagtgatttccatcatattatcactcttgaattttatcatctataaaatgagagataaaaatatctcactgaattgttacttatatcaatttaaaatttgctagtggtttgaaaataataatgtactgactacatgtatgctgttattgtcagtgtttccttctataaactgttctttggaaaattaagttatacataavattcatattaaactttttacagaaagcatacatgataaacagtttatggtacttctcagaatcatttcataataagcaatttatttagcttaagttccaacttactgttcttattataamtygcaaagcaacctgtcttacattcttacattatcttaaaataaatatttctgccttgatcaag

SEQ ID NO: 48988 - DNA, 497 bp, Homo Sapiens
tttgccgtttattattccttattcagcctaattattggtttctacactcccctttcattgaggcacaaaaaatgggtttccctttaagtagctctgctgtacctagttaatgagaatatgcataatcgtgacaatactgcttttgaataccacactgtacaaggaggaacactagcttggagaaatctgtcttctgattatttgttgtgacacattcctatgtactgtgagctgggcattgtttttttctgtcccagggaaaagaaaaaccatacttaatgtgattttgcactgacagcacacaaatctttaattttcctttttaaaacatttttttttagtgataaaaggaaaataatagttggattgcataacatgaaaactataatcacaattcagtatcaggatataaatcaagctctaagtctttggaccctctgtggaaacatttctaacccgaattttaatttggccttttcaaccaaaggcttagagtg

SEQ ID NO: 48989 - DNA, 544 bp, Homo Sapiens
gaaaagctgacagcagtatctggattaactttttaaaaacaatgaaagcattttacagaaattacatttcagatcgtgctggaactgtgttcagaagatatcctcagagggaatctggcctgagcaccatcatgtttaattgcctcctcctgtcttgcattttcctcccagcccccttcctaccccttagcagagggccaggtgagggtgcttggggcccatgggggctgggagtgtagacttcagttacacccccagcccccaggggaaagcattagccttgaatcctcaatcccaggccctctactaaccactctcaacctatggtatttatcttttgattattctgtgcatctataaaaatgggattatattgtacagaatgctttgtaagctttctctccccacataagaatgccctgtaagcattttgttaaatatttttaatgactttagagtccaactttatactcctctttatgcattttggttttctaatttaatggtagtgtaaacgtttttggaataaacattcctgtggcta

SEQ ID NO: 48990 - DNA, 643 bp, Homo Sapiens
tttccagtcaatataattgcttgttctactgtaccatgtatgattcttgtcctttcctatatccttcatgacagattatgatgtggctttatattgtgccttacttgtacatttaaaactaaacgtcttcattcccttccacttcctacatctttaactttgacctttttggtaagagaatcagaactattacaaaagcatcatgaaggatttcagatgggtatggtttcaaattccctctctttatagttattttatatttgtatgaaagaccagttttggatggtctttgaatataggggggaaagattagcagtaatttcactacatcccttttctctgactttcatgcatttctcatacatcttctttctgatgcttgactttatttgcttcctagcaatagtctgcatttaaagaaaggtgtgttcaattcatcagcttgaaattgactatttcatttttccaggattttttaagagaagagtacccattttgttttataaaaacagatgacaagtctctttaaaagaaacagaagtacagtacttttgaaatacaatgctgttagtttggatttctttttatatatatatataatattcatacaatgatctgatgtttgccttcattaataaagctg

SEQ ID NO: 48991 - DNA, 620 bp, Homo Sapiens
  misc_feature (471)..(471): n is a, c, g, or t
cacctgtagctacttgggaggctgaggtgggaggatcgcttgagcctgggaggtcaaggctgcggtgacctgtgattgcaccaccaggagaccctgtcttaaaaatgtatatataaaataaaaagaacatcagacatcaccatcacctcgcttagaatccatggggccttctcctcaaattcaatcttcccaggcatttcatgaacttgcgtctagtttctggttccctctcaaattgcccaggctgtcctgtgagtgacagcagctatttcgtgggcctcctctggagtcatgagaagtcacccaaacaatctcagttttctagctcactccgtcttgacatttctacactgtcatccttggttttcttggaaattaatttgcttttcttcattgtctttctttggagctgctttcctttgtgttggttactattttatttttagcttctcacaccataccgacatatgntggttattcttttagacatgttttttgttgttgttgtcacctggaactttgtatcttgaataatttggggatcacatacgaaaaaaaaaaaaaaaacaaaaaaaaatttgtggcgcgcgggcccggaaaaagtttctaacccactccgg

SEQ ID NO: 48992 - DNA, 781 bp, Homo Sapiens
ggaaaatctgaggacagggagactagtaaggaaggctggaaagagccctgggtttggagttcagagatctgtgttcagagtcctttgcttcttagtgactatgtgaccttgagaagataacttgagctccctttttcctcttctgtgaggtagaggtaagattgatgtgcatattgatattgtacttaaaagtgtttgtaaaatgctaagtaaaacctaatgctatgctttgaatgtagtgggttccaaatatttgtttaatgacaaagaataaatgatattgactaatgaaaataatggagccactggaatgtcacctcctgcatctgccagtaaacctgttaacacaggggtggcgggggggggaagtaaatatgtgaagccaccaaatctcatgatcaggagaaaaactttggaactcccatgagactccaaagttatgtcacaggtgaataagtcatgaacttttcatgctgatatcatttctaaggttgctgccttgtcagaagaagcaaaccacaagataaaccatgcagaaaatctttttttaaaaaaagttcctgaaggatggatggtcattggtgctgcttgtcactttacttactaatgagtcattttttttccttaaccagtaatttgtgttaaattgggtcttaagatggtttgtcgcctagtcccatggttccaacatatgggcaaaaagtgacggaccccaactgaattagggacactggttcttgactccaggtgaatgggagggaggcccatgtgaaaggggttg

SEQ ID NO: 48993 - DNA, 585 bp, Homo Sapiens
caagtgatcgtccaaactcaaaaccaacaaagcctatatgacaagtctctaagacacatggattgattactgatttcatttgatcaggaagttaatgaaatctactttatactctcctttaatttttgccaatctccgtttatatgagttgcataagttaaggcactttcaaatatatttgtgtcaaggaatattcacggaaatatttccagctatgtgtcgctaaaactgcatttatttattttctgttctaagatcccttcattaacaggagaaatgcaaataccttcatatcccctcagcagagatggagagctaaagtccaagagaggtcagtaacaaaacttcatgaggagtggtcatttttcccagtgtagatcacagatctgaattggagtgggaaacagctttttcatcatatacattatttctaattgtatctttaaaatcaaaaaacttaaaagcaatattcagaaaacaactgaattattagaaaattatttggggaaagatccggaaaggagaaggaaggaggagagaaaggaggacagaaagaaaacttctattttcattaaaaaaaaaaaa

SEQ ID NO: 48994 - DNA, 611 bp, Homo Sapiens
  misc_feature (516)..(516): n is a, c, g, or t
  misc_feature (529)..(529): n is a, c, g, or t
tttaattaacctagttgtgattttccgaatttaagacgttttcttactacatgtgttaaattgttacctataatatcttcctggaaaaatagaagtatttgtaaggtttttataaatgcacaatttatgtataaatataattggaatctgggatgactcttagtaatctactattcttaattcaacgatggccaccagctacctgacacattttgtaaatttagcatctgtgtatgtgtgttcgtgtatgtgtgtgtgcgtgcatgtgcacattactgcatttattctcaaatggatttataatttagtgtttttgtacaagtacttgagctattcatgtaatgggataagttgccataaagatgtacataaatgacccttaatttggcacgttttcacatttaattttttaaaatacagcttttcatatacagttcctaaaaaaaaaaaaaaaaaaaactcgagactagttctctccatttaatgactttccctgctgttacctaattacaaatntggatggaactgngttttttttctgcttttgttttttcaggtttgctgttttctgtagcccataattggatttcttgtgtcaaaataaagtccct

SEQ ID NO: 48995 - DNA, 723 bp, Homo Sapiens
taacatcagctttgcaaattcctgttacggttgccttacctacacctgcgactacatcccctaaaataataaacacagttccacattcggcagcagtaccaggagccacacgttctgtatctatttctaaaagacaatctcggacttcactccagttccattcaccagggatttcaactacagtgccaacaaatgtaaacacaaataaacctcaaactgaattgtcgtccctttcaacaagtccaggtaaaataactaatacgtccaattttgcttctctgccaaatcagcaagctttagtaaaaacccccagttacagttctgctccaggtggcactaccattcacacggcttcggcaccatccaatgtaactagtctagtcgggagtcagttcagtgaaccttgtattcagcaaaaaatagtcatcaataccagtacacctttggcacctggtactcagattatgattaacggaacccggtttattgttccaccacaaggtcttggagctggcagccatgttctccttatatctactaatccaaaatatggagcccccttagttcttaacagtggccaaggcattcaatctacaccaatagataactctgcccagaagatcacacttacatcaaataatttctttaagtgggccaacctctacaacattctttaagaagccctaccaaaattttaaacttttttgggaatgcaaggttttt

SEQ ID NO: 48996 - DNA, 403 bp, Homo Sapiens
acaatttccaaaataaattctgtactcaggttgttatatgattttctgagctgaataagttcaggagcagattattaagatctgccattctgaaacgctggtctttttctccttcctatagtgcaccataaaattctgtttgatcagattatattacatacattttgggggagtggagggacatgagttaagtagcccttcatgtatttataatctcttttctactgaatcaaatgacttagccatgaccctgaatggaccttgttttacttcaagttgagatgtctgccttttatgaatttgtatatgtgaatagagtttgggggttgccaaaaattgcatacattgtatgtaagtaaaattttttatgaagtaaaaaaaaaaaaaaaaaaaaaaaacgcgg

SEQ ID NO: 48997 - DNA, 597 bp, Homo Sapiens
cctaaacacctgctagcaaacaaaacaaattctgaatagaattagttccaataagttttatattttttaaaccatttatatggaagaatgtgagcttttctatttaaaatatttccttcatgattttaaacttccaaatttaaaagctaactttgtgggtgctctgtggtatcaccaagcaagtgaaacagtttttccagaatatttaactaaaatttaaatagtatactaatttgtcattcatttatcatattaactttcatatttcatacttaggaaattatattccaaaaaatctttctaagctcttgaaaatctatagttattcattaccaaaatgaagttgtgattttgccagctggttcccaaaatcagtctgtgaccagtcagttttaaactaataagcagaatgagtataaaaagtgggacaaattgttaatgccactgtgttatagttagtagtagaacaataccagtgattgtttagaagattttatatttgtattactaattgtatcttataaaagcgtttctgttgtatgtttttttacctgttgtaaaaaaaaataaaatttttttttaaaaaaaaaaaaaaag

SEQ ID NO: 48998 - DNA, 852 bp, Homo Sapiens
  misc_feature (797)..(797): n is a, c, g, or t
  misc_feature (822)..(822): n is a, c, g, or t
agttatctcagtgccgctttgtttcccaccccagtcggtcagcccttcctcagcgccctttaacccttgcagatcggatggagaaagctgccagcacgttctagggatgggggcagattgaggagcgggagggagtagtctttgtctaactttataccagtaccaaactatgttaatttaatgtagttttataataaatctttaagtcctgtaacttattctcccaagattgttttggcttattctacggcctttgtatttctaggtgaattttggaattagcttgttaaaaaggggggggattttttattgggctcgcattgaatctatagatctgtttgggaaaactagtatcttaacaacaagtccttcaatccatgaatatcattcttcccccaccatttatttaagcggtctttaatttctcctggcaatattttgtagattgcacatatatctatattttaatgcagctgtgcttggatagattgcagtatagagatcatatatatctttcattagatttattcttgagtatttagtgttttgtatacaatgttaaatggcattttgacttttttatattctactcgtaagaataaacaatattgattttaacatactgaccttatatgcaagcatcttgctaagttcccttgttatttgtaatactctgtagattctttcggaatttctgtgatcaaaatcttgcaatccacgaataaagatggtttaacttctctgtaacctttataccttttatttttatttatttttgccttttggtgctggctagnggttccactattgaataaaaacagngataatggaaaaaaaagatctttaattaag

SEQ ID NO: 48999 - DNA, 498 bp, Homo Sapiens
  misc_feature (409)..(409): n is a, c, g, or t
gactagttctacttctcagataatttatgtgtgtgtactcttcctagacgtacaagagactttttaatgctaaatatttgtcagtgcttaacaaaaactcaatttcacattactcatattgtttttgttttaattgaatgtgaattaaatttttattagttaagtgatttggaatgttatgtatgccattaacactattaggggaatctctagcatttctgtatttttaaagaatttgattcttttgtagattctgcctgtgtggtcattttaaaacatgtgtgacatatatcagtaccttcattcttctatattttgtgtctcctccaacctccaactttttttgttttttgaaaaatgtttctctaacacctcaacagtttaaggtaatttagtacacatatatcantatttttgtgatatgaaaaagcaacccattttctaaattcatatttttcctaaaactttactatgtttttattttaagaagtttccctg

SEQ ID NO: 49000 - DNA, 478 bp, Homo Sapiens
gcacgaggtaatgggcacctttaccggacagctcctttaccataaccagtagtgggcagttctgcggtcagcacttaactacaagggcggtctctgtttcttcaccagagagagaagattttcctgtgtaatttgtgccatttccctgaagttggttcttgagcggaaagatgtgcttggtaaccagacagcagctttacataggttatagattttgctcattgatgctgttaagaattatttccactcatacctgttcagggctccagacagccaatagccttcatcccacagtttgggcttcagctattaacacataaagataaccagttgcagctaggctcggtggctcacacctgtaatcccagcactttgggaggccaaggcgggtggatcacctgagggcaggagtttgagacaggcctggccaacatggtgaaactccatctctactaaaaatacaaaaattagccggggt

SEQ ID NO: 49001 - DNA, 635 bp, Homo Sapiens
attttatggaaaaacccatcttattttcaaatatatttaactgctgttatattttattagaggaaggttgtaaatattttctaggagttctattgtaaagaaaagtatttttgaaaaaaattaatgtaataaaaaggaaaacatttttaaatagtggttgtgattgcttcctgttctggcttcgttatgttctattctcagcagatgaattgcatgccttccatatcaggatgtaatttattcaggtttgcactattataagttgacatcataatatctagtgtgcttaactgtattttcccggaatgcaagtcccttggtccatattaaagcactatgtatagcatattcataatttttcttttgtaacgtgtgtatttttaataaggattttatgtaacattttggcaacaagaggaccgtattttctagtgaattttataataacattttgctaaaaatgtttcttcctaggtcagtttttgttaaggtgaaccaaaagtcttattttaccaggggttaaaaaaaagtttgaagcttgaaagcaaagttatatttaaacatcatatgtaacaaataaataaagatgttttatagacttgtcctaaaaaggtgcattccttaaaaaaaaaaaa

SEQ ID NO: 49002 - DNA, 716 bp, Homo Sapiens
  misc_feature (684)..(684): n is a, c, g, or t
  misc_feature (697)..(697): n is a, c, g, or t
  misc_feature (703)..(703): n is a, c, g, or t
  misc_feature (713)..(716): n is a, c, g, or t
ttgcatgcaaagttgcatgcagcccgtgggtatgactgtctcaggcccccagctcatttgccaagaggaaaccttaacccccctgagagggtctgcgtttcttctagagctcctacctcagtggtgtgcacagagttggagacacctgagggctggtccacgtctcacctttgccatacgggtcatttcttgatcaaatatatgactggggtcctggtttactcccgcccaccgtttcttttaaagtattcttaacatgaaatccacaaaagcggaaacaatgaaccattcttgcactttacagaatcattgtccttagctttagaggttgttaatttcttgtttttaacatgaacagaatgtgtggttctgaaggtgtgtgggggtctcaagaaattgtcctttggggccgggcgcagtggctcacgcctgtactcccagcactctgggaggccaagggggacggatcacctgaggtcaagagtttgagaccaccctgaccaacatggtgaaaccccgtctctactaaaatacaaaaattaggcagtcgtggtcgcctgtaatctcagctcttccggaggctgaggcaggagaatcgcttgaacccaggaggcagaggttgcagtgagccgagattgcgccactgcactccagcctgggtgaccgagtaagactgtctcaaanaaaaaaaaagaanagaaanaaaaaaaaannnn

SEQ ID NO: 49003 - DNA, 898 bp, Homo Sapiens
ggacgcgtgggttgtgaacggggaagaggttggagcttgcatttttcacgcacttcactgtggagccggagtctgcattttcctaaaaatcagagaatgccgagtggtcctggttgaaggtaaagccagaggctgtgcctatccagctccttacttggatgaatatggagaaacagaccctggcctgaagaggggcaacccccttcatttatctcgtgagcggtatcggaagctccatttggtctggcaacaacactgcattatagaagagattgctaggagccaagagactaatcagatgttatttggattcaactggcagttactgtgagctccaactctgcctcaagacaatcacaaatgacgacagtagtaaaggctgattcaaaattatggaaaactttctgagggctgggaaagtattggagggtcttttgctccatgtccaggttcacttacatcaataaaatatttcttaatggagtattgctttcaattagcaaacatatgcttcacaggaaaaaaggacatagatcaatctgttttatgtgctagtatttccaggaatttattccccttcataatttgtctcatttcattttatttcatccacttggtagatgaagtcacgtcaaacagttgtagacattttatgtgttgggttaactcttctgccattttgtatttggggttttcccccccaattttacttcaactgacattgggatccctggacaaattctaataatctggggatagtctttccttgcagtttaaagaagaaatggcagaaaaccctgccattataccttgggaaaagatttccaaaaaaaaaacttttttaataatttccccttttaaaggaaataaccccttaatggggcccccctgcttccta

SEQ ID NO: 49004 - DNA, 655 bp, Homo Sapiens
ggcacgaggccggaaggcattgcactgaggctaagggaaaggtctctggagggagcctcaggaagagcaaatggaggccagagactggcaggagcgcgccagcgcaggatttaatcccgacgagcggattcagagccgtgcttatataaagcttcaggaagcgccgttccgacgatgaggtcgacacgcgagaggcgacctcaagagcggcggcgccagggatctgtgcgccaagggaggacgggagggagcaggttcgccataattcctggctccaggctctgttttgttggaccgagccactgtattttagctcacacaggagaattctggccctgggaaaattggtctcagcatgctgccaagctttctcatggacgtcagcgaatcccaacacactgtcggtcaaagccgtgctggaagaaacaaaacagttctccctcggtagaactgagaggggattggtccagggcccccgccgataccaaaatccaggttgctcaagtctctcatagaaagtggcgtagtatttgcacataactatgcacatcctcccgtgtactttaaatagtctctaaattacttcgtaacacctaatccagtgtaaatgctatgtaagtaattggtatactgcttttatttttactatcttttg

SEQ ID NO: 49005 - DNA, 757 bp, Homo Sapiens
ctggaccccgccgggcacttggccacagcgcctccatcccttccagactggtccagacgtcggggaggtgaaacacgtctcttctctaccagctgccgcggcgggggcaaagcccccagagcctcactggccccggcgggatgaggagaccatgccgggcgcgcacacacggcagcttctgtttgaaaacggcgaccttcgggcccttttctccagcaactgcagaggcatttcaggagttggagaacggagtacatttttaaaatttttgttccattctgatcaactaaagaaaattaaggtgtccacctctcacaaacagtgacctgcaggtcggaggggcaggagccccatcccagccgtggttctgttgccgccgagctgcgacggcctcagactgggcttcagacctggtgcggagccaggcggagggacacagagccaggactcccagccgtattgaaatggagtcaaatccgcatggtttgtatcttctttcctttaatcttgggcattttgtttctctttctgagaacgtaactttgaaacacttacagagccaataatcatatcaaaagtggtatccgtaaacgctgtacaagttttatataccttcacaatgtactttgtgctgccttctagatcaatttatttggcaacacattactgcaccaggtgtaaataacttatggtccggtaacatcactttcagtcatgttgtacacgacaatcaataaccttattaacaccacacccc

SEQ ID NO: 49006 - DNA, 908 bp, Homo Sapiens
agttcaccaccatccacataagaccaacaatcgaataagacggacagaagaaggcatcagtaatgaaatttcacagcttgagtcagatgatttgtcatctgccagaagcccctggaacttcttggtgaaaaaagtgaacagtctggattatctgttacactggagtctacgggattagctgatgaaaaaagaaaatattcccactttcagcacctgctctatagacgtttgctcctgatatttcgtcctatgtcttgtctgatgacatcaagctacattccctccagctgctacccatttaccagaccggttctcttacatctgatggaaaaaatttgtctcaggaaaaagaattgctgagtctcttttgctttttctccttacctcatgtgggctatctctacatggttgtcaaatctgttgaattgatgtcagtctaccagtatcctgaaaagtctcagcaggcagtactcacgccacaattttgcacgtcattacaagtaacaacctgcagtgtttcactgtgcggtgcagtgcggcggcagctcgtgaggaggacccgtacatggacaccaccctgaaggcttgaccacctgtcagtatggatgtctgtgctttaagaatacagcttttcatagcgcttgaaagccatctgtcactttaaaaacacatcatactttgactaaagcagaacctgaagccattccagagacgaagacagtccccaagacgcttggaagctccctgcccaggatcgccagtccggagatgatggcacggaactggggtacttctccaaccactggcggccacaggccacgggcctcccgaacaaaaaggtcccacggcaaacctacaagcgaaagaaggctaatgcgcacaaggtgacacaaacggcgattacagcg

SEQ ID NO: 49007 - DNA, 1104 bp, Homo Sapiens
cggtccggaattctcgggatcgctgctggtcccgcgcgggcggcccctgggctttgtgtccaccaggacagcgggccgggctccctgcaggcgcgggcggcgccgaacggtgctcagcaaccacccggacagggccaggccgttttctcccgctcaggcattagtcgttggctgtgggccgccgcgggaagttgaggcctaccacggaggaggctgctgaggtggatctcaggggatccgcaagggctccctcacccttgccgggaccctgggaacccgaaacaaaatcctacgccaccagcccgccgaatgcgccccctcggccgggggtcctgggtcttcagagaagaactcggccgaatgcggtcagaaagcccgcgaaccgcctggacctgcaggccccgccgcttggagctcccgcctttcccgaccgagcccgtgtctgctcgtgtgtctcactgatgtcttaggtctcaaaaaaaaaaaagaaaagaaaaggtttttagtagacagaagagaaatggggccgtgggttcgtggtcccagggggaaactgacgtcgcatgaggtcgtcgtccctcagcttgagctcagcggaacataagcttgcagaggtggaaaccacggaaggtttgggtgtcttggagctctctggacaccgaagcccggacacagtcccggggtccgcaccgcctgtgacctgtggcgggaccgccggggtgggcgttttctcagctggcgcgcgcgtaggtggaacttgggaaactaactggagcgaagtggcaaaaaaaccaagacagggccggggacctcgcgcaggccgtcctttaactgtgggatattccttccactaaccccttttatttcatgtgtcccaggtctgggtttctgggggttcctttgtaagtcccctccggggccctgttccttgccgcctttcccctggccacaagggttcctcctttgcacaggcccccgggtctttcgttctgccggtcctaaccgaatgcccccttcccaacaagttccttcgcatctggcttccctctcgtggagcgcgcgccctcgtctttttgcgacccttctttcgcataactgcccaat

SEQ ID NO: 49008 - DNA, 752 bp, Homo Sapiens
  misc_feature (669)..(669): n is a, c, g, or t
tttaggtgacactatagaagagctatgacgtcgcatgcacgcgtacgtaagcttggatcctctagagcggccgcctactactactaaattcgcggccgcgtcgacaaatctttaatcttggtccttaaaagaaactaaaataaaatcgtaaagtagttctgataagtccttgccataaattattgcttttgtaaacgcacataaaggactctgaactgttgctactcataacatttctgacgccaaatgtgtggggttttgccataccaacaaccagttctctaactctccagacaccaactgggggccttacaattcagtgcagttctgacactcaccacctggagttagcacagactccacagggatgagggttcagtcccacgagtctgcccttgctgcagatgcgagtagcaggtatggggtgcccacacttctgtctgacttgcctgaaaggttgagagtttgttgccaggccccttgctttcaggtctgataacttgctaggttattaaacctgaaacttgataacttctgtagatgttgaaattagaacggcctcactcacctgggctcacaaaattccagaaagtagttgacgtcctattactggtttaccgtgaaggctctatgtccagagtggacaggacaagtggaagagtggcacanggcgaggtgtggggggtggcgtggagctccttttcaggagtctctaaaaaggtgggactccagcggcaatgccttgtccatgt

SEQ ID NO: 49009 - DNA, 894 bp, Homo Sapiens
gctgctgtgatctctgcccaagaggagcctctgaccaacatccaaagggcttctggacccactggactcctctggaggtaccttggtctcccgatccatggctgtggttttttactccctttatcactgcctgtgtgtagaatgataattgcacaattgatagtgtgaagacctcttgataaatggtaaatctgagcatatgtatttggctgacatgtcatcgtgaaacctcacagcttcagtcagtgtctctccaaggactaaacactggaagactgtacgaagatgctattcattaagatatcgcaagaatatggaagactattattcgcttctcatgggacaggacttttcagggcacctgaaaaaactcccatgaaaaatcacttttacaaaatgtcaagttatgatatccaagatgaaaccaatgagtcacaacattcacataatacactgtacaaccctgatctcttgactgtcatcaacatgtttcttacctctaaacaaagtttcatttctataatttaatttttctcattttttccattctcttagcttaagaaacagatcattacaaaacttttggtaagtttctcatatatgcttgcaaagggtcgtaaagatttattgtgattattctggcttaagctgaaacatcctaatctttctttagagatgtggcatagcaggtcagttcttttcaatatccatgtggtctgtaatggattacggaaatacgggcactaatctcgtaactttaaattagacttcaactcaagtctacaggcattatccacacagggtacttcatgaccttcaagggactacagacactatcacgcgagattggagctctaggtccggaagatttcatcaatccgcgtaatgaaacga

SEQ ID NO: 49010 - DNA, 583 bp, Homo Sapiens
gcgatatctatctggttaaattccattttaggagattgagatgcagaacgttaatgttcattacctcctcctaccccaagagaaatggattcagacatgtcttgtctcaacaagaaattgatttttttttaaactatctcattctgttgccaaatatcacagaagtaatgaggagtttagttacatttggctgttgtgctctgaaagagccaggtttggaatttgtgggggtgatctaggaagaaggttccaaagaagcagaggcatttgtcaagttacctaccctatatccagcatcctcctcatgagcttcagtagctgctctttgcccacgcctgtatcctacgtttgctatttgggcaaaccattacttcagttatttaacttccctttttttttaacttcacctttgactatgaacaagtaacggtaacattccttttgtgtattcaataatgcagttagttaacctttttcagaatattttgaacaaagatctttgtctctttctgctggaatgcgcacacagtgaacgtttgttagaactacacacaataaagacactgttttccttttctaaaaa

SEQ ID NO: 49011 - DNA, 681 bp, Homo Sapiens
  misc_feature (21)..(21): n is a, c, g, or t
  misc_feature (638)..(638): n is a, c, g, or t
aggtttttgtaactatcaagncaggtttctgtgcagactcagagagccctttcttatttctgccttttgaggaagtgaagcaggactagaagagccatcaggagccaacggggatgggaagcaaggagcctgcagtcagcattgtcactgggtagccccctctggcattactacctcagggtcggctagacatgcacagcagtttgggcaccagcattcaaataaaaaatcttggatgaaaaaccacaactagtaggcttagcttaagtgtgtttgtgaggtatgcacatgtgtatgtatgcaggtagaagatgggaagctctgaagcatgaaaccagttaggtcaacccatcacactgggttgcttatggccccagtctgagctccttgtatccttggacaaatgccttcctgtgttccctcttccttcatgtaacttgagccgagatgcctattctcacactgtaggaaggaatcacaccaacccaaacctaagtgcttcaggcttcgctgagtgagacgtttattcaaaacaaagattattgttttcatggttaggtgggattcaacaaggtttcatttatccctaattctgataagtcagtcttgagattttccccaaggttgctttttccctncttggtcacttataccctcagctaaaccaaaaaaaaaaaaaaa

SEQ ID NO: 49012 - DNA, 632 bp, Homo Sapiens
cacgcgtccgcagcaacagtggagctccttttgaaggaaattatttgaaactgttattcttgccagtgatagacaacaattgaaaaccatgatgtttcatgtttatttttgttttaggatattagtccttgaatcataccattttaagagtaattgtttaccactttctcttccaaaatttagacttaccaagtatacttaactaaatttatcgagacgtgtctatattgagtataccaaaatttaactttaatatgcgattttattacataagtagaactagagaacaaaaacattgcagaaataaactgaatttattggcatgtttgagacagcgtagtaatggtaaaattaaagacacaaacattgtcaaagttttccttcaaattaatataatgaaattgctggctatcacttttaaggtcattaacgtgttcagaaatgagttcaaaaccgattaaaactgtttgtgatgcctgcttaattactctgtctttgaataattctaatggtgggaatttcttttgatttctttctgtttacctcaaattgcacatctcaacactaattgcagtcagtgtttaaaagctggtaagaaaagaaaatagttttagcatataatgttaggaagt

SEQ ID NO: 49013 - DNA, 582 bp, Homo Sapiens
  misc_feature (558)..(558): n is a, c, g, or t
aaaacaacacattcgccaaggttatatggagcccctgatttccatcaaaaaggtttctataagtatattatttacatttttatacatgataactcttgcctttgtgttgaaaaaaaaaaagtctcttttttttcccccactcagcagttattggaaatagactgttcccatctgaaaccgtatcgtaatttgcatcaggaaacccaactgctgacattgaggacctgggtgtgttcaattatgattttgctggaggctgtccctcattttaatgctgcagctattgaaccaccttcctgaaacctagctgatacggaatagcagagacatgcctctcaacaccattagctttgcaaatggcttcatttcagtcaacgtcgacttctgctttggccaattgaaaaatgaaaattaaaggagagaagaaaaaaaacacagatgcacttaaaacatgaaaagaattatttatatgataaaaatatatttagcttttcaaagcacaagactgaatagaagtgctctttttatgctttctggagatgttactgttaaatgtcnttctacatcaggcttaataaatct

SEQ ID NO: 49014 - DNA, 684 bp, Homo Sapiens
  misc_feature (648)..(649): n is a, c, g, or t
  misc_feature (651)..(651): n is a, c, g, or t
  misc_feature (662)..(662): n is a, c, g, or t
  misc_feature (667)..(669): n is a, c, g, or t
cctaactgggctcagtcggaaggaacttgaccaaagtctgggctcagttgggcatcactcaggctaatggtcgtgtgctggatgccatcagagggaagtaccaatggtaaagtggaaacaatgtgcagctttcaactgggtggaggctgctattctgtggacagtgagatgtttccttggcactgtcaatagacaatctgcgtagagaaattccaagctgaaagccaataatgttataataaaatagagattcttcagaagatgaaaggaattaccagcatggaaattgtgtcataggcttaagggctaaagaagaagccttttcttttctgttcaccctcaccaagagcacaacttaaatagtgcattttataacctgaacacaatttatattggacttaattattatgtgtaatatgtttataatcctttagatcttataaatatgtggtataaggaatgccatataatgtgccaaaaatctgagtgcatttaatttaatgcttgcttatagtgctaaagttaaatgatcttaattctttgcaattatatatgaaaaatgactgatttttcttaaaatatgtaacttatataaatatatctgtttgtacagattttaaccataaaaacatttttggaaaaccatannanaaaaaaaaaanaaaannnaaaaaaaaggcggcc

SEQ ID NO: 49015 - DNA, 835 bp, Homo Sapiens
gggaggggcacggcgtcasgcgtcgccggctgggccgcgccggtggccaggagggagagacaaggaggaggaggaggaggaggtatctctgcattagccagattggacatatgthaagggacatcagtatatctggatcatcagtggtataatgtgttatagaggtggacaagcctgcagattgaagtggggatcgtccagattgttcccttccctggaccatatgattgtgcttcaagaagaccatagggaagaacgcattttcatcttgctgcaaaagttgcaatagaagatctgaaggtttgaatgggccaatgagtatcctcatcattgaagcattctatggaggctcccataaacagctggtggatcttcttcaagaagagttaggagactgtgtcgtttatacccttcctgcaaagaaatggcattggagagcccggacatctgctttatatttctctcagaccattcccatcagtgagcattacaggaccctctttgcaagttcagtgcttaacctgaccgaactggctgcccttcggcctgaccttgggaaactgaaaaagattctgtattttcacgagaaccagttgatatatcctgtcaagaaatgtcaggagagggatttccaatatggatacaaccaaattctttcatgcctggtggctgatgtggttgtattcaactcagtttttaatatggaatcatttctcacttccattggaaaatttatgaagctgattcctgatcacagacccaaggatctggaaagcatcatcagacccaagtgccaagttatttactttcccatcaggtttcctgatgtgagcag

SEQ ID NO: 49016 - DNA, 426 bp, Homo Sapiens
ttcgcggccgcgtcgaccagcctatagggtaaatactgtgtttgaggtacggatgattttcataactacttcctagaacatgtccatttgaagagcagtggggccttagaccccaaagtccatttatgtgtgggcaaataggaaatgttgcaaacaaaacaaagcactagatctaatgtccagtgaaatctggaatgaactagtcattagagccggttctttcatgccaggaaaaagttactcagccaaatctgaactactctcctgcagtttacacaggtggtatttaattgctgtctgtatggaggcaggctaggagcaaggctgtggacttgttgtgattgtcactagttaatcaagattccctttgtggtgcttaagaccctaaaaaggacacttggagctgagcatgggggctgacacctg

SEQ ID NO: 49017 - DNA, 946 bp, Homo Sapiens
  misc_feature (20)..(20): n is a, c, g, or t
ctcagagaccgccgcccttntccccgagggccatgggccgggtctcagggcttgtgccctctcgcttcctgacgctcctggcgcatctggtggtcgtcatcaccttattctggtcccgggacagcaacatacaggcctgcctgcctctcacgttcacccccgaggagtatgacaagcaggacattcagctggtggccgcgctctctgtcaccctgggcctctttgcagtggagctggccggtttcctctcaggagtctccatgttcaacagcacccagagcctcatctccattggggctcactgtagtgcatccgtggccctgtccttcttcatattcgagcgttgggagtgcactacgtattggtacatttttgtcttctgcagtgcccttccagctgtcactgaaatggctttattcgtcaccgtctttgggctgaaaaagaaacccttctgattaccttcatgacgggaacctaaggacgaagcctacaggggcaagggccgcttcgtattcctggaagaaggaaggcataggcttcggttttcccctcggaaactgcttctgctggaggatatgtgttggaataattacgtcttgagtctgggattatccgcattgtatttagtgctttgtaataaaatatgttttgtagtaacattaagacttatatacagttttaggggacaattgagatggctgaactactgaataaaaaaaaaaacaacgctgttttctagtcctgcagaccgtaagatacttggtatcgcttctattttggttactamggtaggtgcctggcggarggagtgggcggagatatgtaatagaagtgcgtacarttaracgtcsgcmstdactkatcgggcatytgggarartaattattcctttcgcascgatgwaaaaaatttaaarawgtgcgactawtwggcaaacamtggagga

SEQ ID NO: 49018 - DNA, 789 bp, Homo Sapiens
gggcctggccccagtccctccccagggcctttatgatctgcctcgggagcccaaggatgcatggtggtgccaagctcgggtgaaggaggagggctatgagctcccctacaaccctgccactgatgactacgctgtgccaccccctcggagcacaaagcccctccttgctcccaagccccagggcccagccttccctgaacctggtactgcaactggcagtggcatcaaaagccacaactcagccctgtacagccaggtccagaagagcggggcctcagggagctgggactgtgggctctctagagtagggactgacaagactggggtcaagtcagagggctctacctgagaaggacggcaaggctgaggtggctaagggggaccatggggaggtggcactagggatcaaagaagatggttagaaccagcagaagccagagggtgggaggggccatgctgtgtgagaccaggggaccagagggatgggagagtcaagggaaggacaatcccaggaagtcctaagaagtggggcagatggcagggctgaggatgggctctgcatcccccaaagccatcccttccctacttccccaaatgaagggacggctgtgggaccaggtctgtggaaagtggtgcatggtcagaatgggtgcagtttgaggggcctgtgtggaggcctcagggagatgttggactgtgcctggatccttactcctgcattgttctttgccagagacctatttaaaaattttaaaattctcattaaagtcagcttgggtttaagaagtt

SEQ ID NO: 49019 - DNA, 455 bp, Homo Sapiens
  misc_feature (409)..(410): n is a, c, g, or t
  misc_feature (450)..(450): n is a, c, g, or t
  misc_feature (453)..(453): n is a, c, g, or t
attcaattaaagttcaaccgtattactgaaatatacttctgattttgaaatgttgagcccaaatatgtgattgcatcttcatgctgcatattcagtgttcactaaaactttaattttaaatgttgcacttcagaaatgtaaaaggatgtccagccaatgtaattttccttcatcacttgtgatattgaccagttttaaagtctttggcctatttttaaaaagtgaggatagctgcatcttttctacttcatatacaacttttctacatgtaaccctcaacttacacattgcctagtgaaacagagccaaaaaatgcagtatcacctgtaccttttaattttattaaacttttttcaatcatgaatttttcaccgtcttccctttataaataaattctagtgacaaatcnnaaaaaaaaaaaaaaaaaaaaaaaaaaaaaaaaaaaagggnggncg

SEQ ID NO: 49020 - DNA, 965 bp, Homo Sapiens
  misc_feature (661)..(661): n is a, c, g, or t
  misc_feature (675)..(675): n is a, c, g, or t
  misc_feature (759)..(761): n is a, c, g, or t
  misc_feature (770)..(770): n is a, c, g, or t
cggctggaccggtccggaattctccgggatgggaccaggacccaccagagcggggggctccacccagcaccttcaaagggacacctacggcagagaacccagagtacctgggtctggacgtgccagtgtgaaccagaaggccaagtccgcagaagccctgatgtgtcctcagggagcagggaaggcctgacttctgctggcatcaagaggtgggagggccctccgaccacttccaggggaacctgccatgccaggaacctgtcctaaggaaccttccttcctgcttgagttcccagatggctggaaggggtccagcctcgttggaagaggaacagcactggggagtctttgtggattctgaggccctgcccaatgagactctagggtccagtggatgccacagcccagcttggccctttccttccagatcctgggtactgaaagccttagggaagctggcctgagaggggaagcggccctaagggagtgtctaagaacaaaagcgacccattcagagactgtccctgaaacctagtactgccccccatgaggaaggaacagcaatggtgtcagtatccaggctttgtacagagtgcttttctgtttagtttttactttttttgttttgtttttttaaagatgaaataaagacccagggggnagaatgggtgttgntatggggaggcaaattgttgggggggtcctttctccacaacccacttttggtccattttgcaaataatattttgggaaaacccnnntatttacgnacaccaattcttcctcgttttactacccccaccttaacaatccaagtagcgcatacatcacacgcccgtcccatattttttcgggggggggggcggccctcaaaaataatccccccgaggggggcgcccaaagtttttacgcggtaacccccctttttttttttgaaacaaaagagggcccccccttaatagggg

SEQ ID NO: 49021 - DNA, 640 bp, Homo Sapiens
gggggaaattagagttactaatttaactgggtcatagagatgtattattactgtgatttctaaagaagattatgttttctttgaattgtgctcttttcagattttgagatttttaataattcactggaagtgtgacatagatgtatcaaagggagcattgctagaagggcagctagtgatttccatagaaggattaaattctaagcaccaggcaaatgctcttcattgtgtaacaactagtaagtagagaaagaaaaaatattttctatctcttttgtcatggtttatgtcgtagcttatttaaaaatttcaattagaatcttttatcatgttattccaggattgttccataattataaaatgaaatgattatgtaataagtgtctggtggtagatttacaaatgtatcatacaggaaaggtgagtagttgaatgactcttaccatagattatttattttactggtttaagttaaaaatgctcagaaacaaacttatattttctcttgattttaatctactttgtcacaactaaaattttttacattgagctttacctaccttttttttcccaagtctaaattttgcaggagcaaaaaaaaaaaaaaaaaacttggggggggcccggacccaaatcgccc

SEQ ID NO: 49022 - DNA, 632 bp, Homo Sapiens
  misc_feature (533)..(533): n is a, c, g, or t
  misc_feature (610)..(610): n is a, c, g, or t
aaatactgggattataggcgtgagccaccacacccagtccacttttcatactttctaaaacaatatttagggatttttgtgttagccactctcctatctcatttctccaattgaagtaatgcataaatcttccattctcttttttctctcattcatggatagaatgaatgtctataatgaaaagagcttcttatcaatagccctctcagatttgttctgaattttgccaaatatttgtataactctgcaaaagactttctttccctgccttctcctttagagggaaaaacaaactgtaggtgtgacagcttacctcctagcattgttgtgaggtttggctggcacaagataaagtgctgtgtaattactctgaaatgtttgtaattaataaagaaatgaattgtaggcactttgtcagtagaaaccactgtgatttggaaacgcaatgtttcaataataaagactataaaatttaaaaaagaaaaaaattaattctctccaaattataaattaaatggtatacctaatgactntccttagaacttgaaaagcttaacccaaaatttatatgaaaaggcaagagcctggaatggttaagacaaacgtaaanaaaaaaaaaattcacttggcgt

SEQ ID NO: 49023 - DNA, 901 bp, Homo Sapiens
actactcttgcaaagcattttatgtcagaaatctggggcaatagtaactaactctggttgccacctaaaaatttcataacatgttaagaatcacattttttacatcatgcaaaccatccttacagagtgagcttaccttgtgatgagctttttaattgttacagttcattttagaagagtaatactttcagtcataatggtacctatggtacatagaattacaattttgctttttccacacactgaaaaatattgaagcaaaatcttaagaacttctaagaaaggtgcttgttaatcattcttggttttcatcatgttttgcggtgaaaatgactttaattagagtagaaatattgtctaacataaaaccaaaaagataaaacccaccacttatttacctgtacctcccatacatagagttcttgatgactaaagaaggatgacagtaattgggatgttctaaatacagttgtgtgtcacttaatgatgggtacatgttctgtggaatgcatcaggtgattttgtcattgtgagaaccatattgggtgtacttacacaaacctaggtggtatagcataccactcacctagactatacataaagcctattgctccgagacaagaaaagaaaaaaaaacggacgcagagtgatcatgaggacgcgtacacgaccacgaagacaagccagaaccagccagcagtcaccgacccactcacgaccagcagcacggcgggcgctaaactaccggggcccacacgctagcacagccattggtaagcgcgcccagtacggaactataaacaggcgccccgctcaacacggacggcaaactcgttcttccgaaaccttggggagcacacccccgagccggaaaaagtagtgacccgcgggggttaaacgc

SEQ ID NO: 49024 - DNA, 933 bp, Homo Sapiens
  misc_feature (727)..(727): n is a, c, g, or t
ccacgcgtccgggcagccgaggccaaaaagagcgtttgtcgccgtctagattacatcacgcagagcctccagcagcagggcgtgcaggcagaaaatataactgtgacaaaggattttaggagagtggaaaatgcttatcacatggaagcagaggtctgcattacatttactgaatttggaaaaatgcaaaatatttgtaactttcttgttgaaaagctagatagctctgttgtcatcagcccaccccagttctatcatactccaggttctgttgagaatcttcgacggcaagcctgtcttgttgctgttgagaatgcgtggcgcaaagctcaagaagtctgtaaccttgttggccaaaccttaggaaaacctttactaatcaaagaagaagaaacaaaagaatgggaaggccaaatagatgatcaccagtcatccagactctcaagttcattaactgtacaacaaaaaatcaaaagtgcaacaatacatgctgcttcaaaagtatttataacttttgaggtaaagggaaaagagaagagaaaaaagcacctttgaaattccaaacaaattatattgtacttgtatctttttacctatttttatactttttataatgtttacgtttgtcctgaatatatatatatatatatatatatatatatatatgggtataggagataagctatttctttccaaaatctataaatctttgaatatagtcccacangaatacttatgttcactttctatttttaaaagactactctgaaaacactcttggataataaatgtattatgggcatacttatatactgacagttcatacaagcacatgtgtaaaatttctattataaaggacagatattgacccctggcattttcataatttttaaaggaaatttaaagcctaaaattttcctcagccacattttc

SEQ ID NO: 49025 - DNA, 515 bp, Homo Sapiens
tgacaaagaatagaattaaactacttgactcaatatgttaagagagtttatgaaaagatagtcgtgaagggtgaagctaatttgtaaaactaatgcctgaaaaaaacataagcatgaagtccatggagagggaattgagagctgacacttcataactggagaaactggaaattaaagaaagggaaacaaaagacttaaaatttttgtttgccgaaatttttacgaaagtaaactgtgttgtagttttaagaatttttttaaaaaatctgattagctgagcaaagttaccagaaaactgctatcctagttgaaatcaaacattacttgcaaatgtgttttctgagtgttagcttcctgcttaaatgttacatatgcaaaattctgaagttttcctgtgctactcctgaaagcattcagaatctgtgacacgtattgacttcatgctttgagattcaaaatttattgttctgaaagttatatttagaatcagtaaatcttgatattcacctttaaaa

SEQ ID NO: 49026 - DNA, 747 bp, Homo Sapiens
ggggttacggggggagggggggggctgggattacaggtgtgagccaccgcgcctggccgacatttaacaatcttttgatttacatttttatagccactctatcaagatttgactcatgctgagtgtgggtcctgggaacctgcatgaccagcagtctgatgggagcacccatgaccataatggctacactctagtcatgaattaacatttcattaaacccaaacgtctgcttcaattcttcctccagtgtgatgtacagtttccttgcagtgcccaagggctctagagctcatcccacccaaaccaaagaatgctggtcaagtgggaaggagtccctgttctcagctgtagagggtgtggggagcactccgagtgccgtatctcagaacatctaagaacagtctaggaaaacacactccatttgtggttctccagagaatcagcacttggaatcctttgccaccgcgtaccccaggctctgaatcctgactgcgagattacacctgccagttcaccatcgactgtgtcacacggctcagcacagctcccaggccaacccatcctgatttccatctacttctaaactgcatcactctactccacacagcaacaactcaaattccttaatgactaatctgttcataaaaaaaaaaaaaaaaaaaaaaaagtcgacattcatacccgtgtcctctagcttactttcccacacacagtggcccctctagagaacctgtaagggaattccct

SEQ ID NO: 49027 - DNA, 891 bp, Homo Sapiens
tataatttatatgtatgcagagacaaactgattgaaacatttctagcactgtttattctcctacatcccctctttttgacctgaaaggtcctttattgtctttggatctgccaaacctccctgtgagggtgtggttcaggcatccagccagaggtccccccacttcttcgatgtccatgcccactcaggcactttctcatataccactgtgccacttcaagtgtgacgtatttaggttctttggggtttcttccatctcatcccacccactcatttttgttccttgttttgttcagacacttccccagcctgggtccaactgctgagctggatagttttctctgcagcttcctgctgaagatttaactcagccatggccttctccacacctccctgatgggtgtctctctacctgggttgtaattagaactgggatctatttaatttctccagccatttcccaacccttcccacagtactagaaatcttagtcctataccagagtaagaggtgtgtacaagcccccactgtactgtatgcacggatcgcttggcaataattatgtcagtgaatctgagacttgtattacacactttggacatttggtagaaggaattcgtacactttttcacttacataccgaaaggtttttcttttttttgtgcagtcctctttgcaaaattaactttgtcctgggttttacaaaaaaacaaacaaaacaaacaaaggggggggctaaaatcccgaggggcagtttgccccgtttgtaaaaggcccaaaggagattaaaagacgggggttaaacgtggaggaaagcttggtttggagactctggggttggaccacgaaaaccggaaaagggagtgcactttcggtttagtacatcataag

SEQ ID NO: 49028 - DNA, 529 bp, Homo Sapiens
  misc_feature (386)..(386): n is a, c, g, or t
aagaggcgctcctcacttcctagatcggatggcggccgggtagagatgctcctcactttccagactgggcagccaggcagaggggctcctcacatcccagacgatgggcggccaggcagagacgctcctcacttcccagatggggtggcggccgggcagaggctgcaatctcggcactttgggaggccaaggcaggcggctgggaggtggaggttgtagcgagccgagatcacgccactgcactccagcctgggcaccattgagcactgagtgaacgagactccgtctgcaatcccggcacctcaggaggccgaggctggcggatcactcgcggttaggagctggagaccagcccggccaactcagcgaaaccccgtctccacganaaaaatacgaaagccagtcaggcgtggcggcacgcgcctgcaatcgcaggcactcggcaggctgaggcaggagaatcaggcagggaggttgcagtgagccgagatggcagcagtacagtccagcttcggctcggcatcagagg

SEQ ID NO: 49029 - DNA, 975 bp, Homo Sapiens
  misc_feature (593)..(593): n is a, c, g, or t
aaaggctaggtagaggctggggtgaaatcggccgagggacagccatggtgtaaacattgttcttgggtgtaccaatctccaagccaaacatgttgaaatgaccagcttgtgtgcccactggcaggtacatcgccatgccacagcctatagggttgttatagaatccctccaggataggcaaaagcaagaatccactgtgggtggagggacaaccaggcattgcttctatggacttcagcctgattctgaatataaaatcagtgtttatacaaagctccaggagattgaaggacctagtgtgagcataatggaaaaaacacaatcacttcctacacgaccaccaacttttcctccaaccattccaccagcaaaagaagtatgtaaggcggccaaggctgacctggtatttatggtggatggatcctggagcatggagatgaaaaatttcaataagatcatcagctttctatacagcactgttggagccctgaacaagatggcacagatggaacccaagtgcaatggttcagttcactgatgatcccagaacagaatttaaactaaatgcttacaaaaccaaagagactcttctngatgcaattaaacacatttcatacaaaggaggaaatacaaaaacaggaaaagcattaagtatgttcgagataccttgttcactgcagagtcaggtacaaagaaggggcatcccaaaggttatcgggttaataactgatggaagatcacaagatgatgtgaacaaaatctccagggagatgcaattagatggtatagcattttgcacttggtgtggcgatgccaaattactcgggagtgggttacacatgggagtaagcccaggcacgccatggctcctgggggatagctttgacgcctttaagaaaatcgcagatgagtaattctttggtgggaacattcggaccggccggtccaggtgtgtgattgccggtcaaggagggg

SEQ ID NO: 49030 - DNA, 710 bp, Homo Sapiens
ggagctcatcatgtctggcaagaacatgcggctgagctctctcgcgctctccagcttcaccacccgctccagctccagctggattgagagcctgcgcaggaagaagagtgacagtgccagtagccccagtggcggtgccgacaagcccctcaagggctgaaggccgaggatggatgccctgtgccagtgaccagagcacccagggctggccagtcactgagggaacagcgtctcggaactgctggtcctcattccttgcttccccgtccccccggtagactctgtcctgctggtcccaccacacatggctgggacatctgttcccagctgtaggccttccaccagctggggagctagagggagcaggcccaagggcagagcagaggctgaggcacggggagccagccccactcggggaccagaagtggaaccaaaaacaagaaaaaactgtgagagattgtgtctgcccctgccctgcctgggacccacagggagactataatctccttatttttttactcctactccccagaggggccctagtgcctctgttcctgaattacataagaatgtaccatgccgggaagccagagacctgcaggggcctcggcccctcacatcgtgtatgtctctccttgatttgtgttgtgtccagtttggttttgtcttttttttatttggcaagtggaggaggcttttatgtgactttt

SEQ ID NO: 49031 - DNA, 563 bp, Homo Sapiens
agctagagatgtgagctcacatttgttgccttgcttggactggaactccttggctcaagaaatcttcttgtctcagccacccaaatagctgggactatatgcacatgctactacacctagtggtaagtgaagcacagagaagttcagtgatggacctcagatactaccagcagaaagcagaagggctaggatttcaacttaggatgtctggatccacagtctgcactcctacccactatgctacactgcctctaactatgaggaagcaagggcattttttttttttctggtgactaaaaagataagagttcaagtatgtggctcctgataatctaacttatacagcctggaaaaattgatagttactatatccagactgtctcattcaattaacagtttctcaagtaatcttctagttactgtcgtattttatctgtatcaacttagcaaaccaagtccaaaacattttatatgtgtctatctttcctgctgttcatattattgagttggccaaataaattcaattttttttctactgtttgtttctcacaaaaaaaaaaaaa

SEQ ID NO: 49032 - DNA, 878 bp, Homo Sapiens
caacactttttcctgggatgactttaagaggtttgagccacagcacctgaagtggcaaagatccatggtcttgtagggtattagagaactcttccagtcacctctgaaagcactctagatcttgcagctgagtggatgaagtgtaacaaatctgttgcacgctgagaggagtcagaattagcatttttcatgaaagttccccacgtctctactaagaatgaggaagaaaagactaagactaggtaattacacagaggcttgaaatgttacatcaccagagccaagtcctctcccttcagatcagttactggctgctacacagggacacccccaccttttcagggcatcccatgcactccacttctcaggatctaaggaatttgactttgtagggatcccagaaagggcactgtgccacttcccctggtgtgaatcagacatacattgtacattcatttctaaaattcactcatgcacctcaaaccaaggtcattatccaaaaaaaaaaaaaaaaggcccgggggtggaagagttgtgaagtttaaagagagggttcttcaatgtgaggaaatgcagaaaagggacacgaagtgatcactatatacacggataggggctcgggagaatccccatgggggaacctctaagaagatctccaagtttataccaagggaaatagggaaaacacaggtgaaacaggcaccaggcccaagcagggctcccttgaccaaggaaccggaggcatgcaggtacaagggaacccccttgaagaaagcctctacgggacatgggccaggagaaaggagaagatatctgtagagcaacagagaggcaaagaggtgggaccaagggccggaaatgccccaacccaagaatca

SEQ ID NO: 49033 - DNA, 696 bp, Homo Sapiens
ttttttttttttttttttaaagaaaagaggtttaattgactcacagtcccacatggctgggggaggcctcaggaaatttacaatcgtggcagaaggcgaaggggaagcaggcacctcttacatgagggcagaagagagaaaagcaaaggggggtaatgccaaacactgaaaccatcagctcttgctcagaacccacccactagcacgagaacagcataggggaaaccaccccgtaatccagtcacctcccaccaggtaatgccccccacccccagcatggggggattacaggtggagatgagatttgggtggggacacagccatatcaccatcccaagttgcaagcggaagactttggttcttaggtttttggagaaagtacctgttaagtgaggagagctggctacaaagcagatccacactaagctcaactctagggctggctgggatggaggcgggcgggactgggtgtgtgtgaagctgttggaaggactgcaagtggcgagcaggagagcacttgataatgactgtggcatgaagggaggctaggaacagagcccgttactcatgctaacaggattttttttctaaaaattatataatgtctagagttacaggtaaaaaaagaaatggtagttttaaaactgcccaggttccggcatcacagttcctcttcctgtcttggacgcagagggt

SEQ ID NO: 49034 - DNA, 851 bp, Homo Sapiens
  misc_feature (700)..(700): n is a, c, g, or t
atttgggacaagatggaaaaacagcaatacaaatctgaagtccataaagcttcattaataattgatttgtttgggaatgagcatgataattttacaaaaaatcttgaaaatctcatgtctaccattcaagagagttactgttccaactggcgatgcccaactcgagtgcaggaggatcagcagcgcacaattaatataaatcctccccaagaaattccacatggaaacttgataagactggctgtgaatgagttattctgttccaagattgaactgtgtgaagagcatgggtgtggtggcttaagagaattttcccaacgaattttctgccatggggcacccccttttgttgtcttaaatatgcaacattggaaatctgaagatctggcgtatgtaccctattacttggatttgtctgatcacaagtatttgttggaaggtgccacattatttaacaaagaggaacatcattattctgcagctttccagattggtggacattggatgcactatgatgggctcagaaatgtgaatttaattttgttaaataaacccccagagtttctcctcttgtcatcattggtttatattcgagcaacagagaaataaatatagattgatgctaaaagttgttttccctcctgcccatgctctcccagatgaagggctttttatttttgtgtataccttggtatccaangaaaataaggttcaacctatactagttttccaaaaagtggtatttttcaggtgttttaaaccccccagggtaaaatgttttttataatagaagggatcctgttggcaaaaaaatgtttttgggaaaatttctttttataatttttccatgg

SEQ ID NO: 49035 - DNA, 770 bp, Homo Sapiens
  misc_feature (717)..(717): n is a, c, g, or t
cagctctgcctcctccctgcaacacctgcacatcccgtttcctttgctgtttcctcctcatttccctggcccctcaatgtcacaggttttagtactcagagtctgcacctcttttcttctctgtgctcacttatttggtgatctcatccagtctcatagctttaaattatcttagtttgggttctcccagaagcagagcgtaaaacaatgcttcacgtgaaagtaatcagtaggaaattggggaaattgtgtatgaaagagaaagcagccaatgaaaagtttactattaagccagctacggtaagtgggcaattagagtttggtgccccagggagactctggggagtttggcaaaatatatacctcagaattatcccacctaaggggcaagagacctggagtatttatataacaacttgccagggttactgagtgaaggctattctagcacatgttagttactggcttgccatgtgtaccgacacagctgctttccacagtttaaaaagaaagtctgagcaacatagtgacatcccatctttacatacaatttttaaaaaattagcaaggcatggtggtgcacacctgtagtctcagctacttggctgagataggatccctggagtctgagggttcaaggctgcagtgagctgtgatttgtgccactgcaccccagcctgggtgggtggcagagtgagaccctgtctaaaaagacanaaaaaaaaaaaaaaaaaaaaaagcagcagcagctgaaagttggcaggagcaca

SEQ ID NO: 49036 - DNA, 720 bp, Homo Sapiens
agacaagtgttttggaaagagcaccctcgagaagggtggatgacagggcagagcaggaaggacaggaagctggcagaacggaggaggctgcagccgtggtccaaccaggagctgatggcagctggggctaggggaagggctttgagggtggaaggatgggatgggttccagaggtattcctctcttaaatgcaagtgcctagattaggtagactttgcttagtattgacaactgcacatgaaagttttgcaaagggaaacaggctaaatgcaccaagaaagcttcttcagagtgaagaatcttaatgcttgtaatttaaacatttgttcctggagttttgatttggtggatgtgatggttggttttattttgtcagtttggttgggctatagcacacagttatttaatcaaacagtaatctaggtgtggctgtgaaggtattttgtagatgtgattaacatctacaatcagttgactttaagtgaaagagattacttaaataatttgggtgagctgcacctgattagttgaaaggcctcaagaacaaacactgcagtttcctggaaaagaagaaactttgcctcaagactatagccatcgactcctgcctgagtttccagcctgctagtctgccctatggatttgaagtttgccaaccccaacaattgtgtgaattaatttctaaaaataaagctatatacagccaaaaaaaaaaaaaaa

SEQ ID NO: 49037 - DNA, 717 bp, Homo Sapiens
cacaatgaaaaatatcgcccatgatcaacgtgttctcttctggggaagggggcaaaggcagggtgaatcactttcttaaaaagtatagctcaagttgggagtgcagagggaatggggagaaaacccttccgctgcctgtgtcgaagtgcaggagcccccacccccatactcacctgagtccagcccctctggggaaagaaggggtgcatgaactccccttagtccacaggcgcctccctgtggcccaaggccctcttcacactccatcttgtagccccagcaggagctattttccgaaaagtgaaaagctctgaaggtcccacaattcatggtatgtacaggggctcggaggagggaaactgcccagctttcccccggcacagctgcaggggtagggggtatagataagaggagcaggccttggccaggcgtggtggctcacgcctgtaatcccagcactttgggagggggaggcaggcagatcacgatgtcaggagatcgaaatcagcctggccaagatgatgaagccccgtctgtactaaaaatacaaaaattagccggacgtggtagcgtgcacctgtaatcctagctacccggaaggctgaggcaggagaatggcgtgaacccggtgggaagagtttgcagtgagccaagatcgcaccactgcactccagcctgggcgacagagcaagactcggtctcaaaaaaaaaaaaaaa

SEQ ID NO: 49038 - DNA, 778 bp, Homo Sapiens
  misc_feature (743)..(743): n is a, c, g, or t
  misc_feature (757)..(757): n is a, c, g, or t
ttttttttttttttttttaatttaatcagtaactttattataacaaaacctgtatattacccatttaaactcatgtgtaacattcagtgatgtgtagttatttggcaagttatacataatcagcagcagccaggctcaagaaaataaaagttgattagttgatcagaaataaaatctgtagagtgaattagatttctgagttgttgttgttaatggaacattctatttgagacctttttcaggtgtgtagcaattctaccatgtccatttttttaagcattaaaaaggaacttaccagttgtaaattaagacaagatccaaatagtcatatttttgtgtttcctctaaaaaaatgtaagatttccatttttggcactgactaactgagcctacatctagattttaaataccatcttgaatcctaataattaaactgatgaaagtgcatatcattgttcctaacatttatgaacccccataaagatgttcctgatctttaaaactcattaatctgagtattaagtagaaacagaattttccaaagcattagacatcactttctcagtttatctgaggtgacttcgtgtacatctgtttctaatatatttgactaattttcatgatctcagattgtgaggtaaatgtaatctggaataataagtgtcttttacctagattacatctctcatttggagtttggcaatgaaactgctatgaagaatgactgtactctcctatctgtncctggatgacatanatatcatttgctttgttgttt

SEQ ID NO: 49039 - DNA, 903 bp, Homo Sapiens
  misc_feature (575)..(575): n is a, c, g, or t
ggacgcgtgggcggacgcgtgggttggtagtctactcatatttaagtgtggaacaccaaaaagcttactataagctgagagtgtggtaaagggctctttgttttactatgacctacctgagctatcttgctggggaacaccctaatgtcagtctctttataaagggcctttcattttggcctggcaagaaatactctttcatcctcctgcatggagggcaaaaaaaaatttaaaaattggctgctagggtctgctcacttccctgttttgcagaccccacactcttctgcaattcatttcatagttgtcaagactatacaaattgtcctttttaatgttctctcttctgctatccctagttggcagtcttcctctttacaacctgctgaaagtggaagacctccagttttcctttaattcctcagcaaaccaccaactattatatgtcttttttccagaacaacttattttttaactataattatatgcatttatgttagattcactgaaaacctcatcttgtatggggcctctgtaccctatgggtgctaaataaaggcttgctactggccccnaaaaatacctcaccttgaaaagggggggccggctctaaagaatcccttcaagggggcccaagtttacgcggtacccaagctttctttggtaaaaagcgggcccctaattaggaacgcccctattataaagcctaaggccctggggccgtcgcctttaccaacgctctgggaattggggaaaaactggcttacctttgggaatccttttggaaaaggaaacctttcatttctgggggcgggtggaaattaatgggggcacaacgctacccttatccaaagaatttcaaacattttctttagggtgaaacactcaacaaatattttttag

SEQ ID NO: 49040 - DNA, 849 bp, Homo Sapiens
  misc_feature (226)..(226): n is a, c, g, or t
gaggccgtgtgttaatgggtcagaccaattccagagatcccttccagaaactattatcagcatggcctcgttgactctggggaacattctacccgtttccaaaaatggaaatgctcaggtcaatggacctgtgatatccacggttattcaaaactattccataaatgaagttttcctatttttttccaagatagagtcaaacctgagccagcctcattgtgtgttntgggatttcagtcatttgcagtggaacgatgcaggctgccacctagtgaatgaaactcaagacatcgtgacgtgccaatgtactcacttgacctccttctccatattgatgtcacctttgtcccctctacaatcttccccgttgtaaaatggatcacctatgtgggactgggtatctccattgaagtctcattttatgcctgatcatcgaggcttgtttggaagcagattaaaaaaagccaaactctcacacacgtcgtatttgcatggtgaacatagccctgtccctcttgattgtgatgtctggtctatgtggtgccacagtggacaccacggtgaaccttctgggagtctgcacagctgctgtgttctttacacacttcttctactctcttggtcttctggatggtctgctgggtccctggggtacggatcatctcggttcatccatggcagcattgagaggggggggttgcgggagggggcccctttttggttcctgtggtcgccctgcactcaagagggtgggtgctgccgggacccccgtttgccccggcggggtcggggcgccaccagggcggggaggaggccccggcgctcctgcgtgggaggtggaacttttgt

SEQ ID NO: 49041 - DNA, 578 bp, Homo Sapiens
  misc_feature (553)..(553): n is a, c, g, or t
  misc_feature (578)..(578): n is a, c, g, or t
ggatggaatgttgaaaaggaagagctggaaagctcagttgttttccttgttcctctgacattgtccaggcaagagggcatcctgatcagatgagtagatttggctgagaaaaaccctagagtaaggcaggcactttgtggaggtggatgatgatggctcataaaaacgtttgttctcagtccagttcagggctctgccagcagtctttcagatttgaactgcttaaacaaaccctacagataaattggcactctgatttgtaattctgtttgtacaagtttagagcagcctagctcgagtcctcaaccccagtcctcttagaagtgaactgattgcactggatccctaaacccacaatgttgaggacacatgtgatgactccacttgctcagccagctggcctcttgcactttcccctgcccaccacttgtaactaccacttaattatcttgtgttaattgcttttgttgtgttgggtctgtatttttgtggtcagtgcctgcaggcagaaatgtgaaagcatttggtatgttgaagatacttgcttcttttntaataaattaaaagtgcagcacgtn

SEQ ID NO: 49042 - DNA, 589 bp, Homo Sapiens
  misc_feature (544)..(544): n is a, c, g, or t
  misc_feature (568)..(568): n is a, c, g, or t
aaaaaccttagctcctcccgcaccccgatgtggacctctactttccaggctagtccggacccacctcaccccgttacagctccccaagtggtttccacatgctctgagaagaggagccctcatcttgaagggcccaggagggtctatggggagaggaactccttggcctagcccaccctgctgccttctgacggccctgcaatgtatcccttctcacagcacatgctggccagcctggggcctggcagggaggtcaggccctggaactctatctgggcctgggctaggggacatcagaggttctttgagggactgcctctgccacactctgacgcaaaaccactttccttttctattccttctggcctttcctctctcctgtttcccttcccttccactgcctctgccttagaggagcccacggctaagaggctgctgaaaaccatctggcctggcctggccctgccctgaggaaggaggggaagctgcagcttgggagagcccctggggcctagactctgtaacatcactatccatgcaccanactaataaaactttgacgagtcanaaaaaaaaaaaaaaaacgagg

SEQ ID NO: 49043 - DNA, 512 bp, Homo Sapiens
attgtttgaaggcattattaaaggaaaatataagatgaatccaaggcagtggagccatatctctgaaagtgccaaagacctagtacgtcgcatgctgatgctggatccagctgaaaggatcactgtttatgaagcactgaatcacccatggcttaaggtacatgagcattcacaggtcaccttctacactttgtctgaacacttccagtgacaggaatgcgttgctctatgagatggtcctttttaccttttcttttttctgagcagttttcattagtttttttcatcttgtttgctgttcctgcacatcatctgtgaacatctgaatagaagacataccatttgagtgtcatgcagctatcagagggtaaaaaacaggattaagacagaatatatcaggggaaggcctcttttttctctgccaacatgtgttccaaagatatgcaacatcaacaactgaagtaataccatgttataataaattaactatctttaaaaaaaaaaaaaaaaaa

SEQ ID NO: 49044 - DNA, 605 bp, Homo Sapiens
gggtatatgattgctactctaaaggtttggatatatgtattgtaattagaattgttggcatgatgacatttcatttgtgccaaaaaatattaaaaatgccttttttggaaggactaacagaaagcacctgatttgcacttgaaccagattatagatttaaaagtatatgacatgtattttgtatttaaaactagaatagccagtatttatgttttttataaaactgtgcaatacgaattatgcaatcacaatacatttgtagctcccgagtgtcctaaagggagtgcacttctttgaagctggtgtgttaatactatgtaataaatggttaactttcaaatgatgctgctgccaaaattatattaatagtgagtttcaggcccctgggcattttgtaccatgtaattatcctctggtgatgctgtttctcgttagtggcagtagtgcctccgtctcctaatgataatgctccaagtctatgaactgttaaatcaacattcattttaagaaaagcaactttagtttccaagatacttttaagcttctaaaatgatcatttaaaactattctttaaataagagagccaaattaaagctcatatttag

SEQ ID NO: 49045 - DNA, 705 bp, Homo Sapiens
cgacacgtacactgcttgaagagtcctcttctattactaaacgtttttattgtgcaacatttaaggcatacaaaaacatataaagaataccatgatgaaaatctatgactgtattaccaagcttaagaaataaaacagttgagtgatctctcatttatgactaaattaacttattaaaaccattaaaacttttggattattcctgttaagatattttctttttttattattatgctttaagttctagggtacatgtgcacaatgtgcaggtttgttacatatgtatacatgcaccatgttggtgtgctgcacccattaactcgtcatttacattaggtatatatcctaatgctatccctcccccctccacccaccccatgacaggtcccggtgtgtgatgttccccactctgtgtccaagtgttctcattgttcaattcccacctatgagtgagaacatgcggtgtttggttttttgtccttgcaatagtttgctgagaaagatggtgtccagcttcatccatgtccctgcaaaggacatgaactcatccttttttatggctgcatagtattccatggtgtatatgtgccacattttcttaatccagtctatcattattggacatttgggttggttccaagtctttgctattgtgaatagtgcctcataaacatattttacgtgtcgctatgggatctctaagtc

SEQ ID NO: 49046 - DNA, 557 bp, Homo Sapiens
  misc_feature (488)..(488): n is a, c, g, or t
aatatatccggcctatcccagaaagtggagttctgtccgctgcgagcctggagatggggaacaggagcctgagtgatgtggcccaggctcaggagctttgtgggggccccgttccaggcgaggctcctaatggccaaggctgtttgcatccaggggacccccgtctgctgaccagctaaacaccaatttcttcctgcttttctccacttggtttggaaaatcacacagttttcaggctccatctgtttggagaaaatacattctgaagcatccccaattcaccttctaaaaactcatgtgcaggtttgataaacaccagaacagaagacagtgatgctgtattattttagatttattacatagatttggaattcacttttttcatgacctagaaaaaaacattccagtgttcaactgttttatattattaaagggcttttaatttgtgaacttctgaaggcatgagtgttttctctttctacttttgnatatgtgcatgttttggttcctctgacttggtatatgctcatctgagtgacggataggccggatatatt

SEQ ID NO: 49047 - DNA, 820 bp, Homo Sapiens
ggcactggctgtgcttgtgcttctgggccctcctgggacagagctgggaagtggatctatgacacgtgcttgtgcatttacccgccctgtggtttctgtagctgtctagttcctgctgttcctgtctcacctgcccctttccttatgtgtagtttcttcctgtgacagggagaaacctggctctcagattgacaggacattcgcttaggccatgtcagtgctgtaggtgaactgttcaacctgtgccccaggaggcgcagtcactatggaggcaccttacttccttaatcgtgtactgtgttttgtgttgacctgtagcatctaggtactggtttcaaaagttgcctagatgagttcttttctttctttccacctcctgcaaattatgtgattgcataattggtacatagttaggttcattgttagttgtattcctttggcttcccccatatcctcgttgactttttctttctttgtaacttacatatgttatgaaatttatatgaggatatataattttcataaaatgtgtatggtttacatgtattagtcgtgattattaagatcaccctgggattgactggcaagcatttggtggaagatagcaataaattatacatcataaaagacttaatgtaaataaaggcatgaaagtccaagaaataattctctcatttattacttaggtgttggatcatgtgccaaaggggcgagtaattggggtctaaaccgtttgagggatttaaaggttgtgtgtacgggtattcttaaagggggcttttgggttataacaagcggggtattcacaaactttggtgaa

SEQ ID NO: 49048 - DNA, 653 bp, Homo Sapiens
ccccaccctacatttgccttgggtggagctgggggtggtcctaggactgcgggtgcccttagctgaagggggtggggagaagcgtggactgggcagcctgtgggtaattggaggttcattgagaattgagtctttggaaacactaagaaaatcaaatttttaaaagttatttatggcctgggaaacaatttgcatttgtccccaaatacgcttagctgtgtgccgcttagaacgatgcgaaaccatccctctgtgtaagcccgtgccgtgtgactcgaagcctagcgccctccctgcgaagcatcagacgccacccagccctggggggaggcccacgcctgctggaccaacgcgggttctggggtgcacagcgccaggttaacgctgaagcctgccccgctgagcccaggagccgggaggcctgcgggctgacccagaatccgatcatgcacctgtcctcatgccagcggctttggctggggttggtctgaagcctgcacgcggcagttctttgttaaagatctgagggactcctcagtcctggggcgtcgccgcctgcagcctcttccaagccctgcgtccagcgagcgtcacagcacaacctgcaaaaacggagctgggctgcagctggggctggcatggactttcatttc

SEQ ID NO: 49049 - DNA, 440 bp, Homo Sapiens
tatgggggaaatttttcattgttggatttgaattatactggattttatctgtgtagtcttacttgtctttattttaatgctgtctgaagggaacttggtatccaaataaagcaggtaacctcattttacttcaagggcatactgtgtagtgctgaatttaatctgaaaatctgatgattttgaaaagaaaaacaagtttataaacattgtacagaagaaattaaatgtgtgtgatggaaatcctgatggtggagcacgttgaattttctgatatatagtgttattttcctgggatcccctatgccttctttgtatttcaactaataaaggaaaaaccctgtcattaaaactggtaagataataggatattctgattatacagtattactattcctatcccattttctgacctttttctcaatcactgtaaatttttattt

SEQ ID NO: 49050 - DNA, 790 bp, Homo Sapiens
cctggtggcacgcgcctgtaatcccagttacacagaagactgaggcaggagaatcgcttgaacgcaggaggcagaggttgcaggagctgagatcgcgccattgcactccagcctgggcaacagagtgagactctgtctcaaaaaataataataaaataaatgaacacacatgctgctgagtccgcaggggggcagagcagaggacagcgtgcttttgtgtactgttggaagactggctcctcctgtacagcacctctgagcccttgtgcaccgccctgccacgggcaccatccagtcctggccgtgtgaccacccacagctgactgggcagcaggcacaggccctacccgagcaggccggagttggctcgcatgactccagctgaggctgcctgtgtacatttctccagataccctatggctaattttgttataactgcacagtggctgctgccattttgtattaaatatattgtgaaacaaacctatctggggagaagcaatctacttgccgctgcttcctgtctggatccagcttgtgtccttggagagtggctggcccaggtcctattcccgtcctccagcccgttctttcatgagggacaggaaggtaaaatcagcccttaggagagaggtctcagcctccctttcccagatctcccagtgagttttaaaggaagcagggagcccagagtgctaagttcttacagccagaaagaagcttatagatttctgaaaaccgcccctttgtttttaaaaagatcaacacaatttgactttctcaaggtcaa

SEQ ID NO: 49051 - DNA, 961 bp, Homo Sapiens
gggatcaggggccgagacctagctgggcttggggcggggccgagacggagcgaggggtccagggtgtgggaaacggggaggggtttgaggaggggatcggaatgtggctcaagttcgggaggcgttacctgcggagggtttgaggcaggcccaggagcgagcccatggtcttccgccgcggggccaggggcgggccccaggatccggagcttcgtgcggggccgagtccaggtttggggcccgggaggcggggccagttagggcgagggtccctgggatcgtcgggtcaggccttgggctaacgtaggcactctcgcagttcctccgccttcaggaaggtcttttcagcaggggccttacgggtgcatgcttcggtcctggaggccttatcctagcctcctctccatcagcgccacccgtctggggcccgaaaggagggagctttccctctgtcccccagcctttggactgtcagcaaacaagccattcgttcatcaaatactttttaagcgcctaccatgtgcctgacaggggagatgtaacggtgagaaaaactaggtgtggtccaggcccttcaggggctcaggtgctcgtggaagaagtggacattgaagtacttatcacacaaatgaggataaaagtacgatagcgatatctaccacgaagctgttgttccccaccagaaccaaatgagcgcaagatctgacaaagaaaaaaaaaggttcatcttttattcctccaaacactttcatttaaatcaagaggatgggatgtggttattgctgtgtttttagacagaatcaacggtttctgggtctgagatgttgcatacaccttctcagtccctgtatcctgagatggagtcacctgagaatccacagcaagtcctaaccagggatgggtctgggtgattaaggargttggctcagaactgggcagggsactgcttkctttkctgttt

SEQ ID NO: 49052 - DNA, 542 bp, Homo Sapiens
gagggggcgtatgtgtgccgagagtgcgggcgaggctttagccaccaggccggtctcatcaggcacaaagcggaagcactcgagggagaagccctacatgtgcaggcagtgtggactgggctttggcaataagtcagctctaattacacacgagcgggctcactcggaacagaagccttgtgtgtgcagagagtgtggccaaggctttctccaaaagtcacacctcaccttacatcaaatgacacatacgggggagaagccatatgtgtgccagacgtgtgggcggggcttcagcctcaagtctcacctcagcagacacaggaagaccatgtctgtccaccacagactgccagtgcagcccgaccctgagccgtgtgcagggcaaccttcggattccttatactctctctgaatgcaaagatggggacaaggactaagagtcagaatgttgacactttgatgaaatggagtagagaaatgcattctgtaagtggtcaaaggacatttgactgtttactttctccacactaagtcttctccat

SEQ ID NO: 49053 - DNA, 607 bp, Homo Sapiens
ccgggcagtaaatccatgcaatgcctcagacgttataaccaaataatgcctggaaaatcgacatgaatttatgtgaagcataagcctttaatttttttaaagaaaagtagattgctgtttttccacatcatttcagagccgttctctagttttgcatgccctttactgcagaaccatacagattttgttctccatttcatacatcatttgttgaaatgccctttaaaatgtaacggaatatagagctttatgggaaaaaatgctgtagaaaataaattatcttctctctttgtattgggaaccaaaaggtctcaccttattaatgaccacagagactctcctaaagcaattctggaagtcaaaacagctggagtctagtttaatgggaaccctcattaattagacaagaacaccaaggctatgaccacagcagctggtagcagcagccctgcagtgaagtagactctcagaggacacaaaggaagagtgttttgataagaaatctacagcaaagggtggggcacatcatcatttgaacttgtacacctgactgtgggcaaagacctgtatttaaaacaatgcttgtatgtaggcccatgataacttg

SEQ ID NO: 49054 - DNA, 502 bp, Homo Sapiens
tttagtataaatattcctttgcttccaaccataaatgtgttcttagaaatgggcctatagtttagtaacctatagtttggtaataggcttgtttgttttcagatggattttggttctgtgagctaaagctattttgcattaaagccttcgtcctcacacattgttttgacatatttctagtcttcataaacttttttaatttagatttttttcccttcacaagtatacatctgttttagcaaatagccttatgaaggttgtagatgtattattttgggcatgcctggtgatttctatattttttccaattacatttaaagctttatgttttaggaatataaggtacattttatttctactttttattatatatatttaattgcacaagtactactgtctagaaaaaaatgggatgttgctaacacagcattgttggcttgtaggcagtgctgtcctgtaaatagattgaaatgtatttttatcagctggtatataaatttga

SEQ ID NO: 49055 - DNA, 504 bp, Homo Sapiens
gcacattctaataaatgatgaaattcagtccaacatgcttattataaacatagcaattcttgctctatcaaattagcttatatgccaaatattaaatatggtttatttaggtaagcataaaaacataggggctatcatttttaaagacttgattttctctattgtggtaaaatatataaatacatatttgccattttaaacatttaccattttaaccatttttaagtgtacagttctttcgcattaatgcacccatgaccgccattcacttaaatttttaaaagaacagtatattctttttttcctagagccttcagatgagagggaacagtatattctattgcacgtctacaattcccaaaagacctcttactttgggaggccaaggtgggtgggtcacttgaacccaggagtttgacatcaacctgggcaacatggtgacctcccgtctctctcggaaaaaaaaaagaaaaaagaaaaagccgggtgaggtggtgtgtacct

SEQ ID NO: 49056 - DNA, 422 bp, Homo Sapiens
ggacattcctgtcataggaacatgcttatataaacatagtcacctgtccttgactatcaccagggctgtcagttgattctgggctcctggggcccaaggagtgttaagttttgaggcatgtgccataggtgatgtgtcctgctaacacacagatgctgctccaaaaagtcagttgatatgacacagtcacagacagaacagtcagcagcccaagaaaggtcctcacggctgctgtgctgggtagcacttgccatccagtttctagagtgatgaaatgctctgtctgtaccgttcaatacagtaggcactggcactagccacatgtgccagctaagcacttgaaatgtggccagtgcaataaggaattgaacttttaattgcatttaataaactgtatgtaaatagtcaaaaaaaaaaaaaaa

SEQ ID NO: 49057 - DNA, 819 bp, Homo Sapiens
cgaccgctcggcactggaccagtaccgcgccggcacgctctccatcaccgagttcgccgacatgctctcgggcaacgccggtggtttccgctcccgttcctcctcggtgggatcctcctcctcctaccccatcagccccgccgtctccaggacccagctggcctcctggtcagaccccactgaggagacgggccccgtggctggcatcctggacacggagacgctggagaaggtgtccatcaccgaggccatgcaccggaacctggtggataacatcacggggcagcggctgctggaggcgcaggcctgcaccgggggcatcatcgaccccagcaccggtgagcgcttccctgtcaccgacgccgtcaacaagggcctggtggacaagatcatggtggaccgcatcaacctggcccagaaggccttctgcggcttcgaggacccacgcaccaagaccaagatgtcggccgcccaggccctgaagaagggctggctctactacgaggccggccagcgcttcctggaggtgcagtacctgaccggcggcttgatcgagcccgacacgccgggccgcgtgcccctggacgaggccctgcagcgcggcacggtggacgcccgcaccgcacagaagctgcgtgacgtgggcgcctactccaagtacctcacctgccctaagaccaagctcaagatctcctataaggacgcgctggaccgcagcatggtggaggagggcacggggctgcggctgctggaggctgccgcgcagtccaccaagggctactacagcccctacagcgtcagcggctccggctctaccgc

SEQ ID NO: 49058 - DNA, 631 bp, Homo Sapiens
gcaatttctcagcaagacctggtacacatggctattcagattgcctgtggaatgagctacctggccagaagggaagtcatccacaaagacctggctgccaggaactgtgtcattgatgacacacttcaagttaagatcacagacaatgccctctccagagacttgttccccatggactatcactgtctgggggacaatgaaaacaggccagttcgttggatggctcttgaaagtctggttaataacgagttctctagcgctagtgatgtgtgggcctttggagtgacgctgtgggaactcatgactctgggccagactccctacgtggacattgaccccttcgagatggccgcatacctgaaagatggttaccgaatagcccagccaatcaactgtcctgatgaattatttgctgtgatggcctgttgctgggccttagatccagaggagaggcccaagtttcagcagctggtacagtgcctaacagagtttcatgcagccctgggggcctacgtctgactcctctccaatcccacaccatcaggaagaaggtgcctgtcggggctcacttgaagcctgtcagggatgctttgtatctaacacaacgccaacagaagcacatttgtcttcc

SEQ ID NO: 49059 - DNA, 607 bp, Homo Sapiens
ttgaatttaggtgacactatagaagagctatgacgtcgcatgcacgcgtacgtaagcttggatcctctagagcggccgcctactactactaaaattcgcggccgcgtcgacaggaaattaatgaggattacttttgagagtctgacatgcatatcataattttatgtcaggtattatagatattttgaaatggtgactgactcttttgaaattttaagttctttagaatgtgacgcttttaatatagcctctggttttagatggagaaacactatgctattgtcattaaaaattaattctatttccccaattgtctaatatatgtcttaaaagatctttcatattgtgaaacatcagagggtacaacctttgttcttcagtttaggtattaaagagcacacagaatactgtgtgattaaacatgtaaggccagataatgcatttgcaaaggttcctttattttaggtttaagcctgcataattgtggtcttaatctcaggatagcaagaaagagaattgtacatgaaagtatttacacaaagttcccaaagcccttgtgattatgcattagtttagaataaaaaaaaaaaaaaagtcgacgccgccg

SEQ ID NO: 49060 - DNA, 790 bp, Homo Sapiens
  misc_feature (697)..(697): n is a, c, g, or t
ccctatgggattttagatagcatttcccacttgatgctccttgccctcatcaccattcatcttattactacagtcagtttctgtggactaccaagataatagcgctttcccaaacacaagcactcattttaaagcagttatcttttaatgtgaattctctttgttaaaatgtcaatgttgtgagatttggtagcatattcctatttaaactagtgaatatgattttgatatgaaccttgaaagatggggaatttgagtgcttttaacgtgttgaaagtgtaacacttgaaactttggaggctgggaaatcgaggcgatgaagtgttctataagataggttttctgcccttttaaatatagtggtgctgtctttgtttccaattggaatttcagtgtaatgcactgttctcacttcagatgcagaggaaggataaaatagtgaagttgatatggccctgttcagccaaatttccgaatcataaagtgacatgctaataggatatactgtggcatttctgtgtattacagcttgtatggtttgagttacttttccacacataattttttctcctccacacaagtcattaaatatgttttcctgagagatagtcaagctttgttgtataggaaagtttcgtttgtggaaataaatgagtttcactgtaagctaatgtaattctattacgtgaggaaatgntccttaaaaaataaagaatattatatactggtggtttcctgaatattttttaaaagacacattaactatttcctatttcatccttcatggaca

SEQ ID NO: 49061 - DNA, 681 bp, Homo Sapiens
ctggataaagccagggtggggcggaggcgggctagcttcatttggctctgacccccgaccccagggtcgtatcttcatttgactcagttgatttcactgaaatgtgaataatgcaaagtgactgatgtctggatgatgcttgggtggggcggagtgggctagctccatttagccccgccccaaggctatgtttatcttcgtttgaccgaattggtttcaccgaaatatggatgatgctggagtggggtgcagggtggctaccttcatttggccctgaccccggccccagggtcgtatttatgtttatcctcgtttaaccaagttgatttcaccgaaatgtgaatgatgcaaagtgaatgatgcctggatgatgccggagtggggctaagggggctagcttcaatttggccctgacccccgcccccagggtcgtatctatgtttgtcttcatttgaccgagttcctgttatcgaaatctggatgatgctcagcaccccgaagggcttcctggaatcagctgtggttttaacccattaacatttttaaatgggaatctgattagactccgtctcaaaaaaaaaaatgtatatatagatgaggtttcagttttatttaaaacacgaggccgagcatggtggctcacgcctgtaatcccagcattttgggaggctgaaacgggag

SEQ ID NO: 49062 - DNA, 735 bp, Homo Sapiens
ggagttttaggcctcaatcttaacatcactggtattttaaatttggcaatgaatatgaaattacttttgacttacagattgattatattattactttgaaaatgcattaatttcttagaaaagtttggagcctctatctttttttgagttaatacttaaattctcattacttatattaatagcctgtactaagtgaaaatattatttatgcaagtaaacaagtcactataggcttttaagacttttctttaattttagattttgtcatcaaagtttaaattttttacctactgtccacttaaatataatttaacagtttgtaaagtgaaatagttttaagtatgatgtatgatgcacctgcatataaatgaaaatggcgtgcacaaagacactttactatgggaactgtactggaagatttatgaaagcatgtgaaattgcacctaaaattgtgttattagtgactataagcagcaatgctaaatttattgtacttgatgaatgaatgtatttagtcacagttactttggtttaaatgtataaatgtctttagggttttttttttaaatgtgtttgtaatttgtactattgtgggggtatacttggactgcaggggttattgtcaatgtgtgatttgtgtttttattttatagaatcatctaatgtgatatacccaatttttataagtgatatttacataaattctaaataactgtatattttgacaaacctatt

SEQ ID NO: 49063 - DNA, 403 bp, Homo Sapiens
cacgaggactcatggcacagggtcctgggcccactctgccctgactcaacctgcctccgtgtctgggtctcctggacagtcgatcaccatctcctgcactggaaccagcagtgacgttggtggttataactatgtctcctggtaccaacagcacccaggcaaagcccccaaactcatgatttatgaggtcagtaatcggccctcaggggtttctaatcgcttctctggctccaagtctggcaacacggcctccctgaccatctctgggctccaggctgaggacgaggctgattattactgcagctcatatacaagcagcagcctcgggaatgtcttcggaactgggaccaaggtcaccgtcctaggtcagcccaaggccaaccccactgtcactctgttcccg

SEQ ID NO: 49064 - DNA, 783 bp, Homo Sapiens
gcgtccgcaggatgatgatactgatgcggttgagattgctatcgacggcacggcttttatggacgagttcttttctgagattgaggaaactcggcttaacattgacaagatctcagaacatgtagaggaggctaagaaactctacagtatcattctctctgcaccgattccagagccaaaaaccaaggatgacctagagcagctcacgactgagattaagaaaagggccaacaacgtccggaacaaactgaagagcatggagaagcatattgaagaagatgaggtcaggtcatcggcagaccttcggattcggaaatcccagcactctgtcctttctcggaagtttgtggaggtgatgaccaaatacaatgaagctcaagtggacttccgagaacgcagcaaagggcgaatccagcggcagctcgaaattactggcaaaaagacaaccgatgaggagctggaggagatgttggagagtggcaacccggccatcttcacttctgggatcattgactcacagatttccaagcaagccctcagtgagattgagggacgacacaaggacattgtgaggctggagagcagcatcaaggagcttcacgacatgtttatggacatcgccatgctggtggagaatcagggtgagatgttagataacatagagttgaatgtcatgcacacagtggaccacgtggagaaggcacgagatgaaacgaaaaaagctgtgaaataccagagtcaggcccgggaagaaattgataattatcattgtgctagtagttg

SEQ ID NO: 49065 - DNA, 600 bp, Homo Sapiens
agtggaaaaagttggtgagggactgaatccttgttctgttgtttatccatgaagcctatatatttctagtgcaaaaggcccagtgggtctcaaaacattcttggaggggtttgacacactgctattagtagtgactcataattccacgattccctgggatacagagaaggcaggggggtagtactgtttgaacaaaaatcttcccaagaccctggcaaagagatcttccttaggaatcagtggcatatgcgtttatgttctttaacagggaaagtaaaagtgagcgcacttttttgaagctcataaatactcatgtgactgtaaatttagaaatgttaattaattgggcctaatgtttgatctggaaaagtacttagcagtcaccaggaatttgccttgaactgactcgaaccacaaatcagaaccgtatttccacaatttaatttttccatgagacaatcataaaaactctgctgggattatattactaaaacctttatatcccattgcattggatatgtttgtaggtgagtaatgttaaatttaaaaaaaaaaattaataaagcatttgtttaggacctctgtatgcttgataaagta

SEQ ID NO: 49066 - DNA, 756 bp, Homo Sapiens
tgcttactagctgcatactttggatacttgtctaaaacttgatgatactgtctatctgagggacatagccttgtcactcccacagctgccgcgggagctgccatcgtcacatacaaatgcaaaggtggcagaggtgctgagcagccttctgggaggtgaaggacacttctcaaaggatgtgcacttgccacacaattatcatattgattttgaaatcagaatggacactaacaggaatcaagtgctaccactttctgatgtggatacaacttctgctacagatattcaaagagtagctgtgctatgtgtttccagatctgcttattgtttgggttcaagccaccccagaggattccttgctatgaaaatgcggcatttgaatgcaatgggttttcatgtgatcttggtcaataactgggagatggacaaactagagatggaagatgcagtcacatttttgaagactaaaatctattcagtagaagctcttcctgttgctgctgtaaatgtgcaaagcacacaataaagtgaaaatcaaccttttcatattaggagacatgcatttgtaaaaattaataaagatgacaagtcagttgtcaatggaattgagcaatctgctaagacaaaaatgttacctcagttcactatttaaaataattttaggaatggaagaaatgttgttactgccatttaaaatatgctgagaaatttcagaagggttattttttcaccacacctattcctctagggccagat

SEQ ID NO: 49067 - DNA, 540 bp, Homo Sapiens
cgcgtccggccaatgagccgcgcgcctctgccgagcgcagccaactaaatcggcttggatgattcgcgacctgagcaagatgtacccgcagaccagacacccggcaccgcatcagcctgctcaaccctttaaatttacaatttccgaatcctgtgatcggattaaggaagagtttcagtttttacaggctcaataccacagtctgaagctggaatgtgagaaactcgccagtgagaagacagagatgcagcggcattatgtcatgtattatgaaatgtcctatgggttgaatatagaaatgcacaagcaggcagagattgtcaagaggctgaatgctatctgtgcacaagtcattcctttcctgtcccaagagcaacaactccaggcccagcatttatcacatggacatggtctccccgtacctctgactccacacccttcagggctccagccccctgccattccacccatcggtagcagtgccgggcttctggccctctccagggctctaggaggtcagtcccatcttccaattaaaga

SEQ ID NO: 49068 - DNA, 911 bp, Homo Sapiens
acacccagcgaaaagtttgtttgaataaacaatatccgaaagacaattagtttcttcagatgtattttgaaattctcctaaagagctagtgtttctattcattttcacaatttaaaaacagctcttaacattgctgaagttgggagaactttccatctcttcttaataacagtgcaagattttgtaaattcttttttgtgtttaatgtttaataaaacgagtattaagcttaaattactgaagtacctgggagaagtaatgatgtgtactttcaaaaaaatggaaaatgcttttattttattttctataatttgttaacatgatatgtaaaattaaacttcggagcacaatgaaatgccgattatttttaccttgtttgggcttaaagtaggtatttaaggtttatgtgttcaaaatgccttggtaaattggatgacctctaactttactgtccatatggagtttgtcattctttatggataagagaacttaaggaaaagttactgtttttcttcagtctttttatatctatctgatttaaaatctgttactttattaaaaggcttcaacaacaggttgttaggatgtagtcttacatccaggttcacataataaccccatttgaaatccaaaattgtgtatatttttccttatggccagcagttaatttgtatccccaattttaacttagggttgtgttcttgaaggtattaaaattttaaccctctttaacgaacacacaccaacacgcacaacaaagaataacaaaaaaaggggggcgcaaaaacatccccggggcgcaaaacacccccttttgaaaggcgcaacaggagaataaaagaaacgcgcgtacaaaggcgagaaacgcccgcatggaagcacccgggggaccgccccaaaggccgactacg

SEQ ID NO: 49069 - DNA, 671 bp, Homo Sapiens
  misc_feature (473)..(473): n is a, c, g, or t
  misc_feature (580)..(580): n is a, c, g, or t
acataatttctaaaataattttttcttatttatatactgacttttcaaaatacaaaattaaaatatcatgtctgacttcagtgatctttttctttttctttttttagaaatgagatctttcagtaatcctttaatttaattttttagagatggagtcttggtgtgttacccagggtggactcaaactcccgggctcaagtgatcctcctgcctcagcctcctgcatagctgggctacaggcatgcaccaccacacctggcttagtaatccttctttattaatggtttgtcacagtacgtttgtgatgttatattgctcatggcatactttatgtgttcgaacaaaggtggaaatttccattgatttttttttttttaaatgtatgcacaaacaatctggattttgaggagtacggtcagaaaaaaaaaaaaaagaattagaggcccttgaaaggtcaaccgtaagcttcttanagttaaaatatgagtttaattttttcccacattttgacagttgaaattttgatagggacagtaaacctatgagcctctattaggctactggattttttttaactggnaaaattccttgaagatttacatactatattacagattttaaaagtcaagactgacttaagtaaatcagaggtttggaattctggagctgta

SEQ ID NO: 49070 - DNA, 561 bp, Homo Sapiens
ggggaagcttattggagagtgagtgccaatggaactccataggtgacaccataagaacaaaatctacaacaaggagatctaggaagggcagctactgcctctctgctatgcctgcagtgtctctctagtgccctctgctgataagcctaacattgcaccagctggcaaatgagaaatgttcatgggatccagatccagatcagttaactccaaacaagaaaaagaaagattgctttggactaaggagcaataaattgataactggcacagtgttaccctcccttttttgtttttgtttttccattcacggctatactgtcaatatccattcatgctctatatgtatgattattggacattctatttttatacactccctggttttcttttcctttcattgttttggggctattttatagctctgaaagttgtagaaaactaataacaatgtaaaagatttttagttcatagaaatgaaaattatttgtgtctggtggaatatagtagattaaccaccctgtggttagaccattttccatcttttaaataaatgcattctag

SEQ ID NO: 49071 - DNA, 470 bp, Homo Sapiens
  misc_feature (402)..(402): n is a, c, g, or t
gtatagattaggaattctcattttaaaattaaggtctttttgtgacttttaccatggattattattttcccaaatacatgaccctgtttgattagcatatagagttttgacccagggagaggatgcagtgcccagcttctcagtggttaacagctgttcagcctagtgcatatcagaatttatgtgggtgttgaatgatttttttaaactagtgtaggaacacttgataccttctcagtagttatgtgcatgtttctgtagtttcccaagctaatgggagagatcttcaaaatgatgaaattttattgaaatcaaatagatacattaagaaatggaaatgctgaatagagcctagtctgctctacatgctctttggcaaattgttgggtcactgagacattntaagatagcaatataggccaggtgcagtggctcacaccttatatccagcactttttggaggctgaggc

SEQ ID NO: 49072 - DNA, 569 bp, Homo Sapiens
  misc_feature (538)..(547): n is a, c, g, or t
  misc_feature (549)..(559): n is a, c, g, or t
ggcagtgtgaaatgcttctgtagaattatagcagaaagcccttgctataacctggcttagtgcagacatgcaaatctgagatagcacaaccagtttggctggactaaaggtgcagatgatcagtctaaacagcagtggtgataagcagaagaattccttataattggtacagtggggttatctaacagggacaggaagggcactcactgcatctaatgaggttcaggaggtaattgaagtgtgttaaatggtcaaaggtgagacttcagtttgagcttcaacttcacttataatgacttgaaataatgtaataatgtgccatattacttagaaataacacctagctgttaagtgtcacagcagcttctgcagtgatgtgacgttattgataatgagcattttctataagaggacattggaaactgatgttgcatactcattcagaatattgtttttaatgttgaagtgaaaacacttgtacctgtaattttagtcaaaaccaaatataatgttggtctgttaaaattttctgacttannnnnnnnnnannnnnnnnnnnaaaaacatgt

SEQ ID NO: 49073 - DNA, 360 bp, Homo Sapiens
tgatagtaataattttcaagaccttcagtcattcctatgtctatgttgctatctttattttaaaacttagaaccctgatctaactcccttctcaagtgaagatactgtgtagattcaagaattataatgtagagtaataggcctttaagtttttttttaatctgttagaaataaagagcatgatttaattattgttgaattaacaattaaaatgaatccctttggagggatggcattgaataacttataatttcagtgaatcatttacgttttcattggaagacagtatctgatttcaactggtgcgttacgaagtagagccattcccacaaagtaaatgtgcagtgcccatgtttcttg

SEQ ID NO: 49074 - DNA, 869 bp, Homo Sapiens
acatggttcgctgcagcctcaacctcccaggctcaagcggtcctgctgcctcatcctccaaagtagctgggaccacagacatgcaccaccatgaccccagctgatttttgcagagatgggttttgccatgttgcccaggctggccttgaactcctgggctcaagtgatcctctcaccttggcctaccaaagtgctggcgttacaggtgtgagccaccacacccggcccgagtgagccattcttatctcttagggaatggtgggaaccctcctggagtctatgttcttagacaccacccaagggccaaccttgaagcaggcctttccaaggatcgcagttgaggcctgctctgttactgtttttctgcacagtgtgcaacaccacacagatgcccagtttctaccaaggtctgtggatggcaggataattttgaggaacctcctttttcgctaacactttcttcttttgtttacactcttcacattgtctattgagtctggattcaagatgattgattgtgaatatcgtgtgcatgatttgggggtttcctccttgtgaaatttttgaggtggcagatttgacattctacttttaaactcatcttggtggcacttttctgactcaccacctaaggcggaatcaataatgacgaaagaatacaaatagtgttatcagtcaccaaaaaacaaaaaaaagggggggtttaaatatccctggggccaagttagggtcccggttttgtcaagggcctaagggtgataaaagaagcaggcgggttaagtgatggaaagggtggttgggaagattttggggtaaatggcatccaggtagcaggataatggtgtggagtttgctaagtgttaaaagca

SEQ ID NO: 49075 - DNA, 480 bp, Homo Sapiens
ggaaacacgagtaatgagcaaggcaggttcctgctctcatggagcttacaatcaataggttaccgagcatattcgtctgctacaagtttgattataggacactttgtgttgagtagtcttgttctatttgagtacttgtttgagcttactcctgtttattttttaattgtattgctataactgttgactatttttttcgtgcacagttcgaaaatagtggtaaccatttgtttgtacacattgtgccattgaaaactacgtttttacagacacttatgtaatatatacatgctttggtaaatgaatggatgaatggctctgtcatttgacatgtcttttaaagtctaataatcatgtataaaaaagataacggttcgctgcatctgttacctttaggagtatgtacaagtggaacattatgttttcagtagtgacctgttttgactgttacattcttgacccttattaaatagtgtcttg

SEQ ID NO: 49076 - DNA, 680 bp, Homo Sapiens
attagggtgttaaagttagatatgaatttaactgggttaagttccaaaataagggaaagtgttaattttacaggtgccaaatttcttatggtacctaaacaaaaattggtaagttccccggctttttgaattattttccaaagagcaacacctgtaaacaccaaaattgtataactaaaaagactttgggccttggaccaagtctttatctggcctgcaatgaagtcatggttctttttgaatcccactctcacttttttctttttacccttagatattgcatccgtggtatttcaggggtatagagaaataatattggaatttaggagctatttttttaagtgaaaatattactaagtggtatcttttgatgattacctactttaatgtgtcttagaaaagcaccaaaacatagcatgattattttttcagttaattaaaattagttaataacatgttcatttaaaaactattcattgactttttgtaccagtcatatgcagggtacagtaactgaggatatgggaaataaaataactgacatagtccctgctctgaaggaacaaaggaaaaggaattgcaaatttttattaaaataataataataataataataataataatgtgttttgcctggaagttattagctgagattctacccccccaaaaaaaaaaaaaaa

SEQ ID NO: 49077 - DNA, 480 bp, Homo Sapiens
atcacgaccgagatcctcaagtcagtggtggctcgctttgatgctggagaagttatcactcagagagagctggtctccaggcaggtgagcaacgaccttacggagcaagcagccacatttgggctcatcctggacgacgtgtccttgacatatctgacctttggaaaggagttcacagaagcagtggaagccaaacaggtggctcagcaggaagcagagagggccagatttgtgaaggaaaaggctgagcagcagaaaaaggctgagcagcagaaaaaggttgagcagcagaaaaaggcagccgtgatctctgctgagggcgactccaaggcaaccgagctgattgccaactcactggccaccgcgggggacggcctgatggagctgtgcaagttggaagccgcggaggctctcggaacatgacctacctgcccggcggggcagtccgctcctccggctgccccatgagggcccaccctg

SEQ ID NO: 49078 - DNA, 398 bp, Homo Sapiens
  misc_feature (376)..(376): n is a, c, g, or t
aggaatgtctaaatcagattgtatgtttggatcgccctcacctgtcccattgaaaccaactggtttatttgttcaggtaaacctagctcaaacggagaaggaggcgtgtctgtcatctgttcactcaggagctgctccctgagtgctctcagctctgcaccatgtccttgcgctgtgctggcagtgtgggccctccttcctctggctgacctgcagcactcctgtctgtcctgcgcgggtgtggtgcgtggtgaggcttactgggcaccggatggcggggccttgtttcagaactcctgcccatggtcttgcttttcagttaacttgcaaaattctgccacccacatgccttatttcagctctccttggatatggnttcggttttaaggctgtttcag

SEQ ID NO: 49079 - DNA, 570 bp, Homo Sapiens
tcgaatttaggtgacactatagaagagctatgacgtcgcatgcacgcgtacgtaagcttggatcctctagagcggccgcctactactactaaattcgcggccgcgtcgacctgaacaccaggttgtttcctctgactttaacagtgacactcactcttccactttcgatgctggggctgccattgccctcagtgaccactttgtcaagctcatttcctcgtacaacagtgaatttggctacagcaacagggtggtggcccatatggcctccaaggagtaagactgctcgacaaccagccccagtgagagcacaagaggaagaaagagaccttcagcttctgggcagtccctgccatgctcagtcccccaccacactgggaatctcccctcttcacagtttccatgcagaccccacaaagagctctatcttgtcgtgtaccatcaataaagtcctctgtactcaaaaaaagtcgacgcggccgcgaattagtagtagtagtcgacccgggaattccggaccggtacctgcaggcgtaccagctttccctatagtgagtcgtattagagctt

SEQ ID NO: 49080 - DNA, 728 bp, Homo Sapiens
  misc_feature (9)..(9): n is a, c, g, or t
tgccatggnaaatgtttcctgtatactgtgacctggaaagtgggagcattgctttgaacacagtgcttgctctagccaagcctcttctcacctttgaaaatgggactggtagaccaggcacagtggtgcacgcctgtaatccaagctacttaggaggcggaggttgcagtgggctgagatcatgcattgcactccagcctgggcaacaagagtgaaattcagtctccaaaaaaaaaaaaagaaaagaaaaagaatgggactgctaaatcctgttctgtgggatgccgtgggagggagagaggataatggattgaggaagacatccatatccccttatggaaaatacctctttggttttggggaaccactcctttctagggaatttggttagggctgactcatttcctggcttcaggggctaccctgggcccagatttccagggcccggattaccagtgaagcgtcaatccctggatttttattgaaaccattggagaagagccatttcaaataaatctgccaagtatcctagctctttgcaactcactgtgtagtttttgggcatttccttcctctttctcattctgtttccctgttggtaaaatggaatggtgaccaacaagtgacctatggttacctcatagatctgccacttgtctgagggagtcagaatgcacttgtctgttccctgtccaataaaaggcttcacatgcaaaaaaaaaaaaaaa

SEQ ID NO: 49081 - DNA, 928 bp, Homo Sapiens
tcggatgcttcctagcggcctgtgttgattggctgcccgaagatccgccctcctgccgtgggcccagccccgcaaatgcgcagctaagcgggtggcaaggggcgggtggagcgcggggcgcgacggcggaggggggcgtgggcagccggacgtaccctggcagggagcagcaggtggcggcggtgcatggggcctggccccaccagcgggcactggcccacagccacggccggggggccatctagctggagagagaagggacaggtgacccgatcggagcccaacccagccctcagcggtggggcgagagacagcgaggggaatcgaggttggggaggttatctagggagatcccggagggaatctggtgaggcctgaacggagggagatctggggctgaataaagggcttctgccctctaaagtcgcaaagacgtagggtgagccctatatctggacggggagaccaggagccagggaggggatctgcagaatgggcagcaggtctgaggcaggggaaagagaggggtcttacatgggaaggtggatccgtggcccggggactggggacccccgtgacagctggaaggagaagaaagaggcatagggcgcgtggaggggcgaatgagggcggtggcgcggcgtgccccagcgtgggtccctttccctctccaggtgtctatacacgccccgccggacaaaaggcccacctccttccgggtcctccggggaaaggggacccatgaagggactccccctgtggcctccctcttccctggagccaacttccatccggctcctggccaactgcccgggaacgtgtgcccttcttagttccccggttttccgaaaccttcttgcccttcgcggtaaatttaaactggtggggggaaggttaaggaaccggtgaaaatcccgttcccggggcc

SEQ ID NO: 49082 - DNA, 765 bp, Homo Sapiens
  misc_feature (678)..(678): n is a, c, g, or t
gccacagctgtcacgggggtccccagtccccgggccacgtgatccaccttcccatctagatggccccccggccgtggctgtgggccagtgcccgctggtggggccaggccccatgcaccgccgccacctgctgctccctgccagggtccctaggcctggcctatcggaggcgctttccctgctcctgttcgccgttgttctgtctcgtgccgccgccctgggctgcattgggttggtggcccacgccggccaactcaccgcagtctggcgccgcccaggagccgcccgcgctccctgaaccctagaactgtcttcgactccggggccccgttggaagactgagtgcccggggcacggcacagaagccgcgcccaccgcctgccagttcacaaccgctccgagcgtgggtctccgcccagctccagtcctgtgatccgggcccgccccctagcggccggggagggaggggccgggtccgcggccggcgaacggggctcgaagggtccttgtagccgggaatgctgctgctgctgctgctgctgctgctgctgctgctgctgctggggggatcacagaccatttctttctttcggccaggctgaggccctgacgtggatgggcaaactgcaggcctgggaaggcagcaagccgggccgtccgtgttccatcctccacgcnaccccacctatcgttggttcgcaaagtgcaaagctttcttgtgcatgacgccctgctctggggagcgtctggcgcgatctctgcctg

SEQ ID NO: 49083 - DNA, 635 bp, Homo Sapiens
cctaaggacatgtctgcctggtgctgctttgacttcccaggtccgggaggctttctctttctctcttttcccaaggtgaggctggcaagctatcagtctctccagagcaaagagaaatggcaggagaattgactgcgtgaaccccacagggccgttagtggaaaaataaatgtctaaattgaaagggtcacacttgtgtagatggtgactgtcttgcttgcagcagctgaggacaccgactgtgtttagcgagtgtcctgcttttcatgtacacatctggcttaataagaagtcacgatgcagacgtggccttggctcagaccctctgtgctggacacaaatgactttgattcaaactcaagtccttggagtgtcacaaaggactaacaacgctggctgggacaaaacctacagcttctctaaatgctgaggggcccctatggagaaatggcccagtgtgtttctcatgggtgtctcctccacttccccacagaatgcaatgaactcctgattccccaggtcacctacaggatatatgtccaatggatggggatctcctgccttccagagaatttgaggggaagaaatgaccttttcctgagacaggaccatctcaatttaaaaaaaaaaaaaaa

SEQ ID NO: 49084 - DNA, 700 bp, Homo Sapiens
  misc_feature (2)..(9): n is a, c, g, or t
  misc_feature (11)..(21): n is a, c, g, or t
  misc_feature (26)..(28): n is a, c, g, or t
  misc_feature (493)..(493): n is a, c, g, or t
  misc_feature (640)..(640): n is a, c, g, or t
  misc_feature (685)..(685): n is a, c, g, or t
gnnnnnnnngnnnnnnnnnnntttgnnntcctcgggcctgttggcctactgggtgttttacaatcagtggcttagattcagtgaaatacagtaattcattcaattatgatagtatctttacagacattttaaaaataagttatttttatatgctaatattctatgttcaagtggaatttggagacactgtgttctaattttaagaactgtttcagtgttattagattagtagtagggctgtagatggggtctttcgaggtcctttgcctacctcagtaacagaggctgggtctgagccttgctcgagattagctcttcaccaggtctgtgtggtaatcatatcgtagttaccgtaggtcacgctgcaagtgtaatttacagtgaggcatagtcttttccagtgattggaatacttgtgtcaccgatccagggtttctctttcctgagtctgaaatacctgggaaaccagttagaaggtgactgggtagcctangagtcaaggatcagaaagggtacttcatatatatatggcagaattggtgcaggtgatcctttgaaaaatgacaagaattgatgaaattttggttacttccttcaattttttgctgaataacatctcctttctacctgattggagtangcttgctttctcttacttaatttctataaattggcattggtttgnctcaagtaaaaaaaa

SEQ ID NO: 49085 - DNA, 650 bp, Homo Sapiens
  misc_feature (619)..(619): n is a, c, g, or t
ggatagagtaagtttagtactccaaaaggcacctctgatgttttagtgtttttcgtttctttttttgagacaagagtcacactctgttgccaggctggagtatagtggcacgatctcagcttactgcagcctctgtccccaggttcaagtgattctcctgcctcagcctcccgagtagctgggactacaggtgccagctaccacacccagctaatttttgtatttttagtagagacagggtttcaccatgttggcaaggctggtctcaaactcctgacctcaagtgatcctcccgcctcggcctcccatagtgctgggattacaggcatgagccactgggcctggccagtgttttaggtttttggcactgagtagctatcctcccattttaaagtacaaagcactatgagcaaactgttcttgttgatctctttgcataaatctgttaaaagacttccttctaaggattcttgatactgctttgccattttaagtagaggtaatctaaaggcatggtgtacttagccataaaattcttacacttgtctcacctcaaagcagaggcaaggagcaatgtttacagtcaacttttaatacttactttttggaaatctcttcnaatatactggactttaatacccttgctgctt

SEQ ID NO: 49086 - DNA, 942 bp, Homo Sapiens
atcaatacttccttcttcctaaaaatccagatcaaaacttcaggttaggtttctaagtttaggacatgaatattatttttttctggaaaagaagatgagtatatgtgtaataagacaagtagaactgagagatttagtttttttttttttttaagttttagttcagaataacattaattttgagagattgaggtaaagaaccttaactaatgctaaggagtttattttgattaacataggttattctgaccaccacctcttccttccttaatctccttagaatctgacagtctcaaagctgtcacacaaattagactaattttgacactttgaaatgaaaacttcaaggaagaagtagccacggacagttatgtttataatcagtaggtggcactctttcctcaggtagccccccattttcacatgatgtgtttgaaggttaaatgccaccaaaagtgctgagtcagctataaaactaagtccctgaattccatggcccttttaaatatgtaatcattcaagattgaaaaaaaaaaaattaaagcattttttgtttgtttgcttgattgtttttgagacggagtttccctcttgttggccaggctggagtgcaatggcgccatctcagttcactgcaacctctggcctcccggattcaggcaatttctcctgcagccctccaagtagctggggttaccggtgcccgcccccatgccccagctaattttttgtatttttagtagagaacgggatttccccatggttcaccctggttgcccaggctggtccttgaactcctgggccctcagggatctggcccgctcaaactcccaaaagtggtgggaataatagggggggagcccctaagccttgggtgagaaaacttaagttccccttaactcgttgggaattctcttgggagttaggagatattccccagag

SEQ ID NO: 49087 - DNA, 562 bp, Homo Sapiens
acgcgtccggagcaactgaaggagcctgtaatcaccaaagaggatgtggacatgttggttgacaggcgagcagatgccgcagaagcactttttttattagagaagggacagcaccagactattctctgcgtgttgcactgcatagtgaacctgcagacaattcccgtggatgtggaggaagctttccttgcccatgccattaaggcattcactaaggttaattttgattctgaaaatggaccaacagtttacaacaccctgaagaaaatatttaagcacacgctggaagaaaaaagaaaaatgacaaaagatggccctaagcctggcctctagctttcactcgtggtgaatatttcagacctaaagatccagatagtatctctgttcatatgtgaataagttgaagattgtggggctactttttctcatagcactttattttgaatgttgttagtttgtgctgagaatggtcgtccgtatttgaaccaattatttattttaaaatatatttaagctacatttttgttttgaaaaattgccataaatttggtgccactttctt

SEQ ID NO: 49088 - DNA, 465 bp, Homo Sapiens
ccacgcgtccgggcagcgccttcaccagctgaccaggagactgctggagaagcagctcctccatgtcccttatagcctggaatatattcagtttgttcccctgctcaacctgaagccctttgcccaggagttgcaactctccgtcctcttcctgaggactttccagtttctctgcagccatagctgtcgtaattggcttcctctggaaggctggaaccacgtggtcaaactcctctgtggcagtctgacccgcctcctggactcagtcagggcgatacaggcagctggcccttgggttcaaggaccagagcaggacctgacccaggaagccctgtttgtttacacccaggtgttctgccatgctctgcacatcatggccatgctccaccccggaggtctgtgagccactctacgttttagccttggaaaccctcacctgctatgagactttgagcaagaccaacc

SEQ ID NO: 49089 - DNA, 685 bp, Homo Sapiens
gggacaagctcagaaatccaaaaattcagggagggcacagggtaagaagagaggtttgctcagctttgtgctctgatggcacccatctgtactccagcaaagtcatagctgaagcccaaatcgctcaaacgtgtgaagtcaatcatttttcctatagggctctgtttccttttctttaccttctagcttctcttgataaaacagttgggagaactgccaacgtgttcatcagtgagagggtgtggttctttccgatatgttcagcacgtgcatattcatttatgagaaaccaaagtaacttcttcaactcgggttactgtgggatgattaagtagatataaagtgatttaaaagacagcatggtactttcactcagcttaacatgcagctgggatgtctacaatacaagatgtggtgggttttattttattttattttgaggcaggagtgtaattatcttagggttgatataaaggcccatgggaagagttacggattgtacatgggaagaatccataaggagtattgccttgctcaagaatttaatccgctgacagtatgcttcttccagtttgccttacttcctctgcaagtttctttgctccttagggcagaggttttattgaatagattaaatgaggtcagtaagattagttaaaaatagtcattccttgggggtgttgga

SEQ ID NO: 49090 - DNA, 705 bp, Homo Sapiens
gggagagaactagtctcgagtttttgttttaattacaaaattaaattctacattgttaccaagaaatttgtggtgataaaaatggaaaaataaaaatttggggagttagtgaggttctgtgcttatgtctatttgttctggacatgggtaatggagggttcacctgcaacttaatttcaaacagtcagacaaagggtccaagcgggaggagaagcaaagtgagaaataagagataaaaatagacaagtcaaaaggcaggtttttagaatctcctcatggtgaactttttctctcttttgtccactgcatggtttctgtgattgaacctgcctgaatttaatcatgaaaacaagtgaaataatgtatgttaaatgcctggcagagtacttagcacagactagtgacccaataaatcagtgattgtcaaaaatccttatgagtcttctttaaaaaaataaaggccacttcctctcaaaaaattctcatacctgtcatctcagcactttgagaggctgagactggaggatgacttgagcccaggagtttgagacaaacctggttaacatagcgagaccctgtctctacaaaaaaaaaagaaattaaaaattagctgggcctggtggtgcaggcctgtagttccagctactctaaaggttgaggcgggaggatggcttgagcctgggagggttgaagttgcattgagct

SEQ ID NO: 49091 - DNA, 940 bp, Homo Sapiens
  misc_feature (663)..(663): n is a, c, g, or t
  misc_feature (679)..(679): n is a, c, g, or t
  misc_feature (779)..(779): n is a, c, g, or t
  misc_feature (781)..(781): n is a, c, g, or t
  misc_feature (785)..(785): n is a, c, g, or t
  misc_feature (872)..(872): n is a, c, g, or t
  misc_feature (901)..(901): n is a, c, g, or t
  misc_feature (940)..(940): n is a, c, g, or t
aatatgaagttgctacaaaactccactgtgattacattattttatagcacaaccaataatgattaaacataattatttcctttgactacttttcatttcagtggtaaaacagctgatgaaagttatttgggatggaaagagtaatacaagacatacgcagatggagtctcctgtgcgtaggtttagcacacccatgttagcttgtccacattaggccttcttttgaaggtactgtatctaaagataagggcataagtgatcatttaattctcagccacttcactgatactacaaggtgttacacagtaattatagtggtttgatacagacatttgtttacaagaaactgaattggcattattaacttatttcacacaaaaaaagttagctttacccatgaactgtaattcagattgataaggtgacctacccatgaaaaagacacctgagacctgtttacttttttaaactatgaagtgaaatcctcagttcaataagtgtcccaaggagaatttcctctgttaaattttccctgttaacttagtataattggttttcttgaatagaagaataatgatttctgtaagatattttaatgtgaatatttttgctgtcttcatctttaaaaattaaatacagtactatatatagatattaaaattntaaagtgggactaggntgttttatgtatacaattacagtttgtctcctctctttgcaaattactggctattatcagaataagggtggactcattttgcttatcccagtcattaaangnttgngatctgtttcttacatatttagcattttatttttaaaatgagatgtgccattatcataccaaaggcaactattaattgttcctaganaaaatgatggtaagggactacttcttagncaatattaacacttaattcccacttttttttttccacan

SEQ ID NO: 49092 - DNA, 798 bp, Homo Sapiens
ggtacccagatgggaaggaaggagacagccgcgcgcttcactccatttgtcacctcatgcatggaccatactctgggtttgagatcattcttcattgaagtttgtaaaaataggttgaaattgtaaagctccatgatcattgctatatgtagatatatttcaatttaagcaaaacaagctgcaagttattccctggcatgctcaaaggattttcgtgcttttcacttaatagtccaaagtctcttaaattcctgctgcagacatcaatagcttatctatattctcaaacaccaaaaggaaaagttgaatcttgctctctttggtatactaatgtagtggtatgctaagctggctcataccaacttagaaaagctgattgtaaaattttcattttgacagctggttattaaatgcagccattattaaaaatcaaatcatacaaacttataattaaatcaattacatttaaaacaaaggtaataaatattccaagcatatcacttcctaatttgatcttgatgctcttgaggtaatttacgtccatggtacctgtgtggtggaattactatatatgatggtgtgctactgggcaccttgtctcaactcccctcttcgtgatagcatgttggtagcttgaaatcagcctggtggggagtattaccctggacactggcaaaagctacagattcccggagagccaggggttaaacattttacagcctacccactgctaataatcaagggctaactggtcccagaatccccccaggaaaaatgaaatgggaggtttccattttt

SEQ ID NO: 49093 - DNA, 640 bp, Homo Sapiens
gaccatggaggccagtgccagcacctgcccagtgggccccgctgcagctgtgtgtccttctccatctacacggcctggggcgagcactgtgagcacctgagcatgaaactcgacgcgttcttcggcatcttctttggggtcctgggcggcctcttgctgctgggggtcgggacgttcgtggtcctgcgcttctggggttgctccggggccaggttctcctatttcctgaactcagctgaggccttgccttgaaggggcagctgtggcctaggctacctcaagactcacctcatccttaccgcacatttaaggcgccattgcttttgggagactggaaaagggaaggtgactgaaggctgtcaggattcttcaaggagaatgaatactgggaatcaagacaagactataccttatccataggcgcaggtgcacagggggaggccataaagatcaaacatgcatggatgggtcctcacgcagacacacccacagaaggacactagcctgtgcacgcgtgcgtgcgcacacacacacacgagttcataatgtggtgatggccctaattaagcaaaatgcttctgcacacaaaactctctggtttacttcaaattaactctatttaaataaagtctctctgact

SEQ ID NO: 49094 - DNA, 591 bp, Homo Sapiens
gttttctctagaatattgttttgaacatccttgtaaaagatttgcgagttaaactattttatttactgtctgtgagagcattgggagtaggaaacgatggactccaaagtacaagggagaatacccattttcattcagctatctggagtaaaatatcaagtacttccttcaactaatcttgtctcattcactcaccttttgatatcgaaggcagaaattgcgtttacaacactgaagaccaaagctttttaattagtaaacaagcggaacatagataatggacaatgctggccactgccattctgtgttcagaaagactatgagacctgaacatatggccaagaggaaagaagagtgacgttgtctaagatgtaatgagtgctctctgagagaatcactcaattcctattggagtgcaatccttacttgagaactttattactcttgttctgtgtagttttttttttttgtcacttccccatcagaaaagcatattctttttgatagagggtcagtgttataaataattgtcttttgaaataaaatcaaatattcatgcattgaaaaaaaaaaaaaaaaaatcgctaatcg

SEQ ID NO: 49095 - DNA, 631 bp, Homo Sapiens
  misc_feature (294)..(294): n is a, c, g, or t
  misc_feature (300)..(300): n is a, c, g, or t
attatgattaggagcactaataaagcacaaatcagggattcccaaaaagaatgttgaaagggcagtcagcttttcctgtgccagaaatcaaagtcatagcagatttggggcaaatatgtcaaagtcaaacttacgcacatcactactgagaagacaaagatgaatgtgtgacagtttcctgcccccaagaatctttaagcattgtgaaggaagattaatatagccaaataactagagtgatcagttctaccagagaggaccagttttggaagccagaggaaaaaaaaaaaaaancagaancaaaatgatgtttgaattaaatctttaaaagtttctcttataaatttaccaagccacatattgggaatggtaccccaggcagaaggagtagagtaagcaagccagaaaggaaatactatggtgcttttgagtaactgcagtgtggctgaagaatgtggaaaatgatgaggataaagaggtggacagggaactaggtaagggagggccttccttttaaataattagaccttgtcctgtgtacatttaatgggattttaatcaggccataatgccaaatttctttacttcggaaggatctttatggtgatggtttcagaaaaaaaaaaaaaaa

SEQ ID NO: 49096 - DNA, 408 bp, Homo Sapiens
  misc_feature (391)..(391): n is a, c, g, or t
gaaataatgagttgacataggaattacctacatattttggctgtacatttagtgcacaaaatatcccttttttgaatgccaaatggccaagtgtgaaaaccaatatttgttaaagctggagcagaagtcggtatcatcatcatagagtaaacttctggcatatgtgaagatatgaaatgttatccctgaagttattataatttattctcagaaatattagtaatcttattttaagagtaggacattatagtgcagtaatgataattttctcagtgctgcctgttgctagattgttcctatgattgctgtcatgcacatacagacactaaattgaggggtcactttccactgaagttagtgggaatacaaaatagggtgggagggactttcnttcctctaacgtcttta

SEQ ID NO: 49097 - DNA, 621 bp, Homo Sapiens
  misc_feature (508)..(508): n is a, c, g, or t
ggcacgaggcttttgcttacgttagcgagtactagtttgttagccagtgttagtttctgttgatcctaaccaaaaaaccctaactgagatatcagtctcttagcgcaaagtttgtgaatacggtcatccctccatatgaggaggggagtgggaattggttgtgggacttccgtggatatccaaatcagtggatgctaaagtcccttacataaaatggcatagtatttggttatcatcctccccatacatcatctctagattatttatagtacttaatacaatgtaatgctgtgtagtcatactgtattttttacttgtatttttgttgttttgtgggatttaaaaaatatttttattctgaggatagttgaatccacaggatactgagggccagctgtattcacaacccaaatcacatacaaagcgacaagttcatacacaataggcctattagaacaggactgttctctcttgtttatcattgcagcctttctagcacaaagcctgngacattctggacatttagtatgtgttaaatttctcttactacattatttccaacagtatttactgcaatctgcaattaccttccttttgttttgtaactgtgtcccccactag

SEQ ID NO: 49098 - DNA, 447 bp, Homo Sapiens
agggagtgctcgtctttggggcgggggtctctgcagcctgttctggggctgggcctcggtgcaggtctggtcgggctggtggcctggtggccctgagcggagcgcgtgacaagaacgccgggtttaatgaggttctcagggaacggcctgctcctagcatgggatgtactttacgctggggaggtgaaggagacccctagtaacagtctccagctgcctactgctggaggcagtagaacaaggtgcattcccaagaacaatcctctccgtcggtgcaggaggaaaggtgggatttgctaaaggctcagtgggaaacaaaggaagcacttgggctgtgctgggggcatccacaaagaagataaagggctcctccccagactcagtgaccacatccacggtcgctcaaagcaggcagcaagaaaaggttcgaccacaaaagacgagcac

SEQ ID NO: 49099 - DNA, 718 bp, Homo Sapiens
cccacgcgtccgcgggccgctgccgcgacgtgtggaggcaggagagcgatgattgccgcaggagaagtgcgggcgcccttcacctggggcccctcccgaaccgcccccgggcccatgcccctccagggcccaggagcgagccagcgggagggcgagggcgagcgctcctggcgaggacagattaaggcgaacccccagtcagcggacatttgagcggctcctcgccgcgtctctgcccccactccaaaccggactcgacgcctgtcccgggccgtgacgcacgcaccggaggaaaaagtgcttctcggctcgctccctctttggggaagagagctcactccccatgcgggcgcgggacactccatctctgttcctgccggtcgggtccgcaaacaccggggatcccagctgcggcgcccaaagggttaacgcaggcgttcggccagtgcaaaccggcctcgcaggatccgcgcttaaaatccgggtgttttcattttgggtttgtttcttctactatgccaagctggtggctctcttttaattctcttgtaacatctcaaccctgcacccatctttcctgaggggaaaaggaaacgggataacttgcggtatttcgatgctcaaaggtaaccggcggctctgctccaaccttcaagagattttgcaagttgaaaaaaaaaaaaaaaccatccttcgtaacatctacttaaaaaaaaaa

SEQ ID NO: 49100 - DNA, 806 bp, Homo Sapiens
  misc_feature (742)..(742): n is a, c, g, or t
  misc_feature (768)..(768): n is a, c, g, or t
aaaatcaatgtacaaaaatcacaagcattcttatacaccaacaacagacaaacagagagccaaatcatgggtgaactcccattcacaattgcttcaaagagaataaaatacctaggaatccaacttacaagggatgtgaaggacctcttcaaggagaactacaaaccactgctcaaggaaataaaagaggacacaaacaaatggaagaacattccatgctcgtgggtaggaagaatcaatatcgtgaaaatggccatactgcccaaggtaatttacagattcaatgccatccccatcaagctaccaatgactttcttcacagaattggaaaaaactactttaaagttcatatggaaccaaaaaagagcccgcattgccaagtcaatcctaagccaaaagaacaaagctggaggcatcacactacctgacttcaaactatactacaaggctacagtaaccaaaacagcatggtactggtaccaaaacagagacatagatcaatggaacagaacagagccctcagaaataatgccgcatatctacaactatctgatctttgacaaacctgagaaaaacaagcaatggggaaaggattccctatttaataaatggtgctgggaaaactggctagccatatgtagaaagctgaaactggatccttccttacaccttatacaaaaatcaattcaagatggattaaagatttaaacgttaaacctaaaaccataaaaaccctagaagnaaaacctaaggcattaccattcaggncataggcgtgggcaaggacttcatgtccaaaacaccaa

SEQ ID NO: 49101 - DNA, 433 bp, Homo Sapiens
gcgagagaaaaccacgtgcaccaaactttaggggaggaaaaatgggaacgtggggagaagacgtgaggcggcagatctgaaaaagatggtcattccggactcctgacgccgccagtcccgcggtgagacgtgagcgccattggcgtccgtggcctctgtttccgtggcaacctagtaaccattaattttcaattaaaggagacaaaaagctcgatgacagctccaggtctgctgaagatgtcaagaatctgtattaatatacagcaagagagcataattgtgtgtccatcttccagagcagcgaaaaatggagggataattaccagctcgaaagccactctgtaatttagttcttactgtcaccacagccctacacattagcataaattaaaagcagagtttattgttatcaaagtgcaaaaaaaaaaaaaag

SEQ ID NO: 49102 - DNA, 440 bp, Homo Sapiens
cgatcacgtaaaaccaaaggaaactgaaaacacaaagcaaccttcaaagagctgccataaacccaaagccatagttcataccgagaaggtgaacatgatgtccctcacagtgcttgggctacgaatgctgtttgcaaagactgttgccgtcaattttctcttgactgccaagttatttttcttgtaaggctgactggcatgaggaagctacactcctgaagaaaccaaaggcttacaaaaatgcatctccttggcttctgacttctttgtgattcaagttgacctgtcatagccttgttaaaatggctgctagcaaaccaatttttcttcaaagacaacaaacccagctcatcctccagcttgatgggaagacaaaagtcctggggaaggggggtttatgtcctaactgctttggtatgctggttttataaagggataga

SEQ ID NO: 49103 - DNA, 569 bp, Homo Sapiens
tactcgttgcataaatttgcgctccgccagcccggagcatttaggggcggttggctttgttgggtgagcttgtttgtgtccctgtgggtggacgtggttggtgattggcaggatcctggtatccgctaacaggtcaaaatgcagatcttcgtgaaaacccttaccggcaagaccatggcccttgaggtggagcccagtgacaccatcgaaaatgtgaaggccaagatccaggataaggaaggcattccccccgaccagcagaggctcatctttgcaggcaagcagctggaagatggccgtactctttctgactacaacatccagaaggagtcgaccctgcacctggtcctgcgtctgagaggtggtatgcagatcttcgtgaagaccctgaccggcaagaccatcaccctggaagtggagcccagtgacaccatcgaaaatgtgaaggccaagatccaggataaagaaggcatccctcccgaccagcagaggctcatctttgcaggcaagcagctggaagatggccgcactctttctgactacaacatccagaaggagtcgaccctgca

SEQ ID NO: 49104 - DNA, 379 bp, Homo Sapiens
gcttgatatcgaattcgtatcggcattatggccggggtggggtctcagtgagtgcagcgctctcgggacgtctccaccatggcctgtgctctgctattcctcaccctcctcactcagtggcacaggctcctgggcccagtctgccctgactcagcctgcctccgtgtctgggtctcctggacagtcgatcaccatctcctgcactggaaccagcagtgacgttggtggttataactatgtctcctggtaccaacaacacccaggcaaagcccccaaactcatgatttatgatgtcagtaatcggccctcaggggtttctaatcgcttctctggctccaagtctggcaacacggcctccctgaccatctctgggctccag

SEQ ID NO: 49105 - DNA, 720 bp, Homo Sapiens
  misc_feature (651)..(651): n is a, c, g, or t
  misc_feature (670)..(670): n is a, c, g, or t
  misc_feature (690)..(690): n is a, c, g, or t
caaaccaccccacaggctgtttgtaggacaggcagaagtaagtgcttgtctgggcagtgagttgataccactgtgcttttctctcttttttatctctcatgcctttctctcttttgtgtttaagatcggagcacagtgctacttggaatgttcagctctgactcagaaaggtctcaaagcggtttttgatgaagcaatcctcaccattttccaccccaagaaaaagaagaaacgctgttctgagggtcacagctgctgttcaattatctgaggttgtctgggacctgcctccaccccatccagggatgagaatggcagccaatctctgtggccaagctccagccaaaaaggagggcacgaccagaaaggaactccctttgcacggaggcttgccccatcaccctctgagccctcccaacacagcacactagtcagcccactgccacgacctccctgccagccagaagcatccgtactgcacgctgtctgagaatgctgggcctggattgcagacagtgccgctgctgatcgcatcaaaaacaaagtcaaaggccatctcacattttacaaatccccagctcatgaacgtgaagctgataggaaatcaccccagggaacccgaaaaagaaacttgattcctctattgctggncttacttgatgtcttttantaaacttgggactacaatanaaaaaaaaaaaaaaaaaaaaaaaaacactt

SEQ ID NO: 49106 - DNA, 1172 bp, Homo Sapiens
gtttacctgagccctttaacaacctcaaataggccatatttctctctctggttgatggcatggaccctacaggaaaaaccacaccttaccgcttctgaccagcatcactacaaaaaggagtgctgaagccaatcaccatgtaagcaagataaaagcaaagggggtcttgcctgcccatctctgttccatacattcttaccaggcactgagagtcatggggagtttaagactccatcccacatactccttttgaaactggtccagtgtacaacatccagtgaagagtataggatggcatagacttaccaactcaaagaatggaacggattctagaaacattatagtccaacctcctcaattcatcgttgatacacaaaggcccactaagctgtgtggttcactcagcatcacgtggctaatatgatatgaagccacactagcttgtcctcagctgtgccaagaatgagagctgccttctccaaacctaaaaccaacccatggcatcattaacacctctttaaaatccataggacagtgatccaaaacttattccctaaatcataaatatcttttcataaggagtttcctttgtaagggatttgaccatgccattaggaataaaattttaataacgagaatgtaagtttaaaccataaaatgaggagcttagggtggttcttaggcagaatctaactatgacattactgaaatgctcccacaaggccaaaaaaaaaacaaattcccttttagcatgaacctcccaaggggttgtcttattgaccctaaaagaagagctcacgataatggaggagcctttcttccacaggtcctcaacaagaccaaattccaatgagcttccacattgcagaccttgactttcaattcctggccgttggtctgttgttctcaagaattccaaaagaccctctttggtggtgggaccaacacatatgtaaggcaccgtgcaaccaggtttaatcgaagtgaccaagtgagggcatcacgaaagctttcttcacccccataatgggagggcagcacacaatagctgtcagacacctattggtgacgtcaccctgctacggacgggcaaaaaattcgcacacaatcgaagaacccacctcctgatagaagtttcccagacgctcgttagaatcgtgcccagataccca

SEQ ID NO: 49107 - DNA, 828 bp, Homo Sapiens
  misc_feature (729)..(729): n is a, c, g, or t
aaataaaatagctataggtaattaaaagctaattagataaatcaagtcacagtttcatccttcagattaaggtgctccaatataatccataccacagcaaacaaaatcctgaagaattctgctgccaatcatcttgcctcttaacctcaatataacaagaacatacataaaagagattaccgatttagtaaatgctatcatctcataccccattcacaccactggcctgtgatattcttcccctgggagagatgtcaagatttaatgagattctatcataacctgtagaaaaaatgagcaacatggaaacattccaattccagtcttaggtgagttccaatgaaattacctgaagaactgaactagtgcttttagttaaggggaaaagtgccctagcttttaaaaaatatgtctataaatctagttttaaaaacatagcaattggctgcatgtggtggctcatgcctataatctcagcattttgagaggccgaggtgagaggactgcttaaacccaggagttcaagaccagcctgaacaaaatagggagacccccatctctacaaaaataattttaaaaagctgggcatggtggcatatacctgtggttccaggtacctggagggctgacgtaggaggattgcctgagcccagcaggccaaagctacagtgagctgtgattgtgccactgcactccagcctgggcgaggagagcaagactctgtctcanaaataaatacataaaatacagcgtccaaaagtgtgtcatcttctttctcttcacaattttataataagggggtaaaatgcctgtgagtctattcattat

SEQ ID NO: 49108 - DNA, 621 bp, Homo Sapiens
cacaatacactcactgcagccttgacctcccaggcttaggtgatctttccatcacaacctcctaagtagctgggactacaggtgttgcaacaccatgcccagctaatttttctattttttgtagagacaggattttgtcatgttgtccaggctggtctcgaactcctgggctcatgatccacctgcctcggcctcccaagtgctgggattataagtgtgagccaccgtgcccagtctgatctttacttcttatgaggacttgagtcattggatttggggcccaccttaatccagtataacctcatcttaattacttcggcaaagaccctgtttccaaataaggccatatttcacagataccagggtataggacttcatatcgttttgagggacacaattcaacacataacattagttaagcgtctcatggagttcggactggttggggtgataatatttgtttctttttaagaatgtgcatttcctgccaggcacagtggctcattcctgtaataacagaactttgggaggccaaggcaggaggaggactgcttgagcccaggagttagaaaccagcctgggcaacagcaagaccctgtctccattaaaaaaaaaaaaaaa

SEQ ID NO: 49109 - DNA, 368 bp, Homo Sapiens
cgagaacttccaaatgttatttttttttttgaaaatataaataattactatttggtactgtgtggtatctctggtcttttgtttcactcacctgccttgttcttgggtctgagtcccttgcttaagggattttgaagtcctagttttcagcttgcagagattatgtctgaaatgcctaatgagtcgcagggatttgttgagactccgtaatctcaagttctctttgtgagctatcagcatctgccagtctcttgtcctccctgagtatctcacagtccgtatcctgatgagggatcaggcccctacctctgccaaggcaagtaatggtagtgggcttttaaactgccccccggttccccgggatacag

SEQ ID NO: 49110 - DNA, 502 bp, Homo Sapiens
  misc_feature (278)..(278): n is a, c, g, or t
ccacattttgttgttataacagttagtagttagtattgctttcatatatagactccagaatctaaattttacgataatgacatttcttctggtcatgacaaatgtaatattttacaaatataaatctacgtagaatccaaagacacacacggagcagtcctgtctgagaaataaaaaatcaggacacccatggcatcgtagtagcccctcgcgtccagcaggtggcgaagggaggtgaggtttatttattaaatgggaccgagtgggacggggacggngcagccctaagggtagggaagcattgtcaatttctggggatagaatgagacccaggcatagctggagtttgaagctttgaagcaaaaatatctgtagaacatcttaaacgtgaccaaaatatgatgttaaaatcagcaactctttatacgttaaaaactttgaaacctgtggccgggcatggtggctcgcgcctgttattccagcactttgggaggccaaggca

SEQ ID NO: 49111 - DNA, 577 bp, Homo Sapiens
gtattcagttttgtattctggtcctttgttcatttaacatcttacaagtatttgtccatgttgtaacagtagtgtattagcttacactccttgcctgttcaaaatgtctttcaggcacagcactggcctttaagcctgtgtcgtagggatttccagagaatgctctgtgtattgaagcacagaaggtgtttctgtgtctcagtgtgtttctgtccctaggtttaaggcttcatgtcatggaggagattttatagatgtcaagctaatgaccttagagttttaaaaaatccgtgaccgtggccgggcgcagtggctcacgcctgtaatcccagcactgtgaggctgagatgggcgcatcgcatgaggtcgggagtttgagaccagcctggccaacatggcgaaaccccgtctctactcaaaatacaaaaattggccgggcgtgatggcacgtgcctgtaatcccagctactcgggaggctgaggcaggagactcgcttgaacctgggaggtggaggttgcagtgagccgagaatgccactgcactacagcctgggcgacaaagtgggactgtctcaaa

SEQ ID NO: 49112 - DNA, 859 bp, Homo Sapiens
tccagagctctgcacaaactcttccatttccttaggcagggtttggctggtttacagtgaagtcctccaacaaaatcaacatttggtaagaatgggcgaggaaattcaaaatcccaataggttcgaatgagccacatttcagctttccccattgtctcaaataatgtagtgggtcttcctagaacttcactataaaactggtcccacttcttcagatcataaatttgaaaccaaaagtcaaaataaagcatatgtatcatattttttatcctctccatggaaatcatttgatcacttaattctgacataacaacaggtacataggaaggagggaacagaaatcctccaccattcttctcaaatgtgtagccaacagagaatcgaagactgtacagaaagggtatgttaaatagttcagccagtagctcaccacagggattaagggcatctgccagaatgacatcaaactttgactcttgtagtttcatcataagtttcttattcaaaactgcatctttacagagcttgttactgtagtcataatattcccaacacaattcttgtaattcgtgaaaaatatgaccaaaatgtattttttgaaacaccatatatccatctatcgagaattttcagaagagaatcttccaaataatttttagttaaaggatgtaggataaacttctaatttaataggcagatgatttactgggcatttgacaaggagtagaagcccgaagatgtccaccacagtcaccctcatgacccctctgaacaagctcttccaggattggtccttcatattttatccaatggctgattctgtggggcacaattaacaacctttccacagtttctctcg

SEQ ID NO: 49113 - DNA, 744 bp, Homo Sapiens
caaaaattaattctagctagactagcagttagtcttctactttttggttactcccttttagaaattggaagctatgaagctatataccctgtccatttgaaaatgcacataagcaaagaactttacaaataggttataaagagaagttcaatctcagcaaaataagggaagtgcacattaaaacacaagaaaccatctcagagccaactaatatttagcgtgcatacaaatcaaaagctggaaagggtgtggaaaaacaggaatacattgctagtgagcatacaaattggcacagcctcttttaaagacaattgtgtatcacccattaaattttaaaagtcacataccctgtgacctaacaattccaacttttaatgtcctaaagaaacatacatgtgttcacaagatagcctgtacaatgatgtcaattgcacctttgcttgtacagtagacccccttatctgcattttcactttttgaggtttcagtcatccaaggtcaaccacaatacaaaaatattaaatggaaaattccagaaacgaacataagttttaaacttcaaacctttctgcatagtataataaaaatctctcactatccctctccatcctgcctgggacaggaatcatccctttgtccagtgtatccacaatgtatacactcattatatacccattttataatgcccattagtcatttctattatcagatcataaaaaaacatagtacatagagggtttggta

SEQ ID NO: 49114 - DNA, 565 bp, Homo Sapiens
aacattttaaaatttattctgattagtttgtgtcttttttttttttttgagagagagagtcctgctctgtcactcaagctggagtgcagtggtgcgatctcggctcactgcaacctccgcctcccaggtccaagcaattctcttgccttgtcctcccaagtagctgggattataggcacacaccaccatgcctggctaatttgtgtctcattttcaagagtagaaaccctaaatattttattttcattccttttccaaattgctatgaatgggattaaaggattacagatgtaaagtctattatttgtgaattctaaatgtagttctgctgttgtacctgtggaaacatcttaaagaagtacatattttgcacgtcctgcacgtgtaccccagaacttaaactataattaaaaagaatagtttcaaaaaaaaaaaaaaaaactcgagggggggcccggtacccaattcgccctatagtgagtcgtattacaattcactggccggcgttttacaacgtcgtgactgggaaaacccctgcgttacccaacttaatccccttggcaga

SEQ ID NO: 49115 - DNA, 1029 bp, Homo Sapiens
gtgtgagcgcagaaggcaggactcgggacaatcttcatcatgacctgctcccctctcctcctcacccttctcattcactgcacagggtcctgggcccagtctgtgttgacgcagccgccctcagtgtctgcggccccaggacagaaggtcaccatctcctgctctggaagcagctccaacattgggaataattatgtatcctggtaccagcagctcccaggaacagaccccaaactcctcatctatgaaaataataagcgaccctcagggattcctgaccgattctctggctccaagtctggcacgtcagccaccctgggcatcaccggactccagactggggacgaggccgattattactgcggaacatgggatagcagcctgagtgcttgggtgttcggcggagggaccaagctgaccgtcctaggtcagcccaaggctgcccccatcggtacactctgttcccgaccctcctctgaggagcttcaagccaacaaggcacactggtgtgtctcataagtgacttctacccgggagccgtgacagtggcctggaaggcagatacgcagacccgtcaaggcagggagtggagaccaccacaacctccaaaacaaagcaacaacaagtacgcggacagcagctagctgagcctgacgcctgagcagggaaagtcacacagaagctacagctgccaggtccacgcatgaagggagcaccgtgggagaagaacagggcccctaccagaatgtacataggtactaaagcctcaccacacaacagggacgactagagctgcagggatcccagggaggggactctccaccccaagcccaagggcatcaaagccccttgtccccggcgctccaataaagcccgcgagaacaatcatcgtggccagcagcagaaagcaaagagacaactccagggcccacagcacgggggccggcaaaaagaggccagaagcggcacaaggcatcgcgaggaccagggcaagcggcacgcacaagggacaaatgcgagcccaacaag

SEQ ID NO: 49116 - DNA, 617 bp, Homo Sapiens
cccgagtgggtctagtgtcttctccagggtgctcccttcatgcgtgacctggcagctgtagcttctgtgggacttccactgctcaggcgtcaggctcagatagctgctggccgcgtacttgttgttgctttgtttggagggtgtggtggtctccactcccgccttgacggggctgctatctgccttccaggccactgtcacggctcccgggtagaagtcacttatgagacacaccagtgtggccttgttggcttgaagctcctcagaggagggcgggaacagagtgaccgagggggcagccttgggctgacctaggacggtcagcttggtccctccgccgaatacaccagcactcaggcttctatcccatgttccacagtaataatcggcctcgtccctagtctggagtccggtgatgcccagggtggctgacgtgccagacttggagccagagaatcggtcaggaatccttgagggtcgcttattattgtcataaatgaggagtttgggggctgttcctgggagctgctggtaccaggatacataattattcccaatgttggagctgcttccagagcaggagatggtgatcttctgtcctggggccgaagacactg

SEQ ID NO: 49117 - DNA, 806 bp, Homo Sapiens
gcccggaactgcctgctgagctgcgctggacccagccgagtggccaagattggggactttgggatggcacgagatatctaccgggccagtaattaccgcaggggggaccgggccttgctcccagtcaagtggatgcccccagaggccttcctggagggcatcttcacatccaagacagattcctggtcttttggggtgctgctctgggagatcttctcactgggctacatgccctatcctgggcgcaccaaccaggaggtgctggacttcgtcgttggaggaggccggatggaccctcctaggggctgcccagggcctgtgtaccgcatcatgacccagtgttggcagcacgagcctgagctccgccctagctttgccagcatcttggagcgtctgcagtactgcactcaggacccggatgtgctgaattcactcctgccaatggagctggggcccaccccagaggaggaagggacttctgggctggggaacagatctttggagtgcctaagacccccacagccccaggaactgagtacagagaagttgaaaagctggggaggtagccctcttggcccctggctgtcctctggcctcaagcccctcaaatccaggggcctccaacctcagaacctttggaatcccacttatcgctcctgagccccaaggggccctgagggtaaggactgaggcactgagggtccctccctatactcctcaggctcctgggtggcctgttatgccagcggcctctgttccctgcagtctgtgctgtgtgtytgggcctgtctcggggctggcctggc

SEQ ID NO: 49118 - DNA, 687 bp, Homo Sapiens
aggaccggtgtatttaatatgcaactctaccccttaagtacactttgtgcttgggagaggaggaggatggagatggttgccatcttatctatggcttcagggcagctgtgtagctttcctatgtgtgtattcaggcagggggctcagccctgagagaaagtgggcctctggcacacctgggacagggaagatattccctggcaagctctcaggcatctcaggctggcacttctttgtatccatggcaatttgctttcccctcactgaactgagatcagaatgttactctgttggtggctcccccaacagtgaaggggtgactcagtgacaatagtgctagaagtatgagtcaaaacactgtacaacttgagaaattccccgtttgcactacgcttggaagccaagaggagatgttaaaaagaaaagaataattctttctgaagacatttcccatcattgcacttgatgggttcaactgggaagggttactagactctggaagttgaaaactgcccacataattaaactgtacaacagctactcaggattaccttgcaagttttaacctataaaaatttaactttatatagcacttccaaaatagtttgccataatacctactaatctggatttaatttttaaaactcatccttttaacttaagattttaaataaaaaaaaaaaaaaa

SEQ ID NO: 49119 - DNA, 521 bp, Homo Sapiens
cacttaccagagtagtctgtcttttgaattcacagcagttgtatccttgagttactttgtaaatgtatttttctcagtacatttaaccactgggaaatgaacccttgtacgaatgtgtttcttctactcaacttaaactccagcaccacgaccctactactatctcgcacctgaaacaagctaacatgactaacacccttaattccatccaccagcacaacctctgctcctacaaccagcacaacctctgcccctataagcagcacaacctctgccactacaaccagcacaacctctggtcctggaactactcccagccctgttcctaccacgagcacaacctctgctcctacaaccagcacaacctctggtcctggaactactcccagtgctgttcccaccaccagcataacctctgcacctacaaccagcacacactctgcccctataagcagcacaacctctgccactacaaccagcagaatctctggtcctgacactactctggaaagggggacctc

SEQ ID NO: 49120 - DNA, 731 bp, Homo Sapiens
agctgctgtagcccctacgtggtgagtagatcgtgtccacagaaatcagcggaggcttccacagtccctggttggaatggaaccggcggtgaggatgagaggcgctgaagaccagaagacccagtgcgtgaacggggcgtgtcatccctggagtttcagtagaatttcaggcctgtctgcttgagcagcagaggaggagtttctgtgtgcctgtgagagactgtgtgtgtgtgtgtgtgtgtgtgtgtgtgatgaatgaacagggttgtgtacgtgtgtgtgcgttagacaaatgaacagtgttgtgtacctgtgtgaattgtcactgtgactccaggctctaggctctgcagattcctcagccctatcgcctcacagacacttgggatgtgcagcaggtaacagagagaagccagattcatggaggcgtgaaggatcccagcaagaaaacacagacttgatcttgagacgagattttcgaaatcggttgcggtctcaaggcaggctctgagaagactcgataaagagttctcaggaataggcatccctcctggatatttcccccttggaagcgccgaggagccagctctatgtgtgtaaccatagcatctctaaagctccagccccaggaacctgctgtgacttagagacagattccaccctagacatcagtgatcttggcctctcttgtatagggaaggtcaacagtgttccagtttctctcctactcc

SEQ ID NO: 49121 - DNA, 705 bp, Homo Sapiens
ctcagagagttggagggacttgcccaagactgcccaatggcaatgagatttcaacctcaaatcaatgttctttttaatgcaagatgataaagagtaggatttagcctaatttaggatagaataaagccaaataatttaggataggttctttggtgttcatgggtgtaatctaatgcccatgatgcaagtggcagagtagagaattagtgcacagcaataattaaagtgacatattgccaaaggaagcggttatagcccattatataataccttttaaaggacagacgcatactcaggtttattttacctgctgagcttctgccttagaagttttcagaattgtgattacattgaataggaaaaaagtctgaactatcagaagcagtgccgcaactttgacaaacaactgattatataataatctgcctctagcatgagactatattaattattatttagctctggtgacttcataagcagccagtgacaacagaaagttaagataataaaatgaaggaatgttacaatttgttatcatccgggagcctgaggcaggagaatggcttgaacccgagaggtggaggctgcagtgagctgagatcgcgccactgcactccagcctgggcaacagagactccacctcaaaaaataaataaataaaaagaatttgttgttatccacttcagagctcattaatgccacatt

SEQ ID NO: 49122 - DNA, 698 bp, Homo Sapiens
tttagaattttaaacatgtacaaagggctacattttaattttaaaatagcttcacattattttacttatattgggtttttcttcattttaatccttttcaagtggaatggcttagaataagtatacacttgaaatctcctctacatgatctttgttctttaacagtgtataccagagggttagttggggaaaaacttcattctcaggaaaagacttgaatgattatgtgaccctgttatatttcagtgttgtgacaaatgtgtaaactagcgggggaagacagtattgtatcataaatgagatgcgtagtttgttttctttcatgggaagtagagataaaaatatatacatttctctaattgagttgtttagagaaagaactaatgtctcatatgatgtatttacttattttaaaaaaaagaataggaatgagatgtccctgagctgtacttttctattattataaggcctttaggcatcagtgcatctgggttatcaacattttctcaaatgctgtcaatattttactgtaatttatgttcttatatttatgtatatttgttaaaactgtaaaaaaatttcacagatttttttccaatacctgtgcaagatacatgtgtagctcaaaactatttgtgatctactgtttgcatgtaagagaccaggatatgtaactcttatattttaagtgtatacat

SEQ ID NO: 49123 - DNA, 542 bp, Homo Sapiens
gcagctgcaggagtccggctcaggactggtgaagccttcacagaccctgtccctcacctgcgctgtctctggtggctccatcagcagtggtggttactcctggagctggatccggcagccaccagggaagggcctggagtggattgggtacatctatcatagtgggagcacctactacaacccgtccctcaagagtcgagtcaccatatcagtagacaggtccaagaaccagttctccctgaagctgagctctgtgaccgccgcggacacggccgtgtattattgtgccaaaggtggggatagtagtggttatcttttctactactacggtatggacgtctggggccaagggaccacggtcaccgtctccgcagggagtgcatccgccccaacccttttccccctcgtcttctgtgaggaattccccgtcggatacaagccacgtggccgtttggcttgcctcacacaggactttctttccgactccagtcactttcttctggaaatacaaagaacaacttttgacatttagcagaacccgg

SEQ ID NO: 49124 - DNA, 583 bp, Homo Sapiens
tgctgccatgtttcgggaccccttccgtaaggaccctaacaagctggtgttatgtgaagttttcaagtacaatcgaaggcctgcagagaccaatttgaggcacacctgtaaacggataatggacatggtgagcaaccagcacccctggtttggcatggagcaggagtataccctcatggggacagatgggcacccctttggttggccttccaacggcttcccagggccccagggtccatattactgtggtgtgggagcagacagagcctatggcagggacatcgtggaggcccattaccgggcctgcttgtatgctggagtcaagattgcggggactaatgccgaggtcatgcctgcccagtgggaatttcagattggaccttgtgaaggaatcagcatgggagatcatctctgggtggcccgtttcatcttgcatcgtgtgtgtgaagactttggagtgatagcaacctttgatcctaagcccattcctgggaactggaatggtgcaggctgccataccaacttcagcaccaaggccatgcgggaggagaatggtctgaagtacatcgaggaggccattgag

SEQ ID NO: 49125 - DNA, 818 bp, Homo Sapiens
  misc_feature (538)..(538): n is a, c, g, or t
ggtgtcactatttgaaaagaagttgttaatggaaatctctgcaagtatcgtactgtgtttagtctctcatggtagagatttcaaaagaagaaatgtatgtatcctaaatatgctgaaagcagtctgatgaaaggtttttaaatttcaggtgttaacttggtcaactctttgttaggaggttgtctgtactttaagtaaaattattctttggtttactggttattttggtttgctaaaattatgtcacttataattttgatttatatacaagagtgaagaattgaaggaaatactgaggagagacgtatgaactattttcttcatctcaattcctattttatcaaatgcaaaatgtaatcctaaccagttgattttctataattggtatcttagtactggggaggagtatcacatgaggaaagatttttcaaagcatgtcagctgaggcacaagaatcgcttgaacccaggaggtagaggttccagtgagccgagattgtgccactgcactccagcctgggcaacagagtgagacaccngtctcaaaaaaaacaaaaacaaaacaggtcaaaaatcagttgcacaagttgtatgaaaccaggtattctgcagctctgtctcttgtttattagatatgcacagtttctgaatcaacaaatatatctgtgattcttttatactactacataaaagaacaggagtaattctttgcttataaataaatgtgcaacatttcctatatggaatcatttggtccctaaaatatgattttagtccccgcaatgccttatccccgggttttctcctttttcctccccc

SEQ ID NO: 49126 - DNA, 821 bp, Homo Sapiens
caaagtggcatccaatcctttcacttacaattccttgcaggaatgtatgtctagaggctgtctagtagtgattatgagagggtttgtttgttttattgtttactgtattaggtgaggaatgccatatttcttgtcagccaacagtacttgtctgagacagaaatttaaaaaaagaaaaagaaactaactaattaaaatttctgtgcacttgcttccctgaccatattgattttattgcttaaatggaaacaatacgctggatttgacagatttgacccttgaaagaagaaaagccctatatagtacatgtttctttgggttattctagtactgtttccttatttgttctgcaaatttcaaatcattttttgtgtgcattattttacatctgtgaaactaaatgtgttattatgcactcattaaaaatgaaacaatccatttctcttggaaaaaaaaatgacaagctttagatgatgaaagcttaaattatccatcattgcaaaatgaatttcatataattgtgtgaacattattatgtaaatgagacattttctgttaaatttattatttgatggatcattatatggttgtcatatgtgtgtaggaaggtgtgtacaattacttggggatctgaaatgctttgtctcatgtggagttcagtgtaatcatgatttatctttggtgtgcctggattttaaaaattgggtcgatggaaatggctaggatctgaaaaatgaccggaaagttcatcaaattgggacaggataagggaggatttaagttgatgtttgtcatggaaaagcttcatgaaaaaaggggaa

SEQ ID NO: 49127 - DNA, 439 bp, Homo Sapiens
actcgagcactgggggagcccttggtactttcctcttcataccacagtatggcttgtgattccaaggaaaaagttgtgttataaccttacaagcagcttcagttccttcctggtaaacctgtggtccgtggaacatgtgttttgatccagcagttcctctgccacctggaatcttgagataagtgtgtgggtcagtgtgcatgtgtgcccatacatgcttatgaggaggtcagtgtgtgaggggaatcaggaagtctcttttttatttttaaatgaaatcaagtaaaacttaaccttggcttcaaaaatatctctcaaatactgtaaacaatacctttgatactttttagaaagagattatggccaggcgtagtggctcacgtctgtaatcccagaactttgggaggccgaggtgggcagaccacctgaactcaggaat

SEQ ID NO: 49128 - DNA, 809 bp, Homo Sapiens
ggcagacgagcgggttaggagactatgaagaacgacatggatcaatgaagtaccgggacggcagctgaacgcagagaaaagtatggcatccccgagccgccagagcccaagaggaggaagtacggcggcatatccacagcctctgtagacttcgagcagcctactcgggacgggctgggcagtgacaacatggcagtcggatgctgcaggccatgggctggaaagagggcagcggcctgggccgcaagaagcagggcattgtaacgcctatcgaggcccaaacacgggtgcggggctccggcctgggtgcacggggcagctcctacggggtcacctcaaccgagtcctacaaggagacactgcacaagacaatggtgacccgcttcaacgaggcccagtgagcagcttcaagagcaacttctccacatgttgggtgtccatcctggggcagggaaggacagagtgttggatggctgggacggggccttgctcttgtcggccagcccactccccagccagagagggcttgaccaaatcaaattgaggtggtgacttttgttggaaaattgggctgggatcacgtcctgtttgtaataaaagctgaaacagtctggcaaaaagaccaaacatcacactcgaacaatctaataaaaaaaacagccgcgggactattttggtgtgtgggggaacagagtcgtaggagggcgacaggtgcactagtggtccctggccccgattttgtcacaatgtgatatggcggccccctaatgaggacatcatcgcaacgccgattacgggtaaaggagcag

SEQ ID NO: 49129 - DNA, 655 bp, Homo Sapiens
cgcgtccggccctacatcgtgcgccagtgcgtggaggagatcgagcgccgaggcatggaggaggtgggcatctaccgcgtgtccggtgtggccacggacatccaggcactgaaggcagccttcgacgtcaataacaaggacgtgtcggtgatgatgagcgagatggacgtgaacgccatcgcaggcacgctgaagctgtacttccgtgagctgcccgagcccctcttcactgacgagttctaccccaacttcgcagagggcatcgctctttcagacccggttgcaaaggagagctgcatgctcaacctgctgctgtccctgccggaggccaacctgctcaccttccttttccttctggaccacctgaaaagggtggcagagaaggaggcagtcaataagatgtccctgcacaacctcgccacggtctttggccccacgctgctccggccctccgagaaggagagcaagctccctgccaaccccagccagcctatcaccatgactgacagctggtccttggaggtcatgtcccaggtccaggtgctgctgtacttcctgcagctggaggccatccctgccccggacagcaagagacagagcatcctgttctccaccgaagtctaaaggtcccagtccatctcctggaggcggacag

SEQ ID NO: 49130 - DNA, 710 bp, Homo Sapiens
taccacatcttgctagttttgtatttttagcagagatgggggtttcaccatgttggccaggctagtctcgaactcctgacctcaggtgatccacctgccttggcctcccaaagcactgggattacaagcatgagccactgtgcccagcctgttccactgacatttcttagacattcagcaaaacccccaccttaacctcttttctttcttgagggttggtcctgtccccacctccaccctcccaccccctggaagaggaagggcccgggcatcagtggctagtccaaataaaatatgggcttggggatggaatgggtggtggtaagttcacagagtgtagttagatcccaactcccatgacctctggcttcagtggtgggtggggcagggcagatgaaagggcttcagtgggaacctctgagagcattttcctgttccccctatcaaccgcccccagtgataacatctgtgaagccagccattactcaataaactgcaaacttgtctaaaaaaaacaaataatgtgaacaaacagataaataacaaccgtaccacagtacaacatcctcggcgccgctcattcgcgcgggcgagaacaggcaggctcttagacgggcgccgtggactatcatttctctgcccccttttttttcaccatgtgtaaaccccgcgcgccccaatagggccgaaattcagaagcgggtcccgta

SEQ ID NO: 49131 - DNA, 733 bp, Homo Sapiens
ttttttttttttttttctgtttccagctgttgccgctccagctgcttctgatgcttctcctcccgggcctgggccttcatctgctgcacctcgatggtgtcaggcttcctgcggcgcatatacaactcatggttgcccatgcagagctgcaggatccgcttgttgattctcagacgtggggcataaaacacaaagtcaggtgccttcttgtcgatgggtttaatgacaaactttttgtcattgaaagagatgttcctgatttcactccaaggaaagccaatctttggggttaacttatcatctttctcataaatattcagtccaagggcatcaactccaagccaaaggtctgttcctttcttgttttttatctcgaaatagttgattccatacatttccaggtcctgagcaatcttcaggtattccaacatagcattatctttgagcatcccacggtgttccgcatgccacacctggatccggtcctcccactggtccctggtaagtttgtgctggtccatcactctttgagggatcagccgctcagagctgaggtacccagacttgtgcacttctttgttgtagtcccaaacttggcctgcacagcgtaggaccccaagagcacggcagtctcaggggggcagtagatctcatcgctaaggattccttccttcacttggaggaagaaaatttctgggtgatgtcctggatgagctctcagcacatcttcagg

SEQ ID NO: 49132 - DNA, 533 bp, Homo Sapiens
  misc_feature (122)..(122): n is a, c, g, or t
  misc_feature (210)..(210): n is a, c, g, or t
  misc_feature (278)..(278): n is a, c, g, or t
  misc_feature (446)..(446): n is a, c, g, or t
ggggacgtcggctgcacgcggcatcagagcgtgcagaggaggatggcactggcgggatggccagggctgtggcaaggcggcgctgagcacggtgcaggaacacgagacaggccggcgcacangcactggcgaggcgggcacacccctggtacccattgtcgtagagcctgcgcggcccggggctaaggctgtggtgcctcagcctctggngcgcggactccaaggggttgcaggaacccgcacccctggcgccttccgtgcccgaggccccccagtgnaggcgctgggtgttggaggtggtggaggagcgcaccacgctgagcggtcctcgctccaagcccgcctccccaaagctctccccggagccccagacaccctccctagccccagcgaagtgcagtgcacccagcagtgcagtgaccccagtcccacccgcatccctcttnggctcaggcaccaagcctcaagtggggctgacctctcggtgcactgctgaagctgtgcccccagcaggcctgaccaaaaaaggagtg

SEQ ID NO: 49133 - DNA, 564 bp, Homo Sapiens
gtatcggccattatggccggggggggtctcaggaggcagcactctcgggacgtctccaccatggcctgggctctgctcctcctcagcctcctcactcagggcacaggatcctgggctcagtctgccctgactcagcctcgctcagtgtccgggtctcctggacagtcagtcaccatctcctgcactggaaccagcagtgatgttggtggttataactatgtctcctggtaccaacaacacccaggcaaagcccccaaactcatgatttatgatgtcaataagcggccctcaggggtccctgatcgcttctctggctccaagtctggcaacacggcctccctgaccatctctgggctccaggctgaggatgaggctgattattactgctgctcatatgcaggcagtttcacttggacgttcggcggagggaccaagctgaccgtcctaggtcagcccaaggctgccccctcggtcactctgttcccgccctcctctgaggagcttcaagccaacaaggccacactggtgtgtctcataagtgacttctacccgggagccgtgaca

SEQ ID NO: 49134 - DNA, 961 bp, Homo Sapiens
  misc_feature (596)..(596): n is a, c, g, or t
  misc_feature (738)..(738): n is a, c, g, or t
gacttgaagcgctgccagtatgtgaccgagaaggtgctggctgctgtctacaaggctctgagtgaccaccacatctacctggaaggcaccttgctgaagcccaacatggtcaccccaggccatgcttgcactcagaagttttctcatgaggagattgccatggcgaccgtcacagcgctgcgccgcacagtgccccccgctgtcactgggatcaccttcctgtctggaggccaaagtgaggaggaggcgtccatcaacctcaatgccattaacaagtgccccctgctgaagccctgggccctgaccttctcctacggccgagccctgcaggcctctgccctgaaggcctggggcgggaaaaaggagaacctgaaggctgcgcaggaggagtatgtcaagcgagccctggccaacagccttgcctgtcaaggaaagtacactccgagcggtcaggctggggctgctgccagcgagtccctcttcgtctctaacccgcctattaagcggaggtgttcccaggctgcccccaacactccaggcccctggccccctcccattcttgaaaaaggaggccgccctccctcgggggctccagngctgggcttgcccgcgcctcttttctttccctcctgaacagtgggttgtgtggtggtcctcctgtgaaatgcctaaatcccatcaccccttttccggcaaaactggcccaaataaaacagcctattttaaagggggggaatnccacctaatatcatacccccaaccagaatagtgattctcactgtgcccggccaaatgggtgcgactgcggccgaagcgaggagagccacgaccgcgcatagataagggcgtcggaggctaccaaacaaacccacaatctgggggggggggggcccccctttaaaaaaaaaatacccccccccaaggggggggcccccccagtttttaaacccgggaaaccccc

SEQ ID NO: 49135 - DNA, 480 bp, Homo Sapiens
gctcgacgttagatgataatatttttgtgtgatattatagccagtgacaagagagctaagggtgagccccttgggacggttctcacctgtgccccacttccccagtctggaggaggaagccatgtggaaggagaaaaggagaagggaactctctttttcgggaattaaggtgtcatatattgctctagctggcttgggacagaggagagaggagtgcatgtaaatcttctagtctctctgcttctcttgaaatgtggcagtctgagctccacgtttatattcccctatttcttctccctaatttcttacccagtgagtgctgagtgggtgcccgcaagcattgctgtatggcacccaggcctccagtgagcaatccttaaagcccagttttcctggggtcccagcctgctgtgagtcccagcctacacctaccttttgcatatgcttttcttggccttaggatagtactggactttgttg

SEQ ID NO: 49136 - DNA, 805 bp, Homo Sapiens
caagaatgcatttgagaatttccaggaacctgacatcggcctcgtcgcactggctttccttcagggctcctttgcctatggaggctggaactttctgaattacgtgactgaggagcttgttgatccctacaagaaccttcccagagccatcttcatctccatcccactggtcacatttgtgtatgtctttgccaatgtcgcttatgtcactgcaatgtccccccaggagctgctggcatccaacgccgtcgctgtgacttttggagagaagctcctaggagtcatggcctggatcatgcccatttctgttgccctgtccacatttggaggagttaatgggtctctcttcacctcctctcggctgttcttcgctggagcccgagagggccaccttcccagtgtgttggccatgatccacgtgaagcgctgcaccccaatcccagccctgctcttcacatgcatctccaccctgctgatgctggtcaccagcgacatgtacacactcatcaactacgtgggcttcatcaactacctcttctatggggtcacggttgctggacagatagtccttcgctggaagaagcctgatatcccccgccccatcaagatcaacctgctgttccccatcatctacttgctgttctgggccttcctgctggtcttcagcctgtggtcagagccggtggtgtgtggcattggcctggccatcatgctgacaggagtgcctgtctatttcctgggtgtttactggcaacacaagcccaagtgtttcagtgacttcattgagctgctaaccctggtgagc

SEQ ID NO: 49137 - DNA, 678 bp, Homo Sapiens
  misc_feature (3)..(3): n is a, c, g, or t
  misc_feature (33)..(33): n is a, c, g, or t
  misc_feature (39)..(39): n is a, c, g, or t
ccnttttctaaaatttaaaaaattttctttttntggtcntcagttctagtcatggatatttgaaattggacaaccacaagtctgagagatttgaaatttcaggctatgtggcaacgtctttggtacatttcaaaggtctgactaaatcagtctttgggtggcttgaaaattgaggcaagatcacacactgtgtggtttgtggagaccggcagtgtttgtgcatccctgatatcctttgtgttgtaatttatcacccttttgtgtttcacagatctggctttgattggctgatgagtgtctttgtgatcagttaaaagtggtagaatgtatgtacgtggacttgcctaaataataactttaggagaagacaatctgaaacatttgtgaccttgcacagatcagcaacagacttttaaaaataaattatttttattttaaggtttcataatagtaattacattcttaactttgtatgtcaggatgaagaagagaaggatgatggtgaagctaaagaaatttctacacctacccattggtctaaacttgatccaaagacaatgaaggtaactttgataaggatggattttatttatttttttcaattaaaaagctctttctgagacagagtttggctctgtttcaaaaaaaacaaaacaaaaaaaaaaaaagatgcggccc

SEQ ID NO: 49138 - DNA, 372 bp, Homo Sapiens
cacgaggacaatctccagcatggcctggtctcctctcctcctcactctcctcgctcactgcacagggtcctgggcccagtctgtgctgacgcagccgccctcagtgtctggggccccagggcagagggtcaccatctcctgcactgggagcagctccaacatcggggcaggttatgatgtacactggtaccagcagcttccaggaacagcccccaaactcctcatctatggtaacacccatcggccctcaggggtccctgaccgattctctggctccaagtctggcacctcagcctccctggccatcactgggctccaggctgaggatgaggctgattattactgccagtcctatgacagcagcctgagtgg

SEQ ID NO: 49139 - DNA, 637 bp, Homo Sapiens
  misc_feature (433)..(433): n is a, c, g, or t
cttagctgctgaatcagctttctggttactatgggcaacagccttgttttctttttgatgtcctttgcagtggatcacagctacctgctgagccactcccctgcttctcaccttgaacacagatggcagctcttcccatcattccaaaccttggggattgtccagccaaattttcttcagacaccatagcttcacccgccctcttcagggagaagatgcaagggcagctgagatctttggaagcccaaatctggcctctctttggggtggactgagagtgggaactcgactctcttttccaagtgtcatgtttatcttgttcatcgttatattacctccagtgcctggcacatagtaggcactacagactggcacatcgtaggtgctattagtgtctgtataatgggactcttgaggttgaagcaattagcanaaacctgccaagcaaaaggatggaaaactgaccaccaagaaagaaagaaagaaagaaagaaagcaattgtggctttgagctctaaacgcataaggcaagggccccagtttgggcaattttaatacaacagccattttgctccaaacaaactggcactggaaacttcctctgcctcttgacaaccggttctctttctctgtgggc

SEQ ID NO: 49140 - DNA, 395 bp, Homo Sapiens
  misc_feature (307)..(307): n is a, c, g, or t
  misc_feature (339)..(339): n is a, c, g, or t
tgaccccaccctcaagtttcagagaccctaatgtcctagggaatggaatttcctggtcacttctcgtcatcattggtcatttcatgccaagtcccacacacacgctttccctccacccagctctggtcaggtccctggaaaagaaacagaaatggccttgttctctccactgcccctttccctctctccttctcctccccctctcttctcttccctcccagcactatccacctctgtccctcagctttgaggcaggagtggggggatgttgaggggagagtccagttcacagtacaggcctgcctgntgggtgttggggggttttcctcttaattcttncattttttcccccaaccctttaccaccttggccaccaccaccatcaggggacaaaa

SEQ ID NO: 49141 - DNA, 550 bp, Homo Sapiens
tttttttgaagttttattattaactgcaggtttcattactgaatagatatagccaaattccttcccccaaaagattataaagtttcctagtcctaccagcaaaatcattaagttcattaaggcaaatcccctccagcgctggatgttgatgctgtctttaattttgtatttttctgactactttgtgcaattgaggattgttttggtctattggccatttggcttttctcttttgcaaatgttcatatcctttgtccagttttctttagggtgatttttccttttcgtatcaatttgtaaacagtgtacaaattacattgtacattagggatattaacagtctgtcagttacactgtacattagggatattacattagagatattaacatctttgtccattaaggatattaaccatctgtcagttacattgcagtatttttccctaaactctttttgtcttttgcattttatgtttttttaaatgtgcaattagaaaaattttatatgggctgggcacagtaatcccagcacccatctctactaaaaata

SEQ ID NO: 49142 - DNA, 715 bp, Homo Sapiens
  misc_feature (645)..(645): n is a, c, g, or t
  misc_feature (694)..(694): n is a, c, g, or t
gttgaggctgcagtgagctgtgatcgcaccactgcactctggcctgggcgacagagtgagacactgtctgagaacaaaaaacgactgaaaaaaaaaatcaccttagctttttctcttagaatcttctctaaaatgtattctttgtggcattctgaaataggattcatgatgatgcctgttgatcttagggacactacctcacctgccagtatctttggggctgtgtccttcaaggacatgtccccagactgctgtgcagtgtcattttttgtgtttggtttggtggtggcttcttcccccttgctaggctatcaacctcttatcaccacttgttggtgtcagaactaactgcttctggtctggagagggactgaccgatgcctttgggtagagagaattatgaaagaaattttggtatttttctactttatattttctgaggtttctgtaataagcatatttcacttttccaataagaaaaaaaaaaaacttggcctggcgcggtggctcacacctgtaatcccagcactttgggaagtcgaggtgggaggatcacttgagttcaggagttcgagaccagcttgggcaatatggtgaaaccccgtctctactaaaaatacaaaaattagccaggcgtggtggcgngcacttgtagtcccagctactcaggaagctgaggcgggagaatcacttngaacccgggaggcagaggttg

SEQ ID NO: 49143 - DNA, 410 bp, Homo Sapiens
ccctggactccaaggcctttccacttggtgatcagcactgagcacagaggactcaccatggaattggggctgagctgggttttccttgttgctattttagaaggtgtccagtgtgaggtgcagctggtggagtctgggggaggcttggtccagcctggggggtccctgagactctcctgtgcagcctctggattcacctttagtagctattggatgagctgggtccgccaggctccagggaaggggctggagtgggtggccaacataaagcaagatggaagtgagaaatactatgtggactctgtgaagggccgattcaccatctccagagacaacgccaagaactcactgtatctgcaaatgaacagcctgagagccgaggacacggctgtgtattactgtgcgagaga

SEQ ID NO: 49144 - DNA, 638 bp, Homo Sapiens
  misc_feature (575)..(575): n is a, c, g, or t
cgggcactattcaaattaaagaaaatgtatattgagaaaataactcaaatttcttccatgaaattggcaagaagtaaacatttcaaatacacaaaacattatgggtatttttgttcatttgattataaaatgccaaagttgttttataaatgctacttcaagcctggaaactttgaggaagtcctgaacattaagcatataaatggcccagctctagaatacatgtaagttgaaaagctaacctgaagtgggaagcgcagtatatacctaagacttactctgcactgaaagtttgctttgtcactagaagtaaaacaagactgtggtaggatagtaagatcagtaacacctcagttaatcaggtatcttggaggaagtgaagaaagaccctaattcaagggacagttaattggccttttattccaagaatgggccttagtggcagtatcttaaaagcccacaagatggagatgtttcctaatgaaaggcctttaatttctttatagagctgagttagtgtcacatcccagtccccacccatgacccttccccagttaaaaagaagagaaaatgtngagcaagtctgatttgattcccatggtgacatttttagccattatgtaacaaattctgacagt

SEQ ID NO: 49145 - DNA, 1063 bp, Homo Sapiens
ctgtccccttacctgtgggtgctctccactggttaccttgtggtgtttggagtaaagacctgctgtactgactggggccagttcttccttatccaggagaaaggacagtcagcccttgtaggtagctcctacatgagtgccctggaagttgggggccttgtaggcagcatcgcagctggctacctgtcagaccgggccatggcaaaggcgggactgtccaactacgggaaccctcgccatggcctgttgctgttcatgatggctggcatgacagtgtccatgtacctcttccgggtaacagtgaccagtgactcccccaagctctggatcctggtattgggagctgtatttggtttctcctcgtatggccccattgccctgtttggagtcatagccaacgagagtgcccctcccaacttgtgtggcacctcccacgccattgtgggactcatggccaatgtgggcggctttctggctgggctgcccttcagcaccattgccaagcactacagttggagcacagccttctgggtggctgaagtgatttgtgcggccagcacggctgccttcttcctcctacgaaacatccgcaccaagatgggccgagtgtccaagaaggctgagtkaagagagthcaggttccggagcaccatcccacggtggccttccccctgcacgctctgsggggagaaaaggaggggcctgcctggctagccctgaacctttcactttccatttctgcgccttttctgtyacccgggtggcgctggaagttatcagtggctagtgaggtcccagctccctgatcctatgctctatttaaaagataacctttggccttagactccgttagctcctatttcctgccttcagacaaacaggaaacttctgcagttaggaaggctcctgtacccttcttcttttcctaggccctgtcctgccgcatcctacccatccccactgaagtkaggtattcctgcagcgsaggsactaatgaccttgattytgygggtctaatctctmasagtgggtactcygtgcaawactaaatcargaagagagg

SEQ ID NO: 49146 - DNA, 315 bp, Homo Sapiens
gcgtcgacttctaactctattattatttctgtatcaattagtcatcattctactgtaaggaagaggtttccctttatcatcaacttcgagtaagtacttttttctgagccatttgaatattccttactagatgtggtgcctctttaccccaattacttaagtttgtatttccaaagaacaagggtgttttcctgcatagccatagcacaattaccaaaatcagaaaattaacattaatactttactattatcaaatctttttcatattttgctaattgtttcagtaatatgcaaaaaaaaaaaaaaaagtcgacg

SEQ ID NO: 49147 - DNA, 609 bp, Homo Sapiens
agtgaagaccccccggcggacccccatcatgcccacggccaacatcaagctcccaccaggcctgccctcccacctgcctcgctgggcaccgggtgcccgggaggcggctgccccagtgcggcgccgggagccacctgcccgccgcccggaccagatacattccgtgtacatcacgcccggggcagacctgccagtgcagggcgccctggagcccctagaagaggatggccagccacctggggccaagcggaggtactcggatcccccaacgtactgcctgccccccgcctcgggccagaccaatggctgagagccacagctgacaaagtctgcatgtccgaggacggcccctgcactggagctgggcgccagagctgcagagctagtgttcggccctcagagaaggatccagaatcaaaagctcaagagtgacgtgaggtgggcaccggccccaagtgcagagtcaaggcagggagaggccggctggagccaggccccctcgcacgcagcccccaaatcatggacgcacctgtggggagcaccacatctccacctgcggcctcacatctccccactcccctttttgtacgtttaactgtttctttgtac

SEQ ID NO: 49148 - DNA, 763 bp, Homo Sapiens
atcaaatactttggctaagatgagaatcccaaactatcagctttcaccaactaaatgccaagtataaataaaagtaaagatagggcttctcagcagcagcagaccaactccatcagaaactactttcagccgtctaccaaaaaaagggaaagggatgaagaaaatcaagaaatgtcttcatgcaaatcagcaagaatagaaacgtcttgttctcttttagaacaaacacaacctgctacaccctcattgtggaaaaataaggagcagcatctatctgagaatgagcctgtggacacaaactcagacaataacttatttacagatacagatttaaaatctattgtgaaaaattctgccagtaaatctcatgctgcagaaaagctaagatcaaataaaaaaagggaaatggatgatgtggccatagaagatgaagtattggaacagttattcaacgacacaaaaccagagttagaaattgatgtgaaagttcaaaaacaggaggaagatgtcaatgttagaaaaaggccaaggatggatatagaaacaaatgacactttcagtgatgaagcagtaccagaaagtagcaaaatatctcaagaaaatgaaatcgggaagaaacgtgaactcaaggaagactcactatggtcagctaaagaaatatctaacaatgacaaacttcaggatgatagtgagatgcttccaaaaaaagctgtcatcgactgaactttagatcactggtgattaaaaaactctaacttccaga

SEQ ID NO: 49149 - DNA, 473 bp, Homo Sapiens
tcccagaaaaaagaaaaatccatactggtgtaaacccgtatccagattgactcttctcttaacaaggacacacttggcgttagtatggatctagcctcaaagaccctcgtcacagatgaagcagcccatcgtgaccagtcgaggccttaggaccgcaggaggaatgtctcaggatgagggtcaagcacactgagggtgtgggctggaaaaaagggatctagttgtttcttcctagtctcaggaagccagtgccccaagggttcacacctggtaagtgtaggcgtccttggatatgggctgtagaggaacagtttgaatccaggtgccgccatctaatagctatgtgacagcaaatttcttaatctgagccctggtagcctcatttaaattggacataatgccacctacctgaggatttgtaaaaggaaaagagaataaatgtctgttacatcataaacaaaaaaaaaaaaaaa

SEQ ID NO: 49150 - DNA, 927 bp, Homo Sapiens
ctggaccggtccggattctccggatactggactaatgaagatacatgtgtggaatggtttcacagcatgcccaacctcatgaggcttgttgggtcagagcttgtgccagatgccagtcttctgccttccagtcttatagttgttacgctatagccttctgcagtggatggtaacgtggccaaaataagcctttggttttggagtattcgtaaaatgaaagtggtgccatctaccttaatgctgggggaatatatttcaattgactcaagtcttcattgccgaatgatatcttaaaaaaaaaaaagtattttgcctgatattttcacagttgttctgcttgaaatgtaaaattccaatttctaaatgtaataccaagatttatcctaaattaacaataagcagtgtttctaatagcttttcatatatgtctgtgtgtataatcttcaaataggaaagcatattgtgcgtgaggtttcactcattgagaacctctgaaatgtctttctttgccccctttaaaaaaaaccatgattttccaggtgtttgtgtttatgtttttgctagggagatgaaagtagtttttgtttcttcattagcgtaggatgtgtacattgaaagccatgttcccttgtagaaagaaaatgctgttgccttttggggttgattctattatctgatgttttattaatctctgtgaaataattgtgtaaattaatattaaaaactagtttgaaaaatggtgggataaacatgaaagaaaataccccattttttgcctaaaatttaaatgtggatccaccctcacaactatcattattgaaaatttgggctgccctttggaagaaaacagggaaattaattaattaaaaaagggttttccaatttccaaaatggaaaatcttaaaattttccaaaaatttaattttg

SEQ ID NO: 49151 - DNA, 616 bp, Homo Sapiens
  misc_feature (594)..(615): n is a, c, g, or t
cggacgcgtgggtactgattacaggcatgagccaccagaaccggacatgctttgcttaaaagctaaatattttaggcttgtgtgccattaggctctgttacaactacttaattctgcttttgtaattctatagcacccattgataatacataaacaaatgagcatgaatgtgtctcagtaaaaatttgttcacataaacaggcagtccacccatgaagctatagcttgctgaccccttgtttaaacaatcaattgaattcaaacagaaataaaaggatcttatatatttaaccatgttgataccatttccagtgcttttcattcttctatgtagatccaaatttccttttgatattattttacttctgcctgaaacattttctttaacattttttatagtgttgttttactggtgatgatttctttcaggttctaagtgcctgaacaaaatctttatttcacctacatcttgaaagatagtttctctgagtctacaattcccagctgacaatgtttatcttccagtactttaaagatgttgcttcattatcttctaattttctttgtttccaataaaatgtttgctggcaaaannnnnnnnnnnnnnnnnnnnnna

SEQ ID NO: 49152 - DNA, 618 bp, Homo Sapiens
caacgagggatgagagcctcacacattcaaggatgtactaagcactacaggcctcacagaaacagagatcccatcttggagttttcagtaccacatgggagataaagggttttgaacatgaaatgacaaaaacaacagcaagaagaaaattcttgtcctttttcattactatcagactcaaataaatgtcttggctcttacattacattcattcttcaaccattgtggtctggcttccacttccttcacttcaccaacatggctctgccaaaggaagcccgtgatctctaggccatcactttaattgatctctctacaacatttatcctggttgttaagccctccttacaacattcttctctctttgtttttatagctccatctctcctgcttctttaacttgataatgcatacttgatttttctatttgttatttcataaaccaattaatacacagataaaatgactgtatatcaaaccatgtttgtatagaaaaaatggattttggatgcctctcatatgtaattagttctattaaacatattaattgtattgtttaatttgtcaggtttttgacagaattttgtttacaagtaataaaaattttatctccaattt

SEQ ID NO: 49153 - DNA, 392 bp, Homo Sapiens
  misc_feature (368)..(368): n is a, c, g, or t
attagttccatatctccgcagagttctctggtagattaaatgttctctgtgcactaggccaaggaagttcctgttacctttgaaaatcattgtgtttgctctgattgtctacattagctcatatcagtcttttgaacactggttcaaatctgggtgttgggttaggatctgatgagtagagaatagtggaaagttgatataggaaggtatactggtttctggtgtgattctttagctacatttattccttgtcttatgtcatttcactggatcatgtaactgtcctggctttcagaaattatattagatgcccagcctttctcattcagagatgcctgtattattatgttatttcgattgcctaccanaaaaaaaaaaaaaaaaaaaaggac

SEQ ID NO: 49154 - DNA, 705 bp, Homo Sapiens
taaaatttaagagggcatgataaaatagtatggggataggtaaaaattaggaagatagtgcttaaataattggcatttgggcaacactttaaacattgaaagcgagaaagcactttatgggtcattgtctgctggcctccacccctacctaccctatgtactagactgtttaggaaggctgaggccatgtgtcagtgagcttaccgttacatcctgggaactggtaggtgctcaataaagaaatgaaatgtaggtggatggatacatcatgtggctcagatcccttgttttgcaggtgagaaaactgaggtttaaaggaacaggtgacttggctgggagcactcagtcatttagtggcagtaggcaactgtggccccatctccagtactgagtcccgagcccctttcactagcacatgctgcctggtagagtatgaacagatagttaccaaatgctctacacagagaacatttaacccccagtcttaacaagtgccggtgattcatgagatattgacccatgtactttattttacgagtgtgtctcttttaaactccaaaaatgtttttatgcttttatgagtgtcctgaactttacatgggtgctgctggagattaaatcctccatcagacccctccattcaatattttcagcagaattttatcactatgaattcaacatccccaccacaaaaaaaaaaaaaaa

SEQ ID NO: 49155 - DNA, 358 bp, Homo Sapiens
taaattcgcggccgcgtcgacaaggattttaagtacagccaaatgatatgtcacaagttttttcctaaatatccaaccatttagtctttcataagcttttaattccactagcctcactttctgagattgttgatgttttcttgttctaacctgaaattttctttgtttgatgttaacaggagtataatgaaggagtaaccatttttattttatgatagtctatcaatagactttttttaaccttctttaagctaggtgtgtttgtcctttattaaagtcagtttgacccagcctgtacaacattgcaagaccttaactttaataaaaaaaaaaaaaaaaaaaaaaaaagtcgacgcgg

SEQ ID NO: 49156 - DNA, 1003 bp, Homo Sapiens
  misc_feature (1003)..(1003): n is a, c, g, or t
cattcttggttgtggggactgtcctgtgcattgcaggatgtttaattgcatccctggcctcgactcactgagtgcctatagtaccacctccccaggtcatgacaaccaaaaatgtctccagacattctccactgtcaattgcaaactcaccccttgttgaacaccactgatagacactaatccctaatatcaactaaccaatgaaatgctgtacctcttgttgtatgagaagaagaaacagacatcttctcaagtctatgagaatggcttttaactaatcaacaccttgattaaccagtagaaggcatatttagtgatgattcgcttatgactgcctgtacctcaccgggacaaaattgtggtttgttagagagtctttagccacaaacagaataacaaccactggcttatattgcaaaaaggatatgggaaattctatagatattggcacagacacacatatattataagaagtctaggccgggtgcggttggctcattcctgtaaccgcagcactttgggaggctgaggcaggcggatcacctgatgtcaggagttcaagaccagcctggcaacatggtgaaaccccgtctctactaaaaaatacaacaacattagctgggcgtggtggtgggcgctgtaatcccagctacttgggacgctgagccaggagaattgcttgaaacccgggagcggagggttgcaggggccagatcacgccattgcactactgctggcaacaagagcgaaattcttctcaaaaaaaacgaaaaaaaggggcgggctaaaataaacctgagggcccggtaccctccgctttgaacaggggccaaggaggcgataaaacacacggccggttcaaccgcggcggaagcgccgggatggacaacctcggggcattgacaccccgatacgccgcaaaatcggtctggcaacgatcgggagtgctgacacacagagaaggaaaccgaacacacatccgataacagcaccgcccactccn

SEQ ID NO: 49157 - DNA, 769 bp, Homo Sapiens
gaggacgaggacgaggacgtcaaggataactgggatgacgatgatgatgaaaaaaaagaggaagcagaagtaaaaccagaggtaaaaatttcagaaaagaaaaaaatagcagagaagataaaagagaaagaacggcaacagaagaaaaggcaagaagaaattaaaaagaggttagaagaacccgaagaacctaaagtgctaacaccagaagaacaattagcagataaactgcggctaaagaaattacaggaagagtcagacctcgaattagcaaaggaaactttggtgttaataatgcagtttatggaatagatgctatgaacccatcttcaagagatgactttacagagttggaaagttactaaaagataaaattacacaatatgaaaagtcactatattatgccagttttttggaagtcttagttcgagatgtgtgtatttcattggaaattgatgacttgaaaaaaattaccaattcactgactgtgctttgcagtgaaaaacagaagcaagaaaagcaaagcaaagcaaaaagaagaagaaaggtgtggttcctggagggggattaaaagccaccatgaaagatgatctggcagattatggtggttatgatggaggatatgtacaagactatgaagacttcatgtgacatttttatcttttcttgggggtcatctttatgttgcccaacaatcccttgaacatgttgcacaacttcctttccttcaaggtctgccaaatgctacaacagaatgcgatccctggcg

SEQ ID NO: 49158 - DNA, 638 bp, Homo Sapiens
gttgccaaaggcctgtagatgcctcctgacaaggtcttgattcctggttttctagcacccatttgcattttggtcttcagcacaaagccttgttccctgtggccggacttctgggcaataagactggggagtgactgttgagcagtctgctgtcaggagagatggctgaaaaggtgatcatcttggtgctaaacaagtaagaggcaactgccctgtttttgtttgttttgaggcacaatgaaactttagccaaactctgcaagagggtcccatctcctgccatggccaggtgtgagagaccaaaccgagaaaacagcatactctatcacttaagccttgggtagaatgggaattctttaccctgggtaaacgttttaacaaaaaaatggaacttaacttcggtttggactgtggtcgtgctgaggcaggagtggggttgccctcttggggctgaatctccaggcctcacgaggtcccctgtggggatgctgctatttctaagatgcaaattgcacatttcctagattttgtatctgtggatttggataagggaggggaacacggacaaattgcttgtacaatttgaaatgggcctcaatggtacttcaaaccttttgattattcctaaatacatattt

SEQ ID NO: 49159 - DNA, 929 bp, Homo Sapiens
aaggcgattagtctctgcctggggtcccccttcccaagtggtaccactagctgggaacctcgccccctccaccaggccctctccccagcctgtcctttaggattgctgagtcagtggttagatgttcttacggctcttctctgaaacggagttactgctccttcttaggcacccctggctcagccaagccctgacccacctgacgggttttcatgtgcctagctgggtggtggacttggagaggcacagggacagcttggggctccagggggcattgaggcagcactgatgcagcttaggattagcaaggtcaaggtgactggctttcacccatatgttcctctgtatggatttcactgagcctcgattgctgccccttttcatggcattttgttctgggattttgctttgaaagttagggctctttcagccttgtggtgagcagtgaattgtcctcgtcctctgcttcactttccagattttgcccagaaatttccctgcagtgcttaggaagctgcctggtagagcaggtttctaagtttgaggcgaagcagctctggaagctgcctctgtccttgctgttggaggcagtgatttaagtagcagttgcctagagatacatcctttctgtttaatctcaagagagaaaaacccagccctgtaatcccagctacttcgggaggctgaggccggagggcgagccaggagaatccactgaacccaggaggcgcggtcgccggacccgagatcgcacatgtgcgactctgtctaaaacaacaaaaacacaaacaaaaacgggcggcgcaaaaaaccccggagggccagtaccgccctttcggacaggggccacgaggggaaaacgacacgcgggacacaggagtgccacgagcggaggtcaccctcgggcgccccccacaaccggaaacggg

SEQ ID NO: 49160 - DNA, 632 bp, Homo Sapiens
atgagaatttcgaaaccacatttgagaagtatttccatccagtgctacttgtgtttacttctaaacagtcattttctaactgaagctggcattcatgtcttcattttgggctgtttcagtgcagggcttcctaaaacagaagccaactgggtgaatgtaataagtgatttgaaaaaaattgaagatcttattcaatctatgcatattgatgctactttatatacggaaagtgatgttcaccccagttgcaaagtaacagcaatgaagtgctttctcttggagttacaagttatttcacttgagtccggagatgcaagtattcatgatacagtagaaaatctgatcatcctagcaaacaacagtttgtcttctaatgggaatgtaacagaatctggatgcaaagaatgtgaggaactggaggaaaaaaatattaaagaatttttgcagagttttgtacatattgtccaaatgttcatcaacacttcttgcccaactttcttgtacaaagttggcattataagaaagcattgcttatcaatttgttgcaacgaacaggtcactatcagtcaaaataaaatcattatttgccatccagctgatatcccctatagtgagtcgtatacatggtcata

SEQ ID NO: 49161 - DNA, 746 bp, Homo Sapiens
aaagatgagttttcagagctgatgtgatagtcagcttctctggagtcaacagggtgaatccttcccaagtccagccatgcccagatgcccggagggaaaactgacccccagccagtagacattggctaagaacacagaatcttctgaccaaacacgctttcagcagctgcctgctctggactttgaaagaggtcaggtcttgccctaagctcaaaacaagtgagaggtgtcctgacctagctcatagggcaaatggtcctaataggatgggcaatccagatgcctgagccccttcactccgacagcaccagcgcctaatgcagccttttcattcttgccattaggaaatctgtggacttctagcctgtgttttaaaccagccatgtttccttgtatatttccctacccgctgccccacatacccagcatgccgctgtggccaccatgtcctcaaagccttctgtctgtatcaggaatgtagtctgagactgccaggaagcaacaaggagagagaaacactaactagtcttcctttataacccattcatactctctggctgtccccaaccttcatagtctcctgcatccaaatgtcctctttggctcaaaaagtaggccaggcatggtggttcatgcctgtaatagcactttgggagactgaggtgggaggatcacttggggccaggagtttgagaccagcttgggcaacacagcgcaatctcgtctctactaaaaaaaaaaaaaaa

SEQ ID NO: 49162 - DNA, 587 bp, Homo Sapiens
actattcagccactaaaaagaatgaaaccatgtctttgcagcaacctggatggaactggaggctgttatcttaagtgaaataacttagaagtagaaagtcgaatacttcatgttctcactcataaatgggagctacataaagtgtacccatgaacatagagtgtggaacaaacattggagactcagaagggtgggaggagggtaagggatgagaaagtacctgatgggtacagtgtacacttttctggtgttggttgcaggaaaagcctggacttcaccacttcgcaatatatccgtgtaacaaaactgcacttgtacgccttatatttatacaaatttaattttttaaaagggaagagagaatcatattaatttctcaccactttttaagtaagcaaacagcagtatttcccagaggcaagaggttcagcaagaagtcaggaaatgttttgtagataagcatctatcattctgatgggccatgactagtgtgttcacttgtaattcctttgcctttaaaaaaagagaatgatatcaaaaaataagtgccttatactgtgaaaaaacgataaaaggacttcctgatt

SEQ ID NO: 49163 - DNA, 515 bp, Homo Sapiens
aacatatatggcacatgggattgtgactcaccagtgtgttagcacaatatggtcaaaaacctctgatccaattcaacctactcatcttaacgattttatcagcatttaataagtttgttttggccatcatgtgttatagttttgtttgtggttttgacacctcattagaggtttcatcagtgtaaggagccaacctaagagctcttctcacaagtttcccaagagagaaattgcccctccaaatgtgaggagtctcactttatatagatagcatccacacttcttgcagtggaaaacaaaccttataaaatgtaatacgtttggtttcctaactttttcatgaccctggggtggtagaaggaagtgcaagttttatcacttggatttagagacaaggaaattgaaatggagagagaattgggctcacatgcaggcagcatgtctagctgcctccatcgtgtgatctgaggcaccccatgaggcctatgattactgtaaacctctaaaataaataa

SEQ ID NO: 49164 - DNA, 502 bp, Homo Sapiens
ctttagcaagcgacaatgaaggcattgcggaaaaaatctgttttgctaactggctatctggaatacctgatcaagcataactatggcaaagataaagcagcaaccaagaaaccagttgtgaacataattactccgtctcatgtagaggagcgggggtgccagctaacaataacattttctgttccaaacaaagatgttttccaagaactagaaaaaagaggagtggtttgtgacaagcggaatccaaatggcattcgagtggctccagttcctctctataattctttccatgatgtttataaatttaccaatctgctcacttctatacttgactctgcagaaacaaaaaattagcagtgttttctagaacaacttaagcaaattatactgaaagctgctgtggttatttcagtattattcgatttttaattattgaaagtatgtcaccattgaccacatgtaactaacaataaataatataccttacagaaaaaaaaaaaaa

SEQ ID NO: 49165 - DNA, 582 bp, Homo Sapiens
tttttttttttttctgtcactttccttgggataatgccatgttgctttagaaaagtgcctaaagtcagcctagtgcatacattttaagttggggttattcaattaaagcagagtgggtgttccactgcaagccccctccaccagcactcatttgcttttggctggaagaccgggtgtgtgctgtgcatggcccagtctcttctacaaaacacacctgtctcaagtgggttgggggtggggggcactcttgccgagaagtcgctgtcacagtcgtgagctgaggacatctgcactgtggacatccctccaccagagccgtaagagccttctagctgcagagtggttgtttccacatggccacaattctgattgggggtcctgggtcacttccttcaagttgagagcctgggtggtgcacagtgtgaagtacacgtgtgggcggggaggggaggttacagcatagatgtgtcaacttaatttttttacaaaaggaaaaatacctaagtttacaaaatgactttctttgaataataagattgggttaaaacttttgggcgaataaagtcaatatttagtactatc

SEQ ID NO: 49166 - DNA, 654 bp, Homo Sapiens
  misc_feature (498)..(498): n is a, c, g, or t
aaattgagacatcatctcgaagttacaagaattatccaaagagggtatttaatgacatttctaggtcttcagacactattaatgcagatagtagcctctaggtcctgaagattttactagatactggttactgaaactgagctttcttgaattctttttccttccactgtggtttcccgcatttcaacatatcacctatttttgtcctcaaaggttacttaaatgttttccacagaattaaattaaatatgaatcatccctcctctgatttttgaaatgaccctttgcttcctatgataatgattcttctggtccgttttgtagttatatgttagagtttgtaaatagtcacacattttgcaactgcatataattttcttattattttttcctcttcctctaaaactgctgttatttcttttaactttttgtgggaaaaattaaacccgtctttcactttgttgatatacttatttataattgaactccttgattttngctcgaattgcttttaagttacccacttttagggaagacattatttgggtttggttcagtgtatcaggctttttttagttaggtgtatcagaagggtgacttttctatcataatttctttttccacaggattttttttttaaaagttagcggggca

SEQ ID NO: 49167 - DNA, 634 bp, Homo Sapiens
  misc_feature (565)..(565): n is a, c, g, or t
  misc_feature (601)..(601): n is a, c, g, or t
aatatctttgggtgctgtggtggtaaatgctatattatgaacggtggcatgtatttacagttagagtattgtgtgtacactttttaatggtaaacttaagctgaatgtgtaatggatttgtgtatagttttacatatttggaagcattttaaaaacaggttttaaccttatgtaaaattacttttatactcgtgttaacattttcatctgtgccttttggtaatttaatttctattatgaatttctggtgcctatgagctagctatcacctacctgaaaggtgcttagaggtgaaggtactgtttctaaaaacacatcactgtgatacctttctatcctcacattttcaagcttgcctcttttctgttctttgtggatataacttaagcaattgtgttattcataaaggtttagaaatttcaatattcccaacactctatgtttctgattttataacagtagccatttttgaaagtcagatgtctggcctgttttatatgaataaagtctatttataaaatattataaaaaataagtaaataaacagaacattaataatagagtnttggttcttcctatccctgactttcatataatgaanattatcctattgatctaagtagaagttatcata

SEQ ID NO: 49168 - DNA, 1027 bp, Homo Sapiens
  misc_feature (714)..(714): n is a, c, g, or t
  misc_feature (742)..(742): n is a, c, g, or t
gtaagggcttcagtcaggcttcaaatcttcaagtccatcagaatgtccacactggggagaaacgattcaagtgtgaaacgtgtgggaagggcttcagtcagtcctcaaagcttcaaacccatcagcgagtccacactggagagaaaccatatagatgtgatgtgtgtggtaaggacttcagttatagttcaaatcttaaactacaccaagtaattcacactggagaaaaaccatataaatgtgaggaatgtgggaagggcttcagttggagatcaaatcttcatgcacatcaaagagttcactcaggagaaaaaccctataaatgtgagcagtgtgataagagcttcagtcaggccatagattttcgggtacatcagagagtccatactggagagaagccatacaaatgtggtgtctgtggtaagggcttcagtcagtcctctggtcttcaatcccatcagagagtccacacgggggaaaagccatacaaatgtgatgtgtgtggaaagggctttagatacagttcgcagtttatataccatcagagaggccacactggagaaaaaccttacaaatgtgaagagtgtgggaaaggctttggtaggagcttgaatcttcgccatcatcagagggtccacacgggagagaaaccccatatatgtgaggagtgtggtaaggccttcagtctcccctcaaatcttcgagtccacctgngtgttcacaccagggaaaaactctttanatgtgaagagtgtggtaaaggcttcagtcagagtgcacgtcttgaagcccatcagagaagtcacactgggagaaaaccatacaaatgtgacatatgtgataaggacttccgtcacccgttacgtcttacatatcatcagaaagccatactggtaaaaactttaaaaatgagaaatgggtaaccacttttgtctgaatgcacttcttcaaggttttggtaagccctggctggggggaaaacccgttaaactccctgaaatgggaaaggggcccttcctcaccctct

SEQ ID NO: 49169 - DNA, 733 bp, Homo Sapiens
ggccttaacattctcaacatcttcatcatccaaatgctatgttgcatgtggtggttgaggttgtacacagcaagactccagatggagccatccgcatggtaggtgagtggcatctcccaaggtatgcaaagccatcatgggagccctgcctgtcctgcagacgtgaactgggcatgcgatgcaggagggcctagggtaccgctgctcccggagctctggagcactgatcaggagtgtcgcatgtgtccggttgctttcgaatgcaggaggcgacaagtactagtggctcactcagagacccttggcactttcttcagggaagctatattcatattataaataaacttaaaaaaacattcatatgtatagttagaattgatttgtagggtttttgaactgatgtaacttgggcaaaactgaagttcttatttttgttgttgctaagagacaataaagataaaaataaaataaagattaaagataaaagatttggtatacaaggagtataaatatgaaatgagagggcattttaaaaatgaattaataattttgaaatatatattaatacttgctgacttccaaagtatcatctgtgataatttatctcattgtattccatttcgttgtaccaaacatcctaattgtttgaaaaaaaaaaaaagtatcagaaaattataacagacttttgataggccctactagcttaggtttttaccatttagttggaaatgtt

SEQ ID NO: 49170 - DNA, 586 bp, Homo Sapiens
  misc_feature (557)..(557): n is a, c, g, or t
gcggccgcccacgaagctgtcggtgcgcagcatcgccgcagagaggcccgccaggcgcccagcgtagcagcggagctgggccgggccgggcgcaggcccggaggcagggaccaggccgccggcgcgggggcggaggcggcagcctggaaacgtcgacccgaggcgccgggccccacagctccgcagccaaatgcaggtcgccatggcccgggcaacgacggcgacaggaaacaggttgtggcctggcctgctgatcatgttgggttctctctgccatagaggttcaccgtgtggcctttcaacacacgtagaaataggacacagagctctggagtttcttcagcttcacaatgggcgtgttaactacagagagctgttactagaacaccaggatgcgtatcaggctggaatcgtgtttcctgattgtttttaccctagcatctgcaaaggaggaaaattccatgatgtgtctgagagcactctctggactccgtttcttaatgcaagcgttcattatatccgagagaactatcccctttccttggagaaggacacangagaactggtagctttcttgtttggatta

SEQ ID NO: 49171 - DNA, 506 bp, Homo Sapiens
ccggagatttatttggatcatggttctggaggctgggaggtccaagagcatggtaccagcatctgcttggcatctggtgacagctttcttgctgcatcattacatggtggaagggcaagagaatgcgagtgagagcaagagggcaaaatgattatccttttatcaggagcccacttctgacataactaacccacacctgagataacggcattaatccattcatgaggtctctgctcttaaaggagatcacctcttaaaggacccacctttcaatgccattacactggcaatttaatttcaagatgagttttggaggggacattcaaaccatagcagtgctataattttaaagtacttcaaagccaatttattctcttaattagcttcattattcttgtctttgtgtgtggattacctaaactctccttccagagctactttaatgattatattcaaccaaagcactctaaaatttagagtataaattgtcttatatttcaaattag

SEQ ID NO: 49172 - DNA, 754 bp, Homo Sapiens
gctgggcctgcagaggaggggcacagtaggacacagtgactgcccaggtgtccacacacctgtaggcctctgagccagcgtccagggtacagatgcgggtggtggggatgaaggcctgaccagggagggagaagcaggtttggagaggaccctgtgcccaccctgacatacaccctggctggccctgactgactgtattctctggccacattcaagtcccccattggtgggggcagagaagtaggaccaggccgtccttggctccagagctcgaagaccccaagacagccctctgctctcagcggcgccacagagagcctgggctcagccttctgcatcaggacatggcctcgtccactgagggcacgatttaaacatttgacatcagaagctttatttgtaaacctcacacagataaggaccaagggctggcggtgtggccagaggacaggggaagctgaaggccccgtgcttgagctcggcagtcctgctccttgcagtgaagccaccatgggtgaccgtccagcctcacccggtggcctgcacagtgagggaagggcttcagggccatctgctcccagggcaggggacaggccaccaaggacctttggcaaatgaaggtttacatttctgtagtttgtttgttttagagcttaatttgtagttttttagctattaaaaccatttgaatttttaacgacctgatgagggcatcaggtaaattaaaggattttgggaaagattaaaaaaaaaa

SEQ ID NO: 49173 - DNA, 622 bp, Homo Sapiens
gcaggtgcaaaataagagaccttagttttaagacaggttatcctgtgatacagaagaatttagttattacctaatatttaaaacttctaagccaagcattctgtttggtaaagatttctcttaactgttagatatggcagagtgtgtaactaattttagtattgtctttgcagtgtatgctgatggtagcatatgtttagatatccttcagaatcgatggagtccaacatatgatgtatcttctatcttaacatcaattcaggtaagtgtgtgttaggatgtattataatttgtcagtattctgtaggatatagtcagctccttagcacacaggtaaccaatggcagagcttggacaagaatccatgcttttcagctaacttttctctttcagtagtgcctacttgggatccagtctgcagtccctttcctgattgtgtaagttacatgttctcacaggtcaaacctaatttgtgtccatgaagcatagccaagggttgtggaaaagaaaaaatggcttggaaaaaccataggaacctaaagaaactgccaagtgtagataagcattgagtatgttaccccatccaagaaattttattttaaaaaaaaaaaaaaaaaaggac

SEQ ID NO: 49174 - DNA, 706 bp, Homo Sapiens
tgggactttggtctcttttaacaaaaccgatattaacaatcaatgtcagttaaaggagagttgtagacttaaatagtgtcaattgtcctacattttcatgttgttgataacagcctaccatagaggtgttacagcttccaccattttacacaggaggaaacagagctcagctcagagaggttgagttttccaagaagccaagtcatggggccaagaatagtgcccgggtgccatgagactctgcccactactgccctgctggctgcagagcggctcagatacggctgtcatccaagccagggagcctttgagccagtgctgctgagaaaattgggaaaaagcccactgcccggttcccagcacatcttcactgttcctcgggctccctccatgtctgtttccctctgagtgtagtagattggggactcagaaccttctagaacagaagttatggttttgtaaggggaagaaatatggtcaagtgcacatctataatttagagtattaaatttccttgtacccttatgatttattctagaaggtcagcacattgattacaaagctaatgttggctaacattaatccttcaggtatgaggtaagaaataaaaaattactttcatgcttcatttctgcacaaaatttcactctggaaagatatttcatttgaaaaaaaaaagaaaaaaaagatctttaattaagcggcc

SEQ ID NO: 49175 - DNA, 566 bp, Homo Sapiens
cacatttgggggaatgagtaatctttaaaagtgtaaaagggaccaaaaagtgtgagaatgtttgatgtagagaaactccaagctcattccctggactttggctatagatgctttcttcagggatgggtcttctgggcctgtgtcctgcaggatgcccagtaggaagcacagcctctttgatcttatgggggtgggctcatttgctgttttggagctcaggtgcaaagccgagttacttgatattccctggtcatggcaaagcctctctccacttttcttcccttctattgtcacttccattctttttccatagtccatagaaatcatttttacgtgacagtgatgagctgaccagaagctatagaagctatagtacttcctatatcctaatgggttttaaaaacactggctggggcatactcaccctttctgaacaaaggctgctaggtgaccctgctgttgccgctctgtatattcacttggttagcccacagattggtttggacctaattccctttccttctttaactgcccaaagggcttttctatttaaaaaaaaaaaaaaa

SEQ ID NO: 49176 - DNA, 688 bp, Homo Sapiens
  misc_feature (9)..(9): n is a, c, g, or t
  misc_feature (18)..(18): n is a, c, g, or t
tggtgagtnacagctgtnatgagctagaagcgcatgacttattgtgacgatgtcttgcctttctgtggtccaagttggagtacatggcaatgccctcctgctgatgtgcattaaggaaaatctaagtctaatatttggaattaagatatattttagggggaggggacagaagcaatgtaaaatagttgatttatgataaagctcagaatgtcctcttcatttattttcttgttttattttcctttctaaacagaaactgcatttaattccaaaaagtagtattcttatttattatttaaccctttgctgctgctaaaatgtgcacatattcaggctttagtttttccaaaaggcattttttttttggctgaaaaatattaaacatttgaccacagggaagaatcaagtttctaggatgtcataggtatactatgtagcactgaaaaaattgattttaggtgacagccaaaagtagtcttaaagtagcatgagaccttagataatcgacctaaaagaaagaaaattgtgaaaaagacaaaaatcttcatgcattcctataaaacgctactttaaggtctacttttggagttaattttgtttggtactttttttttttttaagacgagcaaattgttatatgcttttggcaattgatacaataaactgtaatggtctgtaaataaaaaaa

SEQ ID NO: 49177 - DNA, 663 bp, Homo Sapiens
aagcccccgatgcggagctagggctggagctctgccctcctgggcagatgtgccctgtgtcctgggtctgacattgcctcaggagggggaagctcatccctccctccaagcccccgatgcggagctagggctggagctctgcccaggtgccctggggccagcaaggcagtcccaggcctgccgtctccagcacggccccaaggtggacactagcccctgctgctgcaggcgccatgctgcttcagcagtgacgattgagccatttgtgagagagaatccggaagcgttaggtattacagcagactgacctaagacctatgtaaaaggaaagctgttccaacacacggactatttttgtactagaatttgctaacttgtaatattgaatttcctttggccgataatcaggatttccctataagtcacttggacattggtcacttgtaggaaatttaaactctaattatgacagctacactgaaaaataattgtactgaaattaacttgtctatcttcatttggttttaatttttaaatgtttgtaaaaagagactgttttgggggaatggggcaaaggggtgggcgatttcttttgtaagtgtaaaataaatgaacacgcattgaataccaaaccaaaaaaaaaaaaaaaaaaaaaaaaaaggg

SEQ ID NO: 49178 - DNA, 491 bp, Homo Sapiens
catctgaatgaaaggtgtgatccagagagtataacatcactggttaagcagcacatctctgatgccaaattgacagcacaaagtgaagaaaaacttgtatatattttgcctttggaaaggacaaacaaatttccagaactttacagggatcttgatagatgttctaaccaaggcattgaggattatggtgtttccataacaactttgaatgaggtgtttctgaaattagaaggaaaatcaactattgatgaatcagatattggaatttggggacaattacaaactgatggggcaaaagatataggaagccttgttgagctggaacaagttttgtcttccttccacgaaacaaggaaaacaatcagtggcgtggcgctctggaggcagcaggtctgtgcaatagcaaaagttcgcttcctaaagttaaagaaagaaagaaaaagcctgtggactatattattgctttttggtattagctttatccctcaact

SEQ ID NO: 49179 - DNA, 812 bp, Homo Sapiens
ggtttttcgggtcccggaattcccggggatgtgccctccattgtaaatccatagtcatctttttaagcttattgtgtttaagaaagtagctatgtgttaaacagaggtgatggcagcccttccctagcacactggtggaagagaccccttaagaacctgaccccagtgaatgaagctgatgcacagggagcaccaaaggaccttcgttaagtgataattgtcctggcctctcagccatgaccgttatgaggaaatatcccccattcgaacttaacagatgcctcctctccaaagagaattaaaatcgtagcttgtacagatcaagagaatatactgggcagaatgaagtatgtttgtttatttttctttaaaaataaaggattttggaactctggagagtaagaatatagtatagagtttgcctcaacacatgtgagggccaaataacctgctagctaggcagtaataaactctgttacagaagagaaaaagggccgggcacagtggcttattcctgtaatcccaacactgtggaaggccgaggcaggaggatcacttgagtcccaggagttttgaaacctacctaggcaacatggtgaaaccttgtctctacccaaacaaaaatttatctgggcctggtggcccgtgcctgtggtcccagctacttgggaggctgaggtggaagcctgggaggcaaggctgcagtgtaccatgaacattgccctggactccttcctgggtgaaagcacagattttgtcccaaaaaaaaaaaaaaaaaaaaaaaaacctggagtggacaaaaggaaagtaca

SEQ ID NO: 49180 - DNA, 598 bp, Homo Sapiens
cacgaggccaaatgacatgatcttcagtgcaattgcctcaatgttccctgagaatggtgtcccagatgacatgaaggagaggtatcgagaactaacagagatgtcagaccccaatgcacttccccctcagtgcacacccaacatcgatggccccaatgccaagtctgtgcagcgggagcaatctctgcactccttccacacacttttttgccggcgctgctttaaatacgactgcttccttcaccgtgagtggggctactctgtttgaaatgctctcctctcttccatccccagccaccatttccttctctttgttctggtttctcgtatagagttcctggcttctgttctaacgttttacaaagggccagttctattttcccttgctcaattatagtgcaacatgctttgcatgatagggacagactaactagcaacttatctgtccctcagtacctcttagctttgaaagcattgtgttgatgtcagaaatgactgaattttgtgcaccctgatggtagccgtttatatcgaattctaactcctacaatagctctctaattcacttttgtttctccccatcttgtcaggtggatag

SEQ ID NO: 49181 - DNA, 580 bp, Homo Sapiens
ttataggaaagacatcggctttcgtgccatagctttcctccagcagcccaggagtttgacttacaaggaatctggagtagatatcgcagctggaaatatgctggtcaagaaaattcagcctttagcaaaagccacttccagatcaggctgtaaagttgatcttggaggttttgctggtctttttgatttaaaagcagctggtttcaaagatccccttctggcctctggaacagatggcgttggaactaaactaaagattgcccagctatgcaataaacatgataccattggtcaagatttggtagcaatgtgtgttaatgatattctggcacaaggagcagagcccctcttcttccttgattacttttcctgtggaaaacttgacctcagtgtaactgaagctgttgttgctggaattgctaaagcttgtggaaaagctggatgtgctctccttggaggtgaaacagcagaaatgcctgacatgtatccccctggagagtatgacctagctgggtttgccgttggtgccatggagcgagatcagaaactccctcacctggaaagaatactgagggtgatg

SEQ ID NO: 49182 - DNA, 704 bp, Homo Sapiens
tagtgtttaattagtccttctgcttctctcaggacttggaccactctataggaactcagtatagtgccaacccacctgttacaattgatgtaccaatgacagacatgacatctggcttgatggggcatagccagttgaccaccattgatcagtcagaactgagttcccagctgggtttgagcctagggggtggcaccatcctgccacctgcccagtcacctgaagatcgtctttcaaccaccccttcacctactagttcacttcacgaggatggtgttgaggatttccggaggcaacttcccagccagaagacagtcgtggtggaagcagggaaaaagcagaaggccccaaagaagagaaaaaagaaagatcctaatgaacctcagaaaccagtttcagcatatgctttattctttcgtgatacacaggctgccatcaagggacagaatcctaatgccacttttggtgaggtttcaaaaattgtggcctccatgtgggatagtcttggagaggagcaaaaacaggtatataagaggaaaactgaggctgccaagaaagagtatctgaaggcactggctgcttacaaagacaaccaggagtgtcaggccactgtggaaacagtggaattggatccagcaccaccatcacaaactccttctccacctcctatggctactggtgacccagcatctccagcaccagct

SEQ ID NO: 49183 - DNA, 575 bp, Homo Sapiens
ccttggatctgtggtctctggagctgtggttgctgctgtgatatggaggaagaagagctcaggtggaaaaggagggagctactctaaggctgagtggagcgacagtgcccaggggtctgagtctcacagcttgtaaagcctgagacagctgccttgtgtgcgactgagatgcacagctgccttgtgtgcgactgagatgcaggatttcctcacgcctcccctatgtgtcttaggggactctggcttctctttttgcaagggcctctgaatctgtctgtgtccctgttagcacaatgtgaggaggtagagaaacagtccacctctgtgtctaccatgacccccttcctcacactgacctgtgttccttccctgttctcttttctattaaaaataagaacctgggcagagtgcggcagctcatgcctgtaatcccagcacttagggaggccgaggagggcagatcacgaggtcaggagatcgaaaccatcctggctaacacggtgaaaccccgtctctactaaaaaatacaaaaaattagctgggcgcagaggcacgggcctgtagtcccagctact

SEQ ID NO: 49184 - DNA, 629 bp, Homo Sapiens
accactctagccaggaattgccatgaacttgaaaagatggacctggaagagtgtgttcagataacagatagcacattaatccaactttctatacactgtcctcgacttcaagtattgagtctgtctcactgtgagctgatcacagatgatggaattcgtcacctggggaatggggcctgcgcccatgaccagctggaggtgattgagctggacaactgcccactaatcacagatgcatccctggagcacttgaagagctgtcatagccttgagcggatagaactctatgactgccagcaaatcacacgggctggaatcaagagactcagggtaaaaatggctacataactctccaactctagtgttagcagcactttcttctctctttttttttccttttttcaaatttaggttcctatgatttttatatttacttgaacatttaacaagggaaagagaaaaaagtgcaaacctaaggacagatagtttttccctctggctccagagatggaaatttagtaggaaaagacccactgaagggaagaaaagtaggtctcctcccagcagagtctgtctaataatgtctagggcttaataacattcccagattgaagaaaaaaaaaaaaaaa

SEQ ID NO: 49185 - DNA, 723 bp, Homo Sapiens
  misc_feature (27)..(27): n is a, c, g, or t
  misc_feature (664)..(664): n is a, c, g, or t
atttgaagcaaaaaagaaattccgggnaactccctggtgtgttttgccttgagacctccctagctggtgtgccttattctctccacctttcagagttgtcttatgattgttttgcatataatgtctaggatttttagttgtacttattgggggaatagggaagaatatgtgtactccgctttcacaaagcactcatatatagatctagtttctcaaatagctaaagaactaaaagtgtaccagcagttctgaggctcagcagtatagcccaagaactatgaactcaggatgatagaagtgaaataccatcacatggtgaggtcaagggatatctgtaggcacctacttcacagggtccatgctgaaagactgcaaccaatacacagcgcttatctgggggcatacactggaccgatatagtttcacaatcaaaatatttcccaacaaaatgtgcactgttattctggtccccagtcagctgcacctggcctgagttttttagtcaggaaaaatttctcaaagatgattctgtttttcctccataaatactatagggcaattgcccaaaagccaggccataaatggcaagagccacgtgcttcacctaggcccaagtggttgctgtgccctcagtgttgacagactaacaggagggaatgggtgntcaggcttaactaagccactactaccatcaccaccctccaggttaaaaaaaaaaaaaaa

SEQ ID NO: 49186 - DNA, 711 bp, Homo Sapiens
  misc_feature (629)..(629): n is a, c, g, or t
  misc_feature (705)..(705): n is a, c, g, or t
  misc_feature (711)..(711): n is a, c, g, or t
aatataccccacccccccatcatgcgtgcatgaacgtacactaaagtagatgaaactataccagagtattaatttactctgggtgatggttttattggtaaggattttgtttgcaggtttattgtttctgtaacaagcacacattacttacataactaggaataaaacatttattttaaagggttaatgctacttaattgcagttttttccccaacaagttaatagttaagaaccctgatctcaactcttcgtttttccaggttatttatttcataagatgactatccataaatcttccgatgaacgaacctctttatgaccagagctcctggggttaaaggagaaaggttttataatggctgtcttaatttgtttggtggttttccaggtattaatgccaaatttgcctttgtttagtttctgtttcttatcacactgttttcaggttacatcattatcttaaaaaggcagaggctttattttcttcgttgtgatataacctaattcttagaggtttcttaccaagatcactttgcttgttttgcttaattttattttctaaattttacaaattaatattttccaccaaaaggtggaacgaaacaaagacagcaaaatatcaaactgnttagtaatagttaaaaaaagtcaagtgggaaggaaggttgaggctgaggcaggagaatcgcttgaacccaggaggnggaggn

SEQ ID NO: 49187 - DNA, 735 bp, Homo Sapiens
  misc_feature (667)..(667): n is a, c, g, or t
  misc_feature (732)..(732): n is a, c, g, or t
caaattacatgcttgaaaatctgtcactaacatcaatttcatgttaaaaagtactaagcaactattacagtggcatttcttttgttgttggggaaaataatgtgaatagctatgctaattcagagataattttcaaatttcgtgactaaataaaaaagctaagagtagttcactaggtaatgtttgggagggagttgttggttttgttgatttattatatcttgactggtatgattgaaatgaattaaatgttagacgtgcttaacattttatatgctatatatcatcataatagcaaagtgcacagatcacattattgagtgcctttggattttaaaaataaagattgctattcagatgaataccatttcattattgcctgcactactctgtcaaattaaaaaatataatagctatctttattctcgttttaaagcatgataatcatcaaaatgttgaagtttatcacagttctacattaaaaataagtcatttttgtagatgagttatccaatacagcaaaggccatcaaagagaaagccaatactttcatggagagctcagagccttaatagatcccagcagcaatgcttcaaccattcccaactccatgttccttgctagatgctcctcaccccaaactcctgcaaatttcaagaatttctgngtatgtgtgtgttaagggaggagttttaaagtatctctgtattcaacaagatacgtcagcttgtnagc

SEQ ID NO: 49188 - DNA, 572 bp, Homo Sapiens
cctatgtgaaattttgcaattattttctatattcacctaaaatggcattgcactggaaatatagtatgcttcttttgtgatttctacatatctctgtttttttctcatatcagattctactttacccctcagtgacagtcattttacacccctctctgtctcaatgtccgaggcaccctgggaccatcctggctgtaaggcatagtgacattgctggcctgagctgaagtgccgattaaaataaattgaaagctgaattaccttatgaacagctgctttacccaggaacaaatgtggagaggaactccttgaaactgtgttctcaagtagaccacttttgagaaattatacatttatcataacatctcaagtcctgctctacatagaatgaccattattatcaagaaaagttctccattccctgtaattcataaggcaatgcaggcctaaccagaaaacaggaactgcgacaaccttgcatcagacacattcgatctctctattcatagttgcattctctttttttttgtttacaaagccaatcaccaataactcggaaaaaaaaaaaaaaa

SEQ ID NO: 49189 - DNA, 431 bp, Homo Sapiens
  misc_feature (409)..(409): n is a, c, g, or t
gcacgagctgcagtgagttgtgatcacaccattgcagtccagccaggttgacagaatgagaccctgtctcttaaaaaaaaaaaaaaaatcctggtgatgcttttctggattaaaaaataaaataaaataaaaattggcctcactactctagcttatttgcattttctaataaatgttcagagtcaccttgtcagttcctaccaaaaagcctgtcggtattataattgagattgcatgaagtctgtagacaaacttgaagagaattgacacttaacagcagtgacttccagtctgtaaccttagcataagttctatttgtctcctttaatttttctcagaaatacctgtagttttctgtatagagatcttgaatgtattttcttaagtttattaatagacattttcacanttaaaaaaaaaaaaaaaaaaaa

SEQ ID NO: 49190 - DNA, 678 bp, Homo Sapiens
  misc_feature (556)..(556): n is a, c, g, or t
  misc_feature (626)..(626): n is a, c, g, or t
ttaaaaacacagagagaggtgtcctcctgaccacccataacctggctgaggcggaagccttgtgtgaccgtgtggccatcatggtgtctggaaggcttagatgcattggctccatccaacacctgaaaaacaaacttggcaaggattacattctagagctaaaagtgaaggaaacgtctcaagtgactttggtccacactgagattctgaagcttttcccacaggctgcagggcaggaaaggtattcctctttgttaacctataagctgcccgtggcagacgtttaccctctatcacagacctttcacaaattagaagcagtgaagcataactttaacctggaagaatacagcctttctcagtgcacactggagaaggtattcttagagctttctaaagaacaggaagtaggaaattttgatgaagaaattgatacaacaatgagatggaaactcctccctcattcagatgaaccttaaaacctcaaacctagtaattttttgttgatctcctataaacttatgttttatgtaataattaatagtatgtttaattntaaagatcatttaaaattaacatcaggtatattttgtaaatttagttaacaaatacataaattttaaaantattcttcctctcaaacataggggtgatagcaaacctgtgataaaggcaata

SEQ ID NO: 49191 - DNA, 455 bp, Homo Sapiens
  misc_feature (340)..(340): n is a, c, g, or t
  misc_feature (343)..(343): n is a, c, g, or t
gcacgagctgttggagagtagacagaggccagattgctatgcttagatacaatttcaaccacctacaaatccatctaattacctacatgaccatcatcatctggtcatgtttctccattttatcattatgtataccttaaagacttgctcacattacttaaaattgagataggttaggcatctatccaatctcccatgccagtaattctacagaaacagattaggttagctagataagcatgtttacaattaaatttatgctgtatccttctaatcaccactttctcatcaaaatgctcacaaatcatctgcatcattgtccattctttaaaaatgtatnaancccatctctactaaaaatacaaaattagctgggcatgatggcgcacgcctgtaatcccagctgttcaggaggctgaagcagaagaattgcttgaaccccggagacggaggtt

SEQ ID NO: 49192 - DNA, 428 bp, Homo Sapiens
agtatgaatttacttctttgtcatttggagaaggtgcacagtattattatgaacagagaagagctgtatgaaaactgatcttccagcatctatcatctccttttagtctaatgagatactgccattatctcctgatgaaatattgttctagaaaaccttaccccatcatacgatttctgcagatcttacaggagcaatctgagctcaagcaatattaattactgtttcatttgtccatttgtctgtgtataatcatgtattttaatgatcttctattttctatggtttgtgtagatttggagactaattcaaaagagttgaagttttttggacatgtttagttgaatgtgcagttctcttttgaagaatcctgtctccaaatcctgttttgaaaagagtgttgatgagtagcacagcacctgtcatat

SEQ ID NO: 49193 - DNA, 525 bp, Homo Sapiens
ttgaatttaggtgacactatagaagagctatgacgtcgcatgcacgcgtacgtaagcttggatcctctagagcggccgcctactactactaaattcgcggccgcgtcgacgagcacaagatcacaattaaccatatacacatcttactgtgtgaggtcattgagcaatacaggagggattttatacattttagcaactatcttcaaaacctgagctatagttgtattctgcccccttcctctgggcaaaagtgtaaaagtttgctgctacaaagaatacagaaaactcagaaagaaatgctaacatacacatttagctggccctatggatatatcatattaactgcttatcgttaggggctgtatatttgtaaaataaaagaattttgggagttccatctctcggctttggagcccccctccttttgtctctgtatggaggagcttcgtctttctgcctttttctttacctgttaaattctccactccttaaaactaaaaaaaaaaaaaaaaaagttttgcccta

SEQ ID NO: 49194 - DNA, 283 bp, Homo Sapiens
gggacttcgggggcggctctgggaagcggaaagcagtcagcggagaggaccccattctgggactgctcaggctccccaagacttgacgcagccccccacgcttctggaggtggggagggcctctggacagatgggtgtcccctggtgcccctccactcttctcttcctctcttttttggggggagaaacctcggaatttctatgagacctcccccagggagggggtcagttgggcccccatccctccccttgccacatcgcagcccctgttggaataaaaaaa

SEQ ID NO: 49195 - DNA, 581 bp, Homo Sapiens
  misc_feature (396)..(396): n is a, c, g, or t
  misc_feature (451)..(451): n is a, c, g, or t
  misc_feature (473)..(473): n is a, c, g, or t
  misc_feature (517)..(517): n is a, c, g, or t
aaaagtacggatacctcaatgaacaggtccccaaagctcccacctccactcgattcagcgatgccatcagagcgtttcagtgggtgtcccagctacctgtcagcggcgtgttggaccgcgccaccctgcgccagatgactcgtccccgctgcggggttacagataccaacagttatgcggcctgggctgagaggatcagtgacttgtttgctagacaccggaccaaaatgaggcgtaagaaacgctttgcaaagcaagggggcgccctggcgcacgccttcctgccccgccgcggcgaagcgcacttcgaccaagatgagcgctggtccctgagccgccgccgcgggcgcaacctgtttcgtggtgctggcgcacgagatcggtcacacgcttggnctcacccactcgcccgcgccgcgcgcgctcatggcgccctactacaagaggctgngccgcgacgcgctgctcagctnggacgacgtgctggccgtgcagagcctgtatgggaagcccctanggggcttagtggccgtccagcttcccagtaagctgctcactcctcttaaaccccgccattcttc

SEQ ID NO: 49196 - DNA, 573 bp, Homo Sapiens
ccatattggccaggctggtctcgaactcctgacctcaagtgatctacctgcctcaactttccatagtgttgggattataggcgtaagcctccatgcctggcccagccactcttattcttgtaccacctcttcctcacatccttgaggagataaagaatgtgtcatggctctcctttctgctcttgatcatgataacgttctaaagggtgtggaataaattacagtacagaactggtgtgtgctatgtgacatgagaggtactgagattagtttatggaagtaacagtgttatagttcctttataaattatttttctctaacttcatatatgacatagttgctaagtcattttggaagtgttcgattgtgtatgcatcaccttgtatttgggcaaatacaatatatacaaaaaaatattacacatacataacttttttttttagacagtgtcttgctgtgttatccaagttggagtgcaatgtcgtgatcacagttcactgtaaccttaaactcttgggcttaaactatcttcccgcctcaacctccactacaagcagtaaaaaaaaaaaaaaa

SEQ ID NO: 49197 - DNA, 442 bp, Homo Sapiens
acaaaacaaaaaacgatgggctttctgtcatgtgcctgagaactgggaggaagctggagaaaagatgccctctgaatctttgtgtttggctgcccaggctcgccttgacaccgaatggttgaaaacagatatacagatgatagtgtcgaaccaagtggaacaaagaaagaagatctgaatgacaaagagaaaaaagatgaagacgaaactcctgcacctgtatatagggccaagtcaattctggagacctgggtgtgggtcaagcaaccaggtaatcttctgagttttggcattttggaaagcttgatctgacgctccttttctaaataacttggatggattattcgtattttttggtaacaatttaaaaaaatgtaattaaaaaaatttaaatattgtggtaaaatatacataccttaaaacttgcaaaaaaaaaaaaaaa

SEQ ID NO: 49198 - DNA, 615 bp, Homo Sapiens
atcagagtcaaagaatcatcttcacacaacaacacaaatggctggtaatgagttattattatctcatagcgtatgttttcttgacagccttgaataattttgattgacctctgggatgttattaaagcctaacgttccttctattctcacaaattttcgttatgacttcagaaggatcattaactctggtatctgtttgtttgcttgtatggcaccaataagcagatttcttctttctaatctatggattagtatagaccaggagaaggctaatacagagactatgaaacgggaataagtttttttaacgatatggcaaaattgtgactctgaaagatcattcatgtatattctaaaattaccacagtcataaaaagtcttggactttcatgaggaaatagcatagctagatatgaaaaaatatagaaaatcttcatcaatggaactattcttggggtagacactaatcatatgaaaagacaaatgctcattccctaagatagcctgaatctcatttaaaatgtagaaaacccctttttagtaaagagacatcttctacagtaaccactgagaagaagtggaagtttttcatctcctttttttattcaaaaaaaa

SEQ ID NO: 49199 - DNA, 639 bp, Homo Sapiens
ttttttttttttttttgtattttcagtagagacaaggtttcagtcttgaattcctaacctccggtgatccacctgcctcagcctcccaaagttctgggattacaggcatgagaaaccatgcccagccgatttctctcatttttttttttttttttttttaagagacaaggtctcgctgtgttgcccaggctggtctcaaactcctgggctcaagcaatcctcctgccttggcctcctgagtacaaaagtgcatctcaaatagttttaaaatgatgtgcaatatttagcaaccagtacagcccagcatcaaccaattagaagaagtgtctgactgttgagaacagatgcagccaaggtgtcaccccggtgtgtaccagctggacttcagcactgtgtagtgttctcaatatgaaaggaaaagctgaacagctaacaggagaagatgtaaaatatcttaacaactctattaaataagcaatcaaaaagcaaccaactgcagaacaagataattcatactgtctacattaaaattaaaattttcttttttttttgagacaaagtctctctgtcactcaggaggccaaggcaggaggattgcttgagcccaggagtttgagaccagcctgggcaacacagcga

SEQ ID NO: 49200 - DNA, 546 bp, Homo Sapiens
tggcgcatgcttgtaatcccagctactcaggaggcagaggcaggagaatcacttgaacccgggaggtggaggctgcagtgaacagagacagtgccactgcacatcagcctgagtgacagagagactttgtctcaaaaaaaaaagaaaattttaattttaatgtagacagtatgaattatcttgttctgcagttggttgctttttgattgcttatttaatagagttgttaagatattttacatcttctcctgttagctgttcagcttttcctttcatattgagaacactacacagtgctgaagtccagctggtacacaccggggtgacaccttggctgcatctgttctcaacagtcagacacttcttctaattggttgatgctgggctgtactggttgctaaatattgcacatcattttaaaactatttgagatgcacttttgtactcaggaggccaaggcaggaggattgcttgagcccaggagtttgagaccagcctgggcaacacagcgagaccttgtctcttaaaaaaaaaaaaaaaaaaaaa

SEQ ID NO: 49201 - DNA, 481 bp, Homo Sapiens
ccatgtgaggtcacagtgttcctccctcctgaggatgcagtgttcatgaaagcaaacactgggccctcaccaggcaacaaacctgctggtgccttcatcttggacttcccagccttcggaactatggagcccgcactctccagttcatcaccaccccagcatccctactcttgcatctaacagtttccgctattttgcaccacctgcctggcccttatgggcaactcaaggaagaaaggaaagaagagatagaggaaaaatggattcaacaaatgaaagtgttctttctgactactgctgtgtttacaaacattttaatcatcaaaacatgctttatttgatagaaagatcaaatctgcctttgtaaaacaagagactattttaatcattaagacaacacatatgtttgatttggaggcgtgttctcattcaaaaccttgcaaaatataattttttcttgtctgggaaaaaaaaaaaaaaa

SEQ ID NO: 49202 - DNA, 807 bp, Homo Sapiens
ggatttcagttgtagttagattgagaaggctggaaaagccttaattgcaatagcctggattctttcttgggttattattcaaaatttttgtcgtaataccgtactaatttccaggaccaagaaaaatcggaaggcaataggcctttggtaaattgtagtattttattttccgagaaaaatacagttttaagtgattcttatgggattttaaggtaaactatttagtcaaatttttattttagtttttgtttactaaacaaagtataatcaggcagtcttaatgtgcaagttttcctgagtttaaacgtaacaatttaccaaaaactgtgagtggcttcttttgtccttgagaagcccttgacctgtttcagttgaaaattacaaaaacttttagaattgatttcttttgcccatgttatttatataatcaaactatatcaactctagcctgggaattcactactgtggagtcgaggatgaaatgagaggatgcttttgaaaaccctttaacctgatgttggtatttattttatatatttgttttggatatttcagttgttatgagcccctccttgttggggaggtgctataaatactaatcttttaatgaaacatagggtgtaataaaggccgacctttagaaaaattttaattaccccccccttggaaaaagctcgtggtaataaattttttaaaaaaggaccttccataaaattaccatactttgggaattatttggagcacacgagggcgccccaaataaaagaaacccttgttcgggcccccctccggcccctccaagaaact

SEQ ID NO: 49203 - DNA, 360 bp, Homo Sapiens
  misc_feature (350)..(350): n is a, c, g, or t
  misc_feature (353)..(353): n is a, c, g, or t
ttttttttttgagacagagtctcgctctgtcgccaggttggaatgcagtggtgtgatctcagctcactgcaacctccgcctcccgggtccaagcaattcctctgcctcagcctcctgagttgctgggaccacaggcgcacgcaccacgccaggctaatttttgtatttttagtagagacggggtgtcaccatattggccaggctggtctcttcgaaatcttaaatccaaacatttctattcttctagatcccttgctcaggcgaatcctttcatctttcccttatagctcatcagcatgtaagtgtcttgacatctctcttctccttccctattagctctctactctctncanttacacg

SEQ ID NO: 49204 - DNA, 631 bp, Homo Sapiens
gagaataggggagcccgtagagcagccccattggtgtcgactggcgagatccttcctccccgcgatgttgcctgtcactgtacagaactgactatggcaggcttgttcggagcacgggagggtagctctttctggcatcactcctgccttttgaacagcaagttctaaactgtgactgcctggcccaaccaacactgataagtttcaattttaaggacgctttattaatttttctttaaaattgcctctttagataatgtgtattcttgttactttactaaatccttaccaacattaacagaaaatgtaagttgaagtaagttaaatataactggctgggtgtgatggctcatgcctgtaattccaacactttgggaggcagaggtgggaggattgcttcagttcaagagttcgagaccagcctgggtaacatggcgaaaccctgtctttacaaaaaatgcaaaactttgccgcatgtgttggggtgcgcctgtagtcccagcttctcgggaggctgaggtggggggaccacctgagccatggaggttgaggctgcagtgagccgtgataccaccactgtactctagcctgggccatagagtgagacaccctgcctcagaaataaaataaa

SEQ ID NO: 49205 - DNA, 663 bp, Homo Sapiens
  misc_feature (13)..(13): n is a, c, g, or t
attttcgatacangattccaatatcacttaaacgtttcccagaatatttagatagaataatttagtttcttctgaaaagtttattttaggctagtgccacatggttgtgaatattagcatggtagccaaataatagtttgtttaaatgtatatttcccaatataaatataaggggcatcataatttttaaaaactataaaatctagaagaaaaatctatggataaaatccataattctatcatctgaatgcaatgaacattagcatttaggtatattttcttgcaggttttttaaccatatacttatagagaatatgtaatttgggtctgtgttttttacatataaatatttttctatgttaaatagtcttcataagttaattataaagatctgcttaatagttctgctactgcagttttcattattagataagttggtcattatagttggacatttaggtttacaatattaaagcagtggtttatatcaatttcagtggtttaaaatatgaatttctattttggaatgaaagtattaatttaatgtagtgaatctcatattccagaactgagatgattgatttgatgctatttgtgacagacagaacccataatacagcctttctatgcaagttacattttatagaattatcctactaaaag

SEQ ID NO: 49206 - DNA, 403 bp, Homo Sapiens
gtgggcctagcagtcgctccatttatcgcttgagatctccagccttaccgcggctcgaaatggaccccaactgctcctgcaccactggtgtctcctgcgcctgcaccggctcctgcaagtgcaaagagtgcaaatgcacctcctgcaagaagagctgctgctcctgctgccccgtgggctgtgccaagtgtgcccacggctgtgtctgcaaagggacgttggagaactgcagctgctgtgcctgatgtgggaacagctcttctcccagatgttaatagaacaagctgcacaacctggattttttttcaatacgatactgagccatttgctgcatttctttttatgttaaatatgtgagtgacaataaaacaattttgacttgaatcttaaaaaaaaaaaaaaa

SEQ ID NO: 49207 - DNA, 432 bp, Homo Sapiens
gctgttggctcactttgctggaatttttctgaatccaggttaagatttccagaagtcagctttggaaaacgtgacactcctaccaaagtccagatggttagaaagttatcacataccatgggtttcagtgtttttggaaacccgtttttttctggtttttttttccccctctccattttagaatcttctcccagtcccttcgggcctagttctgtctcatcttgctttattgggttttaaaaaccggtcttatttaagcttttctaatttgtatttatgtacttatttattttttggtatgatggcagggaggggacaaagcagaaataccccttttatatgacaatgtgtgagaaaagaaactttagcttaaaactccgtaaaatgtgctcacttcagcagcacatatactagaattaaaatgatatagag

SEQ ID NO: 49208 - DNA, 597 bp, Homo Sapiens
  misc_feature (490)..(490): n is a, c, g, or t
atttggccctcgaggccaagaattcggcacgaggtttttgttaggctgtgcaaccacagtgctggtgacaggggcaggagttggcgagatggtgctgcagatgctggttggttcggtatgtggggacctgtaagggagaggggagcatttggggagcactcctctgacaggtgagaagatgcagatagccaccttctgaactcaaactgtccctttcctgagtctccagcaaagccagcagggccccctgtgccgttgttacctgtttccgtttccaagccagccctgagagctgagcctccatatgtgggatctggagatgtaaacggatgcatggaaaagtccaaagcaaacacaagccatgtctgggagcagggccagagggggcccgtgggaatgctgtttagctctcagagcctgagatgggttggaactgcagtcagagttctttttccatcccttcggaacccaccactccctaccccacctntcacagcctctggccaccctgcagagggcccagcttcctgctcaactcctgccctgaccgagagggccaactcttccagttctattcaaattcacccatgtttcatt

SEQ ID NO: 49209 - DNA, 884 bp, Homo Sapiens
gagaagtaacaggacccatcagcatttcaggcaatttgcttcctttaccaggagggtctctgtcctcttacaacctgggaaaaaataagttgtgtcccaggttgtaagtttgctttacttaggcccaaaggaactaaagaatggatatcagaaatctcaccccaatggttttgtcttacaggcacagaataggttctagcctcagcattttcattaatgtagtgtttttattaacatctccattaacttgcttgcagcaatgagatggaattatgcctcccacaaggcctggggcaagatacttgcataggtgccccctttggttggacagtagaaacactgtctcccctgccatggtgttcaatccagttggcaggtgggccagcttcaaagtgcagaaggaactgggtgtggtggctcaccctgtaaatcccagcactttgggaggcaggcggatcgcttgaactcaggagtcgagaccactctgggcaacacagtgaaaccctgtctctccaaaaaatacaaaaaattagcctgggcatggtgcgctgttgtctgtaatcccaacactttggcaggctgaggccagtggatcccttgagctaaggaggttaagaccagcttggtcaacatggcgaactccgtctctacgaaaacatacgacaattagctgggcgtagatagtcctggcctgtagtcctaaggtaatcggaaaggctgacgtgggcgaggaatcgctggagtccgggaggccgaggttggcgtgaagcgacgtatgatgccttgggctccagtctgggtgaacgagcacgatcctgtctcacaaaaaaacacaaccacacaactaacaacaccttccgcctttctccctcaaaacttcacac

SEQ ID NO: 49210 - DNA, 635 bp, Homo Sapiens
ctactaaaaatacaaaaaattagccgggcgtagtgacgggcgcctgtagtcccagctacttgggaggctgaggcaggagaatggcgtgaacccgggaggcggagcttgcagtgagccgagatcccgccactgcactccagcctgggcgacagggcgagactccgtctcaaaaaaaaaaaaaaaaaaaaaaaagatggaaagttcgatgtgactgcagtatgagattaaagccacaactattgtttattttggggactctaggccaccaagtattagcacacatacttatgttttctctactaatctggtccaggtcctcatggaccacaggacaaagctttcattttcattcattcttctattgaaattataccaaattcagctgaggaatatggaagtaactttagacttaaacaagacaaaagttttttcactgaagaattgacaagtatttgctccttaaaacaacgcagattagtgaacgtggattcctgctgagggagtgcatcccataatatggcaataattttcagtttctccaacgaaaagatagtggaggaattaaatcttttgtcctcccatggttaaaaaaaaaaaaaaagctgtgttcatttttactgtactatgcctctttt

SEQ ID NO: 49211 - DNA, 576 bp, Homo Sapiens
gtatgtatgcttatagatcttcttttctggaagaatgctcaccaaattcacaggaaagaagtgcctaggtgatcatttactgctatttactgcttcctggtatggagcaaaattgccctcaggtaggtaactacatttctaattagtatgaaaggttctactattttcctttcttttgcttatttccccttaagcacaatttgcagaccctacttctatttaactgatcatacccttttaaatgccttgtcatcatttttcatagttcctgcatcctagaaaaaataaaaaatcatttaaaatattccttggtgtctagaaaagaaaatttctctaacaatagagataatcattttgctttctcacttaagctgatctgaatgatgatttggtactgcctttatgagcagtcctccttaataatgactaattagggccgggtgtggtggtgcatgtctgtaatcccagctacttgggaggctgaggcacgagaatcacttgaacccaggaggcggagtttgcagtaagctgagattgagccactgcactccagcctaggtgacagagcaagacttt

SEQ ID NO: 49212 - DNA, 914 bp, Homo Sapiens
  misc_feature (701)..(701): n is a, c, g, or t
attttctcttcagtagatatatgagtaaacatgatgagttaatgttacacagcatacccagttaggtctcttattcttaaagcatctttctttagaagtctgcacatattttcaaatgcatcatattaaaggcacaagtcaagaggaggtggagttgcctacttcagtggcctttattcccactataccagttctcagtcttgattttgatactttctggcaactgtatcatctcttcactatcacgtattttaagaaaaagctaaggtgatttctttacatttgaacatgtgtagatcaatgagagaatggtgagggatagcaaggataaagtataatgttgaaaagtagaaagaagtggtatctgctaaactctagctttagtagcaagctattttaaggaaatcattgtatgtggtacttcctagaaatatgaaagttcctcatttgtatttaattatgtaagaaaatgttctaggaaaagaataaaaaacatatattgtcaaagtgccctttggtagtgctcccaaatggtagtaactattggtctctagtatatactcctcaaatatcttttgctatgtattaatatatctatatgtttacatatagaaatacatagtgttgtgggtttcaaattttccccattaaaatgtggtcttacgccatgtgttttggccatttgggctttttctctgccnaacgtgtctaggagctcttgggtaaatacagaccttctccattctaaaaaacacaacacacacacaaacaaaacaaccgaagagaaacaaaacaaaaaaaaaaaacacaggcgaaaaaaaacaaaaaagaggggggaacatttgggggacccacccgcttagaaaacaccggggaaaaaaagcaaggggtaaagggagaacacggggtgaagc

SEQ ID NO: 49213 - DNA, 510 bp, Homo Sapiens
tgattttaatctagaacactgaatgtaggtcagtatccaccccattttcagaaatctgggaagatctttttttgtttttcagcttctcagaataaatactttctaggatgttacaaacatggatgaagttcaccagaacagatccagggttaaccttttaaagtcattagatatggctccagtaaaaggcatgagaaggcacccgtgagaccctgcagaggaagcctcactcctgggcagccttatggctgacgagctaccttactgagcatattcctgcctctacaccagagactcactctgtggtccggtgtcacctcgattctaaattccctgcttcctggtgaatgatgctatcacactttagaaacctggccaataaatgctttgaaatttaaggatagctatcctgaaaaaatttaatataacctaaattgatagtctaatgacatcagtattcagaagaggcattctatttcagcaagtggttttcagaaaaaaaaaaaaaaa

SEQ ID NO: 49214 - DNA, 568 bp, Homo Sapiens
  misc_feature (564)..(564): n is a, c, g, or t
gccactggcccggcccgcgggctgcccccgatgcggaggcgctgtcgccggggccatgcagcaggcgccgcagccttacgagttcttcagcgaggagaacagtccgaaatggcggggactgttggtctcggccctgcggaaggttcaggaacaagtgcatcccactctctcagctaatgaagagtctctctattatattgaagagctgatttttcagctgcttaataaattatgcatggcccagccaaggactgttcaagatgtagaggagcgagttcagaagacctttcctcacccaattgataaatgggccattgctgatgcacaatctgctatagaaaaacgaaaacgaagaaatcctcttttactgcctgtggacaaaatccatccttcgttgaaggaagtattagggtacaaagtggactaccatgtatccctatatattgtggctgtactagagtatatctcagctgatattttaaaattggctggtaattatgtttttaatatcccgcattatgaaatatctcagcaggacattaaagtgtcaatgtgtgcggatanggtt

SEQ ID NO: 49215 - DNA, 888 bp, Homo Sapiens
gttcactaaatacaaaaataaccgggtgtggtggcacgtgcctgtaatcccagctactcgggaggctgtggcaggagaatcgcttgaacccgggaggcagaggttgtggtgagctgagattgcactattgcactccagcttgggcaacaagagcgaaactctgtctcaaaaaaaaattgtatttctgaagaattgttaagaacattggaaattcttgagatataatattgattggaaaaagatgaaactatatggtatgatctcaatatgtcctgatgaataaaaacataatacagaggacattattctgagataaaatacatcaaaatctttccattttatttgtatacttttacaatttttgattttttaaaatgtattctgatacacaaaataataaaaatgaaaaataaaaaatttggccgggcgcagtggctcatgcctgtaatcccagcactttgggagactgaggcaggtggatcacttgaggtcagcagtttgagaccagcctgaccatcatggtgaaaccccatctctactaaaaatacaaaaattaagctgtgtgtgatggtgcacacctgcaatcccaggtactcaggaggcttatgcgggagaatcgcttgaacctgggaggcggaaggttgcagtgagccgagatcgggtcactgcactccagcctggggcgacagagtgagattccatctcaagaaaaaaaaattgtagattcacattgcagtacaactgtgcatcttgcccattgatttctaaatgtattaactactttaaattaatccggaatcttttccccaggcttaaatggggaaatgtttttattggtagatgccttattttcctgggttctaccccagtcttttctttgaaaaactt

SEQ ID NO: 49216 - DNA, 365 bp, Homo Sapiens
gagaagacgacagaagggaattatggcgatgaagaatcaagagctcaaacttacattactgtattgaccaggaagtcctataaagaattatatttctatagaattaaaaatgcagttctgtcagcctggacaacaaagtgagacccccatagctacaaaaaaaaaaaaaaaagtttttttaagagttgggcatggtggcacacgcctgtagtcctagcttctcgggaggctgaggtgggaggattgcttgagattgggaggttgaggctgcagtgagccgtgatcacaccactgcactccatcctgggtaacagagtgagaccacttaaattaaaaaaaaaaaaaaaaaaaagtcgtatcgatgt

SEQ ID NO: 49217 - DNA, 375 bp, Homo Sapiens
gcggcgccctttttttgcaaatttataaagacaatgctaaaaggaagtgacaactgaaactaatggtcacagtcagtcaagatttcccttttcgtgaggggcctagcaggaagagaatatttagactgatgcttagtgtaaaaaggaatgtggtacaggttaaccagcaacacaaagacatattcaaaagacctaataggtcagaagaataacataccacaccaaaaacaaatctgtatggaaatctagaatcatgtgcatagaaaaagaattttcatgaggataaaacgaagcaaagagaagtaatgctcttattggggcgtgcatcagtggacatgtgctaaccagtaagaacagcaggaggcctaaatgccc

SEQ ID NO: 49218 - DNA, 718 bp, Homo Sapiens
atgaaggctgctccggtccttattatcggattttttttctgtgttggtttttataagtgtcacagacatgaagcaagattttcttctccagcaagctcttatgaaatagcttgtattaaaatatgaatctaaacatcgtgctctctatctctaatgacgaaaactgtttgagttaaaaatgtctgtttttgtaaaacaaatgtgttctatatttttgtagattttagattttctactgattggatactccaaatttatcaagttctgcaccacacagaaggagattttgagtgtcaataatgaaacacttaactcattaaaaaaaatgatttaagaagactagttaaaggtttattcttgaatctgctagcatggtgtaaagttgagccttttaacatacttcctttgagtgacatgaaattggtgctgttgcttgtggtggtagagaagtatgaaagtattaacttcttctaaaacaaaatcattcagacttaaaaaaaaaaaaaaggtcaatatttccttgcaggctgggagcacagattaaaccccagggccttaaaaacttcagctctgcctacagcagtttacaaaaatactaaactgcaatcaatgtaaataaaattcttagtgctatcctgagaccagaaagaatctcaggctaataaggaatccggtttgcatatgctgtcaaaagggtgtcatctaacccgaggtttca

SEQ ID NO: 49219 - DNA, 615 bp, Homo Sapiens
ggatcgcgtgctcagcccatccccatcctagaggtgggctctctgccccttggagtgaagctgccctgacacctcctgacttgtgtgcccatatgtgaggctctgggcactgtgggtggactcctcaggaccactgggcaagtggtgtgtgagttcgacatttcacataaaatagaaacttccatgtggttttccagaagttttgtggctgttcattaccagcacggaaggtgcccactggcctggatacagcccagcactatgtggtgttgctttttaggatttccacgaaggccaggcacagtgcctcatgcctgtaatcgcagcactttgggaagccaaggcgggcagatcacttgagcccgggcattcgagaccagcctgggcaacatagggagaccccatctctacaaaaaatacaaaaattagccgggtccgcacttttagtcccagctacttgggaggctgaggtgggaggattgcttgagtccaggaggtggaggttgcagtgagccaagatcatgccactgcactccagcctaggtgacagagcaagaccctgtctttaaaaaacaaacaaacccaaaaaaaaaataaaaaaaaaaaaaacatgtc

SEQ ID NO: 49220 - DNA, 461 bp, Homo Sapiens
gcacgaggctactcgggaggctgaggcaggagaatagcttgagccagggaggcagaggctgcagtgagccaagattgcgccactgcactccagcctgggcgacagagccagactccgtctcaaaaaaaaaaattattatatatttttatgtgtatataaatatgcacgtagatgtatacatgtatagaaaaagcctggaaaaatgcacctgaaacttttacagtgatcttctgggttgggagtgacaaaagggccttaccctttttgtaatggtttccttttgtataacagaatgtaccatgtattacttatgtaaaaaattttaccctcacactgtatttactcttacaattggcgtacagtattttattgtatagatggtcattatttattcagtctgttaataatggtcatttaagtttttctccagttgacaactctaaataacattgagataaatg

SEQ ID NO: 49221 - DNA, 661 bp, Homo Sapiens
tttgaactgatttccttcatcttgatgaggtggcaactgtccccattgtaatggtcaccattgcagcgaggatagccttacttctgcggcgcagagctcctcagggggcctctggctcctgtccttcctcaggtccatccaactactccttgggcctccttatggtagccctcattgtcttgagttgatttcactaggtttctgttctctgtcatctgcaacataactgacatggttctaaatctgtctctagggagataacacattagtatattttctacactattgaagcctctacctaatgtatgacttttgtagctcaggtaaagagatctttttaccagtgttatcgtttctagtctgtttgttagtcttttaaatagatatggcctaaatcctgtattcctggctaggaagcacttctctccacccctctgctttgagttacaaattcaattcaatttcctatgtatttattaatacctacagataaagtactgtgctttgggggacacaaaggtgactggtacctgctcttttaggaggtcaccgtgcaaaggatcctattctggtacaccaatagttataaagcaagccacagcctgggcaacatagtgagacccctgtctctactaaaaaattaaaaaaaaaaaaaaaaaaa

SEQ ID NO: 49222 - DNA, 701 bp, Homo Sapiens
cccacgcgtccgcaccgttatataattagtgcagtaattgacatgaacatgagtttatagaaactcggggttacctaaagtagtctggataaattagaagaggctacctagagaaagtagtgactgaattgcaatttgattaaggataagaatgagggttatggcagttcctgacagagtgggtactgtgaacaaacaccagaggtagaacaagctgtgttatgtgtttgtcaagaattacaagcaatctggtgttgctggtgtatcataggcgaggcaggaagtggtaagaattgagactaccattttaagttcttaggaacaggaggaaggagtcgtgtgttccgtgtttgggagcttgaactgtaatgtgtaagcaatgagacaccattaaagagttttaaggggggccgggcacggtggctcacgcctgtaatcccagcactttgggaggctgaggcgggcggatcacctgaggtcaggagttcaagaccagcctggccaacttggcgaaaccctgtctctactaaaaatagaaaaattagcccggacgtggtgacaggcacctgtattcccagctactctggagtctggggcaggagaatcgctcaaacccaggaggtggaagttgcagtaagctgagatcacaccactgtactccagcctgggcgacagagcgagactctatctcaaaaaaaaaa

SEQ ID NO: 49223 - DNA, 958 bp, Homo Sapiens
  misc_feature (764)..(764): n is a, c, g, or t
  misc_feature (772)..(772): n is a, c, g, or t
  misc_feature (958)..(958): n is a, c, g, or t
gcgaattcggcacgagggcctctgagagcctttatagctgattgccttttgggagaggggaggtgggagccccaccctgtctcatgagtcaccccaaaggtgcatgggcaggcaggtgctggggaatcggctactccccagagcttggcgtggccatccctgtggcccctctgggagtctggagcccattccctcacactggtactcactgcagctggggacatctgcactaggaagacaggacacggcatggaagctggcctctgcccagaagccatgacattctggtcaccagcctgatgctataaaacgagtgtcacggccgggcatggtggttcacgcctgtaatcccagcactttgggaggccaaggcgggtggatcatgaggtctggagttcgagaccagcctggccaacatggcgaaatcccgtctctactggaaatgagaacattagccaggtgtggtggcacatacctgtggtcccagctcctctggaggctgaggcaggagaatcacttgaacccgggaggcggagattgcagtgagccgagaccacggcattggactccaggctgggcaacagagcacgactccatctcaaaaacaaacaaaaaaaaaagagtgtcaccctggggctacttggccagacacagagagcaaggagacatccctattatctgtcaaaaataattgttgggggctgagcacagtggctcatgcctgtaatctcagcacttttggaaggtcggggcaagaagacttngagcctanagtttgagaccagcctgggcaacatagcgagcaccccatctccagaaaaaatttaaaacttggcctgggcgcagtggttcatgcctgtaatcccaccacttggggaagctggaggggaatggatccttttgagggcaggaagtttgagaccagccttggccaacatgggtgaaaccccacctcctn

SEQ ID NO: 49224 - DNA, 724 bp, Homo Sapiens
tcctaactattcagattccttgagcccaggagtttgagtccagcctggacaacatattgagacccccatctctctaaaaaaaaagagaaagaaagaaggaaagaaaaaaagaaagaaagaaagaaagaaagaaagaaagaaagaaagaaagaaagaaagaaagaaagaaggaaagaaggaaagaaggaaagaaagaaagagaaagaaagaaaagaagattgtagctagggggagagtaggtgaaaagatgaacaacatgaccgggaagatttcctaatctcaccacagcctggctctaccttaagtctttaataaaagcttgactgaaggtaccaaggtgtgctgaagtggaagcaaagttctccaaagtccagcatggtagacatcagtggtggtaaccaaggacagaccccaaggcaaggtgaacctcaaaaatggaacctcaagtctatgcagtccagctgccctccccaccagaaagtccttgttccagcccaacatcagtgcctctgagtttgtttactagaaacaaaggaagaatttccttgtaaaaatatagacagagtagtccctggctttctcctcttgcaggaaggatggattctcccattccataccatctttcccccacactggccccagaaatacttaattcaactatgtgaaaataaagattgtttttggtttgagggcatagggatccatttatccttattctttatga

SEQ ID NO: 49225 - DNA, 578 bp, Homo Sapiens
  misc_feature (554)..(554): n is a, c, g, or t
agtagagacagggtttgaccctattggccaggttggtcttggactcctgacaagtgatccgccctcctcagactcccgaagtgctagggttacaggtgtgaaccaccatgcctaactatcgttgctactttctattggaagagaaggcagccctgatttagtctgtttacagtctgcattatgtggagaatagagagccatcatagtccctaaaactttccttgccagttaacccagcaggacaacctgtctttgtctcttgacaactgttaactgagaacagggcccttgctcctctaggtgtgcacattaaggactttgcacagtgtggatgtagctcatgctgctctgccgtctagtacatgctgcttgaattttcatcatcatcctccactccttccacctccaagaaaaaaaaaagcgtgcaggaagtagcatttcagatccttctccaccacctctgcttcccttctcccttcttttcctccttgcagcattccctttagtaccagggagggatggtggttgaaaatggggggaatgatgttgctcanagaaaaaaaaaatcagcctccttg

SEQ ID NO: 49226 - DNA, 739 bp, Homo Sapiens
gggctgctgactgcgcacttggaatagtagcaggcggcggcggcggaacgccaggcagtgtatgttttaactggaaaaagtcttccatgaaaacgtcacttttaaaaaataagtaatgccatctgttttcctaaaagactgaaatgggggcgaccattcttagggccccgtggttatgaatgtgcttcagtttcataatgcctcctgctatggcagacatccttgacatctgggcggtggattcacagatagcatctgatggctccatacctgtggatttccttttgcccactgggatttatatccagttggaggtacctcgggaagctaccatttcttatattaagcagatgttatggaagcaagttcacaattacccaatgttcaacctccttatggatattgactcctatatgtttgcatgtgtgaatcagactgctgtatatgaggagcttgaagatgaaacacgaagactctgtgatgtcagaccttttcttccagttctcaaattagtgacaagaagttgtgacccaggggaaaaattagactcaaaaattggagtccttataggaaaaggtctgcatgaatttgattccttgaaggatcctgaagtaaatgaatttcgaagaaaatgcgcaaattcagcgaggaaaaaatcctgtcacttgtggggattgtcttggatggactggctaaacaaacatatccaccagagcatgaaccatccatccctgaaaac

SEQ ID NO: 49227 - DNA, 621 bp, Homo Sapiens
gttttgccatgttgcccgggctggtctcgaactcctgaccttaaatgagcctcctgcctcagcctcccaaactgctgggattacaggcgtgtgccaccatgcctggctaatttttatattttcagtagagacgaggttttgccatgttggccaggctggtctcgaactcctgacctcaagtggtccacccaccttggcctcctagagtgctgggattacaggtgtgagccactgtgcccggcctcttttgctttcttaaagactttggtcgggtatttgtgttgttgagtattgtgtctgggtgtgggtatttgattctttttttgttttgtgtttttggctgtcctgtctattggatgtgatatgttatggatgtgatgtgttagtgtcgagcgtgctgtagaatctcccatttctgaaacaggcgtgaaaacctgtactgattcccacgtcctccagctaccacttcatttgtctgtttctcatttacttcctcttatagcgtggctttaaacatatatacatttgtatatatgtatatatgaatataatgtataaaatgtatgtagatgtatatacaaaaaataaacgagatgggttaaagataaaaaaaaaaaaaaa

SEQ ID NO: 49228 - DNA, 458 bp, Homo Sapiens
  misc_feature (440)..(442): n is a, c, g, or t
  misc_feature (444)..(444): n is a, c, g, or t
  misc_feature (450)..(452): n is a, c, g, or t
  misc_feature (455)..(455): n is a, c, g, or t
ttcggcacgaggtttagccttattggtatattcgtatcagggaaagcaaactaaaaccacaatgacagggtgatgtcagcgaaaatggtagagtaggacttctgtgggtcatccctctgcagaaacaccaaacaccttgacagaaaagtcagaatttagcttatcaaaactctggaaaggtaatcaaaggtttacagcagccaagcaaatacttcgccagaagaaagggcactgaaacaaggtaagagatctttgtggcattttagcttaccctagcctcacctcccttcctggtatggctgcagtcttgaagatgacagcctgtgttccccatgctggtgcctgattccagagagtggacactcttcctcctgagggattctgtgttctgttttgtcctttctccaaaggactgccaccaggggcaaaaaacaaacaannnanaaaaannnaanaaa

SEQ ID NO: 49229 - DNA, 957 bp, Homo Sapiens
cccgggattgctcttcacaagaacatctggccaggcattaacaattagtaaatttttttgcatatgaacagtatttttctggtcatgtagatgggtgcacatgacactaaacagcattgtttagtgttatccctcttaactggtgggttgtatttggggtggaggctgtagccgaggagaagacattcacctctgtactcgagaaactttgtgtaggaatttagtttatttttttattttttttaattttttattttttactacttttactgttagcacaatgctataattgagctaatctttgtagtttggtgcaggaccaccaagtttgtgtgacccattacctactttttccatgctcagccattaccctgtcctggggcatctgagggcagtaaggaacaggtgtccaaaggaggaatgttggtgcctatgagtatgttttccagttgtattgaatttcttacttggtgtatttttgacttgtcttagtttctttccttgtggtctatgctattttacttgcgatttgttggatattctccctgtcattaaagagttgtaaaatggaagttagtttctctatgcaaatgctttaatggatgaagctgataggtttagcattgatttttgctggtgtccttcaacaagcatgaaggtgataaatgtgtttccatggctttagactcatttttgaagtcttggattgtgtgaacattcttagaaacaataaaatgttttaattaaaagccctcgactaccagctgaattcagtgtctactaggaaaatgggtagatttgttacattgtccctttgctctctatgactttgttccagttgtcaaggaacttaaatgggtattcaggaaaaagaattcttgtttccctttcctcaccttgccagttaaataactctkgtgacacttcaggtggtagaattgaamacaaactgacttc

SEQ ID NO: 49230 - DNA, 546 bp, Homo Sapiens
  misc_feature (536)..(537): n is a, c, g, or t
cgccagactctaatacgactcactatagggaaagctggtacgcctgcaggtaccggtccggaattcccgggtcgacccacgcgtccgggaaatcagttctaccataggctaattgatatgagtaagttgagttcctacagcatatctctgatcacaaaaatacccccagacttctagataaagactaaaaacaaatgtgagttatagatacatttaagaaagattaataaaaacaaataagataatgatttatgcagttattccaattcagggttgtgggtggctgaaatctatcccatcagctcagtagcaaagtggggaccaaccctgacaggttgctattccattgcagggtgcattgcaaccacacacacacccatagtcgttcagactgagatcatttagacaagctaagtaacctaacatacacatctttgggatgtgggaggaaattgaagtgcccagagaaaacccacacagacttggggagaatgtgcagactctacacagaacagtaacccccactgggaataatnntttttcctt

SEQ ID NO: 49231 - DNA, 669 bp, Homo Sapiens
ctcacacagcaggaggcagctgagaaggcccagcagatgtacgctgccaccaagggcctccgctggtatcggctgtcggatgagggcgagtggctggtgagggagttgaacctcccagtggacaggactgagggtggctggatttccctgcaggatctgcgcaaggtccagagagaaactgcaaggaagtcacagtggaagaagtgggaggtggttgctgaacgggcatggaaggggggcacagagtcagaaatgttcaataagcttgagagcattgctacgtctgacataccacgtaccccggtgctgggctgctgcatcagccgagccctggagccctcggctgtccaggaagagtttatgaccagccgtgtgaattgggtggtacagagctctgctgttgactacttacacctcatgcttgtggccatgaagtggctgtttgaagagtttgccatagatgggcgcttctgcatcagcatccatgacgaggttcgctacctggtgcgggaggaggaccgctaccgcgctgccctggccttgcagatcaccaacctcttgaccagtaaaattcctagttcatatggatgaattaaatattaccgttccatgttgatctgccactcagaaccagtttgggaaccatgatctatcctgattattggggtg

SEQ ID NO: 49232 - DNA, 879 bp, Homo Sapiens
  misc_feature (62)..(62): n is a, c, g, or t
  misc_feature (771)..(771): n is a, c, g, or t
tggtgcatgcctataattccagctactcgggaggctgaggcaggagaatcgcttgaacctgngaggtggaggttgcagtgagccgagatcgcgccattgcactccagcctggacagcaagagcaaaactccgtctcaaaaaaacaaaaacaaaaacaaacaaaaaaattcccctgagagaaaacctgtctttccagccagaggagcaggaaaaaatgaccctatggtctgaagaatgtggaaataatccatctttttttctctctctgctttctgcctgaggggcgttccttttggcaaaatgagcaggcagtgtaggcaggtaatcatcagagagaaagcccatctttctaagccagaggatgaggaaaaggggccccctgggtgccagggagtctggggggaaatcctgaagagcaaagacctgaaaagaggattctctaattctgtacatgagctgaattccgtgctcagcccagagctgcacatacaagagacagagcccaggcaacacagccacactctgaactgacactcggaccaccaccaccaaacagaaggcaacgcaggacctgcagactaaggctaacgaggctgattgcctgacaaaacagaaaaaaaagaaacattcttcagggaattttagcagaacacagagtctcccaacataaaacagacagtcctcactgcacagcagttcagaactgtaaaaatgaccttcccacctgaaactgccatgtggctgttcataatcattaatgggtaaaattgngatttttttcctgtcttttgaaaattgtcaaaacattgataatcttgtactgttagaaaggtataaggaaaacattaagtaatatttttgtaaaaaaaaaaaaaaaaa

SEQ ID NO: 49233 - DNA, 549 bp, Homo Sapiens
ttttttttttttttatttatgtctattttgctctgtggcttggacccagaaacacttgtataataggtgaaatgaacaaagaatgagctctcagatgttctggcagctgtaaagtttaaattatttggacccaaagaagcatagtctgacgttgttcagttcacacaaaattttgtctgaaaagccttttttctttcccttttaaattatgctgaacatttagggccagtatgtgtaactgacatgctgggacagttgtactcacttttgctggcctgtaggactgtgacatagggagaacactaagtgtgtcctccgggcctcgggtctcagtcctggagctatctacagtatgttaccagcgagtaagaataatagcttctacttgcttttccctacagagttcaggagttttaaaacgtcatcttagtctcattatgaccttcacatgggctatgacaataatttcctgtagtcagcagatgtctgaaggaagatattttttaactgaatctttacaccaaaaaaaaaaaaaaaaaagcctcgtgc

SEQ ID NO: 49234 - DNA, 866 bp, Homo Sapiens
  misc_feature (576)..(576): n is a, c, g, or t
  misc_feature (729)..(729): n is a, c, g, or t
  misc_feature (804)..(804): n is a, c, g, or t
  misc_feature (814)..(815): n is a, c, g, or t
acaatttttaaaacttaatcccaaaagtaaagacctcatttgcaaagaaggtcccattccgaggttccaggtagacatgagtctggggggcacccgccgctccgccctgggtctgcagggggccttctcctggtgcctcctgcctgctgtgccctccatgctgcttctttgacccggttgccttccatcctcctgggcccctcaggctctcagcttcccatcttctctaagacatgtctgctccatcattctggtgtctctctcttccctccttcctggcacctgacacgtttgttaccccacttgtggggtgttgctgtctgatcaccatcttccttccaagggtaggggaaagggccctggctggttcaagtcacagctctgtcctcagcgccaggcacagtgcccagctcactggcacagcctcagattccctggacacctggctccccggctgcattttttaccattgggataagttattagtaccattgaaaattaatacctggggattctcttaatattgttcatattcatgttcttctcagcagttttaccatgaggaatctgtcttanacaatgtcagttgtcaatagcgttatttaaaatagcaacaacaataaaaaaaggtggtcagacctggcagcttgtgcctgtaatcccagcacttggagaagccagggcggggggatcgtttcagctcaggagtttgagaccagtctggccaanatagcaagaactttgtctctattaaaaaaagatgccaggcacagtgacacatgcctggtatccccagcactttgnggaaggccgnnagtgggccaaatcaccctgaaggtcaaggagcttcaagacccaaccctggg

SEQ ID NO: 49235 - DNA, 632 bp, Homo Sapiens
atctgttaaatccaaacagttttcaccatccggttatctttcagatacagaggaaagtaatatgatttgtcaaacaatgaaatgtcagcgttatcaaactccatacctgtcagaagaaaccacgtatttggagccaggaaagatcagtgtgaattgtggacacccatctcgtcataaggctgatagattaaagtcagatttcaaaaaactgagcagtacattaccatcttcagtgtgtcagcagccttcaagaaaattaattgttccgctatctagccaacaagatagtggcttgatagcccatttgttaatctagactaattatggtacagtatttaagaagaatcattaatatattaacaaaaatggaagggaagacctcatactgaaaaaaattgtgagccctgcctcttttgagatgttttaataacatctgttatataagtaaagcattcttctaaaattgcttgagatatttatgttgccttaatattccaaaggcctgatggtgtatgtataatctgcttttgtgtggtgcttatttttggtttctaaaccatctatttttatacttataaattgactcactctgcagtgttaacttatttaaataaacttgcatatggtctggt

SEQ ID NO: 49236 - DNA, 666 bp, Homo Sapiens
  misc_feature (574)..(574): n is a, c, g, or t
  misc_feature (623)..(623): n is a, c, g, or t
  misc_feature (648)..(648): n is a, c, g, or t
gcatcctgcagtggaaattccacagcatgcccgtgtgcaccatcagcagcctgccccaggtggatgatgtgctcgcgtccctgcagatctcttcgcacaactgtaaagtgatgtactacaccaaagtgataggctccgaggatttcagaggttccatgacgagcctggagtccagccacagtggcttctcccagttgagtgcaccaccaccttctccagccagtctcactccagctccatgatttccagctagtgccgcaccacctgcacctagtgtgcagaggagatggccgcccctcctcggacagccagctccaccctcccgccgagcagagacattgtatggactcctctcacctctagagagcaaatagctctccagatggtaaacatagtcatttcatcccaaaactatcttggcaggtagttttaactctgatcctaccttaactcaacagccatagattttgtatatgttgtgcacaaaatcaaaccagagcacaagggctctcttgaaataaaagtagtttctataccaattaaaagattgacgtggtctcgaaaaaaaaaattnattatggcggccggaattcgagctcacttggcccaatcggccctatagngagtcgattacaattcacttgccgncgtttaccgttgggctgg

SEQ ID NO: 49237 - DNA, 593 bp, Homo Sapiens
aagatctcacttccaacacacatgctgtctagcaacactaagtagaggggaccattcttcccaactcacggctgctttgtccacttcccagacctgcagccccagcacctgcccaccttggcatctcccattaagtcacataatgagggcagagagcaggggcctgtttttgcggacacttgaagtacagcatggaccaggcagagcaaggcgccggatcagatcagttccagaagatatgcagcagctgctctgatttcagtgaaatgtgtgaaaccatgcacaggactttggacaactctcagctgtagcaaatccagtttccccttgggccttccagaagcagggtcctgtctccgcgcaggagcatctcccgtggcaatggctgcacctcggcatccgcattaccagtgcttgcgtggcagtccactaatcgggtgagaaccatattgctttttgcatctcaatgaagcaatagtagcaatttatcaagcacttttttttccagactggtataaaattgtatgtgcttttgtaaaccatttaacaataaaagtaaaatacaaaagggaacagggaaaaaaaaaaaaaaa

SEQ ID NO: 49238 - DNA, 710 bp, Homo Sapiens
  misc_feature (669)..(669): n is a, c, g, or t
tatttataaagactttggatagaaggagatgtattttattacctcctattctagagccccatgctcctaacaagccagagaggccccaaacaggattgtttctttcctccacagcccttctgcccatctgagattgagggagcatcgtccacttgagatcagggatgggatggagaatgggtcatgtcatgtaatgagaaaagccctcttcgggatcatgagacttggttctagtccaatttctgccactgaggatgaatgtaactgtgggcaaactatttaccctcctttatctgtgaaatgaaagggttgaattgatggatctctaaaggcttttgtcctctatgaggatgtgaaaaactagggaccacaaaagggaacaagcaaaaaagtttggattcgataaagtgatatgtaatagttgcagaaggctttatatatgcttataatgaaaagatattttttgtatattgacagcataatttatttttaatgctgtcattacacttaaagtcacaggaaaaaaatatacatgcttactcaggctttcttaaaaataaatttttatagagatccttgagtaaagacattttgcttaatttcttttttcttattccccacttgtatatcccctaccagtaccgggatctgcacacatctttttgcagntacctcttcatagccatgaaccaaaacgttctatgaggagc

SEQ ID NO: 49239 - DNA, 363 bp, Homo Sapiens
aggagttcgagatcagcctgggtaacatagcgagaccccacctctgccaaaaaaaaaaaaaatagggtatccaaatatctagattctgatcccttttgaggtcctagaccctttgagaaactgatgaagccaggcacctccttcctcaggaaaatgctggtgtacaaatacacacaaagctcttcaggcagctgatagatttcccccagagagctattcaaggacttcctaaggtgggtggactgcagggttaggacacctgctatagaggtgacatttttccaaggacaagcagggactttggtcttgactgttctctgggtgcttaataaataatactaattatgcaaaaaaaaaaaaaaa

SEQ ID NO: 49240 - DNA, 619 bp, Homo Sapiens
ggtcaggtatcgatagctgatatcgaattcgtatcggccattatggccggggtttctagaaagtatgaaatcgtgtgcttgcaaacttggaagaaaacagttcatgactgcataccttctagttctctagtgttcactggaaattaaagacactaaaagttaacaattcttattaattaatcatattaatgtaattggaatttctagaaatattaggggaagcaactttatacgcaaagcataacagaaaaataaggtgtattttttctttgaaacctatgaaatatactggccaggcacggtggctcatgcttgtaatcccagcactttgggaggctgaggcggtggatcacctgagctcaggagttcgagaccagcctggccaacatgttgaaaccatgtctctactaaaaatacaaaaattagccagtcatggtggcaggtgcctgtaaccccagttactccggaggctgaggtgggagaatcgcttgaacccaggaggtggaggttgcagtgagccaagatagcaccactgcactccagcctgggcgacaaagcaagactctttctaaaaaaacaaaaatgaataaacaaaaaaactatgagacagaaaagatgg

SEQ ID NO: 49241 - DNA, 767 bp, Homo Sapiens
ttttttttttttttttttagcacatgcatgtttatctctttaattcctctgtgaatctaacatacagatgactaggtcccataggacacaggaaaaaaagcaacatgttgcgaacaagtgtcaaaataaagcactgaattagtctttaagccttgctaaccactaattgaagtagctttgataaaaactatttgaggccagcacagtggctcacacctgcaatcccaccacttaggggcaagcagtgaggctaaggcagatcacttgaggtcaggtgttcaagaccagcttcgccaacatgatgaaaccccatcgctactacaaatacaaaaattagctgggcgtggtggcaggcgcctacaatcccagctactcgggagactgaggcacgagaatcacttgacccaggaggcggaagtcgcagtgagcactacactccagcctgggctatagagcgacactcagtctcaaaaaaaaaaaaaaaaacctatttgataaccataaattgatatgccttacttttttttctttaaatagggagagggtttcaccatgttggccagggtggtctcaaactcctgacctcaagtgatccacccaccttggcctcccaaagtgccggcattataggtgtgagccacagcacccggccaattgatatacttttgattaaagctgtttacattagtctctcccactaaactgggttcccaggcttacaagggcaatgactggggatctcattcattgtcatactctgtctacac

SEQ ID NO: 49242 - DNA, 556 bp, Homo Sapiens
caggaagattgcttgagcccaggagttcgagtacagcctgagcaacatagcaagacccccccccctcaaaaaaaagttttttcttaattaaaaacaaaaatactttagggtgatttgcaatataattttccaaatgtctcagggattataaatacagacttgcactattatgatgcctctagttatgtatggctattgaagtaaaattaaagactcagatttttttatttgcactagccacattctgcatgttcaaccatcacatttgtctagtggctaccacgtagaacagtgcagatgtagaacacttccatcaccacataaagtcctattggactgcaccactatttaaagatctgagctgaaattgtactgactccagaatctacaatagggcattttgatggtatttaaatagaaatctaggccaggcaccttggctcacactattaatcccagcactttgggatgctgaggctggaggatcgcttgagcccgggagttccagaccagcctgggcaatatagtgagacctcgtctctacagaaaaaaaaaa

SEQ ID NO: 49243 - DNA, 423 bp, Homo Sapiens
tccgttacccacgtggtagccactgagcactggctcttcctggcttcactctctggcatcaaaacttatcagtcctacatctcagtcttttgcaaggtgacacttatctgattacctaattcacacgaaggtgttaatggtggtaatggcatagtatttattaccccaggggacccagaacggtggtatcaaaacatatcattccccagtggtttaaaactctggtagctttccagggagtccaagtggagtccagtctccttagctgagttcacagggccccgtctgcacgacttggcttctgtcggcttccctagccctgacttcccaagccttagtcatcaccctctctcccacccagggctcagcacagtacctggaacagtcaagccctcaataaatgtttactgagtgcattaaaaa

SEQ ID NO: 49244 - DNA, 426 bp, Homo Sapiens
tttccatacatttttcctttcttgtacaccctgctctcttagccaccttcttgaaataatcgactgttgaactgttagtacttccctgaagaccaataatttccagattaatcgtgtttactccgtggatcactattataagtaatttaaatggatttctactaactgtgtgtgtgtgtaaatactagcaatactagcaaccaccattctttggtatgtctttgttaattttcttaagagttagtagagaattttgtcccagtcttactttctgtatcctatgggagatgaactaaactgccttattcactctaatcacttcatttgaaattcagtaagcctctctaatttcaaacactggcatcagcaagtcggtgagcatttgtgagcacacatttgtagatgtgtgtttttttaaaggcaaaa

SEQ ID NO: 49245 - DNA, 467 bp, Homo Sapiens
aagcactgggctagatgttggagaaggatagggcaatcattcccaaggaaagatagaaagtgatgtcccaagagatgttaatgtcaggttgctaagaagcaggtgaaattatctggatataagctccatgaaggcaaacattttgttggaagctccattcccaaagcttaacacttaattggcagccatttgtatgaataagtgaggttaaacaggacagttccatgcagggaacgatggctgctaacacctatccaggacctagtttccatgaccatgcatatctttttaaaaatttcctttgcccacttcttaaatgttaacatacattttctccaagttaagtttcagcccttttctcattgtccatgtgatctttatgtagtcttatccactgccacggcctcaggttccatctctagttctcaaatttatattcttaacctagatcaggagttagcaaactt

SEQ ID NO: 49246 - DNA, 426 bp, Homo Sapiens
ggcccagtggccacgccgtgtaatcccagcagcgttaacatatccagtaaggtttgctccttttttttttttttaaatcctaccctgtgggagttgcaatacagttgtattggaatgctttcttgtacaaacataagttttacttttcccttctcctggactctccagtcaactgacggttgggttacttctttccaaatagtacctggtagtgccccaaagccagaggtggatgccatcctttcttgagtgtcaactgacacattggcctgggaaaagattctaaactacaactaattaactagaggagagatgtccttcttagacttggaatcaacagctggttactagtaaaagaataacagtagtcattgttaacctgacaatcgtatttccactgcgcccggcctttttcttttcgtttct

SEQ ID NO: 49247 - DNA, 473 bp, Homo Sapiens
ttagaacccactctggcatcgacctttcccggtaggagtgccagggagattgtacacccttctgctctagaatcatagagtcactggcagaaagcacctcaggatatggaattcctgggcctccccaggtttctaacatgcaaattatttcataagatgaaaataagcaggccaggcactgtagcccatgcctgtaatcccagccctttgggagtccaaggtgggcagatcacccgaggtcaggaattcaagaccagcctggccaacatggtgaaaccccatctctactaaaaatacaaaaattggctgggcatggtggcagggacctgtaattccagctactcgggaggctaaggcaggagaattgcttgaaccctggaggtggaggttacagtgagccaagattgcgccattgcgctccagtctgggtgacaagagcaaaactccatctcaaaaagaaaaaaaaaaaaaaa

SEQ ID NO: 49248 - DNA, 467 bp, Homo Sapiens
ttttttttttttacactgtggtacatataagcaactttaataggtgataaatgtacagtagttagatttcacctgcatatacatttttccattttatgctctatgatctgaacaaaagctttttgaattgtataagatttatgtctactgtaaacattgcttaatttttttgctcttgattttaaaaaaagttttgttgaaagcgctattgaatattgcaatctatatagtgtattggatggcttcttttgtcaccctgatctcctatgttaccaatgtgtatcgtctccttctccctaaagtgtacttaatctttgctttctttgcacaatgtctttggttgcaagtcataagcctgaggcaaataaaattccagtaatttcgaagaatgtggtgttggtgctttcctaataaagaaataatttagcttgacaaaaaaaaaaaaaaaaaagcctacacctcgttcc

SEQ ID NO: 49249 - DNA, 743 bp, Homo Sapiens
gaaaaatgaaaaaataaccatttcttatgtctccgtgacctttatagaccaatgtcaccaacttttcctaaggtaattgtttcctactgtcaaatagctctagtgatataaatcttaacaatcaatgaagggaaaactggtggaaacataggaggaaaaatactgggataattttcatcacaaagtattggcattaacattggttagaataggggagaaactgcatgacttgacaactggacattcctgtatgttgtatgaggccctgtcttaacagaaatagtgatgtcatcatcatcctctcttatttggtcttgaattgccaccaatcggataaaacctttgaattatttaactcaatatatgttaagtttctactatgtgctgtgtattggtactataaatatgaataagacataagatattacattcaaaaacatcagaatacatgttcttttaaagtataccccaaaacatttaccatgtgttctggggcgcatgttaggctggatcacaaatcaagtctcaagaatttcaaaacgattgaaatcatatagagtatgaattaaaccagaaatcaagtacattaaaggtaacaaaaaattccaaaatgcattcatttaaggaacatacacctcatgacccatgagccaaaaaataatcacggcacaaattgcaaaaatattttgaccttgaattctacagaaaatacttagcatattaatacttagcatattaaagtc

SEQ ID NO: 49250 - DNA, 895 bp, Homo Sapiens
  misc_feature (536)..(537): n is a, c, g, or t
  misc_feature (539)..(540): n is a, c, g, or t
  misc_feature (542)..(542): n is a, c, g, or t
  misc_feature (548)..(552): n is a, c, g, or t
  misc_feature (563)..(563): n is a, c, g, or t
  misc_feature (573)..(573): n is a, c, g, or t
agttattctgggtattaaatatgttaataaaagtgtttttgttttgacatatttcagttaaatgaatgaatgctggttgtattttatttgaatgagtcatgattcatgtttgccatctttttaaaaaaatcagcaaatttcttctatgttataaattatagatgacaaggcaatataggacaactattcacatgattttttttaataccaaaggttggaagattttataattaacatgtcaagaagactttatagtaagcacatccttggtaatatctccaattgcaatgactttttaatttattttttcttttgctgctttaacattttctggatattaaaatccccccagtcctttaaaagaatcttgaacaatgctgagccggcagctgaaaatctaactcataatttatgttgtagagaaatagaattacctctattctttgttttgccatatgtaatcattttaataaaattaataactgccaggagttcttgacagatttaaaataaaagttaatttctagacctcggcnngnngngggtcnnnnnagagcgggggngagccgtggngggggggggccgctccaaaacatcccacaggggcccccagttttattcgacccccctttggtgggacaacttggacaaaaacccgaggggggcctaaaagttggggcacggccctctttttttacacacagggggccctggaaaaaaaggctaaattgggcatccgtggggggggggaaccttatttaacgggggcgggccccggaaattagcgaaacttcttgctggaggggattttgtaaagggacaccggggtcttatgtgggggtggtgatacaaggtgtgaaaaagcggtcctaaaccaaagatttgataattggct

SEQ ID NO: 49251 - DNA, 586 bp, Homo Sapiens
  misc_feature (145)..(145): n is a, c, g, or t
ccatcgtgtgaggtatatatgatcattggccttaatttaccaatgaaaaaatagaggccgcagctctgctttaagccagctagtggcagagctcagataagaacctaggcagcctgctccgtggctcgtgcttttagccactagntttgctgtgtaaatatgacacaaactgataaacaagagggcaaaaagaaagcgttgcaggctgggcgtggtggctcatgcctgtaatcccagcactttgggaggccaaggtgggcggagaatcacttgagctcaggagttctagaccagcctggccaacatggtgaaaccccgtctctactaaaaaaatacaaaaaattatccaggtgtggtggctcatgctgaagtcccagcttcttgggaagctgaggcagcataattgcttgaaactgggaagttgggggttgcagtgagcctagatagtgccactacactccagcctgggtgacagagtgagactctatctcaaaaaaaaaaaaaaagaaagaaagaaaagaaagcattgccatttctatggattggattaaatgctttgaaaggactcactgaagccattccgtta

SEQ ID NO: 49252 - DNA, 149 bp, Homo Sapiens
cgcggccgcgcgacacggctgcgagaagacgacagaaggggagagtgtggtcaggcggctcggactgagcaggacccatcccaatcttaccagatgctactggacttgaatggttaataaaactgcacagtgctaaaaaaaaaaaaaaa

SEQ ID NO: 49253 - DNA, 640 bp, Homo Sapiens
ctctgacagtgggcacacggcagcctgcaaagcacagggccaccgccacagcccggcagaggggcacactctggagaccttgctggcagtgctagccaggaaacagagtgaccaagggacaagaagggacttgcctaaagccacccagcaactcagcagcagaaccaagatgggccccaggctcctccatatggcccagggcttaccaccctatcacacgtggccttgtctagacccagtcctgagcaggggagaggctcttgagacctgatgccctcctacccacatggttctcccactgccctgtctgctctgctgctacagaggggcagggcctcccccagcccacgcttaggaatgcttggcctctggcaggcaggcagctgtacccaagctggtgggcagggggctggaaggcaccaggcctcaggaggagccccatagtcccgcctgcagcctgtaaccatcggctgggccctgcaaggcccacactcacgccctgtgggtgatggtcacggtgggtgggtgggggctgaccccagcttccaggggactgtcactgtggacgccaaaatggcataactgagataaggtgaataagtgacaaataaagccagttttttacaaggtaaaaaaaaaa

SEQ ID NO: 49254 - DNA, 691 bp, Homo Sapiens
ggcaccaggtctcccaagtgcactcatccaggtcagtgctcagatgtgtttaaggagaccctatattcagggaagttgcgtgaacactgcagtggggagaattgagaatagtcaggcctatcagtctcacagaatcacccctctacctttgatattccacttagctgtagagtccatctgtttgtccatctgctgaaatgagaaaagaaaaatttatgcactgatttaaaacaaaccaaaaaaaaagaaaaaaacaaaaaaaaaaatccctcctttctagctgaacaaaaatgtgcagttaatacttggcgcttgaaaatgcagtagtgaatgtggaaccaagcctgtctgtatatctggtagctcttttcttgctttgttttttcttaccagtattctgcctaacgtttgcttctgtgatggttatattgcctagcaagcacacccgtggttgtgaaaatagtatagcaaaaaagaaaaatccccggttattgatgtactagatttgtgtatgtcttttaaacagttctagtttcaccttacacagaataatcaggaaaagtgtaaaattcaaaagtgaaataaaattttatcagtaaaaaaaaaaaaaaaaaaaaaaaaaactgtcggcgcctcgccccgagagcttctgaacatcgtagcgccgggccagagtagtgacatgtctact

SEQ ID NO: 49255 - DNA, 824 bp, Homo Sapiens
  misc_feature (664)..(664): n is a, c, g, or t
ggtgaatggcctctactcctgggatcagatgagataaactgaaaaggccttggaaagcaggtggttgctggtagcttttatttcgtccatcagcattatcatgttgacatccctggtgccagggggagcccactgatgtcgctgtgaccagcaagaagagggcaaagaaaagctgtcctgtcttatggctgttagtgggagtatttcacggatcggtcctacagtgacatgtgaacttgctgtcctcccagttgagtccattcattcactcattcactcaacaggtctttattgaggtcctccaatgggccagatgctgttctaggtgctgggaacacagcagtaaactaaagaaaggccttgcttgaataccagttgagaagggaatcttggatttattcgaagtccttatgttgaagcttctctaaaaaaaataaaataaaaatgataaaaaaaaaaaaaaaaaaaaaacgcgggcggccgcaagcttattccctttagtgagggttaattttagcttggcactggccgtcgttttacaacgtcgtgactgggaaaaccctggcgttacccaacttaatcgccttgcagcacatccccctttcgccagctggcgtaatagcgaagaggcccgcaccgatcgcccttcccaacagttgcgcancctgaatggcgaatgggacgcgccctgtagcggcgcattaagcgcggcgggtgtggtggttacgcgcagcgtgaccgctacacttgccagcgccctagcgcccgctcctttcgctttcttccttcctttctcgcacgttcgcggctttcccgtcagctct

SEQ ID NO: 49256 - DNA, 529 bp, Homo Sapiens
  misc_feature (48)..(48): n is a, c, g, or t
tatcacccaggattatgcagaaactcatttcactacatcctcatatcntgactctgtttactcccatccccagggcctaagcaaggccctgtaaagcgtcgtcttcagcccccacattcactgctgctcggaaacagcactgctgcactacctttttggaagtgggatctcccacaaatgctgatttctgaggagactccctttgacagctcttgactggtgcccttcaagcagtatgggagccagctaacagtgtggaggtcactggcaccaagctgttctgatgagagtagaacacctgggaaaattttcttctgtccatttcagatgggtggtgtttttccaatgacagaagaaaagtatgtaaaaaatacttaaacccttccctacacttaataggtatggtagtagactcctttgggctcactcattgttcttgcttctcagtaagtgacaatgattaaatatcattcatttttcagtgttaactgtgtaaaattaataactaatgaccaaaaaaaaaaaaaaa

SEQ ID NO: 49257 - DNA, 786 bp, Homo Sapiens
atagcactgtgttccatgtgcctgatgtggctgacatggactgctggcctgtgagccctgagtttggccaccgttgtgcccttgggggtcaggggcttgaggtttacaactggtatgactgaggtatcctgcggtggctggcgtgctgggcatggggcctgctcacagacagcatggagcagggatgggctgtctgtgcccatgctcagcatgccttgaggggaggaggtggtggccgtgggttcctgatgtcggtgcaggagctgaaggtgagtggagtgctgccaagaatatgcccgactccccatgacaagacagaactttgtaacaaacagtaccaatttattttggccgtgggtttttgctttttttccagttgatgactttgtgaacattcccaggtattggagcctctgtggccttaaatgtggctcagtggagggagacccagcatagccaggccagtatggagcacctcacgcacagctctcagaagctgcaggcggacgaacatctgaccaaagaggtgtggtcgaggctcctgaaagagaaagggcctgctggtctcatcctctgcttcctttgcctttaccctatacctctctgcacgtcccaccccattttgctgtgtgctcacccccaggatgtgtacccggttgtagtaggagctgaaatccatgctgagctgtaccaggaacttgcatatctagagacagagactgagtcactggcccatctctttgctcttgtgccccaggccagaataaagaatagagtgtagagtgt

SEQ ID NO: 49258 - DNA, 545 bp, Homo Sapiens
ctccacccacgcgtccggtaaagatgagtagtattaagaaaaacacacatttcttcacaaaatgtgctaaggggcgtgtaaagaatcaaaagaaactattaccaataatagttttgataatcacccataattttgtgtttaaacattgaaattatagtacagacagtattctctgtgttctgtgaatttcagcagcttcagaatagagtttaatttagaaatttgcagtgaaaaaagctatctctttgttcacaaccataaatcaggagatggagattaattctattggctcttagtcacttggaactgattaattctgactttctgtcactaagcacttggtatttggccatctccattctgagcaccaaacggttaacacgaatgtccactagaactctgctgtgtgtcacccttaaatcagtctaaatcttccagacaaaagcaaatggcatttatggatttaagtcattagattttcaactgacattaattaatccctcttgattgattatatcatcaagtatttatatcttaaataggag

SEQ ID NO: 49259 - DNA, 582 bp, Homo Sapiens
ggataaaacaaatttgcataaaattaccatgattgctttatgtttatatttaacttgtatttttgtacaaacaagattgtgtaagatatatttgaagtttcagtgatttaacagtctttccaacttttcatgatttttatgagcacagactttcaagaaaatacttgaaaataaattacattgccttttgtccattaatcagcaaataaaacatggccttaacaaagttgtttgtgttattgtacaatttgaaaattatgtcgggacataccctatagaattactaaccttactgccccttgtagaatatgtattaatcattctacattaaagaaaataatggttcttactggaatgtctaggcactgtacagttattatatatcttggttgttgtattgtaccagtgaaatgccaaatttgaaaggcctgtactgcaattttatatgtcagagattgcctgtggctctaatatgcacctcaagattttaaggagataatgtttttagagagaatttctgcttccactatagaatatatacataaatgtaaaatacttacaaaagtggaagtagtgtatttt

SEQ ID NO: 49260 - DNA, 937 bp, Homo Sapiens
tgcaactctttttctaattggggcacagaggatgtcgctaaagaaaagttgaagagccctttcagcactttctcatctgtggagaagatggaatcttaaaatacatttggagttttatctgttttacaagtccattgatggcctaagttcctcctgttttctgctgtttgatctctaaggaactcctgttgctaaatatgaagagtatggaacattcatatagtctctgtgaagcatggggggagggaagacatttctttttcttataggctttatgctcaaatgtcatagtctcctttcaaagaattgtgttgcattttaaatgcacccagcttaagtagaagacattgaaggatgcattaattttcaggaactattttgaattatgaaaagattcccaattgaaaaaattattcaacaagtaaaagctaagaaatttcattgaaatcataaggcagtttaagcataaattgataaaaatagctgtgtactactaattaatagaaaatcattcaaccaagagaagagtcaagtgaatatcgtttgtttatttgctagtgagtttctttgtaacgttgattttattaaatgataatattttggttagtatgtcctatgttaataaaaatgaacaaaattaattttgctatgttcaggtgtcttgataaaataacaatgctccagtgttgttgcttacatttagcactaaatttttaccacagggtcagttgaatccagggttttaacttcttcatgccttgaaatgggaataaaatggtaattcattggttaaaattaaatttccaaatttgggaatttaatttaaacccactggtggaacaaccttttaacccattttggtttcctttaccaaggaaaagttgggccaaaaatttatccatcctggaaattttcaccgttttaagaaaatggggct

SEQ ID NO: 49261 - DNA, 543 bp, Homo Sapiens
tggatgacagcaacctagtgtatccccccaaggatggtgtctgggtccggggcctgtacctggaaggtgctggctgggaccggaagaactcctgcttggtggaggcagagcccatgcagcttgactgcctcatgcccacgatccacttccggcctgcagagagccgcaagaagagcgccaagggcatgtactcctgcccctgctattactatcccaaccgggcaggcagctcagaccgagcctcctttgtcatcggcattgacctgcggtctggggccatgacacctgatcattggatcaagaggggcactgctctactcatgagcctggacagctgagacctcctcctcttctccgcttgagagagagggtcagggactccaggagctaagacagatgttgcacctaggactgaggccggacctcactcagactttgaccttggccgaatttgtgtgatgtggccctggagatacctagttgtgttagccataaaagtgaaagagttgtattgaaaaaaaaaaaaaaaaaaaaaaaacgcgg

SEQ ID NO: 49262 - DNA, 697 bp, Homo Sapiens
  misc_feature (592)..(592): n is a, c, g, or t
  misc_feature (697)..(697): n is a, c, g, or t
ggagggaccaccctatcccacctatccaggatatcctgggtattgccaaatgcccatgcccatgggctataatccttatgcgtatggccagtataatatgccatatccaccagtgtatcaccagagtcctggacaggctccatacccgggaccccagcagccttcataccccttccctcagcccccacagcagtcttactatccacagcagtaatatgtctgctcagcagctcagctgattcagatcagagggaaagaaataccaaccctgcaataagtgtactaaactctacgctctggttaatgtaatgtactctcctggactgaatgcagtgtataatttctgtctacagctagaagctgtgccccagttccacatttgattacacatgtgagatttgctgctgttgcagtataaacactaggtataataggatttgaaattgcattacagttcataaaaattgaaaatgagaaattaaacctgcaagtgaaacatttgaaacgattatactttctacataagacatggttgggacatcagatacttacaaagatggtttaagtatggatactagagaaaattaagttntctttctctttggtttattgatttggtttaatttccattatgctattttgcataatcaaggcactgtaaatcttataattttaaaataaattaccttaggaaccn

SEQ ID NO: 49263 - DNA, 608 bp, Homo Sapiens
  misc_feature (542)..(543): n is a, c, g, or t
  misc_feature (545)..(552): n is a, c, g, or t
  misc_feature (579)..(579): n is a, c, g, or t
  misc_feature (584)..(585): n is a, c, g, or t
  misc_feature (588)..(588): n is a, c, g, or t
  misc_feature (590)..(590): n is a, c, g, or t
  misc_feature (592)..(592): n is a, c, g, or t
  misc_feature (594)..(597): n is a, c, g, or t
ggtgagcctgcggtgagctgtgaatgcaccacggcactcaagcctgggcaatgtagcaagatcctgtctctacaagaaattttttaaaaatgagccaagtgtggtggtgcatgcctgtagttccagctactcaggacactgacgtaggagggttgcttgagactgagagttggaggctgcgatgagccatgaatgccccactgcactccagcctgggcgacagaacgagaccccatctcaaaaaaaataagttctggttgtcattgaattgggataaacagagagcttgatgctttctgccttctgtctcaggtgatgcattgcacatttgggatatttggaaaggaaatgaggaaagaaattagggcctcctctgatctctcgctatctgcgggtcctgtccttttctcaagaccttcaccattactggtgttttcctgtcttctctttagtatgatccctcaaaacctcactaactggaaggatgattttgtctcagtttgtactcctaaataaaaagtaaacatgacacctctaaaaannannnnnnnnaaaaaaaaaaaaaaaggaaaaaaaaanaaaannaanananannnnaacatgtcggc

SEQ ID NO: 49264 - DNA, 663 bp, Homo Sapiens
cccgagtaagcagggatgtactaggggaatgtaaaactgcaaacttaaaaacctgcatcttcttgaagcatcagttttacttaccaaatggtttagagtcataagatgacctatttttatataaaagttatattatagaataaaatgttcatacgcatagactgttaagataaaaaaataggaatcttgcaaggtaattcttatttgcaagtgggttatgtgttcactctcctctacctttatggtattttggtgttcacttacgaagcatacaactagaaccatatccaagcagactctgggttgctgttaacccagggcctagacttctagtgcctctgaggcagaaccaaaggagcctgcactgggggaaatcccttttcctgcctgcctgtctgcctgtgacctgtgtacgtattacaggctttaggaccagctgattgttatgcttgcaggatggttttgaaacagaaacaatacttgtttactgtaggaatcctatttatattatttttcagtcctgtgaatgctgtgaaaagatttattcctttgaggccaggaagctcccaggcatatatgcttctaggttaggattgtcctgactcactaaagatgccaggatattggggctgaggggagtttgaggtgttaaaaaaaaaaaaa

SEQ ID NO: 49265 - DNA, 598 bp, Homo Sapiens
gcccatatgggagacttcagtctcattattattgcctttatccagcagtgcttatgaagccccctaccctgtcccattccagaaaccataagactcaggcagttcttgattctggaggcctgcctggtaagataagatagtataatttggaactgagaacataccagaaacagcagaacgagggccagagcagaaaaatgaaaataagtggagacacttatggatacattggtgcaaaaaaagccacggagcccatactgggcttgatatgactttgaggggacagcagattaatacttaatgagggttaaacctgaccagtctttctacagtgacaggccacactgcatgaatggggagaaccaatgaatccattgtcctctgcctattttcctgtgcacagtcacattccctccttaggaatcttccccttccaccctttacattaaacaagggaacactgaatctttcaagggaattacacgtttgggttaatgtttcagtatatcattttcatactgtaaattattttgtaagagagatttactgctatcccaggatgttcggacttggtgcccctgtgcatttggaaatcaat

SEQ ID NO: 49266 - DNA, 563 bp, Homo Sapiens
gttgaatatgacgttaccttgcagactaaaaggttgaaggcccgaaactaacttttagctaacaataagggctgtgccccaatggaaactgagttcattttctgagaaaggtttggatgactgaaatatttcctctacagtcaaggactttggcatgcggtggctgaaactgagcttttttgtgtgggctccagttctcactgttctgcaatgctcatggcaagttgaatggtgagctagcttataaattaaagagctctgaactgtattcagaccgactgggtatctagcttactgttttaacatcattgttgaaaccagaccctgtagtccagtggtgctgccctgttgtgcaaactgctcctttttctcgtgtttttgtaaagagcttccatctgggctggacccagttcttgcacatacaagacaccgctgcagtcagctaggacctttccgccatgtattctattctgtagtaaagcatttccatcaacaatgcctaattgtatctgttatttttggtttaacacacactgattcatactaataaatattttcagttt

SEQ ID NO: 49267 - DNA, 720 bp, Homo Sapiens
ttgagtcggtggaggagggagtcaaacaccacctgacacttctgctgaagttggaggacaaactgaaccggcacctgagctgtgacctgatgccaaatgagaatatccccgagttggcggctgagctggtgcagctgggcttcattagtgaggctgaccagagccggttgacttctctgctagaagagaccttgaacaagttcaattttgccaggaacagtaccctcaactcagccgctgtcaccgtctcctcttagagctcactcgggccaggccctgatctgcgctgtggctgtccctggacgtgctgcagccctcctgtcccttccccccagtcagtattaccctgtgaagccccttccctcctttattattcaggagggctgggggggctccctggttctgagcatcatcctttcccctcccctctcttcctcccctctgcactttgtttacttgttttgcacagacgtgggcctgggccttctcagcagccgccttctagttgggggctagtcgctgatctgccggctcccgcccagcctgtgtggaaaggaggcccacgggcactaggggagccgaattctacaatcccgctggggcggccggggcgggagagaaaggtggtgctgcagtggtggccctggggggccattcgattcgcctcagttgctgctgtaataaaagtctactttttgctaaaaaaaaaaaaaaagggcg

SEQ ID NO: 49268 - DNA, 904 bp, Homo Sapiens
ctatgatccttgagatctgtaccaggtaccggggagaccaggatgccactatgtctatattggacatatccatgatgactggctttgctccagacacagatgacctgaagcagctggccaatggtgttgacagatacatctccaagtatgagctggacaaagccttctccgataggaacaccctcatcatctacctggacaaggtctcacactctgaggatgactgtctagctttcaaagttcaccaatactttaatgtagagcttatccagcctggagcagtcaaggtctacgcctattacaacctggaggaaagctgtacccggttctaccatccggaaaaggaggatggaaagctgaacaagctctgccgtgatgaactgtgccgctgtgctgaggagaattgcttcatacaaaagtcggatgacaaggtcaccctggaagaacggctggacaaggcctgtgagccaggagtggactatgtgtacaagacccgactggtcaaggttcagctgtccaatgactttgacgagtacatcatggccattgagcagaccatcaagtcaggctcggatgaggtgcaggttggacagcagcgcacgttcatcagccccatcaagtgcagagaagccctgaagctggaggagaagaaacactacctcatgtggggtctctcctccgatttctggggagagaagcccaacctcagctacatcatcggggaggacacttgggtggagcactggcctgaggaggacgaatgccaagacgaagagaaccagaaacaatgccaggacctcggcgccttcaccgagagcatggttgtctttggggtgccccactgaccacacccccattcccccactccagataaagcttcagttataaaaaaaaaaaaaaaaaa

SEQ ID NO: 49269 - DNA, 737 bp, Homo Sapiens
acgcgtccgagaaaacaaagttcattgatgtcgaaggatatatacagtgttagaaattaggactgtttagaaaaacaggaatacaatggttgtttttatcatagtgtacacatttagcttgtggtaaatgactcacaaaactgattttaaaatcaagttaatgtgaattttgaaaattactacttaatcctaattcacaataacaatggcattaaggtttgacttgagttggttcttagtattatttatggtaaataggctcttaccacttgcaaataactggccacatcattaatgactgacttcccagtaaggctctctaaggggtaagtaggaggatccacaggatttgagatgctaaggccccagagatcgtttgatccaaccctcttattttcagaggggaaaatggggcctagaagttacagagcatctagctggtgcgctggcacccctggcctcacacagactcccgagtagctgggactacaggcacacagtcactgaagcaggccctgtttgcaattcacgttgccacctccaacttaaacattcttcatatgtgatgtccttagtcactaaggttaaactttcccacccagaaaaggcaacttagataaaatcttagagtactttcatactcttctaagtcctcttccagcctcactttgagtcctccttgggggttgataggaattttctcttgctttctcaataaagtctctattcatctcatg

SEQ ID NO: 49270 - DNA, 583 bp, Homo Sapiens
ctcagtgtactgccagattcgtctaaatgtctgtcatgtccagatttactttgcttctgttactgccagagttactagagatatcataataggataagaagaccctcatatgacctgcacagctcattttccttctgaaagaaactactacctaggagaatctaagctatagcagggatgatttatgcaaatttgaactagcttctttgttcacaattcagttcctcccaaccaaccagtcttcacttcaagagggccacactgcaacctcagcttaacatgaataacaaagactggctcaggagcagggcttgcccaggcatggtggatcaccggaggtcagtagttcaagaccagcctggccaacatggtgaaaccccacctctactaaaaattgtgtatatctttgtgtgtcttcctgtttatgtgtgccaagggagtattttcacaaagttcaaaacagccacaataatcagagatggagcaaaccagtgccatccagtctttatgcaaatgaaatgctgcaaagggaagcagattctgtatatgttggtaactacccaccaagagcacatgggtagca

SEQ ID NO: 49271 - DNA, 512 bp, Homo Sapiens
caaacaaaaaaaacaattcttcattcagaaaaattatcttagggactgatattggtaattatggtcaatttaataatattttggggcatttccttacattgtcttgacaagattaaaatgtctgtgccaaaattttgtattttatttggagacttcttatcaaaagtaatgctgccaaaggaagtctaaggaattagtagtgttcccatcacttgtttggagtgtgctattctaaaagattttgatttcctggaatgacaattatattttaactttggtgggggaaagagttataggaccacagtcttcacttctgatacttgtaaattaatcttttattgcacttgttttgaccattaagctatatgtttagaaatggtcattttacggaaaaattagaaaaattctgataatagtgcagaataaatgaattaatgttttacttaatttatattgaactgtcaatgacaaataaaaattctttttgaaaaaaaaaaaaaaaaaggccacat

SEQ ID NO: 49272 - DNA, 477 bp, Homo Sapiens
  misc_feature (237)..(237): n is a, c, g, or t
  misc_feature (323)..(323): n is a, c, g, or t
  misc_feature (334)..(334): n is a, c, g, or t
tggagtgttgtggcgtgatctcggctctctgcaacctccgtctcctgggttcaagcgattctcctgcctcagctacttcggagactgaggtgggagtaccccttgagcctgggaggcgcaggttgcagtgaaccaagatcacatcactgcacttcaacctgggtgacagagcaagaccctgtctcaaaaacaaaaaacaagcaaaaaaaacctagaggcaatatttttttttaaagnttgtcttttcttttctacccaaattactaatctatgccattaaggaaaggaataagaacctccatatgtattattatctccacagncctgcagaagnacaatctgatctttaactttcatgctacaaataataatttgagtagattaatttgaattttatcaacaaaattattgccatatgatgtatcatttctgtgtttgaacaaagcatcgtaatgcaggataacttctactttattc

SEQ ID NO: 49273 - DNA, 500 bp, Homo Sapiens
ggggactggcgccaaatggtctctccctgccaattttggtatcttctctggcctctccagtcctgcttactcctctatttttaaagtgccaaacaaatccccttcctctttctcaaagcacagtaatgtggcactgagccctacccagcacctcagtgaagggggcctgcttgctctttattttggtcccggatcctggggtggggcagaaatattttctgggctggggtaggaggaaggttgttgcagccatctactgctgctgtaccctaggaatatggggacatggacatggtgtcccatgcccagatgataaacactgagctgccaaaacatttttttaaatacacccgaggaggcccaagggggaagggcaatgcctacccccaggcgttatttttggggagggagggctgtgcatagggacatattctttagaatctattttattaactgacctgttttgggacctgttacccaaataaaagatgtttctagac

SEQ ID NO: 49274 - DNA, 527 bp, Homo Sapiens
gaaggccatacctgccacatttataaaataatggttttatccctgcccccaaatcatcaggttcctcgggtttaagagaagtggtctaatagacaggaatagaagttgtggtggaggtgatttgggatagactaggtttccttatgcaagtggatatgagctcctcatagaaaccagacctactgtattagacagtaacctctaacctcacctccaagcccaagtatatggccctgctgggttacctggtgactacatttcccagattcactctaaattcaaggtagtgacccaaataaattgggaaaggagggggtcaaggaggaaaagctgttgaaaatctttctcctatttaagagaaatatatgccctagagctgctccagcacccttggtttctgatttttttaatattgaatatggattagaagaatgaaatcagatgacacctgactgcaaaaatgtttataagcaaatagccttcttacattttggtataaagctgtgaacttcgtaactttgtaaagc

SEQ ID NO: 49275 - DNA, 708 bp, Homo Sapiens
ccacgcgtccgctacgtgtcagccgacatgcataggatggcggcagccttcaataccacggtggccgccctggaggacgagctgacgcagctaatcctggaggggctgatcagtgcccgtgtggactcacacagcaagatcctatacgcccgggacgtggatcagcgcagcaccacctttgagaagtctctgttgatgggcaaggagttccagcgccgcgccaaggccatgatgctgcgggcagctgtgctccgcaaccagatccatgtcaagtccccgcccagagaagggagccagggggagctgactccagccaacagccagtcccggatgagcaccaacatgtgaggggtgaaccttggcctccaggacatctgcaccccctccccacctccacggacctcggacctccaggcggctcagtgctgcctgcggcccagctaaggggcctggccactgggtgccacccagcctgtgtgccctccctggggctgaggaggcaggcggctgctagttgtggcccttcctggaaggagaggcctgcagggctcgaccctgtgggtttctgtccccagggagcagactgtgcggcacccaggcccagtggcaccatttcccagacccctcctgttcccgcctcagtcaggtgcagacaagtgggcggtgtccattaaagagcagactcagcgttaaaaaaaaaaaaaaaag

SEQ ID NO: 49276 - DNA, 798 bp, Homo Sapiens
catcaaagcatggatcagacatcacacgatttttggtaaagaagtaaagtagaaaaatatatgaatgaatgacaaatggtttacatgtggaagactttaatacagaagttttccatgtttgtttaatatatcgagagtaaaaattttcagaacaaaaatcaagaattcaaattctcttctactaattacttttagtattaaatacattttgaaagtacttaacagaaactaagatacaatactgaatatttctgtggtctttttgatttgattcagactcgcaattatgtttcagcaatgttttgtaaagctctttacccctaatatgcctaatcactgtattgtgcatagattgtgtttaaaaaatgtactctcaattacctaaaaatgcttctggattagtattgttctggactgtcataggtatgagtggaacattgcaaaaccttatgggaaatttcagacgcaaatcattatttgggaattctgggccaagcatgaccagcctgcttaggattcaagagagactgtccactaaatacctccagaatgagctaggggcacacattttgggtgttgcttttcttgctttatttcttagctagtcatctttatcaaaaatatccttttcaaaatgaggtacctatgggtggtttgtggacaattgggggttctgtgtaagtaattggttaaaactattaataactgaaaacattaaaatgtcaaaatgccacttaagcttgaattttagaatctttttttaaaacatgtataaaactagggttactgttgaagaaa

SEQ ID NO: 49277 - DNA, 671 bp, Homo Sapiens
  misc_feature (639)..(639): n is a, c, g, or t
  misc_feature (663)..(663): n is a, c, g, or t
  misc_feature (667)..(667): n is a, c, g, or t
  misc_feature (669)..(669): n is a, c, g, or t
  misc_feature (671)..(671): n is a, c, g, or t
ggggtttccatcaaaggcctagatctcttatttagcattttttttcagctcttctctcagaagttcagctgttgaaacgaaaactgtactttgtaccctcacatacaaagggatcaaatttgacctggtgttattttagccccaaatttatgacattacacaatattaaaatgtaaatgtttctttacccaaactacttctagatattctagtatttgcttctggtggaattaaatgacggtaaaattggctaattatttgaatgaatgaatggatggatgttttgcatgctcaatttctaggtcctttgtctagaaaggaaatttgcctcagttgaattagtgaaatatttctgtcgttgatattaaaagtgacttctgagtacagttaagttcctcctatttgccactgggctgttggttagaagcataggtaactgattaagtaggtatgatactgcatttgaaataagtggacacaaactatcctttctccaccatggactcaatctgagaacaacagcattcatttccattcatttccatactggcttttgattatatgcagattcctagtagcatgccttacctacagcactatgtgcatttgctgtcacaataaagtatattttgtcttgcnaaaaaagaaaaaaaaaaaaggaanaaananan

SEQ ID NO: 49278 - DNA, 732 bp, Homo Sapiens
  misc_feature (730)..(730): n is a, c, g, or t
  misc_feature (732)..(732): n is a, c, g, or t
cctgggatccagcacccatggaagcttctgctgggatggtgtcacctatgggttttgaaccagtgtggtatggtccttgggagctctgctctgagcttgccacactgctgagagcacccactgtcctgaccagagtctcagtggtcctgacccccaatgtgggcaggggctgggcaggagggtggggtctgctgtgggttcagaggactccacctcctggctggtttacctgctgctgcccattttctctgggtactgctggccagaggactttagcctacccctgaagagcctgtccatgtcattttcctactgccatagataccctaagcccagggccccttgaggcccagactcagcctgcccactggtgccggagacggagtggagtgggcctggatccgagggatgctacctctccctttcccacttgaggaccctggggagagatgggggcggggaaaatggaggtatgaatttggggtaagaggaagtgagatctccgcttgcaggtcagcccctgccttgcagggcgggctggcttgactcaggccctgtgagatagagggcccagcccagccccacccacagatcccctgctcctgttgtgttctgttgtaaatcatttggcgagactgtattttagtaactgctgcctaacttccctgtgttctatttgagaggcgcctgtctggataaagttgtcttgaaatttcaaaaaaaaaaaaanan

SEQ ID NO: 49279 - DNA, 897 bp, Homo Sapiens
ccggggagtacacttcctttctggctcccatctcttcctccaagctgtacaatgaggtccgagcctgtagggagaaggaccgtgaccctgaggcccagtttgagatgccttatgtggtacggctgcacaacttccaccagctctctgcaccccagccctgtttcaccttcagccatcccaacagagatcctatgattgacaacaaccgctattgcaccttggaatttcctgtggaggtgaacacagtactacatggctttgccggctactttgagactgtgctttatcaggacatcactctgagtatccgtccagagactcactctcctgggatgttctcatggtttcccatcctcttccctattaagcagcccataacggtacgtgaaggccaaaccatctgtgtgcgtttctggcgatgcagcaattccaagaaggtgtggtatgagtgggctgtgacagcaccagtctgttctgctattcataaccccacaggccgctcatataccattggcctctagccctgcgtgccaagtgtccagagccttggaagcagcttcaggttctgctcctgtagtacagaaggtgcagtacatctatgggctgtgattccccttgcccatcagagaggagcatttcaatctgctttcctgccttacatcaaggtgggcaagggattataattaattgcagggctcaagccaccaatctatgaagacctcaggccagggggtgaggaattagtgctggatttgaagctacgcactcagcctcaagaactccctggaatatccctgagaacatgggggtttgaacggattttcagcctttttctgttcttgttttgatggttttgtgtaagagggaatacaaataaagttatagccctttactgca

SEQ ID NO: 49280 - DNA, 671 bp, Homo Sapiens
agagcctggacagtcgcacggccaagagcgggggcctaagcgtggaggtgtgtggcccggccctttcgcagcagtggaagttcacgctcaacctgcagcagtatgagggtccgggaggccctgccgtcctgtctcctgcaccattgggtggagtctggtgatcacattattgattatgtttcttaaactttccgcgaaactaatatacctcagtattccatcatggtctgaaagtcaaacttcggcaaggcacggacgactgtgcagacacagcagcggcaagaagcgagaactgccctccccctcctctcggtgcagcccagccgggcccccttccccaggccagagcgcccctcttcctccagcttttcactctggccggctccgcaactgagtgactctcacctaccaccgactggggagtggtaaaagcacttgacggatgcctggcaacttaagacctgctggaagaggggcacaatgcccccggagcgagaaaaccctgaatctcatttcatcccttcaatccgtatgtttcacaaccccaactttcactggcagttacttaaagtcctctcctgctctcttccaagtgttctaggcaaaccctcccctttattcttatggaaaatttcaggggaccatttaaatttagaaaattcgcctcctct

SEQ ID NO: 49281 - DNA, 546 bp, Homo Sapiens
ctaggccctctcagccttcctatcatcccacgtgtctacccagacccttgtgcggcccatgccctgggggcggcgtcctgtccctgagctgggaggcggctttggatggtccgggcgtcaagagcaggggtgggccggggaggggtcctttgcggtgagctatgtttacatgacacagtgtgccaaagtgacttactgcggttgcgttagtttctagtcatcaggactatctcaccctcccactcctgtttttaaaactcagaattctttcctaagagcccttcgagcaaagcgtgccgaagttagttgtcttctctgtgctggtcctttcttatgtcctcataaaagctcagatgatggtatctgtgagtatgttttgcaaattcaaaatatagtttggtaatttttttttccagttgatttttaaaaagaactgctgtacagagcttgtactttgtccattttatagatggaaaccatccttgaaaattgtttaacttaaataaagagaagatactttctagataaaaaaaaaaaaaaaaaaag

SEQ ID NO: 49282 - DNA, 661 bp, Homo Sapiens
aaaaaagaaacaaaaaaacccaaaaagttttctttactgttggttagaaaaaaaagccagaccatagtttgactggtggcatggaatttgtgtatcaaataaatgcatttgcttatttgacaaaccatcagtgtccactatttgttaccagagttgggccactatcttttaaaattgctggtgaaaacttgccactagatggcagtgcctgtatagatggggaaaaaattgccaccattcttggtataatacagtgtagcttagatgaggtggtgaaataggggtatcagccgaatattcctaatatagtttctcttgaattaataaactgaagatttgtaggaaaatgagtgagcaaaatttgtttactgttgtgaatttttcctacagcactgtttttaatcttgatgttttccaactttctgtactaatagatacatttctgtgcataagattataaagcatatactcacagttcagtagttttcgttaaggatttactgtgtgagtactttactgtgaggaattgcagaaccttttcccctctactcttgtctaaaagttctgtgtggcacacagagatgcgacctactcaatctgacttagtaaaaccatgctgtagaatttttgtcttaaaaagaccacatacccagcacccatg

SEQ ID NO: 49283 - DNA, 555 bp, Homo Sapiens
ccggtttttgaaaggcagtttcgccaagcttaatgcaagaatatctgactgtttagaagaaagatattgccacaatctctggatggttttccagggttgtgttattactgagcttcatctttccagaatgagcaaaacactgtccagtctttgttacgattttgtaataaatgtgtacattttttttaaatttttggacatcacatgaataaaggtatgtatgtacgaatgtgtatatattatatatatgacatctattttggaaaatgtttgccctgctgtacctcatttttaggaggtgtgcatggatgcaatatatgaaaatgggacattctggaactgctggtcaggggactttgtcgccctgtgcactaaaagggccagattttcagcagccaaggacatccatacccaagtgaatgtgatgggacttaaaagaagtgaactgagacaattcactctggctgtttgaacagcagcgtttcataggaagagaaaaaaagatcaatcttgtattttctgaccacataaaggcttcttctctttgtaataaag

SEQ ID NO: 49284 - DNA, 1041 bp, Homo Sapiens
  misc_feature (790)..(812): n is a, c, g, or t
  misc_feature (814)..(828): n is a, c, g, or t
  misc_feature (831)..(832): n is a, c, g, or t
  misc_feature (834)..(835): n is a, c, g, or t
  misc_feature (837)..(845): n is a, c, g, or t
  misc_feature (847)..(852): n is a, c, g, or t
  misc_feature (854)..(857): n is a, c, g, or t
  misc_feature (859)..(862): n is a, c, g, or t
  misc_feature (864)..(864): n is a, c, g, or t
  misc_feature (873)..(873): n is a, c, g, or t
aataatgccttatatattgtttgtagtcattttaagtagcatgagccatgtccctgtagtcggtagggggcagtcttgctttattcatcctccatctcaaaatgaacttggaattaaatattgtaagatatgtataatgctggccattttaaaggggttttctcaaaagttaaacttttgttatgactgtgtttttgcacataatccatatttgctgttcaagttaatctagaaatttattcaattctgtatgaacacctggaagcaaaatcatagtgcaaaaatacatttaaggtgtggtcaaaaataagtctttaattggtaaataataagcattaattttttatagcctgtattcacaattctgcggtaccttattgtacctaagggattctaaaggtgttgtcactgtataaaacagaaagcactaggatacaaatgaagcttaattactaaaatgtaattcttgacactctttctataattagcgttcttcacccccacccccacccccaccccccttattttccttttgtctcctggtgattaggccaaagtctgggagtaaggagaggattaggtacttaggagcaaagaaagaagtagcttggaacttttgagatgatccctaacatactgtactacttgcttttacaatgtgttagcagaaaccagtgggttataatgtagaatgatgtgctttctgcccaagtggtaattcatcttggtttgctatgttaaaactgtaaatacaacagaacattaataaatatctcttgtgtagcacccnnnnnnnnnnnnnnnnnnnnnnnannnnnnnnnnnnnnncannannannnnnnnnnannnnnnannnnannnncnccaacaccnaaaccaaacaccagagggggcccccctataaaaaacccccccgggggcccccaatttttccccccccctttttttttttaaaaaaaggggcccccataaaagggggcgctttttaaaatagtggcccgcgccccccctttttaacacccctttccgggggaaaaacct

SEQ ID NO: 49285 - DNA, 444 bp, Homo Sapiens
taatctagatgcatccatagcacctagtgaaggctcaccatatggtcagaatactcgatgcacactgatacaactctctacatccatctctgtgttagggacaaatgttactttactcttgcacagaacttggacagtcacttttaatatctgtcttttctttttctattttcattactgataccctctgccccttctttctgactaaaactctcattcaataaaattatagtcaaatcttgcaattggaaaagtattcagacttttaaagttatatttatatatctaaatgttgctccattagggttttaattctaaatttaacctttaaaaagttatcatattttctttatttccaggttcctaggagaatgttaacagtccagacctttttcactacatcaaccacggatgattggcatataaaatcctacttaacctttg

SEQ ID NO: 49286 - DNA, 499 bp, Homo Sapiens
  misc_feature (325)..(325): n is a, c, g, or t
gacaaaaagagcattttcctcaaatttagttatataaatattttgccttataaaacatgttgagaacacatattctctgtgggctgtgcaagctttcattaataatttgcctttttacatctcttaggagtgaatcattatttgaaaagtttttactttttcttctttgttgctgttttatgcacatacatgtgtgtgcagttcaccaaagacaaatttcttcagcaaaattaatgtttccatattgtataaaactcataactatggattacaaatcatgttaccattaattgctttctatattgttgtatttagatttaaccangtgtttatccacctgttaagacctgtaatccagtcagggtggctcatgcctataatcccagctacttgggagactgaggtgggaggattgcttgagcccaggagtttgaggctgcagtgagctatgattgcatcactgcactccagtgtgggtagcaaagtgagactgtgcctc

SEQ ID NO: 49287 - DNA, 812 bp, Homo Sapiens
  misc_feature (748)..(748): n is a, c, g, or t
  misc_feature (755)..(755): n is a, c, g, or t
  misc_feature (763)..(763): n is a, c, g, or t
  misc_feature (767)..(767): n is a, c, g, or t
  misc_feature (791)..(791): n is a, c, g, or t
agaggtaatccattgaaacttcgctttttgctaaagaatagcaagttgaatagtaatcaaaaaacatagaaagattttagttcaaaatgattgctcctttctctacctggacttttaaaaaatcaattgtcatctaatatgagtttatttgtctatagacacaagtatcaatgtctaaaaaaaatcatgactttaaacttccaccgatgaggcaggtaggagataaagatgaattctgaactgttactaaaagtactcattttttaccttgtagggagggtgggcaatggggttacctgaccttatttgagggtatgggctttcttttttatttcatcacttgttatctcaaagagactcggagccagtgatccttttatcctgctacagtctttagggagctaaaaaaaaaaaaaaaagcaggggctgccaaaactcttgatttcatatttccttctctaaatatatatgtatcctgttttttggataaaattttaccaagaatccaaaaaaaaaaaaaccctagaatttaatcaacaagatcagtctacaggtcacagtggatttcttttcaaactgacaatgtttaggttttaagcaaataaagttccagttaatgtgaaactcagtcacaaagagttgagatttttcctttatgaaatagaattgacattcttttatgctataaatgtgcattcaggtcccattaacatgctctgcttttatttggggatagacattttctttncataccngatctccnattnctcatagaatgtgatagagtactnctgtgatctgctgctcgtaac

SEQ ID NO: 49288 - DNA, 515 bp, Homo Sapiens
gcacgaggttttttgatccaggcatgaaaggagtattaataggaatggggaagttggaacgtgtttccctccatattcctcacgtctattttagcttttccttccatttgtttcttactctttttctttctaacattctctgctagtgtttgaagagcagttgtgagggaacttaaatgatattccccttttccttttccctaataaccttcctgccagattttcaagtaggcaatgataacagcaggtgagatattaggaactgtgactacgaagtatgtagatggagatgtgcagaaggatccagagacttagagcaatgcttcacatgcttttggtaagcatgctccctactgtgggtaaaccaaacatgtaccaacccccccagaattatgatattctactgcagtaaccagcctcttcttttaacatcagatagctaaaggacgttatcctcaaagtcatggaaaagcatgaagtttttcatgacaaatcagtttgccatagtacagtta

SEQ ID NO: 49289 - DNA, 553 bp, Homo Sapiens
gggcaacagactacacgattggacgtgtgtggttgactgggatgaagttggagggaggggcagggccttgcaggggattggtactgatcccagggaggaagtgttggggcttcatgaactaggatgaaaggaggcccctgagccatgacaaggggcacatccaggatttccgccaccctgaatttagtagagctagtaggccctggtcgtcactctgggcagggatgccgtcagccttgagggtcgccacccacctgtgtgttgccctctgtcctggcggggaaacatacaccccttgtctcaccaccaaccttgcttgtgtagtcagcagggctggccctgccccaaggactcactgcatgtacccggacccctaggcctggcctttgcagcatagttgggagcttctggattccatctgcacctgtgagccccatgctggctgtgcactgcgcgggcctgagactgctggatacaatgttgggcaacaactcagccagcctgatggcagcctcagaggcttactctaacccatcccagaataaatggagac

SEQ ID NO: 49290 - DNA, 689 bp, Homo Sapiens
cctactcgaactcctacaactctcccgggggcggctcctcataccaaggcaaacaaggaggctactcacagtcgaactacaactccccggggtccggccagaactacagtggccctcccagctcctaccagtcctcacaaggcggctatggcagaaacgcagaccacagcatgaactaccagtacagataagcccccgcggggcggagatttctaccttctgcacttactccccatcagaagatcgagttttatgcatcacagttaacatgtcagctggccctccaggcccccgcccccatcccgtccacgttgctgtgtcgtgaggtgcagcgggtcaccctgtggcccgtcctgtgacccatatttagccgtgtttgggactccgtgtcttcaatggtttgttagttgccattacaactttgtctgggtagagtttttgagtttttgcagttcagtatccctctgtctattcacacttcgtgttagtggtaactcagtttgtctttaaatagttacagaagggatacgtcatttgttaatgcttttgtgaagtgagttaaacgagctttctgtattttaatgctttagtgtttcagttttataagtgaagattttattttaaaaaccagtgggaaagagtggggggtttctttttatgtctgggtcattcaggcagtacatctgaat

SEQ ID NO: 49291 - DNA, 661 bp, Homo Sapiens
ggtgctctcaggaaaatgcttagcatcttgtaaaactgcaaatgttagatatcatcaacccagtgttataattgagaaaacaagcagagtgcaagtctaggacttatttggagtctcaccaaagaagtggctggcaaagcctaaaattggggcactggacactttcctatattcttctatcctgggaatcatgatttcctttgaagaatgctgtaaaatgttgagtgtatttgtttttgtctgttatgaactgtgattggcctcacacataagtaatgaattcttttaggttgctttaggaatgtgttactttagtatctcaaatcaataatacaatcacaagtgaaacaagctgtcaatcttgcctaaagtttttaagttagggttgtcctgcatctgcaccaagtttcaaaggtttaagaaagagtactgagaggaaaaattgagaatgaagaaagttttatccattaacttagtttctgtttttacaaactgggatagatcaagattgttattttctttttatggctgaatgttttagtacaactccagagaaactggtgtggagatggataatcttgagtataggatgacattgcaccagcagattcctaatggttgacttagtaatcaatgaatcctccttcccaggcctcatcag

SEQ ID NO: 49292 - DNA, 819 bp, Homo Sapiens
  misc_feature (661)..(661): n is a, c, g, or t
gactataaacacctctactttgaatcggacgctgctaccgtcaatgaaattgtgctcaaggttaactacatcctggaatcgcgagctagcactgcccgggctgactactttgctcaaaaacaaagaaaactgaacagacgtacgagcttcagcttccagaaggagaagaaatccgggcagcagtgacactggcctccagcctcaatctgttccgtagctcagagcctgcctgccagggccaagtgccctagagcccacccggtgtcctgaagtcctcggggggaggccagcccctggctcactggcacagggcaggtgggctctcggggaaggtgtcgggggccccctaggagggagcgctggggacattgccatgggacggaagtctgcttggcagtggctttgataagcgatgcttgggggtcagaccaccccctagaggagccacgtgccgcccagccaccttcaatgcctgccaccctgcccgaggatgtacagagccgtgcccacacatttccttgcaacttgatcaaatttcttaaagcaaacaacaaaaatgtacatttctgtttttccttttaataaacaggtgtactctttatcatggttggtatgatggaccattctttggggcggaggattgattatgttactctctttnaaatctgttcccatattgaacaggcagattggaaaagctatggttcgatttctcagaagaaatgtttaggtcttagtcaataggttttaactatggccattttgttttaaatgaggtgcattttgccttccaaggggtaggtgtcctttactaaaaag

SEQ ID NO: 49293 - DNA, 572 bp, Homo Sapiens
ctgaaatggtataaggaagcacatgttgctaaaggcaaaagtgtttttcttgaccagatgaagaaatttgttgagtggttacaaaatgcagaagaagaatccgaatcggaaggtgaggaaaattaaatggctcaacaagcacaatacctaggttaccacacaccactttttgattgggaatgctgaaccatttgagaagagaaacttggcttctgttttcgcaaaggaaaaaaaaaataggataggcttcccttgtgcagagggagaaatggttttgtttttgttttgtttttaaatggagccctgaggcatcagctattatacttgggactctacctctcactcactatatgctaacttaaagccattcaacaaggagtcaagtagatctgaaattaaatactcaacagactcctccttttttagctgtatttttcaggtactgtgtggtgaccgccccactggtgtctattacaggccactttggtagttgtgtatctgctcatgtatgtgatttgacaaaccagttttttaaaataaatggctctttaaaaaaaaaaaaaaaaaaaaag

SEQ ID NO: 49294 - DNA, 685 bp, Homo Sapiens
tgcagacttgcagtttaagtattggaatttcacaaaagacataggacttaactggaaaatgaaaaaaaaaagaaaaagaaaaaactaaacaaaaaatccctctaggtagtttaggtgaaaaatgtcccttttattttggctttggttgtgatttcagagcataatgctatgtttttttgtctttttactatgtttttcggatttttaagtccgtaagtgcatacagttttctctaatttttaaaccctttcctcctcccattttgacatttgcacttggagaacacttgagttgtgaaggttttgggcatccaccccagaaagtgggaatttgattttatccttccgaactggaagaacatttttatgaagaatttttgtctaggagaatataacagtgttacccaaggttgtgtctttaagggtggttcattttctctgaccttttgttactcaaagtaaagtactaggagtcctaagaaatgttctgttcttgtacattatactgattaagtcaggattaatttgatttcaaagctgagaacagtggtaaaaactcgtttacagaaatgcattttggaagagaaaaatactgtaaaacgtgtcgtgaatgtttcttcagtttcttgttcagccaatgaggaaagggcattgcctttctttttaccattaatcacttctcaata

SEQ ID NO: 49295 - DNA, 830 bp, Homo Sapiens
ctggaccggtccggaattctcagagatcggaaatttgctaatggttgttaccaaccatacagcttgagccagtgaggcagattgggctggtgccttcgtctgagttttcctgctttcctgcctcgtgcagattctgaggtatatctgctgccttggaagacataagaagcagtgatactccctggctcggttattttctccatacaatgcacacatggtacaatgatagaaggcaaaattgccactgtcttcttttttttctcatatatctaaggaagatatatcaggttgtgcctcatgtaccgcttctagtgaaatgtagaggaaggctcaaaggagtcaacatttagatctggaagggacaagtcatgccttgggcctagaataccctgatgagaaaagagaagaggaagggaggccatatctacaacacagcctctcggcactgctgctccttattttaactttgtcttgcattgtcctgtatttatcacagtttctgttgaacagcttttcaagtatttggggagtttatcttgccatcctccccttctggttctctgcacccacctgtcccactgcagttccttccgtgctctgtgactttaagagaaaaagggggggaggggtcccggattttatgtttgtttgttttttctccttaacagtaggacttgatatttttcaattttggaagaactaaaagaagaataaactggggtttttttttgttggttggtttttgtaaaacaagaaaaatattttaaaggggggcccgctctaaaatatcccctcaaaggggccccaagcttatggcgttcccccacttt

SEQ ID NO: 49296 - DNA, 742 bp, Homo Sapiens
ctaacttatgaactccaatttgaattgaacttaactatcggctttcttactggtaaaattatatggtttattttaaatgcgtacatattgaccaatggcctctgaaaaagcacattttagatactgaaattgaaggaaagaaaatgcatcttcaaacattttttggaatctcaccacatatactttgttagatttgtgtattgtagggtgtttgttttgtatttttgtattgtatatgaactttttttaaatgtgacagttaaacacatctttaaaagcatagtcacagacaaaagcatacagtataaaaatttccttgaaaactcctacaatattatatttggaggcagcttcagactgttttattggtggtagctgcttgctgaggtcttttagttggtaataactccagagaagcagcctgtgtatattcctaacactttgttcactagcatttaagtttagaataagcccaagtaagacaatggaaatgtatatagaactcttagttcttacatgatttaattatatcgatacatgaatttaacttactttaatgtaggcaaactatcaattttttgtccattttcctgtttgttaaaataacatacctctcctacgtattattttcttgacccaaatgaaatattaacctaaggtcaagctgggagagagaaatgactgagatgaatgtctttactaaagtaccaataaatttgtcaaactcaaaaaaaaaaaaaaa

SEQ ID NO: 49297 - DNA, 704 bp, Homo Sapiens
ttttactaaaactttgaaataattcactttcatctgctttctagattttgtacatctcagtccataaagcaaagcttgttgatagtgtagttttctaaacgctgcaaatttgcagcctttaccactacaaagaagtttggatgagggattttttttttctttgtcaaaatagttcctgtttctgtagaaatttcatttttagattaaactgtgatggatgagctatcataattcaagtatacatttcttttttctatcagatattcattgtcatgcagtagtagtaaaaacatcaaagatgcagcaagcttattaagtattattttctaaaagaaataggaggcattttcatctttattattgtacttttggttatgcaaacactttgataatataaacagttatgtcccctataaatctggtcagcaacctcttttgattttgttgggtaagttaaatagtctgtagtaggtagagtactgggtacaagtggtccaaactaagataagagactaaaataaaatgctaaatcttaaaagaaactgggtttatgcactaaacgttttgtgccttggtctaatattaacatgatgtttgtgtaaactgacaaaaaaaaaaaaaaaaaaaaaactgagggggggccccgttacccaattcgcccctataggggagtcgatttacaattcactggcccgcgttttacc

SEQ ID NO: 49298 - DNA, 844 bp, Homo Sapiens
  misc_feature (36)..(36): n is a, c, g, or t
tttttaatatattgatacaaatcctttgtcagatancattatttggaaatagattttcctagtctgtgacttgtcttttcattctttgaacactgacttttttagagcaaaaattttaattttgatacaattcactttatcaatttttttacttttgatgtgcaatgtaagaacacttgtctaacccaatgtcatgaagattatatattattttcatccaggaattttatagttttaagttttacatttatatctatgatactttttgaataaaggtttgtataaagtttagctatgggtcaaggttcagtttttaaaatatggctatctaattgttctagtaccatttgttgaaaagattgtttcttttttattgcattgcttttgcacttctgtcaaaaaatcaattgattatatttgtttgggtctaattctgggctgcctattctgttccattgttatccattcacaaataccacactttcctaatcataggaagtcttaaaattagatagtgtgtacaacttcgtccgtctcaaaaatcgtgttgattactactttgcttttccagaaattttagaattgttgctttctataaaaaattctgctagtatatctgttgagttagaactatagatgaatttgaagaaaatttacatcctcacaatattttgtctttaggccacaaacatgatatagctggatatttattttgggccttgcttttttttccactttcagcatacagatcctgggactattttatatttataccaaaaattttatataattttcaactggggggcaatgggtagggggtttttaaatttttcaaacctttcat

SEQ ID NO: 49299 - DNA, 641 bp, Homo Sapiens
gtacaaactaaggatgatgtctatgaggctttcatgaaagagatggaagggctactgtgacagcttttgatgccagaaaaggcttctgttcacaacagtggcccatggagaaagaggctcttattaaacttagatgaaagagctgcttccattgtcagggtgttttctaatttcagttcaaggaatatcctaaaatttagccttgttcagaatttactgcacataaaaaagggtatttcatccagaatagatcagttattgaagcagtgctgctaacatccattccctttcataccaccattttcaccctgtttcttcccctcctccagttctttggaaatttgtgatcgggggatcttagttgcttatttgttttgactcttgtgtgctgtgggcactggagtagagatttctggagaaaaaaaaacagtttatttcatcttgccttttgtgtttgagttatttttaatattttcctgtaaatattttgtaatattttacttgtaatgaaatggatcacaatgtcatttcctaatacaaggcaggatatgtgggaagaatatgtacaattatttgattaaaattatttcccactgacctaaactttcagtgatttgtgggaaaaataaataaatgttcta

SEQ ID NO: 49300 - DNA, 653 bp, Homo Sapiens
  misc_feature (606)..(606): n is a, c, g, or t
aaaacaatatataacttagtgctagctagcgccacagactctagtagataatattatcatcataatggctggtgaaaccatataatcacagaaaaacattgccttcagcatgttcagttcgcagcactgagggcactcttgagggtgttgttaatgaagatttaatttttaaatacaggtggttccaagctttcaaataggttatgctccaaaagtgttatttgtaagttaatttttttacaagtcaaacaatgttggaagtggtatttaggttctagatcggtccacgaaagttagcccatatgtatatcttgaatagtataggggagggtattcataaagtccttatgtggttttaactaagtgaaattatggacaagagaaataattgtaaaatcgtcttaaaggcaaatttaatttttactcctgtttatgggacattcgttctattaactgtcagacacaatttctgttttcatctgagagccagttttcctttaattctacatctaaaataagaacatattgtacactattatataatacagaattgtcctaaactttaataaattcgcattttaaaggtgtttacagattattttttanatctgtagctgaatttgttaaagtctaaaaagctcaaggactttatg

SEQ ID NO: 49301 - DNA, 721 bp, Homo Sapiens
agcggctgtacatttgattgccatctgtacttcccttggagcagctttgcttattacagccacacctgcatctgttttgactagcccacataacctacacatttttcatccaaagctatcccattaccttatttatgtccatttattttcatatatagtatctgccaaaatagtagcaaaagttttatcaatgtgtagatttcaatcagaaaaacctaagcaaaaggaaaaaaaagtgatattctaaaagccacacttcttttatcaccagtgcagttttttccatcatcataaacttagttttatgaaaatgttaatatcttggatttaaacattggggtagaaatcaggacaaaatttaaatgtcatatccaggacttaatctcagatattctggtagaagatatttagataaggttgtggctgcctgtcaagttttttaatttcttaaattatataatgtcagaaaattaaatcacaaatgagccttccagattgtgaggaaaattacttggctgaaaatgactttgcataatgcccaaatcttgaagtatctgctcagatgtttgttccatctgaaatgctgccaaatccatctgtattgaggaaagagctatgaggtagtttcagagaaagtgaaaacaaaacaaagcaaaacaaaaaatgctattacagaagttggacagcccaatgtgttaagtattatacacctggaacaaga

SEQ ID NO: 49302 - DNA, 764 bp, Homo Sapiens
ggctgagagccagttttcctttatttctacatctaaaataagaacatattgtacactattatataatacagaattgtcttaaactttaataaattcgcattttaaaggtgtttacagattattttttatatctgtagctgaatttgttaaagtctaaaaagctcaaggactttatgaagatctcattatatgaggaaaatcataggttaccattttataactctattgccataagaaaatacactctaaaatcttgatttgaaacatattagaaaccttgattcagtgctcagtggtctcctagtaagaagtcaccgacggtagcgtcatatgagaagaaagaaatccccaccacctcaacctctgctgagattgtgtgctaggaacagccttccctccgtttcccctcagtcaaacttgagccagcctctggatcgatgtgatcttattgcatgtttccatggggtgtacctatactttaagccaatcctgctgcattcactgctaagttaaataaaaagccaagaagattttgcactgtgcagatcctttgctatctgacttgcatctcttcccccacctgtcagctagccacctgcttgtttgtgttgggatattttttagcacctgaagcaccatctgaaaagggcaccatttttcttctttccttttgatctcacatatgcctccctaaaaaatccttaagtttgtcaatctgaatccccagttgttgaggttaaatgagccaaaattggttctttttt

SEQ ID NO: 49303 - DNA, 1106 bp, Homo Sapiens
  misc_feature (30)..(30): n is a, c, g, or t
  misc_feature (759)..(759): n is a, c, g, or t
cgggactgttgaaaagagtaaatgatttanttttggataaagtaccaagaacagtgcctggtatttgcagtgatgatttgttctttgttctctgatgtttttttcttttaaacctttttcagtaacgcatccccaattaatagaattgtacaaatcagtggcaattccatgccaagaggaagtggctccggatttaagccatttaagggtggacctccgcgacgattctgaaaatgagctctctgccaaggttttaagataatttattgaaatctcctgtaaactttacttgactacttatgaagaggacctctgacttgcttgagagttctgtcagacttttctttttaaaaatttaacatgattgcttttctcaattttggagaagatgtttaaatagttctgttgtaacttttaatagttttgtgtatcattcaactttttttcttgcagcaccgaggcacatttgaaaagatggaattgaagtcgttttgtttaacgctgtgtgaatataaagagtagtttgcagctgtgtggtagtggtttaatttgcagccttagctctgtggtgtctggctctagagttacttctttttaccaagcattttcagcctccattttgaaggctgtctacacttaagaagtcttagctgtctaatttttagagaataagattgttcattgcatttctgagtattatgtaacctatttttgcagaaggtactgttacattaagtgcatctgtgtatcctggtttanaaaaatgtaatcttttttgaaataaaccttcatattctgtatagttgctaaagtgttgagaacctttttaattgtaaaatgagaaccgattttcagtttagtgtagcagcacacttgttcaggtttgcatggtatgaaaccaaatagattcatgaaaccttggccatgaggtttgttttcacaaggtcttaaaccgagttgtgcaggtaagtgcacttttaggtaatctgcactgtttgtttgatggaaaaatttcatctctgggaaattggggggggtattaatggtttcccatgttcccaacctatgtttgaaaaaatgggaaaaaaaaaccccagggtttctaa

SEQ ID NO: 49304 - DNA, 697 bp, Homo Sapiens
gtcaaaatgccaccgagctgttcactagtgatgtgtggcaaatcaaatcaactgttgaagaaggggtgagttttctgtgctacaagcacctgtcactgttggtacttgcaggaggcttctgctgggtatgttttggaagtgagtgtcactacttggctttgcttagcaggttctgcttcacacttgttctttgacctgctgacttgtgacttgcagaaacataggcagtagtcctagcctggtaaagaccctccaccacccctataagtttgattgctatgcaggtttgggagaggaggcctattgggctcttggatggaaccctttcccgtattaaacaaaccagagacagaatcagtgctgactcaggatctcctggtttggaatcgtaatgtgcctcaatcctctttccaagcaggcctcaccagtctctttctctttcctgcttcacccctgcaatgagccaagaaccaacactacatccacctagaactgcagaagggcttgtggtttcaaccaagacccatcctgagcaagggacttggcttggtgcttttgatcccaaagttcccacaccggcagtggcctgctggggcaatggcatctgtcacggtgttttctccagcaggtggagattatggaacctacatatgggtctggaaaaactgtacactgttgtcaccttgaccattaaaaa

SEQ ID NO: 49305 - DNA, 714 bp, Homo Sapiens
tggatgtataatagtttagcaagatgttacttttgtaagacatcagatgttcaaaaaagtgcatccgaacttgtactaaatactgcagtgtccctttataaaaagtcagactaaaactgacaattgtacagcgaagcctgacatttggatattttgaagttttttcataaatcatagaaattagtatatggctgtagtttagctttttaggtaaaaggtatgtttcattagtgcatttcttcctgctgatcactgtaaacatgtgaatcagctttccatttcttatgcaggtcatgataacttgtagagtagagtacaatcatttgtgctatgtttttaattttctaaagcaccttgatgacagtgagtgtccagtggtgaagcatcctctattgaaccaccctcaaaaatttttttgccaagtcctaagttgatagcttaaagtaaaaagtgaaaattatagtttcattaggacttggtgtaaagaaatcccctccccccttccccaaagggatactgcagttatatcacatacccaataggcaccacgatgaagatcagagcttatacttaattaaggttttatacacaccagttccccagtaaatgcaaatttaacaagaaaatcagacatgtcatatgttcaaaatgctcatggcaaacaatcattttgcattcctgcaaataaaattgttttatactgtaaaaaaaaaa

SEQ ID NO: 49306 - DNA, 553 bp, Homo Sapiens
gcccacatgaatgtggacattgcttgtgctgtggctgatggggaaaatgcctttcagggcctagaacccaaattagagccccaggaactatctcctctctctgctactgttttccccaaagtggaacatagcccagggcctccaccagtcgataaacagtgccaagaaggattgtcagagaacagtgcctatcgctggaccgttgtgaaaacagaggagggaaggcaagctctggagccgctccctcagggcatccaggagtctctaaacaactcttcccctggggatttagaggaagttgtcaagatggaacctgaagatgctacagaggaaatcagtggatttctttgagctaggagaataagagtctggagactgggagccttcacttcggcctccgattggtggcgcatagggtgtaaccaataggaaacccctaaagggtacttaaaccccagattttgcaactggggctcttgagcagcttgctttagcctgctcccactctgtgaatatacttttgcttcaataaatctgtgcttttattgcttca

SEQ ID NO: 49307 - DNA, 660 bp, Homo Sapiens
cacaaacttacactgcccaaacttctcagcctactaattatactgtggctcctgcctctcaacctggaatggctccaagccaacctggggcctatcaaccaagaccaggttttacttcacttcctggaagtaccatgacccctcctccaagtgggcctaatccttatgcgcgtaaccgtcctccctttggtcagggctatacccaacctggacctggttatcgataaggaggctcctctacaccaattaatgtagctgctagctattggcctcccaaaagactccagtactattttaatttgtattgaagaagttcagaaatttaaaagcagagcattttttatgatatcattgttggtgttaattgaaagtataatttgctggaacacaaagaccaaaatgaaagttttttcctccctgcttaaaaatgtagcagcttcttagttactttggaacactactcttacatgtataaagtgattgacttgactttctagcttcccttgtccggaggatattaaaatgctagggtgaggtttagccatcttacttggctttttactattaacatgatgtactaaagtagagccctttgagaatacaagatattatgtataaaatgtaacactgatgataggttaataaagatgattgaatcca

SEQ ID NO: 49308 - DNA, 922 bp, Homo Sapiens
  misc_feature (892)..(892): n is a, c, g, or t
agggcctggacttccctgccatccagcacgtcatcaattatgacatgccagaggagattgagaactatgtacaccggattggccgcaccgggcgctcgggaaacacaggcatcgccactaccttcatcaacaaagcgtgtgatgagtcagtgctgatggacctcaaagcgctgctgctagaagccaagcagaaggtgccgcccgtgctgcaggtgctgcattgcggggatgagtccatgctggacattggaggagagcgcggctgtgccttctgcgggggcctgggtcatcggatcactgactgccccaaactcgaggctatgcagaccaagcaggtcagcaacatcggtcgcaaggactacctggcccacagctccatggacttctgagccgacagtcttcccttctctccaagaggcctcagtccccaagactgccaccagtctacacatacagcagccccctggacagaatcagcatttcagctcagctggcctggaatgggccaggctggtcctggctgcctgttccctgtgctcttcagaattactgtttttgtttccttttaccccagctgccattaaagcccaaacctctagcccaaaaaaaaaaaaaaaaaaactccctcgtgccgaattcggcacgagggcggcggccgcccccaatgccggaggctcggcccctgagacagcgggttccgccgaagctccgctgcagtacagcctgctcctgcagtacctggtgggtgacaaacgtcagcccccggctcctggagcctgggagcctgggcggggatccccaggtccagccaaaagtgaaggagcagaagatgatccaagaagggggatgggaaagcctgcgccttttcaagggttgccccttggccctgccngggggaaagaaattttgtccttaaggaagg

SEQ ID NO: 49309 - DNA, 500 bp, Homo Sapiens
gctccaggggcctcctgcgccctcacctgccacagagcaacccaggttaaatacagcccatgcacaaagccacaggccaaagcctatggaattgtttttaatcatcaaatttaaccattttcataactggttcctggaggtgtgcagtgcccccttgcctcttcaaacctacagcttctctttgccatttgtggatttcacatcactccacacagaaacattacagcctggcatccccagtctttgccttcttccagctgcctcgacacagcactgtggcctgtccctattgcccaggcacgccatttccaagggcaggaaggggcagtgtcctgaagcccatcttttctgtgactgtcttaggtgatgtgtagccccctccacctttccactcaacaacctcccacccctgtcctgctgcatggtccggagtctgggacctactttgttttttgttatttatgaccttgtttaaagaaaataaatatctcccaaccttt

SEQ ID NO: 49310 - DNA, 728 bp, Homo Sapiens
cggctccgcgaggcgggtccagattgtccttcttgggattatcttgcttccaattcgtgtcttattggttgcgttaattttattacttgcatggccatttgctgcaatttcaacagtatgctgtcctgaaaagctgacccacccaataactggttggaggaggaaaattactcaaacagctttgaaatttctgggtcgtgctatgttcttttcaatgggatttatagttgctgtaaaaggaaagattgcaagtcctttggaagcaccagtttttgttgctgcccctcattcaacattctttgatggaattgcctgtgttgtagctgggttaccttctatagtatctcgaaatgagaatgcacaagtccctctgattggcagactgttacgggctgtgcaaccagttttggtgtcccgtgtagatccggattcccgaaaaaacacaataaatgaaataataaagcgaacaacatcaggaggagaatggccccagatactagttttcccagaaggtacttgtactaatcgttcctgtttgattacttttaaaccaggagccttcattccaggagttccagtgcagccagtcctcctcagatacccaaacaagctggatactgtgacctggacatggcaaggatatacattcattcagctttgtatgcttactttctgccagctcttcacaaaggtagaagttgagtttatgccagttcaagtaccaaatg

SEQ ID NO: 49311 - DNA, 597 bp, Homo Sapiens
ggggcccaggccctgtcctctgtccctcacacccctttgctccgttcattcattcaaaaaaacatttcttgagcaccttctgtgcccagcatatgctaggcccaccagctaagtgtgtgtggggggtctctacgccagctcatcagtgcctccttgcccatccttcaccggtgcctttgggggatctgtaggaggtgggaccttctgtggggtttggggatctccaggaagcccgaccaagctgtccccttcccctgtgccaacccatctcctacagccccctgcctgatcccctgctggctgggggcagctcccaggatatcctgccttccaactgtttctgaagcccctcctcctaacatggcgattccggaggtcaaggccttgggctctccccagggtctaacggttaaggggacccacataccagtgccaagggggatgtcaagtggtgatgtcgttgtgctcccctcccccagagcgggtgggcggggggtgaatatggttggcctgcatcaggtggccttcccatttaagtgccttctctgtgactgagagccctagtgtgatgagaactaaagagaaagccagacccct

SEQ ID NO: 49312 - DNA, 690 bp, Homo Sapiens
  misc_feature (664)..(664): n is a, c, g, or t
attttttttttagacaaggtttcactctctcacccagcaggaacacagtggcacagtcactactctctgcagcctcgaactgctaggctcaagagatcattctgcctcacctctgcgccagtagctaggactacaggtgtgtccctccaagcccgctaatgggtttttttgagacagaatctcagtcattcaggctggaatgcaatagcacaatctcggctcattgcagcctctgcctcccaggctcaagtgatcctcctgcctcagtcccccaagtagctgggactacaggcgtgtgccaccatgcccggctaatttttgtattttttgtaaagacgagatttcaccatgttgcccagaatggccttgaactcctgggctccagcagttcgcccacctcagcctcacaaagtactgggattacaagcatgagccaccatgcctggccccacaaagtgttttgtagagacagggtcttgttttgtctcctaggttggtcttgaactcttcaccttaagcgatcctcccacctcagcctcacaaagtgctgggattacaggtataagccactggcacgggacatagaatttaagggggaaagtcagttattttgttttccctgttctttcattcccagaggtagctcttaactgttcttttgtgntggttcttttgaaaaaaaaaaaaaaa

SEQ ID NO: 49313 - DNA, 691 bp, Homo Sapiens
aactgtgttacaattcagagaaagacagttggtgagcatattaagagatatagggaacagatttagatgatccaatatgcttattatcagaattccagaaaaaggcatgaaatcataaagaagacagaataccaggcaaaattaatgaaaaaatattaatccaaacacatataataaaaagtatcaatttcaagaataaaagaatatataagcatttaacacacataaacattggttacctgtaaaggtgaaaaaaaaaaacaggttcagattttctgcttaaatatcaaagggcaaatggaacatttttacgatcacctaaaattcttgaaataggccaagatttttcatatacaaaggcaacagccttcttgccacaactaagttcagtgtacaagggtgcatggactcttcctgaaagaaattactagaaataggattctgtatgataagagattaatctactgaagatcttaagaatgggaaagatgtgatatgaaagaaatggtggtaagcagtaaaccagtaagactcaggatgaatgtcaaaataattgtaattttctgaaacaaccagaaaatcttaattattaatagaagttacaagaaaatgatctggactttaaaagtccaggaggttaagatagtataaaaagtatatatatgcaaactctgttaaaaaaaaaaaaaaa

SEQ ID NO: 49314 - DNA, 410 bp, Homo Sapiens
  misc_feature (2)..(2): n is a, c, g, or t
  misc_feature (408)..(408): n is a, c, g, or t
tngagacttgatagtagcttcagcattcctgagggattcccttacattcctaggagatccctttatgggagggctttgtcaccaggtgacctgatatagcttgagaaagcctatgacctgagagaaattccagggatcctaaagagtttggagctcacagttctgaggggagcagtcacagggatcacccccattatttgctgagaagagggaggagtcaaaatccaaagagcaggaagggaggcgcagggtccccgcattgccctggtttctttttcacaccaggataccaagggtttggtggacttccgagatgtggcccttgcactagcagctctggatgggggcaggagcctggaagagctaactcgtctggcctttgaggtaatggggggtggcggtggtggngg

SEQ ID NO: 49315 - DNA, 501 bp, Homo Sapiens
gcaagtttccacgatttctgaagagctggtataggaagtttctttcttccttttgtgttacatgtgcattaaacagaacaagctgtgtgtcatcacagattgtactgtgggctcagaaaccgtgagagagcccccaccgtggacaccggctctagggccacaggaaaaggaacgtttccaggcattttgtctccagggctcccgctggacaggcacgtactgccctggggagtaaatgcggagagttcacgaactgtgcccaacgcatgttatagccagggtcctactaactactcagtaaaagaacgtattgttgtattcctccagtgttaagctatagccatgttaaaagtcactgtgcatttattctcagcatcaaataccttgtaacgtcttctctgccttgttagtgcatatttttacttttctgatactgtaaagaatatatccagtatgtaaatgaatgttctataaatcttttgtatagtcattttctctgct

SEQ ID NO: 49316 - DNA, 1022 bp, Homo Sapiens
cgccccattcacctgtggatttgtgcgagatgcagcctcagaaggaacaaggcccccagagggaggtcacctgggggcagctggtgccgggtcttcacccagaccacgctgggtcccctctgttgggggtttggggtccgggtctcccaccagccactgcttcctcctgggccctcggccttccacccctcgtcttccctccctcgggggccctgatgcgtggcggcccccacccggcctcggctctttactccattcacagccgtgcacgcgctcaagccaccagggtgcgagatgccagctctggagttctcggttgttgtaggaggttgggtgttttcaaatggtaaagatgttttgagcaaataaatttgcttgatacagaaaccaggccgactaacaaggtttccagcaggtggccttgcctcacgccaagcacacgaggtcagcctggcaggtgtgccctcctcgagctggcttcaggggtcagtgtctccccaggccctcgccctgccctcccacttcgtgctccggggtaaggcgtgagcgtgtctgtctcttcccttcccgtgagggtgtggagttgttctctggcttgtgcagctgtggtttgcggccagttcctcttacagacgtttgggatctggctctacttcccgtttgcttactgtctgatttcagaaggcctcgcctgcgcaagtataagctaaccacggtgggttccctcacagtagctttattaagatgttaatcagcctcgggcggtcgggggctgtaaagggcccaatgtgctgggcgcagggtcccaaaacccgggcgggactggtgtttcatgggacagagggtctcctttttcgcaggtgctttttcaaatggttttcgaagaaggaacccaagggagagatgtttttgtgccattgggacagaaaactgagtggaggggtgaacgtatagcaatgagaggggacgtgagataggacagaagagacacaaaagaggcgtgttagtgaaagtagttagaa

SEQ ID NO: 49317 - DNA, 991 bp, Homo Sapiens
atatgatttcttacccccagggattatgatagaaatatgaagccaccaagtctagacttgatggtgttcaagaataaataatactgattgcctccctagtccttgtccagctaactcagctgtttataattgaagggattcaacaaaattatctctagcatcaggtgctagacatggttagaatctcaccatggtttagtgactggtagatagctattaggtaggtagataaataaatgatgctagaggcaacaggtctagggttaaggattaaggcctgggaattggagtctcaccatggctccccttccttgtctggggcctggacacactgaggacaatgcggctatagcagatggccatggcagtcagtggcagcagaaagaggcagcagaaggtgaagaggttataggtggtctcttgccattgagccttgaagctgcctttggtgacacactgagtgaaagggactgggccagctcagtggaccgtgtggaacaggaacagctggagtggagttgaggactattagaactggttcccctcaccacccaacctacccacctatgtcatactgtctcctcccaattcatccttaattccaagtgaagcagcacagtgctgagaaacagttcatccatggtgccatgttaaagaagttggaaatatatcttgaaaatcctatcttccttttaggcttgaatatgatgctgaacagtaagtttgttaaatcttggaacttaaaacaatcctgctttctcaagtactattctaacattgcgctttataagggatgatatttctaccacctcactcatatttttagctgaaatgattttcctggtatgtctgttattttgtggaaaaagaaatattgtgtaaatgggtgctgccaaattccaggcattttgcagggmtctgaagtgactttagtagtawagtctatktcagtamtawatggtaaratgttaatatwaatttamatttccaa

SEQ ID NO: 49318 - DNA, 583 bp, Homo Sapiens
  misc_feature (13)..(13): n is a, c, g, or t
cataaatgataantttcaaatggggaagaaaatgaacctactcagaatcaattcggtgaaggttcactttttttctttttaaaagaatttcaagtgtgtgctgataaggttctgggaatagaaagtcaccatgattttttggtgaaagtaaaagttggaaaattcatggccaaacttgctgaacatatgttcccaaagagccaggaataacaccttgattttgtaatttagaagcaacacacattgtaaactattcattttctccaccttgtttatatggtaaaggaatcctttcagctgccagttttgaataatgaatatcatattgtatcatcaatgctgatatttaactgagttggtctttaggtttaagatggataaatgaatatcactacttgttctgaaaacatgtttgttgctttttatctcgctgcctagattgaaatattttgctatttcttctgcataagtgacagtgaaccaattcatcatgagtaagctcccttctgtcattttcattgatttaatttgtgtatcatcaataaaattgtatgttaatgctggaaagaaaacaagaagaaag

SEQ ID NO: 49319 - DNA, 661 bp, Homo Sapiens
gggaatcaggagcctggacactgccatctctagagcagagtggaggcctggactccctttgctcactccattcgggtccacagctgaggttgcctctgacaagatgaatgggcactgcctgcccttctagtgaaaaggcttggctatggccctgtgtgactccaggtcccaggaaccttgccttcgtcatctgtggatccatccagaacagcggtatctgaagcccaggccatactccctgcctcctttcttctgcctaccagaggctccagagttgagcttgtccttatctagaaacatgtgaagatgcccaagagcctggaggcactgctgtccttcctgcagaaacagtttctcctcctcccctcagccttgtggccagttcctcttcacatgaagcccctggcatttgctggggaagggactggcctggtacttgctgttagggcaggaaggggcaaaaggaagacttgggtagtaatctgggggttcagatgggtagcactaagccagctggcctaaagatgcaataagttcctaggtagtctacccttaccttgaggaatgggaaaatgaacctcagcccattaggcaggaaaagttgatatttaataaacaaggaaagagtgaactgagaccccaaaaaaaaaaaaaaaaaaca

SEQ ID NO: 49320 - DNA, 804 bp, Homo Sapiens
  misc_feature (747)..(747): n is a, c, g, or t
tggaattgcttttccataacatccaaattgtaatgtggttgctgctgaaggaggaggcagcagcgaggtcctgcggtacccatggggtgatgctacttctgcatgcatctacagggcatctgacacctaacatgagacgtggcatgtgagatgagacttggcatgtgagacatagggtcactagagacccttctgggtcagaggagagagactgaattggactaaacccgtcctctgttcccagcacgtttctcatatagccctcagtcactgagggagtcccccgcaggattggagaggcacattcccttgggacagaggctacaggttggagctttttttcccctgtcccccaaccccatccccacctccacttcagaacatggcaccccacccaactggccaagtgttaagtgatgtgcttattgagagcaactccgggtgtcttttaaaatgtagagaaaaggtgacagtttaaggaaaaatatatatagaataccagaaatgccgtttacccggagaatttttttctccccatttgttttgtttttactcaatgacaccatttttagttttatttcctgatagcaaaaggaaaaaaaacacccatccctcaaaaaggccaaggtcccgtccccctgttgtcggtgatttgtttgtctttctgataggttgaaaattgtgtaataaacttgatgacgctgtcaatcttttatactgcattgtatttttttccttttgtaacanaatatttttaaataataaatggggtgtgagctgttttatggaaaaaaaaaaaaaaag

SEQ ID NO: 49321 - DNA, 348 bp, Homo Sapiens
cttgttttctgcctcctgctaagccaatttatacattccaagaaaatcttccatttcatccaggtgaaacagaacctactggaatgaagctggcctcccatggaatgaagctggcctcccgtctccttgatttgaagcagcttctccacgttggttattatgtcatttttctaaatctaacattttaaaatttgtgccttttctttctcttttgcttgacttctcagaggtttttttaatggtcttttcaaagaagtggttttgggttttatttatcaagtctacttttattatggctgttttaaaattaaatacatttatttcttgtttcccttaaaaaaaaaaaaa

SEQ ID NO: 49322 - DNA, 616 bp, Homo Sapiens
cttggacacccagctgcctttgtttctgcattaaaccaatattgatcacacatatgacacaggctagtcctataaaagtaatgacttcatagaaatggcattataatttttaagttgatactctacaggtagctattgatataattagttttaataaaacatgctgcaaccatggtatacaacaaaaatacatttctttggtgattgaaattaaggccgtatttacaatgacttaatataagactgacttttatcctgcttcataacttgtatggagaactcaccaagaaagaattcaatactgtgaaatatgcagcaagaagattggtctttacctaggctgtgtttcctaagctctgagttttcagcaccagtagatttgtattaaaagaaaaaaaaatggggccttagcttctggcttttaattttgccagctaaggacataaaacaaaaataaacaaacaaaaacaaatagccatctgctatcagcatcattatgtaaaagaaaatatattttagcccctaaaattaggaagaatgtaatctcagaataaaggttgtcatttaagttgaataaatatatagctttatgaaaaacaaaaaaaaaaaaaaaagg

SEQ ID NO: 49323 - DNA, 557 bp, Homo Sapiens
gcgtccgggaagagataggaatgagttcttatctagtgttgcaggccagcaaatacagaggtggtttaatcaaacagctctagtatgaagcaagagtaaagactaaggtttcgagagcattcctactcacataagtgaagaaatctgtcagataggaatctaaatatttatagtgagattgtgaaagcaaccttaaagttttgaagaagactgatgagactaggtgctttgcttcctttcatcaggtatctttctgtggcatttgagaacagaaaccaagaaacatggtaattactaaattatgaggctttgctttttgtttgcttttaagtagaaaaacatgttggcaacattgagttttggagttgattgagataatatgacttaactagttttgtcattccatttgttaaagatacagtcaccaagaatgttttgagttttttgaaagaccccaatttaagccttgcttatttttaaattatttccattcagtgatgttggatgtatatcaattatttagtaaataatctcaataaattttgtgctgtggcctt

SEQ ID NO: 49324 - DNA, 824 bp, Homo Sapiens
gatccctcctcccgccgacgtgaccgaggaggagctgcttcagatgctagaggaggaccaagctgggtttcgcatccccatgagtctgggagagcctcatgcagaactggatgcaaaaggccagggatgtaccgcctacgacgtagctgtcaacagcgacttctaccggaggatgcagaacagcgatttcttgcgggagctcgtgatcaccatcgccagggagggccttgaggacaaatacaacttgcagctgaatccggaatggcgcatgatgaagaaccggccattcatgggctccatctcgcagcagaacatccgctcggagcagcgtcctcggatccaggagctgggggacctgtacacgcccgcccccgggagagctgagtcagggcctgaaaagcctcacctgaacctgtggctggaagcccccgacctcctcttggccgaagttgacctccccaaactggatggagccctggggctgtcgctggagatcggggagaaccgcctggtgatggggggccccccagcagctgtatcatctagacgcttatatcccgctgcagatcaactctcatgagagcaaggcagccttccaccggaagagaaagcaattaatggtggccatgccgcttctgccggtgccttcttgatcagggtgtctccttgtgcttctgagatgtgcagaagaggctgctggcttcccctaaaagttgacaataccagattttggcctttaaaacccacacacaagacatcacctacaacaaaaaaacaaccgcgccgccacacacctccgggggcccccaaacacgcgccagaaa

SEQ ID NO: 49325 - DNA, 624 bp, Homo Sapiens
  misc_feature (624)..(624): n is a, c, g, or t
tgtgaaataaggcaatctagtctccttgaaaaaaaaatctcttggatgtttaggaaggaagacttggccgtgatgtggtgtcctggctttgtggtgtagtgctgtgtgtatggagttagtgtaaaaacatggattacaccaagtggaagaaacgtcttcttgccaagctcattcttagaacttacacatctagaacagcttccactttggcagtgaggtcgtagccttttaggtggaagaagtgagggtgcagcgtgtcagacacaacattcatgttactcttacattggaatctgaaggtagttcagacttcgtgggttttgtttttaagcaaaacaatgtgaaaacatttaagtttgaaatgttgcatttgaagttatgatcatttaatatattcatattaccaagactattatactggaagtggtttttgtgttataaaggtttaattttacataaggcagttacttaatgtgatttttaacccttaaaaaagtggagatgtatacatttgttaacaatgccatgaaagcattttctttctcctaaggaaaagtgaatttcttatcagaatatctggctggccctgtaatttaaattaaaataaaattttggagaaacccn

SEQ ID NO: 49326 - DNA, 708 bp, Homo Sapiens
gaccatccgctccaagaggcctgctctcttttccagctcagccaaggctgatggcggaaaagagcagctgacgtacgagtctggggaagacgaggaggatgaggaggaggaggaagaggaggaggaggacttcaagccatccgacggcagtgaaaacgaaatggagacagagattctggactacgtgtgacagggcccaaggctgggcctccctgacccggccagactggtgtctggcctaatgagggagccggggctccccattgccacccacagtgcccggaatggccctaggaggccctctgaggagagctagagtcccagcaaagggtgcagctgaccctagcactggctgtgacatgctgcttggtgctgcctctggtcctgaggggttagggacatccccaaagggtataccctggctctgccacccatgaaccagcccagcatccagccagtgagtgggcacccaatgcctctcaggatgagaccagtaaatgccggaggtggagctgggcagctgtggagccccaggccacaggccagtctcgcttggctctcatgactgtggtggtggagatagcgtggggagcctcgcccatggtctcacgtggcaagaagtgcctttagctctggatcccaaccgtttggcacagctttggccacagccaggcccctctgggaattgtccttattaaaccagtttcc

SEQ ID NO: 49327 - DNA, 640 bp, Homo Sapiens
cgcgtccggagcattggcttgttttgcttttgttattgttcttccctgttatctgctttatagagagaagtttgtgtggtgggacagattttttaaacacactcacacacacacacacatacacacccagtatatatggggcgatgcacaggtaggagctggcagtgcagggaagaggagacactggtctgcagcaacagcttctactaccagcccttggggcactcacccctgtgatcaagcaatcattgtcaatgacaaagtgactattgaagttataattgtattaaattaatgctaataatttggatattttattttatttttggctgctcgggtaactttagcccttaaccaagcatatgtgggtttttttggttgtttttttttgttttttttttctttttcctttttgggtacagctgtaaaatatttggatataggaaatgttgtgttattcttgcagccttgatattcagggtggattgtaaaatataaatttttgtgagatttcaaagattaagattattttgataacattatttacagatttaaaagatgtggttatcacaagtctcgagggggaaactactgcataaaataactaacttggaataaatattttgcatcagtttggaaa

SEQ ID NO: 49328 - DNA, 1086 bp, Homo Sapiens
  misc_feature (805)..(805): n is a, c, g, or t
  misc_feature (946)..(948): n is a, c, g, or t
  misc_feature (951)..(951): n is a, c, g, or t
ctttgaatcattatgtgaaataggtgaaaagccagatcctgaccaaacatttaaatttacatctttacagaactttagcaactgtctgcccaactcttgcacaacacaagtacctaatcatagtttatctcacagacagcctgagacagttcttacggaaacaccccaggacacaattgaattaaacagattgaatttagaatcttccaattcaaagtactccttgaatacagattcctcagtgtcttatattgattcagctgtaatttcacctgatactgtcccactgggaacaggaacttccatattatctaaacaggttcaaaataaaccaaaaactggtcgaagtttattaggaggaccagcagctcttagtccattaaccccaagttttgggattttgccattagaaaccccaagtcctggagatggatcctatttacaaaactacactaatacacctcctgtaattgatgtgccatccaccggagccccttcaaaaaagtctgttgccagaatcggccaaactggaacaaagtctgtcttctcacagagtggaaatagccgagaggtaactccaattcttgcacaaacacaaagttctggtccacaaacaagtacaacacctcaggtattgagccccactattacatctcccccaaacgcactgcctcgaagaagttcacgactctttactagtgacagctccacaaccaaggagaatagcaaaaaattaaaaatgaagtttccacctaaaatcccaaacagaaaaaacaaaaagtaaaacctaataaagggagggaantaactcaaaccctaacataaaatgggatagcctgggaaattaacaaaatttggactctttcccatcattttcagaaggggaaaaatatcccacaatccacacctccagatttcaggcccttttaatcttaccaaaagccannncanccaaaagggtgtttgattgaaccctttcttcctctgaaaatgggggggaaggggttaattttaagccttttggggggtcccattaccaacctgccaaaagaaagaccctataaaaaaaattttttgtgagggccc

SEQ ID NO: 49329 - DNA, 582 bp, Homo Sapiens
agatcatgggaacagatgaatcccaggagagcagcatgacagatgcggatgacacacaacttcatgcagctgaaagtgatgaattttaacttctggaaatcagacttttacaactggatgtgtgactagtgctgacgtgtttcttgtccctctgtatactgagtctttactcttgagctggcggtgtcatcgtccgtcacttataccatgagtgtgccactttcattggaccctgactgtatacagaatgaaaggcagtgcaatatttagctgctaacaagactggctcttttaccagtatgaatgacaatttatggggggtagggtggggaactttcttttctgtttttctttaatctccctttgttggaaagtatcatgaaaggaagagttatgctttatcttgaaggaaccattagatatggaaaatagtgatgaaccagagtttcttggttgctttttcaaaaatttgtttttatttggttctgttcctgataaacagagtaactgaccttcatttctaggttcttcaagaatggtgtttgcaagtgccagatggaacaataaaagacgttgcctata

SEQ ID NO: 49330 - DNA, 685 bp, Homo Sapiens
cgcgtccgcaagggctgaatcataatcacaaggcttaattttgataaacgaatccagtgacctaaggattttctgcaaaatttgactgggagttgtgataggtggtatttttgtttattttcttcctcttactccttaggataaaggtaagttgacttgaacaactttcttttgcactgggaaaataagcaaatgtttaaatgcttcaaaaaaattttcaattaaactcaaatattaaatatctataacttataaacaccaactttcaatgtaataaatgtatcctaatcttatgtatgtttaactggattacatagatttttatcttttgttaaaatgtgtataccccgtggaccaacataatattaaagtatgtatatattatataaatatatatgtatatgtgctcgcttgtgtaggatgaatgtcttagagtcatttgtggtattttatgttgttgactctggctccagggcctgtgcttgaaaaggacagataagtattgcccagagctaagtggcactacttacaaagttttaaatgtcttctacatactgattcatgtttatttgagctctctttatagaattttctcttaaagtttcaaacctctaagttgtagcctgtaattatgagaacagtaaactttaagtaataataaagaatcccatccataaaaaaaaaa

SEQ ID NO: 49331 - DNA, 829 bp, Homo Sapiens
attcagcgaggaaaaatgtaagtcatttagaccaaagccaagcagtttctttgcgtgggttactcaagggcttgtggttacttgtatctcctctatgtgaacttgactttgaaagacagagctctagtgtgccagcctgctaagtcctgtaagaatagggaagggcggaggggggtgggcagtgactaggggacgagaagcatggggaaaatatttgcactctaaacatacagagatagaggtggggcttgtggtacttaacacttgtagccatcaactgactgagaccttgggctaaataatcaattgtgctgatattacatctcgttatggaatgttcctaaatatgccaggtagacaccagcccaagtaccctcctccagaagtctgtgactaccttgtcactactttaggcccattccacaaagcccatctctggtttgagaattcattttgatctgtatctacaccacccaaagttaggcctcctataatgtccaaaacattcctttcagcctttttatttcttactgtactgtctcttactgtactgtctatctgcagtaattgaggacccataaaatttagataactacatgtctttgctcttagaattgtcactcagcataatgagcatttaacatacaaaggcaatgtactgttttgtgttgatctatgtaaaagaatacaattcttttttacataattagtgaaattttattttttattaggaaacactaaatagtgtaatatttcttttgcttttaaaaaaattcctggtagcaaatcaagataaataattgcttcattttcttgagcaatactgaag

SEQ ID NO: 49332 - DNA, 582 bp, Homo Sapiens
  misc_feature (534)..(534): n is a, c, g, or t
  misc_feature (550)..(550): n is a, c, g, or t
ctgtacagggagtggggagccttgctgctcatcagcatccaggtcctcccgttcctccttgctatgccggagactgaagaccaggcggtggagctggggagggtgggagcacgaacgaggtgggagttctgtccccccatgcctggccctaaagtctcttgcacaccagctcgtcactgcctgccctacccacctctgtccagtctacacacccagcccaggcttaactcatgccaactccaccctacatggctgccctgtgccctcgggataaaccccaagcccctgagcttgtgtttaaagccgttggccttgctcccccagctttgtcagctcaggtctgtctacacccagatggtagcgcttgtgacactggcctggcagtcctgctcacagtgttctgtgcctgtgtgctcccaccctttcctcctgctgctgcagaaacccggccatccttccacacccagatctcttgtcctgtcctcaccccaccctgccaccatcagccctgcctggagccacctgccctttggncacaaaccaacctttntgtgggggcgtcagatggtattgtgcccacca

SEQ ID NO: 49333 - DNA, 810 bp, Homo Sapiens
tgtgtatatgtgtgtatgtgtattttaagttattatttgtattgtgcaaaaatttttttttgatcttggggattctggctgtgaatttggtgcacgacaattatggtaaaaaaacatttgcttggtctaaagaagatcattaatgttttgtgaccatacaagttgtaacagtggattgtttttatgtgtaggtattgttaaatacagggactgtttccaggcacagaatatgaatcgtaagttaggatggacattagatgtgattatgatgataaagcgaaggtctgcggtcctatatctacagacacgtggtgagaaattagaacaaactggagacgggccattgacacatggactctgcctgggcatgttaggttaattctttgactccaagccttaaaatactcacatggagtcagcgctcacctcattcacacaattatcatagagctccctggacactgaacctctaaagggaaaaggtctaccctggagccaggagcatcagggttggcttgggagcatgagaggtgagcccagggctaggcctgggccaggccccggcagcactgctacttgggaggagccacttcacctttgtattagttattaaaaaatataatttgggctgggcgcagtggctcacgcctgtaatcccagcactttgggagtccgaggcatgcggatcacttgaggtcaggagttcgagaccaccctggccaatatggtgaaaccccatctctactaaaaatacaacaaagttagccgggcgtggtggcaggcgtctgtaatcccagctgcttgggaggc

SEQ ID NO: 49334 - DNA, 736 bp, Homo Sapiens
tttaagtgaatcacataattgtctttggaacttggtctcccaacacttattgtgattgcaaagtgtttaccagatatttgatgaggtgctatgtttgtgaaaaacatatcatgtaattcaaaaacactattgatattgaataccagataccactatgtagtaagtcttttaggatgattttaatttagtcgtgcgtcattttctgattctcatcattgggagatcttaaatcttagcaagcattagcaatattaaatgccaaaattccattgaaactttcaagttggagcaattgtctgtgtttgaaaagatgaaataaaaataataatcaagggcaaagctttgagtgcccagaagggaaagctgtaccagttgctaacctgtcttgtttcaggagccaccatgtttttttttcagtgttaacaacaatcatgataattaaattaaaacactagtttgttcacttgtaggactgcagttctgaattttgggttaaaggttttggctgctgtaagaatgtgaatttgaatgtattttgaattgtaagagcaaaagaacgtttttgtacaattttttttcatttaattggaatgatcttcaggtttctacaaatagggtaattgtaaatttaaagcattagcatttattggtgaataatgtatatatccccattccaagaaatataagtgagtgaagttgaaataaaatctttaaaatttaaaaaaaaaaaaaaaag

SEQ ID NO: 49335 - DNA, 560 bp, Homo Sapiens
ctcgagcgcccggggattccaggcccagggcttctactctgcccctggggaatgtgtcccctgcatatcttctcagcaataactccatgggctctgggaccctaccccttccaaccttccctgcttctgagacttcaatctacagcccagctcatccagatgcagactacagtccctgcaattgggtctctggcaggcaatagttgaaggactcctgttccgttggggccagcacaccgggatggatggagggagagcagaggcctttgcttctctgcctacgtccccttagatgggcagcagaggcaactcccgcatcctttgctctgcctgtcggtggtcagagcggtgagcgaggtgggttggagactcagcaggctccgtgcagcccttgggaacagtgagaggttgaaggtcataacgagagtgggaactcaacccagatcccgcccctcctgtcctctgtgttcccgcggaaaccaaccaaaccgtgcgctgtgacccattgctgttctctgtatcgtgatctatcctcaacaacaacagaaaaaaggaataaa

SEQ ID NO: 49336 - DNA, 884 bp, Homo Sapiens
gccgctctgtggggcttctttcccgtcctgctgctgctgctgctatcgggggatgtccagagctcggaggtgcccggggctgctgctgagggatcgggagggagtggggtcggcataggagatcgcttcaagattgaggggcgtgcagttgttccaggggtgaagcctcaggactggatctcggcggcccgagtgctggtagacggagaagagcacgtcggtttccttaagacagatgggagttttgtggttcatgatataccttctggatcttatgtagtggaagttgtatctccagcttacagatttgatcccgttcgagtggatatcacttcgaaaggaaaaatgagagcaagatatgtgaattacatcaaaacatcagaggttgtcagactgccctatcctctccaaatgaaatcttcaggtccaccttcttactttattaaaagggaatcgtggggctggacagactttctaatgaacccaatggttatgatgatggttcttcctttattgatatttgtgcttctgcctaaagtggtcaacacaagtgatcctgacatgagacgggaaatggagcagtcaatgaatatgctgaattccaaccatgagttgcctgatgtttctgagttcatgacaagactcttctcttcaaaatcatctggcaaatctagcagcggcagcagtaaaacaggcaaaagtggggctggcaaaaggaggtagtcaggccgtccagagctggcatttgcacaaacacggcaacactgggtggcatccaagtcttggaaaaccgtgtgaagcaactactataaacttgagtcatcccgacgttgatctcttacaactgtgtatgttaactttttagcacatgttttgtacttggt

SEQ ID NO: 49337 - DNA, 581 bp, Homo Sapiens
taatgatggcttctgagtcaactttactggctcaggaaccacgagagatgactgcagatgtaatcgagcttaaagggaaattcctcatcaacttagaaggtggtgatattcgtgaagagtcttcctataaagtaattgtcatgccgactacgaaagaaaaatgcccccgttgttggaagtatacagcggagtcttcagatacactgtgtcctcgatgtgcagaagttgtcagtggaaaatagtattaacagctcactcgagcaagaaccctcctgacagtactggctagaagtttggatggattatttacaatataggaaagaaagccaagatttaggtaatgagtggatgagtaaatggtggaggatgggagtcaaaatcagaattatagaagaagtatttcctgtaactatagaaagaattatgtatatatacatgcagaaatatatatgtgtgtgtgtatctgtggatggatatatgtatatctcttcctatatatatccatagtggacttattcagaacatagatatgtattcagcttgtcttcaaatacggccaagcagaaaatgttttatatttt

SEQ ID NO: 49338 - DNA, 387 bp, Homo Sapiens
agccctccacccccacagttcagtctccccctcccatccctgccggccctcgcttctcccctcccccgtcggagtcagtccctctcttcaaccgcccccaccccctagtactggtctcagcttctccagcgggcctcagccccgtccacccccaaccccgacgcccctttctccgcgccagttctggcccttctcccatatttataagtgtccggccgggacgggcggtgggcgcggcgtccccggcgcgtatcgtaggcagtgtaccgtggccgtgccgtcagagtgtgcgtgtgcgtgtgtgccgtgtcgaggctgtgtagagtgcattgtacagcatattttcatgaataaaattgttttaaatatttaaaaaaaaaaaaaaaa

SEQ ID NO: 49339 - DNA, 652 bp, Homo Sapiens
  misc_feature (646)..(646): n is a, c, g, or t
  misc_feature (648)..(648): n is a, c, g, or t
tgtgtctgatgagaagcgtccgtcctcgagccaggcgggaggagggagtggagagactgactggccgtgatgggaatgacagtgagaaggtccgcctgtgcgcgtggaacactgtggacgctcgacttccaagggtcttctcacccgtaatgctgcattacatgtaggactgtgtttactaaagtgtgtaaatgtttatataaataccaaattgcagcatccccaaaatgaataaagcctttttacttgtgggtgcaatcgattttttttttctttctcctttctttcaagtgtcgtgagtcgtcttgattgtatattggaaataactgtgtaacaaatcgtattataaatatttcaataattttactctgaatttgtttattaaaagacttttgaacatgaaatgattagtattacctgaatgcatccagaggatatttaaaccaaaatgaaaaaccagaaggccatttggtgtccccttttccaggtgttcccttggagcatatgcattatgtcatctgaattgaggcctttctgtgaacagcatcataacttctatcatggaaagtgtactatatataatggttgtgtcatgtatatgcctaaatttaattatctataaataaacatctggacgtaaaataanangtct

SEQ ID NO: 49340 - DNA, 657 bp, Homo Sapiens
ggggtttcccctgtgccctgacagccgctcctggtatcagagctgctttccagagggcagcacagccagggccgggtgtctttagggatcagtttttccaagactccagaaggtgccaggttctccccttgagctcctgctcccccatcccccatcctcccagacctgggcaggagctgtgctgggagaaagggtggcagccgggagcctcagagctgagccccggcctggctgcccctcccctccggccctctccactgctttccagacactaaccaaggcttccaggccagggattgcccaacactcctagggcagccctcccagcgccccatggggtcgcccatgggtagagacggctttcttgtgcccctccctggggcatggagggtggagtgggcctcgggtccccctgaactccctgtatatctgtataaataacgggattttcatggcgccgccccacccgcattatcactgtgtgatggtctcagtcagtctcctccctgtctccactctttccctctatttatttcactctcttgtttggttctaccctgcaccctcggtccccttccaggttcctgtttataagccccaacccctctgtccccatcttgtatgtgaaaacttgtctcaataaaccctttggagtaa

SEQ ID NO: 49341 - DNA, 785 bp, Homo Sapiens
attgactacattcagtttttgcacaaggagaagaaaaagcaggaggaggaggtgtccacgttacgcaaggatgtcaccgccctaaagatcatgaaagtgaactatgagcagattgtgaaggcacaccaggacaacccccatgaaggggaggaccaggtctctgaccaggtcaagttcaacgtgtttcaaggcatcatggattccctgttccagtccttcaatgcctccatctcagtggccagcttccaggagctgtcagcatgtgtcttcagctggatcgaggagcactgtaagcctcagaccctgcgggagattgtgattggcgtcctgcaccaattgaaaaaccagctttactgaccggttcttggaaacctggagaacagccaacaagaggcccttgaatctctacgtggccactgaactgctgggcccgggagactggactacaacacctcacactggtcagctggtttctacttggtgtttggtttttcccagccccattttatcttcagcggagccgcggtgtttgttttgtgaaagcttctgattaatttattatattgacgataaaactcaaacctacccagccttccccccactccatggaagtccttgggatgggcgtctgctctggacaccccaaagagctcctgccctctcagccctttattcaagcctcagatttctgctcatgatctacatagatttggaaactgttttcctctgttttggtctcttgggcaacatttttggcccaagtttgggcaacatttggcccaagt

SEQ ID NO: 49342 - DNA, 663 bp, Homo Sapiens
cccacgcgtccgctcacagtgtccttgggctctgcccgctgccctcccctcaggcccagggaggggagcaaggagaaggcaggtgcgcgcagcaagcgggccctggaggaagaggagggtggcacggaggtcctgtccaagaacaagcaaaagaagcagctgaggaacccccacaagaccttcgacccctctctgaagccaaaatatgcaaagtgtgaccagtgtggaaacccaaagggcaacagatgtgtgttcagcctgtgccgcggctgctgcaagaagcgagcctccaaagagactgcagactgcccaggtcacggattgctttttaaaaccaaattggagaagtctctggcctggaaagaggcccagcctgagctgcaggagcctcagccagcagcacctggaacaccaggtggcttctccgaagtcatgggcagtgccctggcctgaaggcccacaacccccacccccaggactgctgctggagcctggacacgtcctacttaagaaaatgccttttactcagggaatctcctgctacttaatgtggaaagacacgcccatgtcccccttcggcccactctgggggcctggaaatgctgcagtggggagcaggccccaggctggacctgccctgtcctcagcacgcgtgtgcaaaag

SEQ ID NO: 49343 - DNA, 960 bp, Homo Sapiens
  misc_feature (928)..(930): n is a, c, g, or t
tcaacagccagacagggctccagggcttgtcccagtcaatacagagttccctctgctgtctggccgtctgccagggagccagaaggaagggccttgcagccacagagacactccactgccctggggcacacagtggacactgctcttcctacttcctcctctcctggatgctcatcagctccttctgcctcccccccttttttttccatcttttgttcccctaaattaatgctgcttggattttcatcttatttataaagataaaatcacctggaagtgtcaaggagtggggcggggtggcgggggagaagcagccgtgctgccaggtcacccagacctccagacagccggctagccccactgcccgttccttttacgcccaagttttgctccttgagagcagattggctgatgcccctgcaaccccagcccaagctctgcctcaaagaccgagtgacataagccattcccaccctcctaggttcacatccagggctgtgtcttccttgggggaggagatggtgtcgtttagatcagggtaaggcagtcaggcgggtgttcaccactgccttttcttcctctgagcgtgagaacactgaacccagccactgcccctgggtccctgtcctggaaatggtctaataaatccttttcccctcttgagctacccaagggatctcctccttccttgactcttaaccgaaactctgaagggcccacccttgcttccaataaaagaccccccggggttccgccccccctcccctttctaaagccgacccgggaaacgcaaccctgcccgttccttagacatggttctcccacccagagatgccaagggcctccccccccttcaaaggcgtcgaaaaagttgggttcggcgaatccctgttcgcatcacacaaccgctcttccggcccatgaacgnnnccgaacacaaccacccaacgttaccgagca

SEQ ID NO: 49344 - DNA, 646 bp, Homo Sapiens
attccaggaggagtgggatctcggccctgtccagagcgagttaatgtgtccatctgcccaaccctgtcctgagaaaggacctggttttggccaggacctgacaaatacccaatggcagcagtgtcaacagacgggagtccagccagggtgggtgcccttgtcattgaggttagggacagctatccccaggttatgcctggccccacccagcagggagttggggtccccccacaggctgtgagctctgtgggccctgggatgtgatctagctcagatgccctctcatccttgatgtcatagttgagtgcacccaagtggcacccactggcggccaggggcacagcctggtggtggtggcaatagaactgtgcccctcctcagctcctcgcttcccctcccacagccccagccttactccaccatgcggacaatcattttgtacggatcacgggagcaatgctgtacggttttgtacactggtggtttgtttcctagaaaacccattgtgtctctggatttctagcacattactaaaagagcctctgctttgtaaaaaaaaaaaactcgagggggggcccggtacccaattcgccctatagtgagtcgtattacaattcactggccgtcgttttaccgtcgtgctggg

SEQ ID NO: 49345 - DNA, 636 bp, Homo Sapiens
gtccctgcgtctggcacccaggaggtgaggcagacaccatggttaggtgatagggtctgaacccagttggggagacagaggggttcagacttgggaagaatctgtcagtgtgcatggagtgaggtgtgtgtgtgtggatggatgtgcacgtgtgcatgctttttttctttttgccgtgaggacagttgaatttggggcatttttctacaagaagcagtcagccttctctcccccataaggactggctgtaaccttaagcccatcaaagttacttccagcctggagagaacctcaccaaacagctggtgtggcctgagggtggccatggtgggaaatgggcatgagaataaatacctccccaaattcaatctgagcccagcaggagaggatggtagggttgccagggctcagaagtgcaagctgattactcaccccaccctgcctcgccgcacctttcctttgtttccttgggtgaatgcaggagcagcagtggctgcccttcccacctggacagtggtgtgtgtagaaagccagctggatgtttgtggtggggcctcatggtgcctaggaggagataaagatgaggaggtttttccttattgtataaatgaatattttgtatgattaaattaacac

SEQ ID NO: 49346 - DNA, 695 bp, Homo Sapiens
caccactgcactccagcctgggcaacagagcaagactctgtctccaaaaaaataaataaataaataataaaaaataaaaagctgacatttgatttttatttctaattggttattttgaacatctaatctttaatacttttactattttatttatgttgagttatgtatccattgttctattgtgggaacagttctattggttttgctttattttttctcgactttatattcattcctcatatcagtgataaaacatgttgaacgtaaagattcttacatattgtataggataactatgatattttcatttatgagaacgtatcctaattaggaaagtcataatgtaggtgaatgtattttaagctgccccataaaacacatcaaattggtgtataagcattgtgatttggggctaatcccattttagataatactttgtttacctaatcaagtactacacagttacacacatagttacatgtgtgtgttcatgtgtttgtgaattttcattttaatatacttgcctgtatttctggtcattcatttgcaaagcattgattgcataattatttattgtatgccacatagtcaagtcctagggacacaaatatgaagacagaagtcttcacttgtgaataactcacagtctggttggtgaacatgtaactacttaataaaatattatgtaataaaaa

SEQ ID NO: 49347 - DNA, 792 bp, Homo Sapiens
ttacattgcatatggaaataaaagaatcaaacgtctaatgccttattatttctgatttcctttttcattttaagtggtgtggagattccagcactcccaggacagtggagtcagcagtaagccctgggacaggtggcaagggtgggtcccttgacctttgcacgcctcctcaggaaccccctttcccgggtgagcccctctctgaagagactgtccttgggcctcctctggaagcagcacccccagaggacagggctcctcctgcttgcctcagggctgcctgacttgaatggcgttggacctcggggattactggtagataatatgctctggtctcgcctggtggtgagttttgccagccatggccagggtttggctccactggtggcacacgtggcctccgtggtatggacctggtggcttctccatcccactgtggcctctgtggtatggacctggtggcttctccatcctacccaaggtaacagtgtcttgcttcatcccactgactgctgggagagagcctctgggacttttctttggggcatcattttgttttgtctttcgtagcagggaaaggatatgacaatggggaggacagttcttttggaggttggaggggccaagccaaggacaggagcaagtgtgccctcattttgtttctacttttaatttctgtgtggttggccatactgaattatgagactaacagatgtctacaatacaatacctgtatttcaaataacaaaaataaagcctgattctttgtttctagaaaaaaaaaaaaaaaag

SEQ ID NO: 49348 - DNA, 799 bp, Homo Sapiens
  misc_feature (768)..(777): n is a, c, g, or t
  misc_feature (779)..(793): n is a, c, g, or t
gggggggacgacaaggagggcatgatcaacctcgtcatgtcctacgcgctgcttccagctgccatggtgatgccaccccagcccgtggtcctgatgccaacagtgtaccagcagggcgttggctatgtgcccatcacagggatgcccgctgtctgtagccccggcatggtgcccgtggccctgcccccggccgccgtgaacgcccagccccgctgtagcgaggaggacctgaaagccatccaggacatgttccccaacatggaccaggaggtgatccgctccgtgctggaagcccagcgagggaacaaggatgccgccatcaactccctgctgcagatgggggaggagccatagagcctctgcctcgatgccgttttgcccccgctctttggacacgccgacccggcgctccccaaggaatgctgtcccaacaagattcccgtgaaagagcacccgtgtcgccccctcccgtggacttctgtgccgccccgtccacacctgttcttgggtgcatgtgggttttcggttcctggcggtccaggacggggcgggggctcccctcccatctcgtgctgggaggtctcagcgcgctctcctgtccctgggacgtgcgtctctccttctcatgccgttctggaaaatgctcttgctgtagagagcagctgcttctgccagggtgttggaagtggtggagcgccttccgattccatcatggcattttgtgatgtgatgtaaatggaatagagctgttgattttaggcccacttnnnnnnnnnncnnnnnnnnnnnnnnncctgtt

SEQ ID NO: 49349 - DNA, 927 bp, Homo Sapiens
gcgtggcgaattcggcacgagggagatgtgtctctgttcaggccaagatacagccagccaggcctgtcgtctgggacccaggaggcctctgatgaccaagggctttcacatcctaagtcatttggaaggaggccttgagaacaaagtcacctttgtcactcccagtgaactgaatgaggaacatgctgtctcctgtcttggcctcccctttcatgagatactggggagaagagaacattcctcctggcttagttgtagcagacccagacctgtgcccagctttggtcccccttcccaacttctgaagcacgtgctgcagagccaccttggtctgagcacctgaggaccagcccctcctccctcagtgcgggtcatctcttgggggattttcttaaagtgaagaaagggggtggggaaccatattgcccctccctcccccatcaaacttccttcatttaacttgctataaaatgagtcatataaagaaactctatatgggtgaggtatatcccacttctgtgaaaacattacaaatcaaaccgcttctctcagtttatttaagatgcttttgttgcgagcggagctctagagtgaagcctcctgtgtgtgtgtgagataataacaccttgtaactcattacagctgggcactatttacataaaccagagctgagccaggcaggaatttgctgattaatttatttttaatggagtgaagtataccatgccccaaataaactttactgtgggtacctaactgctcctggaatggatggaaaaattaatgcaccagattttggctcccaactctacacattaattcaaataataaagttattttgagcctttaacccattttgcttgccacaggtaacctcccccacccacagaatcccagcttcctggcaaccagttcaggctaccggta

SEQ ID NO: 49350 - DNA, 416 bp, Homo Sapiens
ctggcctcaagtgatcctccagtttccatctccctaagagctgggattacaggtgtgagccgctgtacccgaactttttttgtttttgcttctggaactttgaaacacaaaacacaagttggcacttacaattttaaagatgcagccagctctaaacaacacacagagcacaaatatgctcctgacggactcaggaaaatgccaacagcagagcaccctggtgccaaggccttctcagcccatgccctggagggcattcccctggccagcctcagccccttgtctacttgttctccagcttctgggtagctgggcttctggaagggtggcagtgggctactccctgctcagcgctcccctgggaagggggtgaggagatgaaaatgaaactatgagctgtcaaaaaaaaaaaaaaa

SEQ ID NO: 49351 - DNA, 1053 bp, Homo Sapiens
ataagaagcagcctgttatagtgcccatgtatgcagcaggattgggtatgttagagcccaccaaggaaccactgaaaccactttctgctgcagaaaaaatagcttccatcggtcagacagccaccatgtcaccagatatgaacacatgtacatctgatcagttccaggagtctctaccacccgtccagtttgactggagtagcagtggccttactaaccctttagatggtgtggatccggagttgtatgagttaacaacttctaagctggaaatctccacctcaagcctcaaagtgactgatgcatttgcaagactcatgtctacagtagagaagacaagcacatctaccagtaggaaaccgaaaagagaagagcacctaagtgaagaagctatcaaggtgatcgctggccttcctgacttaacattcatgcatgccaaggtgttgatgttcccagccacgttaacaccttccacaagctctcaagaaaaagcagacggataactgatgtgaattggacagtttctattgcttttccttttttccatcccttccctaccatcaaaagcatacctgctctaattaaaaaaaaaaaaaaaaaaattcaagttcagctgatttgttggtaagccgcactagaaaggtatacatagtaatgtatatttatttacatactgaagtcctaaatttatattagaaaaatgtaaataatcgggggtaaacatttttgaagatttattctttttgtgttgctggggtgtatacatttatgtcctttgtgaatacacctggtggtgtccctcctacaaaacttttgaaataaaaaaaaaaatccaatcttcactgtcctggggaaatccccttcagtccttttcaaattggcattgactggccctctttgaattttccatattacattggcaaattaaccttttggcctaacctaaaaaaaggctcccaaaggtccccccatattaaattttttttttaaaattttgggggaaaggaaggggggtttcccaaatacctggcctttttttggtaaacacttctt

SEQ ID NO: 49352 - DNA, 448 bp, Homo Sapiens
cagaaaaaagtgccatagaagaccaataactgtttagttgaggctagtctggaacctttcattagagcaatatttggttattgcacttcatttttatttactaagaaatgcaatttgggaatttttaatctgttatgctttgtttatcaaccttgattttaattaagacttttataagactagcttaaaacaccaaccaacattatttttgcaaaagtgagttggactcactttccattcttgctagtcagagtaagtaggcagcacttttaaaaatatgtgaactcaaatattgcacttctttcaagatgttatcaattggttattgtactgtatagttttaataattttgattgaaaccctttaacaactctttgtaaattttaactcattttagttgattttcagtactatttacataggaattgatttttatggatatagtaga

SEQ ID NO: 49353 - DNA, 598 bp, Homo Sapiens
  misc_feature (570)..(570): n is a, c, g, or t
agagagagagacactgccctccagcctgggcaacagagcaagactgtgtctcacaaaaaaaaacaaaaacaaaaacaaaaaaaactgtaggagcacccctccacctgcctccagccagaattgcacagccaactacttccagaatcgctggtccaaagaaatcacgacaggcgctaagtttggggcaatccatttaatgctactaagttgtgggatggttagattgagcagccccagataacaaacattccttgaggtcacacgctaaccaagctgtgattcgaacactgcctctcaaattcacgagcaaaagagggggaattctgtttaaaatgccaaaaagaactctttcttgcttttattatttttaatttatgtataataattgtatgattatataataattgtaataatttacgggatacaggtgatatttcaatatatgtatacaatgtgtaatgatcacatcagggtgattagcggattcatttcctcagttatcatttctttgagatgggaacattcaaaatctgctcttctacctatttgaatatagaaaataaattgttntgttttgtaaaaaaaaaaaataaaaaaa

SEQ ID NO: 49354 - DNA, 769 bp, Homo Sapiens
cgcgtccgcctctgccctttctctgtccttatgctgtcccggcctcgccagccctctggggcattgtgggagatgcctgccaggaatgagcaagctctgttgctcgggagcctcttgtcaccttcttggacttattccccacctgataccttatagagaaaagtgtgaattcaggtggagagtaggcccaggccccatgaggcaccagtggaagcacagctccaagttcagacaggtgcccttagagaggaaaaccatgacaggcaaatgcatttcctctggagtttgagaccctgacaaacaacaggtggcatctggtgtgctgttcttgagttttcgtttaggattagttgagttccagctgggttttgggagaaaggagatgctaccaagtcttggatgttagggcgagaccctgcaagttgagtattagagagcttgtctttcaaggcaggttcctggggcttcagggctaggagggaggagcctgcccttttaacagaaccccagtcacatgcggctcaagtcactcagaggctgttgcatttcagggctatgttggtcctttgtttacctcctaaaccacagctgtttgtgtttcacatatgttgtgaattttccttggttctttttaaaggaatgataataaagttacttgctttaggatttgcttgtttttcttccacttcagaagcttctgagagggaatgggatgatcctaccagttgccttttcagacctgaggctctaactcaagagattcctcctc

SEQ ID NO: 49355 - DNA, 616 bp, Homo Sapiens
  misc_feature (595)..(599): n is a, c, g, or t
attttatgtgtataaaagcaacaatatcagcaacttcgtgtttatactgcaccttggttgttgatgtcaagtaaaaaaaagattgttttgtaacacataaaaaaatggaagaaactgataccacacctaaggaccaaagataagaaagactttttgcccaagacagtgaaagtaattataaaaacaagctttgaccacttaccaagtatctgaagagatgagttcatactatgatttagaaagtggttcaattcccctgttggcatatgattatttttactaaaattaatacagctctgtgggtcttccttagtgttttctttgaagccaatctgttttttttaggacaccagcctttggtttttcatctgttcgagatgcctcttctctgtctccttatcagatagaaatggagtcatgtgctgctgcttcatctagcagaggttggcctctggctctgacactttttgtcagttgtctttaggtggtcctgaatcttgggcccttttgattgtgaatactgtgtagcaggatcttgagagtccttgttcttacataggcattgctctagtttgtctttggcaaaaaaaaaaannnnnaaaaaaaaggccacatg

SEQ ID NO: 49356 - DNA, 586 bp, Homo Sapiens
gaagaagcagcaaaagtttttctttagatgagccaccattgttcattccagataacatagctaccataagaagagaaggctctgatcatagctcctcatttgaaagcaaatatatgtggactcccagcaagcagtgtgggttttgcaaaaaaccacatggcaacaggtttatggttggctgtgggagatgtgatgactggtttcatggtgattgtgttgggttaagtctttctcaagcacagcagatgggcgaggaagacaaagaatatgtctgtgtaaaatgttgtgctgaagaagacaaaaagactgaaatactagatccagatactttggaaaaccaagctacagttgaattccatagtggagataaaacaatggagtgtgaaaagcttggattatcaaaacacacaacaaatgatagaaccaaatatatagatgatacagtgaagcacaaggtcaaaattttaaaacgggagtctggtgaaggcagaaattcatcagactgtagagataatgaaattaaaaaatggcagctagctcctcttcgtaagatgggacaaccagttttacctcggagatcctcaga

SEQ ID NO: 49357 - DNA, 925 bp, Homo Sapiens
  misc_feature (760)..(760): n is a, c, g, or t
aaagcggtcggtcggattccgggatgagattttatagtgattcacaccatttgaaaagagagcgacatgaaaaggaatgggagcaagaatctgaaaggcatagacgcagagacagaagccaagacaaggacagagacagaaaaagcagggaggaagggcacaaagataaagagagggcacggttatcacatggtgatcgaggaacagatggaaaagcaagcagagatagtaggaatgtagacaagaagccagataaacctaaaagtgaagactatgagaaggacaaagaacgagagaaaagtaaacacagagaaggagaaaaggacagggataggtaccacaaagatagggaccacactgacagaactaaaagcaaaaggtaaaatttgcaggctgcttcaggattacatttaaataactgttaaaatgttgtatcttgtaaacaaaagaaagattgcctgctaggattgtgccatctttaaaatttttactattggtcatttgcagaacagtaaattctgtgtgttggtacagagtgctctgtaccagtgctcatcatcccttcttcataccaacggtccctagttataggaatttaatatttttaaaagttttacattgctgtatattcaaagatttgttttattaatatgcaataaaggcttagaaattttagttttattccttaattggtaaatatggttaactatggaatatatttacttcctctagtgaatgtcctttatataatgactaattngggagtatgtgtgctctgtaagttgttttaattgcactgtttttaagaactgtagaggagcacaaatccagcacttctatcgatatctatcatagtgacatttgacagacgagccaggtcatatgctatcgctctgagcttacatacactggagctatctcatgc

SEQ ID NO: 49358 - DNA, 547 bp, Homo Sapiens
acaatgcatttgtgtactattgaataaaaagcaggctgcaacagtatttatgacatatgatcctatatacacgtaaaatcttgtgtgtgtgtttgtgtgtgcacatgcatataagaaaaaactacattgttaaagttgttaatagttaactcccggtggtgggttttaagtgattattattttctttgtataagaaaaatagtgcacagttttcttttgttgttacgaaaggtgtcatacatttgaaagaggacatatgcacagtttaaataataataacatagtgaatacccactgcttggctgaaaaataataatttattactctgttgcacgaaggcaagccttccttctggccctgcctctgtcatggaggtagctacttgtttgaatttggtgctaatcatgtcttgtgctttcttatatagtttagccagctgtgaatgtctccataaaacatacacagttttatttggatggtttttgaactttaaataaatgaaatcataccaaaaaaaaaaaaaaaaaaaaaaaaacttgggggggca

SEQ ID NO: 49359 - DNA, 556 bp, Homo Sapiens
gggaaattgacgaacacgtgacgcggtcgggcggaccactgcagactgagcggtggaccgaattgggaccgctggcttataagcgatcatgtttctccagtattacctcaacgagcagggagatcgagtctatacgctgaagaaatttgacccgatgggacaacagacctgctcagcccatcctgctcggttctccccagatgacaaatactctcgacaccgaatcaccatcaagaaacgcttcaaggtgctcatgacccagcaaccgcgccctgtcctctgagggtcccttaaactgatgtcttttctgccacctgttacccctcggagactccgtaaccaaactcttcggactgtgagccctgatgcctttttgccagccatactctttggcatccagtctctcgtggcgattgattatgcttgtgtgaggcaatcatggtggcatcacccataaagggaacacatttgacttttttttctcatattttaaattactacaagattattaaagataaaacgaaacccccccatccacacacaaacaaaaacatgt

SEQ ID NO: 49360 - DNA, 580 bp, Homo Sapiens
  misc_feature (457)..(457): n is a, c, g, or t
tttttttttttttttacgctcccactagcagtatatatgagtctttctttcacttcttgccaactcttgccaatctaatgaatgggaagtggtaactcattattatttcaatttgtattccctgagaccttaacacttgtgtattgcacattctggttcctctttggcaaattgccttggcattaagatagtaaattttccttgccacctacgctggttgagtcaggatgcttaattacttggaggtaaaaagcacctggctgaaatagccatccctgaggctgcctgttgaggataggagatgcttcatccatctttagatcctttcttggaaacgctgagcctggccagccatgcaggcttttccaagctctgatgctgccctgtgtccacaatagcatccccacagcctggatccatcattcccagcattatgatagctcctttgtctccttgngaagagcccaaaacccacagctgaggcctcagggcttttctaatgtgcttagaacaggggtaaggtaatgccaaccaaaatggggaaacctgtattcctgctcagtcactgcttagtcagcat

SEQ ID NO: 49361 - DNA, 503 bp, Homo Sapiens
  misc_feature (430)..(430): n is a, c, g, or t
  misc_feature (463)..(463): n is a, c, g, or t
  misc_feature (471)..(471): n is a, c, g, or t
  misc_feature (478)..(478): n is a, c, g, or t
  misc_feature (483)..(483): n is a, c, g, or t
agagaatattacttttaatctcaaaactgtttctttgaattctgcctgcctatccgattggttttactgaagttttccttgaggggctgtctgtcatcttttagggccctctgcaagtttttttcaaaaataacaactgcttagttgtgtgcagtgtaggactctttataggtttttgactactcttcttttcttgtagaatttcactgtcttttaaatgtttacagactgcaagcaggataaaattaaaaattcaaaccattattaatattgctgcttttgtaggagctggtaaaggagtagaagggtaaaagatcctattaattataagtggtcctaatacaccccttgaggaaaatcctgttaactcccaaattattaaggacccaaagaaatctggagatcctaatttaatttggcccaatttcanggcctacccaaaaaaaaaaaaaaaaaccccgangggggggnccggtanccaantcggcccataggggggtcgg

SEQ ID NO: 49362 - DNA, 723 bp, Homo Sapiens
agatgacagtgtaagacagtgaaaaagaggggccagttggttatatctgataacatgatcttacaaactctctccatttaaaccccaatatgtctgcatttctccagccctcgtttcccagaggctcactttgctcatggaggcctttgttgccaccagctccatcctactttatatttcctcatagcagcacgtgccctgtgctagatttgcttttggtctgtgctcactggaatgtgagctgcatgaaaaccttttgtgcgctgctgaagctctagtgcttgcaaatgtcgggtacatagtagccacttagtaagtattaagtggattgaggaccatgatcattcattgacagttattaggtttgccttcagctctcagtcccgtgggggtacatggacacataaataggtcatccaagtttagtgagaattggtgggaaggcaagaaatggaaataaggaaggatgggcacttggtcaatatttacatagactttacccaaatattgggctttttgtaaacatagaatctgttgcttcttaaagcctaagcccgttggaaattggggtaatgtgagcaatttctttctttccatcaaagaggtggtatggcatgcaagaaaaagcaagattcaaaactttaatagcatttgtcttgatgtcttgctttagaggactctaagacaattaaaaaatacaataagagtaaaaaaaaaaaaaaa

SEQ ID NO: 49363 - DNA, 517 bp, Homo Sapiens
aggacaacctatgtgttatgctgagatagactcagtaatcatttgtttgcaaattgattatttttttctcatccatccagaaagtacagtgcataacaacaacacttaacaagtgcagaggaacctgtcctgtagtatataataaaaaatgattgtcaccttgctgatctttccatttaaacatgcatgatctccagtactttgtacaatgtatagtatattaaatacatttatgtgtaattttgtgtgtatttttatatggtataattaaaattattacatttatgtgattgtaattcacaaaaaggtactacttactatattctgtagagtgtgttgtgaatgtttttacctgtgtttgagcattatggtgtaggtttaatagatgaatatttgccttcagtctctgctcaggtattaatgtgtagtaatttttggtgctttctttttaatctgtgataatctggtgttctgaatgttcaaaaataaatttggtgaatacccaaaaaaaaaaaaa

SEQ ID NO: 49364 - DNA, 679 bp, Homo Sapiens
  misc_feature (657)..(657): n is a, c, g, or t
taaaattatactaaaaatgcatttgtcaggacttgaaagacagtgagagtgattcaagctcagaggaagagcggagagtcactacccgagttattcgccggcgtttgattataaaggtatcctgtagctggatcattatgtggcattgctctactattagaaactccttccttgtggttgtagaaactccttccttgtggttgtgaaatttcagcatgcttgataatgaaatggctttgtgtaatttttttgcacccttgaaagcttgtaaaaacaacaaccaaaaagaaaagaagccatgttgcatggtattctgtataggcctatttgatatgtggcggttgtagttttatttgagaattcttggcatttgtatcctgctttccttgaagaagtgttatgtgaatgagcaaagattctgtcttggtgacacagtagttcatatcaaatgaaatgtttaattgaaaccttagaaactgtaacaaggtatgaggcacgataaagaagaaagagaatgaaagaattaaaaggcttccttctcagtctcaaattcctactgccttaagaatttttaaattaaaaccagttcttcataagcaatcagtggctgagaatttgaggttataacctggcatggatatatgtgacacaatgcangtcaagtaaaaaaaaaaaaaaa

SEQ ID NO: 49365 - DNA, 927 bp, Homo Sapiens
gcgatatgagtctcatccagtctgtgctgatctgcaggccaaaattcttcagtgttaccgtgagaacacccaccagaccctcaaatgctccgctctggccacccagtatatgcactgtgtcaatcatgccaaacagagcatgcttgagaagggaggataaaaactttcagaatgagcaaaacaccatcaacgttaattccagagatggaacattttttttcctagtgagaaaacaacccatttgaagagaagaccactaatgagaagaccactaaagagagacatcaagaatggattcagcagaatcatttcacgttttgaacagcagcagtttgaagggccaaagccttgatcagggatcagtcattaaaggacactcttgagtattagtaaaccctcttatgatgattaahagagaagggcagccctctccaccttttggtactttctattcaacttgcactgaccataaaatgtttctcttctgaacaagccccatcatttggtgaacctccaccctaacaaagtaggatggggttgggggctaaattaattggagtggggcgaggagagagccagaaaacatagatccgagggcagcagtgctgggtggagagagccagaaaacagatctggaggcagcagtgctggatggaattgtctaggctgtggcatgttggttttgtctttcttttctcctttgattatgtaagagctatttcattataacttattatggtgattatacaggcaagaagacaaaaaggagagaaaatgtacctcttctactggaataatgtttatgattacaagtgagataaggtatttttatcaatatgaaggcaaccttggctgataaaacctctatagtgaatactcacatctttacttcactcactatcaataataaatatattttctgacaaa

SEQ ID NO: 49366 - DNA, 580 bp, Homo Sapiens
gttaaaaaaattaaaaactgattcttctgcagagcactggtgtttctttttataaccccttgaaacaagtctctcacctgagcctgtctaaactttcggagggagtttattattgagtctttatctgtgacagtatttggagatttagggatttgatacttaggcctttgaattttagaatacaaaaagagaagcaagccagacatggtggctcacacctgtaatcccaatactgggaagccaaggtgggagtatcgcttgagcccaggagtttgagaccgacatgggcaacatgacaagaccccatctctacaaaaaaaattaaaaaattagccaggcatggtggcacatgcctactcccagctcccaaggagactgagatgggaggatccctggagccctgaagattgaggctacagtgagccttgattgtgtcactgcactccagcttgggtgacagagaccctgtctcgagaaattaaaaaaaaaaaaaaaaaaaacttattttcttactaaaagcagtctgattacttagttgcatgcccttcttagtatcatacattatccaaaagttaccctt

SEQ ID NO: 49367 - DNA, 541 bp, Homo Sapiens
cccagatgcaaatataattaattgactttatttatctaggaaatgttactcatatcttaattgtagtcattggcttgagtgacgggttttggtaattcaactactattacttgaaagtagtagatttcataggatactgttataaaatctttttaacctcttttctgatttcaggagtaattagtaattgtggtttactggaaaattcaatgaatagggtgttaaaggaagcaattcattaataatatatgtaatctattgggagactgaggcgggtggatcacctgagttcaggagttcgagaccagcctggccaacatggcaaaactccgtctctactgaaaatagaaaaattcgccgggcatggtggtgcattcctgtattcccaggtactcggaaggctgaggcaggagaatcacctgaactccagaggtggaggttgcagcgagtcaggatcgcagcactacactccagcctgggtgacagtgagactccatctcaaaaaaaaaaaaaaaaaaaaaaaaaaaaaaaaaaaaaaaaa

SEQ ID NO: 49368 - DNA, 705 bp, Homo Sapiens
  misc_feature (574)..(574): n is a, c, g, or t
  misc_feature (669)..(670): n is a, c, g, or t
  misc_feature (672)..(672): n is a, c, g, or t
  misc_feature (674)..(675): n is a, c, g, or t
  misc_feature (677)..(696): n is a, c, g, or t
ggtattttgttgaagaaactgtggaagtcattaggaacaatggtgcaaggttgcagtgtaggattttggaagtcctccctccatcacatcaaaatggttttgctaatggacatgttaacagtgtggatggagaaactattatcatcagtgatagtgatgattcagaaacacaaagctgttcttttcaaaatgggaagaaaaaagatgcaattgatcccttactattcaagtataaagtgcaacccactaaaaaagaattacatgagtctgctattgttaaagcaacacaaatcagccggagaaaacacctattttctcgtgataaactaaagctttttctgaagcaacactgtgaaccacaagatggagtcattaaaataaaggcatcatctctttcaacgtataaaatagcagaacaagatttttcttatttcttccctgatgatccacccacatttatcttcagtcctgctaacagacgaagagggagacctcccaaacgaatacatattagtcaagaggacaatgttgctaataaacagactcttgcaagttataggagcaaagctactanagaaagagataaacttttgaaacaagaagaaatgaagtcactggcttttgaaaaggctaaattaaaaagagaaaaagcagatgccctagaagcgnngnanncnnnnnnnnnnnnnnnnnnnnaaaacatgt

SEQ ID NO: 49369 - DNA, 550 bp, Homo Sapiens
gttttggatgatagcattggctgtgcagtctggtttgcttctagaggaattggttggttagtggcccaggaaggagtgaaatcctatcagagcaatgcaaaggtagttctcactggaattggtgcagatgagcaacttgcaggttattctcgtcatcgtgtccgctttcagtcgcatgggctggaaggattgaataaggaaataatgatggaactgggtcgaatttcttctagaaatcttggtcgtgatgacagagttattggtgatcatggaaaagaagcaagatttcctttcctggatgaaaatgttgtctcctttctaaattctctgccgatttgggaaaaagcaaacttgactttaccccgaggaattggtgaaaaattacttttacgccttgcagctgtggaacttggtcttacagcctctgctcttctgcccaaacgggccatgcagtttggatcaagaattgcaaaaatggaaaaaattaatgaaaaggcatctgataaatgtggacggctccaaatcatgtccttagaaaatctttctattg

SEQ ID NO: 49370 - DNA, 734 bp, Homo Sapiens
caagtccgtacaaatacgcacccacacccacagccgcattcgcagccgcacgggcaccggcttctccgcagcacctccaactctgcctgaaaggggcagctcccgggcaagacaaggtttgaggacttgaggaagtgggacgagcacatttctattgtcttcacttggatcaaaagcaaaacagtctctccgccccgcaccagatcaagtagtttggacatcaccctactgaaaacttgcgattcttcttagttttctgcatacttttcatcacgatgcaggaaacgatttcgagtcaagaagacttttatttatgaacctttgaaaggatcgtcttgtatggtgaattttctaggagcgatgatgtactgtaattttattttaatgtattttgatttatgattatttattagttttttttaaatgcttgttctaagacatttctgaatgtagaccattttccaaaaaggaaactttattttcaaaaacctaatccgtagtaattcctaatcttggagaataaaaaagggcggtggaggggaaaacattaagaatttattcattatttctcgagtactttcagaaagtctgacactttcatggttgtgccagctggttgaaattaaaactctgatattactttttggaggatttttattttggttttgcttaacatatagttgtctagagttaaaagctaaagttaaatgtgtatttgaaattacctcagatgt

SEQ ID NO: 49371 - DNA, 911 bp, Homo Sapiens
aggagtcataacttttgttttcatactgaaaatgatgttgatcagagaaaccaactgttttgcttttcattgctctgtgagaaatttgaggattctgttttgctgttaggtaagctaaactcagaaattgaaaaggaaaagactggataaacacaggattttcagtaagaaaacaaccccagtcttgtcttagaagccacttgttgaggagtctgtgggggaaaaaagaggatatgcttttaaaggtagaacaaaccttcttctgtgttaaatcaaaaggatgttcaaaatccaccaggacagatgctacttgggtttaaatggagccatagatgatacaaagtcctcttggggctgaaaatcacttcctatttgcatggctttactaactggtttctgttttccattatctttttcacagaaagtcttggtcagtatttttccagcatttaaattgaaacggtcagtattagaccactgctaggttatgtagtcaagaaataaaaatagaatttcctaattcatgaagtgtttcttgtcttgatcccgtgaccaacagttgaaggttggtaaggacttttctacagtctgaacacaactaaagccctctttcatgttcacacactaactcctactgcgacgaaccgaaaaataattaatgcgagggaaatttatgtcttaggcataactccagttgtacaatcaatcgccattctcttttacggctcaaatgttctgctgacttggggttgtgttgttgggtggttcctgttagaataatggggacattgggaggttaaacttaactttctgcgggttagaaacaagtttactttttcaaaaaccggttacgggtgcaaaataaagggggaaacccccaaagttaggcgttgaagacaaagagagaaaat

SEQ ID NO: 49372 - DNA, 711 bp, Homo Sapiens
cctcccaaagtgctaggattacaggtgtgagccaccacacccggccccagaataatggtttcttgactttctgtagcccttgttccttagtctgctgtgatatttatgttgacctttatcattttctattctgaacccctcttagcatttaatgtgaaatctaagaaattagaagtagaatggcttttattgttttgacacctttgaaattattattaataatttttccagagcaaaaaagcaaacacgctcaataagactaaacaaaacaaaatataaatgtacatcatttaatgtcccagtggctctattctacctgtaagaaaatgatacaaaaccacctaagatattttgaagcctgacaaatcagcttcatggaaaaaggtaaaaaatgcatttttcaaccgaaagggcagatccaatagaagacccgctccttaaataaacataaaatgtaaaaagttggaaaattaagagtaatgttccatctggaaactgaacttttgtccttgaacttgtgttggcaccaagcctcatacacagtgagctcaataactgttgggacaaaggaaggaaaggacaaaatgtgtaactttcccagcatctgggagatgctgtctcttgcctcaatgagtggtccttttctttgctctcatgtcattccctgggaacaatggaattctggacaggctaaaacatcatggatgaagt

SEQ ID NO: 49373 - DNA, 802 bp, Homo Sapiens
gtgagagacgcagccaagatgaacatccccacagtgggcatcgtggacaccaactgcaacccctgcctcatcacctaccctgtacccggcaatgacgactctccgctggctgtgcacctctactgcaggctcttccagacggccatcacccgggccaaggagaagcggcagcaggttgaggctctctatcgcctgcagggccagaaggagcccggggaccaggggccagcccaccctcctggggctgacatgagccattccctgtgatgttcactctcctcccaaagcaaaccacagccaagcctgtctgagctgggagtccccttccccagccctgggtcagcggcatcctcagtcgttgttacttactcagctgatgtcacagtgcagacatccaccgttccaccacagaaccagtggctgagcggaccaacgttgccatgtgcgtttgctctgtggggaacagagcacagagggtgagcgacatgtgcagaacggccccttggctgcagttaggacctcagtggctggtatggccgagctgctagaagatgctgctgtccctgtgatcccagcagccctcccttcaccgtgacccctgacctttgtcaggaaggtgcagtttttcttctcaatctaaatgcctttcaggtgggccgcttccttggctacctggttccagggggctgttttgtaatgagatgctgctggcaggccactcagaggctcccagctgggttggtgggacagccaggccagatgacctgattccagcaaaaataaaactcagatttgggcaaaa

SEQ ID NO: 49374 - DNA, 435 bp, Homo Sapiens
gcccttctgcttctggaagggctatcctgggggtgaacttgaaactctcatcaggcttctgcaaaagctcttcttcctgaagacagacccagcctttgtgctctcaccctccactctggtaaagctgcacctctgggggaatgaggggctgcaggaatctctggagagcctggtgcttcacgatgctgctctggtgattcttgtacctaatctggtgtgctcaccaatgagtgaaagggatcgtgggtcagggacaccgagagagtgaggtcacttccacttcaaaccttcagtgagggggtgggatggagagaatgctgaatcttttttttgacgggatggggtttttctctttgtaattatttctttagtttaattaaccttttggttgtttgtgcaatattatatattttaaattataatgcatctccccag

SEQ ID NO: 49375 - DNA, 681 bp, Homo Sapiens
atactcatttccaaacttttcacttaactaagaattgcaggcctcagcattaatgctacctgaagctttctctaatcctcatttaaattagttctgttacaaactttcaagttgccatattctttcataacattaacacaaattttgtaaacatgtatttggtggtttgtctaatttctgtatccatactacgtttaacctctgtgaggacaagggagcatgtttcttgttcagaattataaattagtccagtcatagtccctggcacataatattgaaattagtgaatcgtgtgtatcttcataaacatactgtttgtcctggtagagcaaaaattgtcaacctgggattcatggacaaccaatgatgtgaaaaaaacccagtaatttcctgcaagattctgtgcttttccttggagggaagtccctgaatttcatgggactttcaaaagaactgagacattctgacccccagaaagaaagacccaccacagtgataaaagagttccaaagcttcacctccagctttttactgtctctcccaccgccagtatctgtgacactgccgtatcaacatacagcaatctcctaatttgaatataatcaagaacttttccactacctgtttggatggagaaactgattaaaaaaacgtttctagaaagcatacctagttaagtgc

SEQ ID NO: 49376 - DNA, 909 bp, Homo Sapiens
gaaagatttccctttttttgttttgtttgttttgttttttttaaccaaattcttagagatactatagaatccaaatgagaactgaattggacctcaagtcttctattcctactaatagagttctttgtgatggtaactgctgtgtcgtttgttttccacaagttgggatggattcatgtcgatacatccccatgcccttgacctcttctggcattctcctgtgctctgacaaactgagccagccttttagatctacatgaataaacaaactattttaccaagaaaaatctcagcttgcttactgcttaattaaaaacctacaatttacacacctccctgccttcaagactgtgagctttggatagccctgcttaaatgtttgtcaacaacaagagtcgtaatgtgtcagtacattgtagctcctttgaaatttaactctttctgtgttacatgaattgttttaaggagtccggcaaacatgtttcttcacttccatgagaatggtgccaagtgtcagactctaatgagccctcagctcaggttttaatttctattgaatgctaacattcttctgattttttggtatcttttataatcatatcggtttccgctgtattaatgacaattattcatggaaataaaaaatgaaatattttgtatccgtaaaaaccactacccacaccaacaatattaagaaaagggggggccgcctctaaaagtatcccctcgaagggggccaaggtttaacgccgtacccaagcttttcttttgtaaaagagggggtcccctattaaggggagtgcgcttattattaaaccttagggcccttggggccggcccttttttacaaaccgctctgtggacgggggggaaaaaaccggcctaacccctgggggaatatcccttgga

SEQ ID NO: 49377 - DNA, 625 bp, Homo Sapiens
  misc_feature (387)..(387): n is a, c, g, or t
gggaatgtggaagttggtggattgctgtgtttttgcatgattagcatgggagtctgttggagcaagaggaacatgcttgttttgaaaactcgagatgatgagggtggtacatgcagtgtgttctctctttattggcttctaaaccagttttgtcctttaatgcatgtcaaatatttctcccatgcttctcttagcagaaaagtttttacctataagacagggcaccttttaactctaaaactagtgatactcagtgacatagactttgtcttataaacattttttcattttttattttgaaaaattgcaaatctacagcaaaagtaaaacagtagagtgaacaccatgtaaccctcacctggtgttaacattgtaccctatttgctntaagttgtatgtatttctgaacttggcaaaattggaaattaaaatttttaaaaaattacaaatatacaaagttatttatcttagcacatttattatgggggactgcatctgatttatatttaaaatggcagggtttgagggattttttttcttatcataaaatgtaaacatacgattttaaagtctatttccccaagccgcacattataactggaaacttaacattttctattgagct

SEQ ID NO: 49378 - DNA, 670 bp, Homo Sapiens
ggcacgagggtggagggcaacctcttccctggcttctaaaagaatccagagcccagtggggctcatgtcccattccaggttccagcatgccttgcctctgcttgctcgggctgcctacgcactagctacatacacctctagcttcatgtttcatgttggagtgtggggagaaaactgggttcttagcattagagagggaagtggcaggtggcagatacaagcttagctctgacctgggtgcacctcagctctgtgtccttttttttccctgacctgaagctgaccccagcagaagtcccccagccaacccctccacccaacaaccccccaccctcccatcctgcccccagccatagtgggagctgggaggattgcagcatctagtgccttccaaggctgttcctggagcgctgcttgtaaacccaagccaagctttgtcccacgtagggagaatggaaggtgactgcaatgtccctgtgcctttggctccatctccccattctgtggttctttgggggttcctgcttccctcaaactgaacactctcctgtccaacagcctgatggcttaattattgcctggaattgcccggcctccgatgctggaatcaaagattgccttccgaagtatttttgttaagatggcaataaaaagaaatcaatctcactct

SEQ ID NO: 49379 - DNA, 729 bp, Homo Sapiens
caatgttttgctatgctgttatcaagggcagacctagcaaattgcgtcagagcaatcctgaattttgtcccgagaaggtggctttggctgaagcctaattccacagctccttgttttttgagagagactgagagaaccataatccttgcctgctgaacccagcctgggcctggatgctctgtgaatacattatcttgcgatgttgggttattccagccaaagacatttcaagtgcctgtaactgatttgtacatatttataaaaatctattcagaaattggtccaataatgcacgtgctttgccctgggtacagccagagcccttcaaccccaccttggacttgaggacctacctgatgggacgtttccacgtgtctctagagaaggattcctggatctagctggtcacgacgatgttttcaccaaggtcacaggagcattgcgtcgctgatggggttgaagtttggtttggttcttgtttcagcccaatatgtagagaacatttgaaacagtctgcacctttgatacggtattgcatttccaaagccaccaatccattttgtggattttatgtgtctgtggcttaataatcatagtaacaacaataatacctttttctccattttgcttgcaggaaacataccttaagttttttttgttttgtttttgtttttttgttttttgttttcctttatgaagaaaaaataaaatagtcacattttaatacta

SEQ ID NO: 49380 - DNA, 837 bp, Homo Sapiens
gcatgatcaaagcttgttttatttcaccactgtaggaaaatgattgactatgcccatccctgggggtaatttggcatgtatacctgtaactagtaattaacatctttttgtttaggcatgttcaattaatgctgtagctatcatagctttgctcttacctgaagccttgtccccaccacacaggacagccttcctcctgaagagaatgtctttgtgtgtccgaagttgagatggcctgccctactgccaaagaggtgacaggaaggctgggagcagctttgttaaattgtgttcagttctgttacacagtgcattgccctttgttgggggtatgcatgtatgaacacacatgcttgtcggaacgctttctcggcgtttgtcccttggctctcatctcccccattcctgtgcctactttgcctgagttcttctacccccgcagttgccagccacattgggagtctgtttgttccaatgggttgagctgtctttgtcgtggagatctggaactttgcacatgtcactactggggaggtgttcctgctctagcttccacgatgaggcgccctctttacctatcctctcaatcactactcttcttgaagcactattatttattcttccgctgtctgcctgcagcagtactactgtcaacatagtgtaaatggttctcaaaagcttaccagtgtggacttggtgttagccacgctgtttactcatacagtacgtgtcctgtttttaaaatattccaattattcttaaaaaattaattaaaatctgtatacttacatttcaaaaaaaaaaaaaatcggagggattctaatcgggggggggaaa

SEQ ID NO: 49381 - DNA, 570 bp, Homo Sapiens
catttgccctcctcctcagctagggccacgcggccccacattgcacttctggggggtgaccgacttcgtacacgggtttaaagtttatttttatggtttagtcattgcagagttcttattttggggggagggaaagggggctagtccccttcttttggccctccgcccccgcaggcttctgtgtgctgctaactgtatttattgtgatgccttggtcagggcccctctacccacttctcccagtcagttgtggccccagcccctctccctgtgctgtgtggagtggacaccctgacccccgaagcggggagggccgctgtggccttcgtcacagccgcgcagtgcccatggaggcgctgctgccaccttcctctcccaagttctttctccatccctctcctcttcccgccgcgccgctagcccgcctcggtgtctatgcaaggccgcttcgccattgcggtattctttgcggtattcttgtccccgtcccccagaaggctcgcctctccccgtggaccctgttaatcccaataaaattctgagcaagttcaaaaaaaaaaaaaaaaaagg

SEQ ID NO: 49382 - DNA, 489 bp, Homo Sapiens
  misc_feature (471)..(473): n is a, c, g, or t
attaccgggtacgccgaaacatgatccagtctcggttgactcaagagtgtggagaagatctcagtaaacaggaggtggataaagtactaaaggactgctgtgtaagctatggtggcatgtggtaccttaaagggacagtacagtcttgacaatagtagcaaactactaacccagcaaatctaagcccaaggaagaagggcggaaccagaagtagggcctcgacttgcttcagacgacacagagcaagaggaactgaccatctcatgacctgtggcattgcacggtgcagtggacagaagggattatcctcagccagtcgcagggtcagcttaagttagttagatcactcccagaagagaccagctgggaccttctttgcagtacaatttgaaattcctgatgtattttgcttattatttggtttcattctcataataaagagagtgtatactgacatgggcaggatgatannnaaaaaaaaaaaaaaaa

SEQ ID NO: 49383 - DNA, 581 bp, Homo Sapiens
tgtccattgccaccagattaagctttctccagccagatcacctctctctgagaaacctccattgacatggaaacaccattgtctggcacacatactcacatactcaccttcccgtcttgatccccacacatctttccagcctcccctcccactccactccctgctccctcctccacctccccatcctcttgtctcccctcccctctgaatccagcccagcggggcttctcctgcctccatcacatcacagaagtacctcctgcttctggttttaattagagccttccccgattacattttcctctgaattttttcctatctacatttgatctgtcatgtttaaaccccctacttctaagggaacttctctaatctcttatcctcatccccaaatagtgttttcctcctctgggttcttataatgttggtatcaatctcacagcatttagtgcttcctgcctggtgtgacagttacctgtgtgcatgtgcaatttctaatttcccacgctagactgtgagcttcctaaggcaagaatcatgccttgttggtttctgtattcctcatggtgccaaacacagtg

SEQ ID NO: 49384 - DNA, 959 bp, Homo Sapiens
atgagtgatgttttcccagtattatttcaattatattgttttattttctgttcctcactcctacctctcattccagtccccaaactggcttttcttttatttcttttttcttcatgctgatgtatttattgagcaagtcctgtatcaggcactgtccaaggtgctgtatgtgccatgttgaagagaacagacaggacctactgtccttgtatatcttgcctttgataacagaaactgcaggggattggaatagcctctttacaagaaaagaataagagtgaggaaaagcgttggaatttatagtgatcacagtgaccaggtttgtattgggtatgttttacatttgtaacttcagtgctatttttttttaagctccattgttttctaaatgtaaacaagtatcaatgtaaggacagtttcatcaggtgaatatcagaagtactgacaccataatctcatttgcactgtggcaaagggtagtagatgtgtgttcaggattattgctctgtcagtagtgcccaggtgccactccatgactaaccgaaacattttattatgtgactcactaagatgttcaattcattagtattttctggttactcaaagtgtactctatgtacctttttttggcctttgattttttctgatggggaaagattagattgccttttatttgttaacaaatagtttggcaacaggacttatttgggagtaggtctttagcattatttcgaaggggttgattttggccctggaagaaatgtatgttcctttaaaagccattttcagaattggttttgggaactaaggtgggtaacacggttttttaatgggcgaattaaagcagttgagggttataatgatacaggtaaattagaatatttatggggggagaaaaatggtgtaaatagtagagagaagatcaatagcactgtcattttgagtatatattattctca

SEQ ID NO: 49385 - DNA, 704 bp, Homo Sapiens
tccggcgcctttgtcctcattttgagctgcaagctgggtcagcggctctgaagccctcgagtgactttctaacccaagacccagcccctggcaggaggaggggtgggtgcagggctggtgggacaaaaagaggcctcagcaggcctggaagacccttccagtacatcccacagcgtgtcgagcagctgggagaacctgtgtcaagctcgagccgtcataggtccccatgaggtgtctgaagccccttcttggtgatgggaggcagaggtgctgacgttctggagcatggacgtgagtcctcagctggctccgcgtgggcccttggagggtgccaggtgtgtggtgaccttctggatgcctttaacttcatggctgcgtcattcctgatttagaactttaaccggagcttcatctagtgattgcaaaactggaccaatgggaggacggcggcgcagcccgctccctccgtggaatggagctcagctcttcggaggcatcaaagcacctgtcgcctccgtggtccccctgccgagggagtgcggcctctgcaaggttcgggggtggcttcgtttgcctggagtggccggccctgcttgtgccatgtggatgtttgtgagcctcggtcctacagcactgtgtaggctgcatctgtttcgtgctggtcctgttgacttgtatgatatccacaaataaatattttcatg

SEQ ID NO: 49386 - DNA, 620 bp, Homo Sapiens
ctgcaactgcaaatgttttttgatccgacgtactgaaataggaagtcatgctcttcccaccctccacccaccagagtggaacccgctgcaaaatccccagccttaattcttgcttcaggacccagaccggtgtcttgctctagggcaacccagggcagaggggccaggtctgcccagcgtttaccactgctgtcaagccacagcccttggccaccatacgggccatcctcagtgaggcagccccccataggcttccgccaagctctggtcccgaagaggctgtgcgagcccttcccggccctccccagggccccccgccccctcctctgcctgctgcgtggaggcagccatgggaaggagcccaggggagctggcctgggggagcgaagcccatgttcgcttcctgacttagagctggggggggtggggggtggggcttgttcccctgcagtatctgttctgtgaagtttgttaaatgtaaggaaagcttaaattcttgtatctttaaaagagaaaatcttatttaacccttttgtgttctagatttacttacacacatagcctagagctcagttttagttttaacattgtgaaaatattaaaagaatcttgtaacttta

SEQ ID NO: 49387 - DNA, 740 bp, Homo Sapiens
  misc_feature (544)..(544): n is a, c, g, or t
  misc_feature (701)..(735): n is a, c, g, or t
ggtccggaatttcgggaatcgtcgaccacgcgtccgattattttaattccattactttcagtctggaaaactaagctagtcagaactgtcatcttgcttcccaatctaagaacctgtggccctggaacacttttcaagaattggttcattttgctttacacagtagatctgttccaacagttctgtgtaaaccaaatgctatttttcaatgcatttggactgctgaccatttaaaagcagcctatgattgcttctttttgtaaagcaagcaacctccctccactttagctgttttgactatttgaattttcacatattgggcttacccagagtggagcacacctccagggcatgtggctgacactgggtcaatgtctgcatctgtgctgtgtgtgtagtgtggttggccagtaggtgagtatccctgtgtgtgtgagtgaagccactccccaggctggtgctctcctcctgtgcccagtgactgcccagtggcagctcagctgcccttcactcccacctgctgccaaagtccctgtgctaatgngattacaaatacaaaaagtggaaaaaaattttcgtaaactttgttttatattaaaagaaaaatccataagtctgtgtgtgttaaacatgaggttctgcctctgtggctgtgtttgaaaaaaataaagttttattagaataatccattttttccagcnnnnnnnnnnnnnnnnnnnnnnnnnnnnnnnnnnnaaaaa

SEQ ID NO: 49388 - DNA, 896 bp, Homo Sapiens
gctctgggaagcggcasagaggcagggaccactcggggtctggtgtcggcacagccatggcgggcgcgttggtgcggaaagcggcggactatgtccgaagcaaggatttccgggactacctcatgagtacgcacttctggggcccagtagccaactggggtcttcccattgctgccatcaatgatatgaaaaagtctccagagattatcagtgggcggatgacatttgccctctgttgctattctttgacattcatgagatttgcctacaaggtacagcctcggaactggcttctgtttgcatgccacgcaacaaatgaagtagcccagctcatccagggagggcggcttatcaaacacgagatgactaaaacggcatctgcataacaatggaaaaggaagaacaaggtcttgaagggacagcattgccagctgctgctgagtcacagatttcattataaatagcctccctaaggaaaatacactgaatgctatttttactaaccattctatttttatagaaatagctgagagtttctaaaccaactctctgctgccttacaagtattaaatattttacttctttccataaagagtagctcaaaatatgcaattaatttaataatttctgatgatggttttatctgcagtaatatgtatatcatctattagaatttacttaatgaaaaactgaagagaacaaaatttgtaaccactagcacttaagtactcctgattcttaacattgtctttaatgaccacaagacaaccaacagctggccacgtacttaaaattttgtccccactgtttaaaaatgttacctgtgtatttccatgcagtgtatatattgagatgctgtaacttaatggcaataaatgatttaaatatttgttaaa

SEQ ID NO: 49389 - DNA, 369 bp, Homo Sapiens
ggtcgactgaggacaggtgtaattaagctctattagtaacaataatgccttgtatttgtatagtgctttataatttacagagagcgttaacatccatcaatttatttgaccctcaaaacaaccctctttgtttacttatgcatatgtataagtaaaatatgtaatattacctccagttgaggaaaccaaaacttggctgggcgcggtgggtcacgcctgtaatcccagcactttgggaagcctaggcaggtggatcctgggacctcacttagaataactaagcacggtgctcgcttcggcagcacatatactaaaattggaacgatacagagaagattagcatggcccctgcgcaaggatgacacgcaa

SEQ ID NO: 49390 - DNA, 602 bp, Homo Sapiens
  misc_feature (484)..(484): n is a, c, g, or t
  misc_feature (489)..(489): n is a, c, g, or t
  misc_feature (507)..(507): n is a, c, g, or t
  misc_feature (570)..(570): n is a, c, g, or t
  misc_feature (575)..(575): n is a, c, g, or t
ccacgcgtccgaaaagcaggctggatggatttccagaggagttttcaatatcgtcaaatatcatccaatttaaatacttcataaagtctgaaaatggcactcgaccttgtactaaaggaagacaacacctttgtctgtaccttggaaactcttaagtttgaggctatcatgatggctttaaagtgtggctttagactgctgaccagcctggattgttccaaagggtcaattgttcacagcgatgcaccttcattttatcaagtaattacctgtgtcaccgaacaaaggcaacaagcatgcagccagcaagcttcggaaaaccacagcatcaaagacatcccaaataacatgcccagctagctctgtactacagagccctgctactaatcaattactgtgagctaacggtatgtaaattctatcgctaaagatgtccttcctctggggtgttcctactgatcagactcttccacctaaaatgaanacagnaaccttctatatactgcnaataaagactgaaagcttttgctatttatttgcccttaagctgtctttcaatttagattgtcntgggnatttgcacaaaaaaggaaggcatgtac

SEQ ID NO: 49391 - DNA, 587 bp, Homo Sapiens
tgatcctgggctgctggtgctacctgcggctgcagcgcatcagccagtcagaggacgaggagagcatcgtgggggatggggagaccaaggaacccttcctgctggtgcagtattcggccaagggaccgtgcgtggagagaaaggccaagctgatgactcccaacggcccggaagtccacggctgagccaggatgcaaggctcctggtcctgtttgcagccggccaagaggcgctgggaggggcaaaaccatacggatgcgctgctgtctgagaggaagggctgacacttgctggcatggcctctgcgggcttcgtcatcgcatgcactgatgcccggggacctggctgtcctgggcttcccctcggcctccaggtgaggctgcccattgcaggcactgggcaggcctgaccttgctggggctcatggccctgtagcgcttttgttacttgaatgtctagctgagcctgtttttgatggagctactactgtaatgcgtgaactaacaaacctgtgaactgtaaataggcccctggaagcacgtgcttaagcccttttgctgatttttaaaaatatcatctagcgcaca

SEQ ID NO: 49392 - DNA, 928 bp, Homo Sapiens
agattcagccatccctgtggaaagtgacaccgatgatgaaggagcacctcgaattagtctggctgagatgcttgaagaccttcatatttcccaagatgccactggtgaagaaggtgcatcaatgctgacataatgagatgttgtagactgtttccatacatgggcttaagaagttggacagagttaccttaagtgtctctactatctttgcctccagatttcaagaggagaaatttagttttaaacctgaataaacatgtttgttttcagtgctcactcaaaccactaaaacagatggatagctttgaggttttagataaggaaagattatggagaatgtagttgttactgatttttggcaattttacatttggaattttatcactgtgcttttttatatgaggcactgtagtattttcacatagtatagtactctggatgtaaaagctcaaaaattgtgattccttgaacgttcactaaatcttcaagcaaaaacacatttttacattatttttacgttgattattttagtgaaagaccatatgaagaagcatttttaatattaacttgttacatactttgatccactttacatcatttttatgttgttgaggtagggaaattagggttcagtttatcactggacattcaggaggcaagtcaatcttttttatttccttataaaattaactcttcaaaagctgttaaacagagagttatcttaatttttattgcagtaggaggaaatatatttaaaatatttgtagatttatagcaaatagagactcgttatttaaaggttaaataacaatttgttcttttgttgtttttgccagtttagggcagtagctgcttttgtcataaatatcttcctaccacatcaaaaatgctgcttttaaaatttttgtttataaattgagaaggaatt

SEQ ID NO: 49393 - DNA, 703 bp, Homo Sapiens
cgaaaatactgaagaaagactacctctgattggactcttctcaaggaattaataattcaagaactaaggaaagaaaaaagtgattatatgaaaatactgaagttgatcgtagcagctgaaggctgatcctgtgctgaagtacattggtgcaatcttggctcactgcatctccaccccaggttcaagcgattctcctgcctcagcctcccaagcagctgggattacagaatgtcacataaatggaatcatactgtgtccggaattggtgggttcttggtctcactgacttcaagaatgacgccatggaccctcgcagtgagtgttacagctcttaaggtggcgcgtctggagtttgttccttctgatgttcggatgtgttcggagtttcttccttctggtgggttcgtggtctcgctggctcaggagtgaagctgcagactttcgcgatttcatctctctctctgctatggacacagatggcttcactccatcctgtattcttcggaccatgataaaattccagactctcggtagtttttgcgttccaagaagtagagcctagagtggtggcctataattacagttactcaggaggctgaggcaggaggatcctttgagtccagcagtttgaggccagcctggacaccacagcaagaccaccaataaataaataaataaatggaacatgaaaaaaaaaaaaaaa

SEQ ID NO: 49394 - DNA, 794 bp, Homo Sapiens
  misc_feature (749)..(792): n is a, c, g, or t
ctggaccggtccggaattctccggatctgtcaccctgtcaggcagccttttccatgcccctgttcaggcctggggaggtaaaggctcaggctgttagtagccgcagagagccacactcaccttgtcaggagactcttctcaaactgtccttatgtgagtgcactgccatttcttgcagggaccctgactgacacaggggctactactgacactttacagggatggttctcccccgtgcagggccgctgtgcccactgcaggacatgcagcatccttcgccccactccactcactaaaggccagcgcaccccaggccccatagtattgctggttatggatttattgactttatgttccaaattcagctttttcagttggctgttttttgaaaggggataagctttgtcagtagagggcaccaaacaggcattataggaggaaaggcgcctccttcgtggttcttgttggttgtgcttctgcctctggacgccgcagtgcatgtggcttccccagcacccagctcctgaagcaccaggcggtcagcagctgcccttggcaccctccagccctcagaagttgcgtaggagacacagcgcctccactgaggcacctctctgggaataacgttccccagcaccccaaatggatttccagtcaattcagaagcattttaccagtgaagccctcattattccagttcactgttaaagccagtaattctctatattaaactttccctggttcagttnnnnnnnnnnnnnnnnnnnnnnnnnnnnnnnnnnnnnnnnnnnnag

SEQ ID NO: 49395 - DNA, 928 bp, Homo Sapiens
  misc_feature (619)..(619): n is a, c, g, or t
  misc_feature (731)..(731): n is a, c, g, or t
  misc_feature (768)..(768): n is a, c, g, or t
  misc_feature (775)..(775): n is a, c, g, or t
  misc_feature (916)..(916): n is a, c, g, or t
gtggtggcatcactgggtcctctcttggatagcatagtcctatgaccaaatgggtcagtcgttgatcaggcttcatgagaatatgatcgctgggagaaatatacagctaatttaacaacaaatgactgtcctaattctggagacctgggaagtattgatgagagtatagtgatcataagcagacattgggtgctttacaaagccaatttgcctgcatcctctggaaggtaaagaagatctcctctctcttagaacttaatcaaactcttggcatccacagaaggctaggaggatgtaatgaatacttaccatttttgtggaagcccacaaccttttgaatggcctttctatactttagtgaacctccatgttatgaaccttacttcctcaagtctcttttgctgctaggaggcagacagtaacttcggtaattagaaacatctgcactcagcaacatgaagcacaagttgtgtgcagttgtccatatgctgtcatgagttttgccatatgtatcatctggctttcagaggacctttcatggttgtcacgttaagttcatgatacagaagtggcatcggtgctggtgttaatggctgcagtaaagtcaattcctagattntagtgctctgtggtacagagagaatggtggtagttatttttccttccgatttttgtaaaaaaaaaaaaaagtcttaattacggccgagctattccttagtggaggtattacntgcatgcgtcgttcacgcggactggaacatgggtcgnattaccntgggcacccctcgctggaaataaacgccgcaatgcgcccgaaatctcacacgaacggccgcaccagagtgtggggcacccccccgccctttttgccccaaaacggtgttcccaaaggggggcgcctggtttccacctgtgnacaatgccgctg

SEQ ID NO: 49396 - DNA, 664 bp, Homo Sapiens
gatttcaccatgaggacacttatctctttcagtggtcctcccaagaaattatttaacaaactgaaaggagattttgattaaaattttgcagaggtcttcagtatctatatttgaacacactgtacaatagtacaaaaaccaacatagttggttttctagtatgaaagagcaccctctagctccatattctaagaatctgaaatatgctactatactaattaataagtaaacttaaggtgtttaaaaaactctgccttctatattaattgtaaaattttgcctctcagaagaatggaattggagattgtagacgtggttttacaaaatgtgaaatgtctaaatatctgttcataaaaataaaaggaaaacatgtttcttcaaattgcataatggaacaaatggcaatgtgagtaggttacatttctgttgttataatgcgtaaagatattgaaaatataatgaaataaaagcatcttaggttataccatctttatatgctattgcgtttcaatatttaagatttaaagtgattttttggtcacagtgttttgttgataaaatttttttagaattgaagtttgaattctaagacttgaaacaacctgatcactgaagccaactttgtcccagcacattccttaagtcctaattgggaaaaaaaaaa

SEQ ID NO: 49397 - DNA, 896 bp, Homo Sapiens
  misc_feature (845)..(845): n is a, c, g, or t
gcacatgtaaactgatctgggaaatactgcagatgcccggttcgcaaccttccatagaaacatgtcgtcacccagaccctgttgctgcagaacctgagctggatctaaattgggcagtgtcacctctctcttccagacatttcgatcccttaaagttgcttgacgtggaggttatttcggtcataaaaccaagaacatggagagtggaaacacttttgtgggactagtaaaacggcctgcaccataaaagagcagaggagtgaaaatcgatgtcatatgtaaactagaataacatgtcagtaacttttaaaaacatagctaacactcacttattcattcaagggagggcttctggctcatcagctattttaggtttctttacatttgctttgaaaagctttctgtggctctttatagctgttttacccaatcagttcctttttacttaggataatctcaagatgggctgcagtctgtgcagacacacaggctgagcagtgaaggggtgtgagctggggatgtgctgagctgcctagcagatccctgggacttagggtaagccttagagagcctcagttatttcgttgcacactggaaattgagagctgactgtatattgtatgccagcattttaagtatcgtaatctctcaatcattcatgctaatgaagggtagctagagataacaaagaaaagtgtaatcaccaaatcatttctttgcatcttcagccagagctgtgatctctttgggttcccgctttgagtcctcatgtccatttgccccagtctccagaataatacatagtaagtgttaaaaaaaaaaaaaaaagggcgggcccgctctanaagaatcccctccgggggggcccaagctttaacgccgtaccccaagcttta

SEQ ID NO: 49398 - DNA, 927 bp, Homo Sapiens
  misc_feature (1)..(1): n is a, c, g, or t
  misc_feature (721)..(721): n is a, c, g, or t
  misc_feature (752)..(752): n is a, c, g, or t
  misc_feature (761)..(761): n is a, c, g, or t
  misc_feature (800)..(800): n is a, c, g, or t
  misc_feature (822)..(823): n is a, c, g, or t
  misc_feature (862)..(862): n is a, c, g, or t
nttgaacagcggtacggtccggattcccgggatggaggctcagtccccaacggctggcaagactcagggtcctcagtggacatggtgtgggtgacatcagaagggtgccacatcagtcccctccccaacctcagtgactgacagaggatccggatctcagagcctgagaccaggtttattggggcctggcctgtcctctaagtcaagtttaggaaaacaaggataagattctgtcataggcatagagagttgcacataaaaaataccgaagaaaacccaaaattcaatcaacaattctgtcttattgaagagttgctaggattcagagtaaaactcaaaggattcagtttgagcctagaatgatggttagacttgtagtcactgggcttttgttttgctttatggaaatcattgaaggtctggatccctttctctgaatggagagattgagagggatgtcgggcagttcccattagatttagtggccttcatgttattcagaattgttttggtgatacctcacccctgtaatcccagcactttgggtgggtgaggcaggcggatcacttgaagccaggacttcaagaccagcttggccaacatggtgaaacctcatctctactaaaaatacaaaaattagccaagtgtgatggcacatacctgtaatcccagctacttggaattggaaatcgcctgaacccaggaggcggaagttgcaggnagggagactgcaccactgcacttcagcctgngtgacaganggagactctgtctttaaaaaaaaaaaaatcatctgtaanataatttccggatagtcgtttnngtcaggaatgtttgtaattgagctccactatatatcttnatgtctatctgagttatacgcagtatatcacagcgctagtatataaaaaaaaaaaaaagcgcctc

SEQ ID NO: 49399 - DNA, 1012 bp, Homo Sapiens
  misc_feature (856)..(856): n is a, c, g, or t
  misc_feature (864)..(864): n is a, c, g, or t
  misc_feature (914)..(914): n is a, c, g, or t
  misc_feature (943)..(947): n is a, c, g, or t
  misc_feature (949)..(951): n is a, c, g, or t
  misc_feature (953)..(961): n is a, c, g, or t
gctgctcgaacgcattcgccgagagcagcagagtgcccgcacccgccttcaggaaatggaacgccgattccatgagcttgaggccatcattctacgtgccaagcagcaggctgtgcgcgaggatgaggagagcaacgagggtgacagtgatgacacagacctgcagatcttctgtgtttcctgtgggcaccccatcaacccacgtgttgccttgcgccacatggagcgctgctacgccaagtatgagagccagacgtcctttgggtccatgtaccccacacgcattgaaggggccacacgactcttctgtgatgtgtataatcctcagagcaaaacatactgtaagcggctccaggtgctgtgccccgagcactcacgggaccccaaagtgccagctgacgaggtatgcgggtgcccccttgtacgtgatgtctttgagctcacgggtgacttctgccgcctgcccaagcgccagtgcaatcgccattactgctgggagaagctgcggcgtgcggaagtggacttggagcgcgtgcgtgtgtggtacaagctggacgagctgtttgagcaggagcgcaatgtgcgcacagccatgacaaaccgcgcgggattgctggccctgatgctgcaccagacgatccagcacgatcccctcactaccgacctgcgctccagtgccgaccgctgagcctcctggcccggaccccttacaccctgcattccagatgggggagccgcccggtgcccgtgtgtccgttcctccactcatctgtttctccggttctccctgtgcccatccaccggttgacccgccatctgcctttatcagagggactgtccccgtcgacatggtcantgcctggntggggctgcggagtccactcatccttgcctcctcctccctgggtttttgnttattaaaattttgaagaaaacccaaaannnnnannnannnnnnnnnaaaacctccaagggcatctatggtccgggtggccggagaaaagaagggtaa

SEQ ID NO: 49400 - DNA, 675 bp, Homo Sapiens
  misc_feature (591)..(591): n is a, c, g, or t
cacgagggcaaatttcaggtaaacaaaagatattttctagcattaatatgccccacgcaatatttggaacacttatgtgaaaaatgatttgtttttctgaaatttacgtttctctctgagtcctgtaactgtccccgaggggattgagcagaagctcgggtatgagccctgaggttgactgccggttatttttctgtcctgggaacagcctgacccacctccctgtctccatgtagccagtggggggagggggagacacagaacctaccacagccaggggcgtccccatggcgactgtggcccggcccctcctctcttgcctgactctcctctcttgcctgactctagacactaacttagttccaggttcggtgccctgttggtgctcctgtttccaatagcttaggtcccatggtgggggaggaacctcaggggctatgcagcccccgccagctgccctcaaatcccgtccaggccagttccagattctaaactgatttttttcatgatattgtcaaaacagtgaggaaacattaaaaaaaaagccctaaaaaaaaaaaaaaaaaaaggacgcggccgcaagcttattcnctttagtgagggttaattttagcttggcactggccgtcgttttacacgtcgtgactgggaaaacctggcgttaccaacttaatc

SEQ ID NO: 49401 - DNA, 878 bp, Homo Sapiens
  misc_feature (586)..(586): n is a, c, g, or t
cacggaggaggcagtgccccgtcggaatggggccgcgggtccacattcccctgaccccctcctcgatgagcaggcctttggggatctgacagatctgcctgtcgtgcccaaggccacgtacgggctgaagcatgcggagtccatcatgtccttccacatcgacctggggccctccatgctgggtgacgtcctcagcatcatggacaaggaggagtgggaccccgaggagggggagggtggttaccatggcgatgagggcgccgctggcaccatcacccaggctcccccgtacgccgtggcggcccctcccctggcaaggcaggaaggcaaggctggcccagacttgccctccctcccctcccatgctctggaggatgaggggtgggcagcagcggcccccagccccggctcagcccgcagcatgggcagccacaccacacgggacagcagctccctctccagctgcacctcaggcatcctggaggagcgcagccctgccttccgggggccggacagggcccgggctgctgtctcaagacagccagacaaggagttctccttcatggatgaggaggaggaggatganatccgtgtgtgaggcggacagtgggtggccaccgggagctcttggctgcatcttctccctgcccccaccccactatgacctttgaccctacggcgcaggggcagccaggacccttgattcagaccatggaccctggaacttgtagatgagggacactgggctggccctcgggtcttcggaagacgtaggggggctggaatgggtgcccaactggctggcctgacttcatcatgctccctgcacttaaggctgcgtggggaaaaaggcctggtgttgtccacaccaaggaatc

SEQ ID NO: 49402 - DNA, 523 bp, Homo Sapiens
gtaataaaagattcaaaataaattcagaaaacattcaaagtgtgggaaaaacttaaatattgaaaatggtgaaacacattgtaatgtataaacaattatgattataattactatttcatttatttttgttagtgtgtccatgaacttcctgcttatgatctttactcctttttctttttgtaaggggaaatacccttcatttttcttcgataatacatggtcactatatggttcaaactctaagataaggggaaaatctcctggagttaactacaatcagatacatactatatatcaaattgatatatagtatatatcaaatgtagaggacatcagaccatatcattgctcatttcttctgcaacacttactttcctgaacatgatgctttacttattcttttatcaaaatattcatcttgacacatataaccagaagttttaagagctatgaggaagtcaattcagggcattattaactgaaatttctagttatacaaaagcaggatactgtcgtaatgcac

SEQ ID NO: 49403 - DNA, 588 bp, Homo Sapiens
tatactagaggccccagatggccaggccttgggctacgtctggcttgcatggtctcccaagggaatcagccccatcaacaaagttcaaatcggggcagaggctgcacttgtgcccccagatgtttctgaggagccagactagggctggcattgctgtagagtgacggctgctgcccagagcgtgtcccagacatcacagcggggctcagcagttcccacagcctctgcctgccttggctaagcatgagttaagcagcaaaacgctcctccatgtctggatggggccggcaggtcctgtgtcccctgcacctggaggagagcaggctagaggcacagcggccacatggtgctggctctgaacgttggttggtggctggaaaacagccctgcttctgagggccgctcagttctgcacacgaaaccacctcctgagggctcagctctgcccccgccctgggctgcagcctctgcacgcaagcaccaggcatcctttgtgttgtcaactccgtgtaaccagtaactacagccatttacaattgactccgtttccttttgtaggtttccctgtctgtctgtgttagtagaaaa

SEQ ID NO: 49404 - DNA, 852 bp, Homo Sapiens
  misc_feature (489)..(489): n is a, c, g, or t
gggtgctctctggtgtttctgattttcctgcctttattctgtcttctcttgtcctatctcattccagcccacatcttctcctttcctgattacttttgttgtcctgcctcttcaggtaatggtcacagatttggctgtaggcacgttaccagccctgtggcttcttgactcttggttccctgttaactctgtttctgagaaatgtgggtatggaggtgggtgggaaagctcacttccatgaaggatgtctccatgctaggagctgcctgcaccctggcagaggtggccagtcacgtgaaggtgggcagggcccttagcatggccacacatgtccccagggcagatcaaggggcctctcagaaccatgttccccagccaggtgaggaccattttcactgggacccaggccaaaaccatgtgggtgcacaaagccaggcactgccaagtggaacatgaggttatttccaaatcatgggagccacccaccanggagagggcaggatggaaaatcccctggagcccggtcaactttttgctcatggctagtgaaataaagttgtttgagtactacgatgcccccccttttccccacttccccactgatccgcgctgccttcccccacacgtccccactcccacgccgcggcccctgcgtgaccccccccccccaccttactgccccgttcccccctccccgtttccgctctccctctctcgcccgccccccgcctgcgcgtcccccgctcctccatcaaacttctttcccgccctttccctcgtggggagggagccctctccaactattccctgttactcggcgcgcgaccactcctcaccaacaaaatcacctgg

SEQ ID NO: 49405 - DNA, 520 bp, Homo Sapiens
  misc_feature (337)..(337): n is a, c, g, or t
tggcactaagtggcggaagcggggagagaagctggcatgcagggcagtcactcggcactgagaatactggtgtccagttcccggcggtgtgctgggtcagcaccacacgcacctggttttattattcatgcctctttaaatagcatggaggtgaggctggctgcttctgtagtgttgcatgaggcttttgagataaatgattttcaatcaacagaatcaatagcagctgtgctcagtacctcgcgcttgtgtacgggtttgcgactgaaaagctcacagcctgtgggtgcttgttgctgcttttccaccagtttgatttgaagaaataaaagcagtnacagaggaaaggtaaaagagttggaaattgtttcagattggacagaaccttcccttggcggttgtattcatctgttcttatgctgctgataaagacctacatgagactgagcaattcgtctcttctcacgctgctgattcgtctgttctcacactgctgattaagacatacctgagactgagt

SEQ ID NO: 49406 - DNA, 538 bp, Homo Sapiens
tcgctctgtccccggctgaagtcgcccaggctggagtgcagtggcctgatctcggctcactgctggctccgcctcccgcgttcgcgccgttctcctgcctcagcctcccaaagtgctgggattactggcataagccaccgcgcccggccaggaaacacttgattttaacttgctacttggactactctgaaagtcctgtgtaatgattctgaacatatatttcagaatatgacacattaattcatgcataataatatatagtttgaattatgaacttacctttcatgaagtcagagatgcctctgacattcctgcatttatccattcagatggaagcttgatataaaagattataaaacttttaacaggcttaacttcttctaattcgaaatgcatgcactacctctttgtagcttctaaatgaactggcccaaaaccagtcagattttacagttggatggtaggtttctttactgaactatgaaaacagcaagtgccaatggggaaaatgtgattgctgcattaagaaaaaataaat

SEQ ID NO: 49407 - DNA, 820 bp, Homo Sapiens
ctgaaaatcaggaactccaacttctacacggtggcagtgaccagcctgtccagccagattcagtacatgaacacagtggtcagtacatatgtgactactaacgtctcccttattccacctcggagtgagcaactggtgaattttaccgggaaggccgagatgggaggaccgttttcctatgtgtagtaaggacactgttctctctgtgtgtgctctctactggaggaaagggattcaaagtcatactccattgattggggcctggtcctgccttagatctcagcttttgacttataggttccctggctttggatgtcttgagatttatttgaagaatgtattattattatgtgtgtatttgaagaatgtattatttgatatgtgacagaagtgctggaatttctaaaagagaacattaagccactaaaaacgttaccaagctccagcacttatgtgatgggtttgaaaaaacagaaagtggtatgacgctgtgggaggatgaaaatgacagtggcagggactgagagctgacaagccttggcagcacttaggtcggaagggggaggggggcaccccaaacaggacagtgtaactctgcactcttctactgaggctttaaaaaaaaaaaaactgactatttccatattgctgttggtagcttcttctgcacggtacctgagatcctggtgccaacatagtgatcttcatgcggtgcgtctctcttccctatcccgatggcctgtccggcccttgtgagcctaccaccttgctcaggaggccctgtgttgacccagggcgaggccctagccgggtgaccccg

SEQ ID NO: 49408 - DNA, 792 bp, Homo Sapiens
  misc_feature (688)..(689): n is a, c, g, or t
  misc_feature (692)..(698): n is a, c, g, or t
  misc_feature (700)..(701): n is a, c, g, or t
  misc_feature (703)..(704): n is a, c, g, or t
  misc_feature (706)..(706): n is a, c, g, or t
  misc_feature (712)..(713): n is a, c, g, or t
ggtacgatctaagttaagtgtgtcaaaagcaaggcttaggatttgttatgggagtagaatatatattgaattttgtatgaagaactatttgtttaaattatatagctgggatattttgccactgttaaaatggattcagaagaggtcctagaaaagtaagattagtgacatgtgtgggtttatatttagatatttaaggtgcattttcatagtgtggtaagaccttaagtaaaaggcacaatggtactacagaattaaaatgtaggtctaacataatgccagttccactttaactttgtttttgcatttgaagaatgtatgtagcactttcctatatatttgtcacacattgaaaactggactgggtataactatgttataggaaagtagaaattgtattctttattttccatctttgttttctgttctacaaagttgatgcttaagcatcaagctgattttattggtcatgagaacaaatggatgtgatcatgaaggaatcagattccctatgtaaagcagtttaaaatggaattcaatgttcagtgctcaggtatgtagtaagtactgtagtcctgtgggggcaaatgtgtagatatttttaaacattttgccataattgcacaattttttgcatttttacctgatgtcattgtttcttataataaaaccttttctgattgataannaannnnnnnannannanaaaaannaaacctgtcggccgccttcgggccttcaaaaacctttctagaaccattccttttggggcgcgggcccccataaagtaaa

SEQ ID NO: 49409 - DNA, 790 bp, Homo Sapiens
agggaatccactgttttctcactttcctcccatatctccgtccttcatccaaaaccttcccagaatccatcagcaagcatgtttgaggcctgtggtgtaggggactgaattttttttttaacttctattccattttaattgtaggatatctttgtccatatacccaggtgtcctgatttgaatgtactatttgatcctcattgtgttcaggcaaaaaataggaaatgagtaattttgagtttgaaatctctcccagaagacaaactacttcagtgagtaaaagctttgacattttatgttttattcataaagggggttaattatttgctacaaagaagcacgatctattttcatcatcgatttgaaaatatctgtaactcctatagatcctataggcagagagttttcctttctgactttttccctttgctttcgtgtgaccacatgttttctgtaccagtcactggggaaagaagtgagtttatctcgtttgttttaaaagttttgcttgtctatttagcattcctttttgggtctcaagatttatggaacaataaatgtcatttaatgctgtgtgcttattttgaattcctcatcaggttttagaagcggggtaaaaatacttagatgcttatcagacttgaaattatactgagtggcattgaacgtgagtttgtcccagtgaaacaggctaaataaattttggcaccagcaaatttgttactttgtttttttaatagtaggatgtacacatttcagtataataaatgttttctgattgttttgcaaa

SEQ ID NO: 49410 - DNA, 576 bp, Homo Sapiens
  misc_feature (552)..(552): n is a, c, g, or t
atgtcgccctctggtcgcctgtgtcttcttaccatcgttggcctgattctccccaccagaggacagacgttgaaagataccacgtccagttcttcagcagactcaactatcatggacattcaggtcccgacacgagccccagatgcagtctacacagaactccagcccacctctccaaccccaacctggcctgctgatgaaacaccacaaccccagacccagacccagcaactggaaggaacggatgggcctctagtgacagatccagagacacacaagagcaccaaagcagctcatcccactgatgacaccacgacgctctctgagagaccatccccaagcacagacgtccagacagacccccagaccctcaagccatctggttttcatgaggatgaccccttcttctatgatgaacacaccctccggaaacgggggctgttggtcgcagctgtgctgttcatcacaggcatcatcatcctcaccagtggcaagtgcaggcagctgtcccggttatgccggaatcattgcaggtgcccaactttcttgtancaagttggcattataagaaagcat

SEQ ID NO: 49411 - DNA, 1232 bp, Homo Sapiens
gcaggtgatccacccacctctgcctcccaaagtgctgggattacaggcatgagccaccgcgcctggccagaagaaatctttatcttggtgtgcagtgtctggtgagggacaaatatcatctctcttggatctgaatctggaagaattcgcggcactgaagggatttttttttttcagacagtatccctctgtcgccaggctggagtgcagtgccgcaatctcagctcacggcaccctctgcctcccgggctcaagggatcctcctgcctcagcctctcgagtagctgggactacaggcacgcgtcaccaggcccagctaatttttgtatttttagtagagacagggttttaccacggtggccaggatggtctcaatctcttgacatcatgatccacctgccttggcctcccaaagggctgggattacaggcgtgagccaccacgcccggcctcactgaagggatttttttaatgtcacgtggctctcacaggtgcggtgtgtttgggtgcaagtgaagattacgactgatgcttaaaaacaaatgtaaaattccaggtggttgttgctatggggagcagctttaggacaatctgagtggtttcagttgcaagagtgtgcgtgtacgtccaagtgctacagtcaagattcaactgctggctttgagggcctctttaagaacagtaatgataacctaaggcagtttaacagtatggaatggttaccttttagaagttaagctatgggcatggaagttcaatcagtgcattgaagtttttcctttatctctcctatggttaatggtttctgcagaaaaggaccaattgatttctttctaaaacgttgcttcagggtgtagagacctttataggtcatgtttcaacttacagaaaatttttatagttcaaatataaattaagttcaatgtggaatttgtaatagaatttcaggtgaagtaaaatttccactttccttaggctgtttgcagtgcccagcaggccccatgatatcgagatggaagttctgttaaaggaggagattgctcagggatgggcagaataaggaatatgggcagctcaggctaatgatacaatgattgagatgtagaaagagggtcaggcacgggataacgcctgtaatcccactggcttgggaggcccagacaagagaatcgattgaggtcagaccagcctggtcaacagagtgagacctaacctgtacaataaaaaaaaaa

SEQ ID NO: 49412 - DNA, 595 bp, Homo Sapiens
tatgtatatttaactttgtatagcccatgtacctaccttgtatagaaaaataattttaaaaatttgaatggaagggggtaaaggaagtcatgaagtttttttgcatttttatttaaatgaaggaattccaaataactcacctacagatttttagcacaaaaatagccattgtaaagtgttaaaatttacgataagtattctattggggaggaaaggtaactctgatctcagttacagtttttttttcctttttaatttcattattttgggttttaggtttttgcagtcctatttatctgcagtcgtattaagtcctattgctagaataggttactacaaaaaaggttatattctgaaagaaaaataactgacattatatataaccaattaatttaaagtattgccatttaaattacacactgagagcatgtcctatgcagacatagatttttctgttcatttatttttcttcattgcagtggattgatttgataaatagatgtgttgaattactacatttgctgtacatattatttaataaactttattcagaattgcgtggctcaacacacacaaacacaaacaaaaaaaacaa

SEQ ID NO: 49413 - DNA, 500 bp, Homo Sapiens
tctgagcccagctcccgtttaagtaggcacctaaaagtctgttgaaaaatacaagggagtgacctgagaaaactgccttcccaggccagctgctcaatagaagcgtctgcgtcccttgtcccgtcttcggagctccccgtgggtgctgtagccccactcacttccctgacatcaccagagcacatgctcagtatgttgccacctcccaaatccagaagggtgtggtcttagatgccatggaagcgattctgtacaatgccgagtcagtcacaggctgatgtggcagctggtggattgtgtcactgtgtcacccacctccgcagcaggcctgctccctccctgggaaagagctacttcagggtagggccacattgccaaggtatcttgagatccattcatgccaactttcattttcatggaaactcgtgaactcgtgctggaacatctttaaccccaaatcaggaatttacgtctttgttattagcagggacacttaaaaa

SEQ ID NO: 49414 - DNA, 1061 bp, Homo Sapiens
  misc_feature (819)..(825): n is a, c, g, or t
  misc_feature (827)..(827): n is a, c, g, or t
  misc_feature (829)..(830): n is a, c, g, or t
  misc_feature (832)..(834): n is a, c, g, or t
  misc_feature (836)..(836): n is a, c, g, or t
  misc_feature (847)..(848): n is a, c, g, or t
  misc_feature (852)..(857): n is a, c, g, or t
  misc_feature (859)..(862): n is a, c, g, or t
  misc_feature (877)..(879): n is a, c, g, or t
  misc_feature (881)..(883): n is a, c, g, or t
  misc_feature (909)..(909): n is a, c, g, or t
  misc_feature (913)..(913): n is a, c, g, or t
  misc_feature (915)..(915): n is a, c, g, or t
  misc_feature (921)..(922): n is a, c, g, or t
cggtccggaatttcgggattaaatgccagggaatctgatctggaaggcagatgggagggggctggtctggctgtggccaccgtcacagtccaggatgaagaggagtacagggtcctgtgagctgtttgaccactgttctaagactatgtgtgcccaaaagcacataagcatctatgttgagagtaagtttgtatcctgcgttggtctcagaaagaacgtgaatgcttaagattttgaaagtacataatattttatactttgggagagagctttaagagtccctggaaatactttttaatttttttaacttaaaattcaagagactgaatcacttttctcattgattaaatgtaaagattattgagaaacctatagtaaatgaaatttgtgagatgttttctcaaatatatgctgtgcctgtacttatatacagtctttcaagagagatacaaacaaggcagaaacatttaaactagtattaaaggtagtttaccaaagcattttttgttttcttaccttgaaaacacagaaccgttaattccttggtttaagcagttgctaagttttgtaattttaggctcagaggaccataggaggttttaagatttatgtttagtccgataggtgaggtctttgatattttgaattttaactccttttatgatacatcacagtaacctcatttttgaagtctttctttgtactttaatgttctctctgttctaatagttgaagtatgagatgtaactattataaactgttgctgaaaacataaatgtctgtaacttacaaacatgataaataaattaaaaattcccnnnnnnnanannannnanaaaaaaaaaannaaannnnnnannnnccaaaaaaaaccaannnannnaaaaaaaaaaaaaaccaacccaaaanccananacccannggggggggccccccaaaaaaaactcccctcgggggggccgacctttccctccccccctttttttttaaaaaggggcgcccctatggggggggttaaaaaataaccgcgcgcgcgccgccttttcaaacaccgcgtgggg

SEQ ID NO: 49415 - DNA, 737 bp, Homo Sapiens
  misc_feature (10)..(10): n is a, c, g, or t
cagtctattntggaagctactatgaaaaagatatactgcatcatttcctaggccttctcccttgttccctggctctagcaacactggggaccctcattgctgtctgaggctctctgctcttgccattgcccctgtctggaaagctctttatccagatgttacttaagcagttcctttttgtcattcgcttctctgctcaaatgtcacttcaaagagcctgcttctgaacagcctgctcttgagaataaggggaagaagcagatggagatttctgggtttttttgtaataaatgctattaataaatacttatggtactatctgactaaactgcagatatttatcactttggtaaatgtttacatttaaaccaaatttaagaagaaaaatgtttaaaaaactacacccacatccattgtcactttttgtctatcacctgggcttcaaggctttatcattatctgaaattatctcatttatttatttgtttattcatttattgtctatgtccactcctgtagaatgtaatctccatggcagcagggactttgtataacaatctagttcattgccatatgcctagggactataacatagaagctgttcaattaattgttaatcaatgaataactgtaataagatacttgagaatggttgtctttttgttaggaaaagactaagtactataatcgcaatctacataattttaaagatattcactcctgagtaataaattatt

SEQ ID NO: 49416 - DNA, 686 bp, Homo Sapiens
acggaacacagctatttccctatgcaaggtacagccttacaaagatttctgcagtgatttgtgtgaagaagagaatgtttgtctttttcaatgaagctttgcagatcaccatgtggttgaaggttttagttgtggacacagtggtccctccttaatgatgaagatcactgccttgggcttcatggaaaacaggcccagcctggggctgcgtttggatttattgtttttattccacacttcctacttggtctctggaagttttaccacatgtaacagattcctttatatgtagtgaaaatcactatttgtagaaactgtcaggtcaaaatatttaactgactgttgacatgtattttcttttttccttgtttttgttttttggggttttctgctttaagatatataccactatgtatatccagttaactgagagaattttgactctcttaataaaactgcattaagtttttgattttgtagaaattagcttttgtctaggcaactagtggttatactctgcaaatattgtaatgaatttttacttttttgatttttgtaataaaaattggtgcagataaaatgtcaaatgaacaaaccagtgttctaagagtgttactaacattttgttctaaaactgtccttcacaaattgaataaaaaactctcacactcaaaaaaaaaaaaaaa

SEQ ID NO: 49417 - DNA, 707 bp, Homo Sapiens
acaggatgggtcctctcatacagatgggatggggttagaaagccagagccagtttttccatctggcgtttcctgtgtcctccaggtttatatgggaatcgaaacagttgttaatctgattgggagagttccatgggcagatttcccttcctgaaggccaaaacggagaactgctctctttaattatttcaagagtcaagaccaaaagtttgctcagcatcacactacatctcaaaattaatgttgccaacttaattttgtgcatttgtgtcagaatgtttagtttacaaggttgggggctctctttgcttcgagaagtaaacctaataccatttttttattgtttaaagctgcattcaacgtcaaaattaccttgggtaacttttgataacttacatgtgtggacaaagctaatagtggttttttaaacagcaccttgcctgaacatgactttaaagaaattaatatattgaaaacatgtttgaacccttattttaattgcaccattaaaacatttgacttaaattggtttgaccagttccaaagaaaaaaaaaaagagaaaaaagaagaaaaaaaagaaaagaaagaaaacagaaaaacagaaaaacgaaacacaagacaggacaacgaagcataaggaagaagcgaagcagcagggggcgaaacgcaaggggagcgggagcggcccgtacgaccagggcgctgcg

SEQ ID NO: 49418 - DNA, 1002 bp, Homo Sapiens
gaagaggctggagcagaccaggaagaaggcagaagccgtggtgaacacagtggacatctcagaacgagagaaagtggcacagctgcgaagtctctacaagaaggctgggcttggcaaggagaaacgccatgtcacctacgttgtagccaaaaaaggtgtgggccgcaaagtgcgccggccagctggagtcagaggtcatttcaaggtggtggactcaaggatgaagaaggaccaaagagcacagcaacgtaaggaacaaaagaaaaaacacaaacggaagtaagcagagctgccaggctcccaggagagcatggggactaggaggaagggtgtggcatggctcagtctggcccccttgattaccggcctagcccctgctcacatcacagctgtctgaagaacagtgaggtggagtgcctagaactcccgtggtggtcctgagcagagaggaggatgtcctcctgcctgcctgaaggtctcccatgaaaacactgctgaactgtgttgacactcatgaccctttttttaaaccgttaaagggaagttcggtgttggagcgatactcaatgtagtcagtctacacctggacgtgtgggccacttaagccctccccagccccatccttattcctaaattaagaccaggataatggcaaaaacaagaaaacaaaagacaaaaaaaaaacgaaaaacaaaagggggcgcgccaaaaagatacccgcgaggacacacagagaagaaacacaagttttagacaaaggtgtcccataagagaagtttataaaggcaggcagacgcgcgcgagtttaaaaaaccgcgatggtgagaaaccggccgtgagaactctgtggacgaggcacccacccgagggggcacaaatgagggagaaaacctgatcgaggattaagccccagaagaacaaccaacacagcagtaatggggaccccggcctactggtcgggagcaaaaggtgccagaatatttaaatacgcacgcgataact

SEQ ID NO: 49419 - DNA, 581 bp, Homo Sapiens
  misc_feature (24)..(24): n is a, c, g, or t
  misc_feature (30)..(30): n is a, c, g, or t
  misc_feature (37)..(37): n is a, c, g, or t
  misc_feature (39)..(39): n is a, c, g, or t
tgccttgtaatcccactactcagnagctgnggcaggnanaacgcgtgaacccgggcccggtggaggctgcagtgagacgagatcgcgccactgcactccagcctggcgacagagcgagacaccgtctcaaaaaaaaaaaaaaaaaaaaaaaaaaaagaaaattgtgcaaagcataggtaaatatttttctttattaagcttctcactgagaagccctctttattttggtaaatgtcactctgtttgttaggagatgtctgcttttccatgaaatgaaatagtggctaaagccctgaaagaggcaagactacaatgggctgaaacagttggtatagcaaccccagagaagtgcttcattttctttttatagtagaagcaggtccatgtcttttgtggtttcctgcacatctttggagtagttatgacttctcagtttttccccccttaaactgcattgcctattcttttttcctgacatgctatcaggtatcagtgtgttgaatacataatgcttgtgtatcagacttacgttactgtcatcaccattaaaagaattgcagccttgtgccccatgaccttca

SEQ ID NO: 49420 - DNA, 706 bp, Homo Sapiens
ccttataaaaagtcaaagcctcaaagaaatggcacaaccatgttcttcggcactcaggctcctaattgcagatcctcacgaagggtggtatgtggagctggaaggtcttgtggccacaggacatgctggtgagccctgagctggccttgtgcagagggctccgttcaaaggctcggggtgtctttgaggttgtttatcaagctggggaactcttccaagtctgacaatgtttcgaaccctttttgcaaggttgcactattagtataccatcatgtccggaaaacttttaatcttctcaaatatctgatgtaactaccagaaagtcccttacttcctatgaccaatcaggaccaagtcttggaggtgatgtgttacattacgtgcagcacaatagtaccgatcagttaactcagcgctgaagggcttgttttatgaaaggtactattccttctttcacattaactggaaacctctttttttacctgttgttcacaactagttttcttattgactgtattggactgtctcttcttgtagagactgattttggccaacatattaatgcatgttttatgcaaaacacaaatatgatattggttgcttttaaggagttctggcattgtatgtgcatttttgtagaaattgttactggacttataattacatacttaactctgatcaggtttctgtaaaatttaaataaaac

SEQ ID NO: 49421 - DNA, 578 bp, Homo Sapiens
acagcttctgctcccagatctgtgacccccggacgaccggcgcgttctggcagacgtggaaggactttgaggtccggcatggcaatgaggacaccatcaaggaaatgctgcgtatccggcgcagcgtgcaggccacgtacaacacgcaggtcaacttcatggcctcgcagatgctcaaggtctcgggcagtgccacgggcaccgtgtctgacctggcccctgggcagagtggcatggacgacatgaagctgctggaacagcgggcagagcagctggcggctgaggcggagcgtgaccagcccttgcgcgcccagagcaagatcctgttcgtgaggagtgacgcctcccgggaggagctggcagagctggcacagcaggtcaaccccgaggagatccagctgggcgaggacgaggacgaggacgagatggacctggagcccaacgaggttcggctggagcagcagagcgtgccagccgcagtgtttgggagcctgaaggaagactgacccgtccctcccccctccccaccccctccccaatacagctacgtttgtacatcaaaaaaaaaaaaaaaaaaa

SEQ ID NO: 49422 - DNA, 794 bp, Homo Sapiens
cgtgtgaagtaggcgctggcaacgcggggttacccgctgttattgaggagtaacggcccagcggaccacccaggcttgaggcagcggcgggaaccactcggtttgctgcgataccatggaaggaggcgggggaagcggcaacaaaaccacagggggattggccggctttttcggagccggcggagcaggttactcgcacgcggatttggctggcgtcccgctaactggtatgaaccctctgtctccttatttaaatgtggatccacgatacctcgtgcaggatacagatgagtttattttacctaccggagctaataaaacccggggcagatttgagctggccttctttacgattggaggatgttgcatgacaggggctgcgtttggtgcaatgaatggtcttcggctaggattgaaggaaacccagaacatggcctggtccaaaccaagaaatgtacagattttgaatatggtgactaggcaaggggcactttgggctaatactctaggttctctggctttgctctatagtgcatttggtgtcatcattgagaaaacacgaggtgcagaagatgaccttaacacagtagcagctggaaccatgacaggcatgttgtataaatgtacaggtggtcttcgagggatagcacgaggtggtctgacaggactaacacttaccagcctctatgcactatataataactgggagcacatgaaaggctccttgctccaacagtcactctgaagattttgccaactcatgaatggaggacacttcagtagtcatctagatc

SEQ ID NO: 49423 - DNA, 443 bp, Homo Sapiens
aaactgggagattttctgcagaaattgagttccagcctctctcgaacctgggaagacctggcaggagggggctgggctctcggctacagacttctccccaccccgtaggagctgaacgccaaccatcctgacccgccagtgctcttggtctcctgagtgtacccaggtcctcccaggtgcggtgtgcaccgagcgcgcctggcctgatgccctggcctgtgagctggggactcctgggccctgtgagcccctaggcggcaggcccaggaatggctgggtaggacagggaacacctttgccccacgtctggctgtgacctcggtgaaagccgacaggagagagatgggaccctcctcctcagtagtggctgccagtccctcgttgcaggacagggtcatcataaccataaataacccttcacgtgtcaaaaaaaaaaaaaaaag

SEQ ID NO: 49424 - DNA, 550 bp, Homo Sapiens
caaattcggcccaagggtcccactctttaaaaactggttccgtgaggaaaggcagaagccgttccgtgtctcttgcaggctgggccggcttcatgccagtgcgagggcgtcccgtgcccacgtacatacgtatgtctccatgagttctgggctccactggttccaattgagctccagccctggttttcctacccatgcagttagggactttaatttaattttttttttgtagggccaccgccttcaaacacaactgctacaacattctaataaaggctcatttaacccccaggctcctgtcgtgtgaatatcctcagtctgtaggaaactttttttgacacagcatagaagacctagttttggaaaacattatctaattttttgttgtgcaaatccccaaatttctcactaatttttgtttttttgtgcataacttggatgggctgaaggaggtgaggacagattggggaagggtggctttcattccaagatccagggatttggggaaaaggaaggaatttgatgttttttggggtgggaggggagggtg

SEQ ID NO: 49425 - DNA, 665 bp, Homo Sapiens
cccaaacttagctaagaaaatatctgagcacatccagaattaaatatcacaagttgttggaccaacaccttcaccatatctacagatgagtccctgacactcacatggagctgattgactctgatttgactcataattctaacagtttctgttttcagcttagtctacggcaacaaaataatagtacaggacccactgcagattggtgtagtaatacaagagatgtgaccagagatgagaagaaagagacccaaaaaatgatcagaagcagaaatgggagcccagaagtgcagctgaccagaagcatttcagtgtcagatcacacgcagcctcctctgtaatgagatcacagcacgtctcatcagttactggttttcattatggtgacactgaacactcatgaaaagttagcattgaaatatgttggtatctccaatttagaaaggtagtgatgatgggtacagtgtttttacggggaaaaaaagccaaaaaatgcattcatgtttgtctactcttaaaacccagctgtccaagaacgattccccaaggccctgtccatcatttctctttctatccttgaagcgcagtgtctgacacataggatgtgctcattgatgccagatgatgaaacttgaatggctggtttcctagggttctggataact

SEQ ID NO: 49426 - DNA, 845 bp, Homo Sapiens
ctgcatacaagtttcatccagaactaccacctgacattccttgctgaaacgcatctagttcccctgtttattcatatgcatattttttttctttttacccatttgttcatattaagaatgatctgattgaccgtgttggtctgtactgattcaatttgatgtggtgaaaagcaggttgataaatcattttatgtcaagggcagctttgctcatatttcccatgatttcatgtactgcattatttgagaagctgctcaacttgcaaaatcagttttcctctcaataaaattatagctctaatgtttgcatataagggaagtagttatcatgttagtaatacctctaatagtataaaccccaccccaaaattagccagtaatcctgtaggaaggtactgtatgatcaaatgtttaatcatataaatagaatgtaaatgtctcactgagcactgttttctagtgtatcaaaatgctcttatttcatcattcacttcactgtgctgttgttatgatgtgcttaacagggaacgtgattagtgaaaggaagataaacgtggatgttactccaaaacttcgtttaatgaatgcttaaagaattcaaattttatctgcctctcttgtaatttggatctcttcttaatgtacatagtgctaacatgaagacctttttctgcactatatgcaaacagggtaactaactaaaacaaagccactttcaatcttcaatccttgaaggtatatctaggtttatgacagtaattgtgtttacattttatggtgcctagtattgacaaaatgttatttccctacattaaacatgactccatagaccttttcatttgtggg

SEQ ID NO: 49427 - DNA, 758 bp, Homo Sapiens
  misc_feature (680)..(680): n is a, c, g, or t
aaaattcacctaaccccattcttaaatccagaagcagggagagggaggggagggggcgttctgtgaatacctaaccagtgcctgaacagagaggaagttattatttaccaggggaaatggtgtgcctacataaagtttagctgctttaaaaagaaagtagaaacaaaactggcaaactggaaataaatgtcatgacttgatttaatactcaaactagcggttggacaaaatgcaagcagcttggtgagtattagtgtctgttcctgggtgggctctgagttgatataaggagagggaactgcaataactgaaatgttggagaagcagttagccgttctccgtaaagggtctgccaatcctggttttccatgacttagctatgactgccgatgaattctcaatgctcgtcacttccagggatcttcagatgttaagatgtttggggaaatcacaaagagaagagactgtgttgagacgcattcatccttaagcaaaagctgagagcctgcaaatgctggatgaaagctacaacctttctaaaaaccattaaatacagactttttcaaagagcatccaacaaagtagaatcctgctgtcaagaaaagccaaacttgggcaataggaaaaagtcacgggaaaaatagagtagctcatacaattacagaagtagaatgatttanggattttgagagagtataatccaattattctctaaactattcagggatctattttaatacttgatgatcctgattctt

SEQ ID NO: 49428 - DNA, 573 bp, Homo Sapiens
tgggaggtggctgtactgaaactcatttggctgcatatatcagacacaagactcacaacgacccagaaagcattctcaaagatgatgaatgtactcaaacagaacttcaattaattgctgaagcattttgcagtgccctagaatctgttgttggctctttagaacatgatggaggtgaaattctcactgacatgaagtatggacacctttggtcagttcaggcagattctccctgtgttgctaactggccagatttgctttcacagtgtggctgtggattatacaatagccaggaagaactcaactggtctttcttaagaagcacacgtcgtccatttgtgccacaaagctgccttccacatgaagctgtgggctcagccagcaacctgaccttggactgtttgactgcaaagcttagtggcctacaggtggctgtagagacagccaatttgattttggatctttcatatgttattgaagataaaaactaagagaatagcatgttcgtattacaagagaaacaaataaactagtctgttggcattgaaaaaaaaaaaaaaaaaaaaaaaggac

SEQ ID NO: 49429 - DNA, 762 bp, Homo Sapiens
aagggctggacggtccggattcccgggactttcacctgtttagttcaactcaagcctccctgtgtcccagaccctcctgctgccaccaccacccaggtcctccctagtcctccagcgtcaacactatcccttgggagttgtagctgctgtcactgactcccggctatacatggcctgtcgaccacgttatagccctcaggcctgttgaacttgctctctaagagaggttgggaccaggctaggttccgggtgacgcccaggagaggtggtggccttcacacatgcacatggagttgaggaccagggagctgcagggaaagcaacagctataggtgccttgctcttctgtcggaggctgctgggggcaagagcagctgcacaaggccagggcaagtgctagggcccctcccccatcacatggtcacactgggacaggcgtgcagctcactgaactccaagcgagccagccctctcttggactagaaggcctactgtcagcccttcgcttacaaactgcaggctcaatccgaaggggacggccggcgggggctctcctagtgcccagagacaggcccagaggtttacaagttttctaagcttttgataatgtgaagctccaggccgagaggatgctgttgagcacattgcagctatgtaatttttggtgtatgtatgtaatatttaaggttggaaaaaaaactcaaaagcaaagatattaactcttattagaaaaaaagacaaaaaaaaagccaaagcatgatg

SEQ ID NO: 49430 - DNA, 858 bp, Homo Sapiens
  misc_feature (33)..(33): n is a, c, g, or t
  misc_feature (48)..(48): n is a, c, g, or t
attgttccttttgtcacaggtaaaatcagtgtntgggaattataattntgagaaaaatattacccagtaacattgaatgtagatggctaaacgattcttactcagtgtgatgtataatgatgcaacagggacccttgtattgtcatacgccaataaaatgtcacaagtaataactgctgttgtttgtttacctgtgtctatttcacacatcttatttctgtggcctattttagaatatcagcgcatctgttaggaagattactggtgtggtaaggcttgataaatgctttataaactccctcaaacctttctttactgtttttttgttttgtcttgtttttgtttttgtttttgtttttgtttttgtttttcccttgtctcccctgggaaaatgggaaattttacagttggtaaatctaagccaaaattattttgaaataaaggaattctggatgtccagtttagtcctcgttttcttacgttaatctgggaccttatcacccataatatggtgattacttctctttctaaaaacatagtagctagtaaataagtaaaaagaattgtcttttcattcactttaagtaagatgtggtataattcttaccatgtgccatcctgtcagttttaacaaagcattttcacagaaatttgtgtactaagacaaactgacacattttgactcatacaaatggcaaattagtccttaaaaattctgtgagagaaataactctgtgtgtacatacatatgcatgtaaagtgttgtgtaagatcattggtaagcttaattatactggataattgtaatgttatataacaaattttctttatataaaaaaaatgcctgcaattatttaa

SEQ ID NO: 49431 - DNA, 528 bp, Homo Sapiens
gctcgaccttgaatctgataggccggccttctacagaacacagctggtttcctgggtatgcctggactgttgcccagtgtaagatctgtgcaagccatattggatggaagtttacggccaccaaaaaagacatgtcacctcaaaaattttggggcttaacgcgatctgctctgttgcccacgatcccagacactgaagatgaaataagtccagacaaagtaatactttgcttgtaaacagatgtgatagagataaagttatctaacaaattggttatattctaagatctgctttggaaattattgcctctgatacatacctaagtaaacataacattaatacctaagtaaacataacattacttggagggttgcagtttctaagtgaaactgtatttgaaacttttaagtatactttaggaaacaagcatgaacggcagtctagaataccagaaacatctacttgagtagcttggtgccattatcctgtggaatctgatatgtctggtagcatgtcattgatgggaca

SEQ ID NO: 49432 - DNA, 682 bp, Homo Sapiens
gaggccaagaattcggcacgaggcctgttctcggtgctgggagtacagcagtgagcaaaggagacaatattccctgctcacagagatgacaaactggcatccttgagctgacaacacttttccatgaccataggtcactgtctacactgggtacactttgtaccagtgtcggcctccactgatgctggtgctcaggcacctctgtccaaggacaatccctttcacaaacaaaccagctgcctttgtatcttgtaccttttcagagaaagggaggtatccctgtgccaaaggctccaggcctctcccctgcaactcaggacccaagcccagctcactctgggaactgtgttcccagcatctctgtcctcttgattaagagattctccttccaggcctaagcctgggatttgggccagagataagaatccaaactatgaggctagttcttgtctaactcaagactgttctggaatgagggtccaggcctgtcaaccatggggcttctgacctgagcaccaaggttgagggacaggattaggcagggtctgtcctgtggccacctggaaagtcccaggtgggactcttctggggacacttggggtccacaatcccaggtccatactctaggttttggataccatgagtatgtatgtttacctgtgcctaataaaggagaattatg

SEQ ID NO: 49433 - DNA, 600 bp, Homo Sapiens
  misc_feature (28)..(28): n is a, c, g, or t
ctggggttggcagtctgcttaacaagangctgggaccacctctgaattagtgaatcagggagctgctgtgtgatcccctcctccaggctttcttggagtttgtctctgccacttcctcaagccctttaaaaaggctcctgtgctttagagagtwaggatgttaatgaccgttcttttttcttgtactttattaagtactagtcttactagactagtgcttaagtggcagtgtctgcctttgccttctcccatctctttatgctcctttcttccaacttctcacgtttctgtttctcgcacggccaggtgtccagcatcccatgctgacttgcggttggccaatcccctcctcgtagatttcctccacattttcctcttcctccttttcctgtgggaagttctttttctgggctgtggctggtcttacgtagttcggtggaaaaagtattgaggtagtgttagatactgtgctgcacctccaggagtgtccaatcttttggcttccctgggccacactggaacaagaagaactgtcttgggccacacgtaaaatacacggacactaacgatagctgatgagctaaaaaaaaaaaaaaaaaa

SEQ ID NO: 49434 - DNA, 798 bp, Homo Sapiens
  misc_feature (750)..(764): n is a, c, g, or t
  misc_feature (766)..(793): n is a, c, g, or t
ggaccggtccggaattcctgggatggcttgggaaccgacccagtgatcatgcctactttcttctttgtatctccctccttcccagcccacccgggcagcagactctgatggaaggaaggtgccgtaggtgggcttttagaaactaacgggactggttttcaaagcagttatcttgggaaactgtttattccagcgatgtgacttttttcagaatatttcttggaatcatattcagagtctggggctgtgtgttgagcagccttaaggatgctagacactcatttagtgcccagggagtccagcgaatgacgtctgtggccaagcgaggtctcaggtgcaaagcaaaaggaccatttaaagtaaaatagcttggattcaatcatgtgacttttaaattggctcagaaagcaattttgtaatttcagagagtgttttgagccatggccacgttgtcattgtgagtctatagcttgactccttggagaacaatattcatttggttgtggagactgatttgctgggagaaatctgtcctgttactttctggtcatcccaggttctgacttttaccaggggcaaaaaaaaaaaaaaaaagcaagagggagataaatcccatctgtgagtttgtcttattggcgcctttttcctcagctgtcttccaagtattatttttactgttaaaaaattttttaaaaatgtgaaatgtaatgtttttacagcaacaatatgaaatatattttataaggaatnnnnnnnnnnnnnnncnnnnnnnnnnnnnnnnnnnnnnnnnnnnaaaag

SEQ ID NO: 49435 - DNA, 429 bp, Homo Sapiens
tatacggctgctagaagacgacagaagggttcacgtcaccttgatgaggggactcgaaggtgaatttgcactgggttccctttcagccaagcatcagtttgctccaacctcttgagcacacagaagttgagaaaaattgttattttagcaagaacactagaggactgtgctgttctctgaaccacgttcatctgattatgcatttgaggttatgaattaatccacgacacaggaacactgaataagttgtgctttgccagtcgggctgcctgtgttttatctgaacaaaacatctgactttaaccccaggcagatttctcttcaggttgtaattattctggaacaaacagagaagttgggaaggggcatcccagtggggacaatgatacctcctgtgtggaaggattcccactggaaattttcaaaaca

SEQ ID NO: 49436 - DNA, 699 bp, Homo Sapiens
tgttctcatttgtgttcagttttgtgcagcattgctagcactgcttttgtgaccagaaaaggccataacatggtccaggatcatcattcttctgactctagatgggacacttgacagtgacttgaaacatttgcatattcaggaatgcatgagatttcaagagagcctacagtatgaaatcattttcacaatataagcagcttgcttctgaaatgctgtctttcccagtagctactcacctgcctctggtggctgggattcagatgccacaaaactgtcagtatctatagaccaggtctgtgccacctcctctctcctctgtgctcagtgaggaggcagtaaatgaagttacaggctagcacaatacctaactcatgtttcccagtacacctgtagatattactgtacttttatgttctcaagaaataagttgttgcctattcagtgttacagatttctttgtttctttttaattaaaatacaagaagcagctgaggaaagggagacaaggtattttatttctgactgattttagaaaaaacttgtgtacatgtgtttggaactgttgaaatgccaagttttctgtattaagtgttttgtaattaactttcagattttcttgttttttaagaagttgatgtgcttgtttgacatttgtctcatttaaactttttctacgttggaaacaacaacacaaaa

SEQ ID NO: 49437 - DNA, 502 bp, Homo Sapiens
ccacgcgtccgaacagaagatgtcagtattgaatatggtggtgaggcgtgaccctggcaacactgaacctgtgaaagccaaggaagagctcatatttcactgtggattcaggcgcttccgagcctcacctttattctctcagcacactgcagcggacaaacataaattgcagagattcctgactgctgacatggccctggtggcgacagtctatgcgccaatcacttttcctcctgcatctgtgctgcttttcaagcaaaaaagcaatggaatgcacagcctcattgctacaggccatcttatgtcagtagatccagacagaatggtcatcaagagagttgttctgagtggtcatcctttcaaaatttttactaagatggcagtagtacgttacatgttcttcaacagagaggatgtgctgtggtttaaaccagtggaactgagaacgaagtggggccggagaggacatatcaaggaacctttaggtacccatggccacatg

SEQ ID NO: 49438 - DNA, 618 bp, Homo Sapiens
agtagagacggggtttcaccgtgttagccaggatgttctcgatctcctgacctcatgatccgcccgcctcggcctcccaaagtgctgggattacaggcgtgagccaccgtgcccggccctaaaatgaaattattaatgttggttctgaaacaacctcttagcattcagattgtattttaaatacttaaacacaccaattgtagaaagcaaccctttatttttagcaagtttggtttactcttctcccatgagattttgtctttctacattaactagtaagacataaagatttgaaactggaactatattatactttttaaccaatctctgtggcttcactcatgaaatttacttcagttaatatgagactgggggttaagttgtaactaatatgcaaaattgctttgtatatttggtgattttgtaatgtaagtgaattgattcttatttcactgatactattaatcatgcagtgtacaattcaaaatcatgcaatgtttcactttagaattggatttgaagaactcgactttatgtgatcatggtattggtatacatgtggggtggagaacttattttttcattttgtcacaataggtatatactgacaaggcttca

SEQ ID NO: 49439 - DNA, 522 bp, Homo Sapiens
ctccagacccctgcccaggctcaggcccatgaggtatggagacaccctggcccccaggagctggaggcaccgcccactcccctggcattccagctttgcaggtgaccctcctctacccaaagctctgtccccctgctcccactccagaagaactgcggcacgtgcttcgggcagcctagccacaggctttgagcgcctgcattcctgggggctggagggtggggtgccaaaggccctgagcaaaagccagagctcctctcatcaaagcctttacaaggtgctgggcccagaggctttgccttgacagagtggcccagggtttcaagggaggaggaacctccccctacctaggacccttcctgtggggggtctacagagtcagggacagaagggaagggacccacaggaagtcacagtggtgcccagggatgtgtcagcccccagccacggggacgcgggattcaagaatgaagtaaatacagtcacagccccaaaaaaaaaaaaaaaaaaaaaaaaaaaaaa

SEQ ID NO: 49440 - DNA, 700 bp, Homo Sapiens
  misc_feature (15)..(15): n is a, c, g, or t
  misc_feature (385)..(385): n is a, c, g, or t
  misc_feature (652)..(652): n is a, c, g, or t
  misc_feature (677)..(677): n is a, c, g, or t
  misc_feature (688)..(688): n is a, c, g, or t
  misc_feature (700)..(700): n is a, c, g, or t
tggaatgtctttagnaggcagtaacacatagggaactgtcatctcttatgataacagtgccttctggaatacctcctgaaggacctgcctgaaactgttttacagctaattttcaaatttttaaataagtggatgagtacactctaaagataaaaagtataggacagcaaatacataaactggcacatagtttattatcacgtattatgtactgcacataattgtatgtgcttagcttttatactactggcagtgcggtaggtctgtttacatcagcatcaccacagacagatgagtaatgcattcattacaacagctgtgacatcactgggctacaggcatttttctgctccattatgtgtaatgttaggggaccatggttgtntatgtggtctgtcgttgacccaaaacgtctttttggggcacatgactgtacataaatgcataaaagatgtgactgcagatgactcctgtgttatgccatccaagattaagcaccctagaataaagagaaattccagaagtaccttgattggccacataggacccaagaatgtgatgtgcctactcttctgctccgctagctaggcagatagggtacttgattggcagcaccaccaaaatcacatggttggaatggaggagaagcagntgccctccaggaaaggtggcagtgntgctggggtgntttaacctttgn

SEQ ID NO: 49441 - DNA, 647 bp, Homo Sapiens
caggatggagcagagcccagcgccaattccgtgtcagcccacaacctgctccggctgcatggcttcacgggccacaaggactggatggacaagtgtgtgtgcctattgaccgccttttccgagcgcatgcgtcgtgtcccggtggcgttgcccgagatggtccgcgccctctcagcccagcagcagaccctcaagcagatcgtgatctgtggagaccgtcaggccaaggacaccaaggccctggtgcagtgcgtccactctgtctacattcctaacaaggtgctgattctggctgatggggacccctcgagcttcctgtcccgccagctgcctttcctgagtaccctccgacggttggaagaccaggccactgcatatgtgtgtgagaatcaagcctgctcagtgcccatcactgatccctgcgaattacgaaaactactacatccatgactgccccaacccccttggggtggggcagaaggtgaagcatcccaactgactagagactcaggccctgcagggccctatagaacctgtggccatccctgagcaccctgccaccaggtgacctcggccatactcactgccccccttgggcacccactcaccctagaataaacttaacagtgtcccgtggtaaaaaacca

SEQ ID NO: 49442 - DNA, 875 bp, Homo Sapiens
aaaacaaaaacaaaaacaaaaaacaaaatactttctccttctatcaggtctaccctcattcaattcaacagtgcaaaaaagagcactcacggaagaaggagatggaagaatagccatcttggcagaaataatgatatgtataatttttttatttaattaaaattgtattatgtaatatttgatactacaaaagataatgcaacatgtttgtcaattttttttattatactttaagttttagggtacatgtgcacaaagtacaggtttgttacatatgtattcatgtgccatgttggtgtgctgcacccattaactcgtcatttaacattaggtatatttcctaatgctatccctccccactcccccgccaccccacaacaggccctggtgtgtgatgttccccttcctgtgtccatgtgttctcattgttcaactcccacctatgagtgagaacatgcggtgtttggttttttgtccttgtgactgtttgctgagaatgatggtttccagcttcatccatgtccctacaaaggacatgaactcatcattttttatggctgcatagtattctgtggtgtatatgtaacatgcttgtcaatttaaaaacatgataagatgaacaccagtgaacacatcacctagagaatgaagcaaacatcaaaaattctattgcagcttcccgtgtggccctccgccatcccagctctctattccatgccagggatatcccattttgaacttcgtatttacatgtcaatgtgctgttgacatttatagggtaattttacatggtaaaactctatatatcctctatggggttggccaaaacataaaatatttagcccttgccttatttttacagtttttaccaaaac

SEQ ID NO: 49443 - DNA, 619 bp, Homo Sapiens
  misc_feature (586)..(614): n is a, c, g, or t
ggggaaaaatttcaacaaatcctgaagtctttctgtgaagtgaccagttctgaactttgaagataaataattgctgtaaattccttttgattttctttttccaggttcatggtccttggtaatttcattcatggaaaaaaatcttattataataacaacaaagatttgtatatttttgactttatatttcctgagctctcctgactttgtgaaaaagggtggatgaaaatgcattccgaatctgtgagggcccaaaacagaatttaggggtgggtgaaagcacttgtgctttagctttttcatattaaatatatattatatttaaacattcatggcatagatgatgatttacagacaatttaaaagttcaagtctgtactgttacagtttgagaattgtagataacatcatacataagtcatttagtaacagcctttgtgaaatgaacttgtttactattggagataaccacacttaataaagaagagacagtgaaagtaccatcataattaacctaaatttttgttatagcagagtttcttgtttaaaaaaaaataaaatcatctgaaaagcatttgtacagtannnnnnnnnnnnnnnnnnnnnnnnnnnnncatgt

SEQ ID NO: 49444 - DNA, 723 bp, Homo Sapiens
  misc_feature (690)..(694): n is a, c, g, or t
  misc_feature (696)..(701): n is a, c, g, or t
  misc_feature (703)..(703): n is a, c, g, or t
  misc_feature (721)..(722): n is a, c, g, or t
gtgccggccaaactgcataagaaggaaccgcagcactggccagtgcagtaccgtgaggccctagcagacgaggccgacagggccagagccaaggccagagctgaagccagtatgagggccagggccagtgctagggccggcatccacctctggtgagggttggtgaaaagttggccagtgggtccccgtgaggacgaactactgtcctgagtcataagtaatatgggtggggcgagggtcttatttctgtagaaatcgtgtgactttaaggatttagattttgtatcttatgttttgtaacatttaataattactgttaaaatgctgtttgtaaatgagattggtctactttttcctgtaggattttattgtagagttttgctggttttgtaaaatggatggaagaactttgtatttatactgtgattttgaacagattatgcaacattggaaggaaggctgtactttgatggtttgaaggaactcagcagtatgatgatctggttccaggggaaaaaaatagctggttggtgtctagccccccaacacttttgtctgttgtgtataaaagaagaaagactggcatgtaccttcatttgcttagctatttgagtatctagagaaaaattaaaatgcaatgagttagcagtataccctggcacacttaataaattaaacatttgtggcagnnnnnannnnnngnaaagaaaaagaaaaaaanna

SEQ ID NO: 49445 - DNA, 450 bp, Homo Sapiens
ttgaaagattcataaccaactattcactattataacatgtttcccagtgtaaatgagtaaggaaaaaaaaagtgtaacaggtggcgtgcagatgaggagtgaccctcatatttaagttattttatatttgactggacattgttcagaagtgtgctttaagggacacttgttggttgtctgcccagcatctctcaagaatatccctcctgtcctccacatggttgtgcagggccatgtgtgaagacagcatgagtcttaacccctcttttattttatttttgagacagagtctcgctctgttgcccaggctggagtgctgtggcgcgatctctgctcactgcaacctccacctcccgggttcaagtgattctcctgcctcagcctgccgagtagctggaattacaggtgtgcaccaccatgcccagctagtttttttgtatttttagtaga

SEQ ID NO: 49446 - DNA, 674 bp, Homo Sapiens
agtgatttgcatgtataatatcaggaaaattaagcatcccaagtgtgactggacaaagagagcagatgcaccagtgcctgtgccataaagttccgaatcccccatgtgtctctttcagagctggccagaccggaaataaatcattctcataaattcagtgtgtactcagaacacatacacaacaacatagggagttgtatgactgatacggaaaacttccagaaagttttaatcaaagcagtttaattaaggtatcaaaaatatctttgcttactatcaagaagtgtcaaataggttcagcttgctgccaaaatatggatcatttatgaagcaggttcatattttagaggtgttaataaaatcctcatcggaaaagatccaaagtgcaaggatttgattataaacataatttcctagactgaaagtttttggaaaagatgcagggtctgagtcaggccttctggttatattgtgcagtttcaaaagaactatttaaaactcttgaaaactcatgtaaataaaaatcatagggtgaaaattgtatttgttaaaataccttaataatttaaaatgacctgatttcctggaaaattttattattcaaaaggtggaggcattgtaaaaaggaaatagtgatgtaaataaacatgttctctttcaaaaaaaaaaaaaaa

SEQ ID NO: 49447 - DNA, 884 bp, Homo Sapiens
agcccacaccaagactaatctcagccaaacctgctgcttggtggtgccagccccttgtccaccttctcttgaggccacagaactccctggggctggggcctctttctctggcctcccctgtgcacctggggggtcctggcccctgtgatgctcccccatccccacccacttctacatccatccacaccccagggtgagctggagctccaggctggccaggctgaacctcgcacacacgcagagttctgctccctgaggggggcccgggaggggctccagcagaggccgtgggtgccattcgggggaaagtgggggaacgacacacacttcacctgcaagggccgacaacgcaggggacaccgtgccggcttcagacactcccagcgcccactcttacaggcccaggactggagctttctctggccaagtttcaggccaatgatccccgcatggtgttgggggtgctggtgtgtcttggtgcctggacttgagtctcaccctacagatgagaggtggctgaggcaccagggctaagcaattaaaccagttaagtctcccaaaaaaaaaaaaaaaaactcgactccgaggtccccgcgccagagacgcagccgcgctcccaccacccacacccaccgcgccctcgttcgcctcttctccgggagccagtccgcgccaccgccgccgcccaggccatcgccaccctccgcagccatgtccaccaggtccgtgtcctcgtcctcctaaccgcaaggatgttcggcgggcccgggcacccccgaagccggccgagcctccaggccgggagctacgttgaactacgttcccaccccggcaccttaaagccctgtgggcaagcgccgcctggcgcccccaaaaaacccaaa

SEQ ID NO: 49448 - DNA, 412 bp, Homo Sapiens
  misc_feature (334)..(334): n is a, c, g, or t
  misc_feature (397)..(397): n is a, c, g, or t
  misc_feature (411)..(411): n is a, c, g, or t
agatggtttctctccccttcctccagactgtttctaaaagaagacagtaagtcaggttcttaactctcttaaaaatcattttagttaaacataagtttgcatatgttaattgaataaacgttaagtgtgaagtagaatctgcagatcccttaagtcccatataaatgaatgaattttgatacaaagttaatgtttagaatgttgataatggccaggtgtggtggctcacgcctataaattccagcactttgggagggccaagacaggcagatccacttgatcaggagttcaagaccagccggccaacatggtgaaacctcattccatacaaaanttaggcagtgtgttagtgggcgggcacctgttattcccagttactcgggaggctgaggcgggntcctcagtttgaant

SEQ ID NO: 49449 - DNA, 960 bp, Homo Sapiens
  misc_feature (858)..(858): n is a, c, g, or t
tctttgtggccaccgttggcatgaagtgtatgaagtgcttggaagacgatgaggtgcagaagatgaggatggctgtcattggaggcgcgatatttcttcttgcaggtctggctattttagttgccacagcatggtatggcaatagaatcgttcaagaattctatgaccctatgaccccagtcaatgccaggtacgaatttggtcaggctctcttcactggctgggctgctgcttctctctgccttctgggaggtgccctactttgctgttcctgtccccgaaaaacaacctcttacccaacaccaaggccctatccaaaacctgcaccttccagcgggaaagactacgtgtgacacagaggcaaaaggagaaaatcatgttgaaacaaaccgaaaatggacattgagatactatcattaacattaggaccttagaattttgggtattgtaatctgaagtatggtattacaaaacaaacaaacaaacaaaaaacccatgtgttaaaatactcagtgctaaacatggcttaatcttattttatcttctttcctcaatataggagggaagatgtttccatttgtattactgcttcccattgagtaatcatactcaaatgggggaggggtgctccttaaatattattggattggtttttcctggtttttctattaccaattgaccgtaaatactattctcacttatgtggtctggcttctttagtttctcttcacttgcttcggtttttctccctttgtggcgcgtgtctggggattttcctttcggccttttcttgttcgggcattttttgccttctatatagtgggggcttggcccgaccgcccatttcgggggttgtantccggggcctatatatattgtcccctctcgcgcggttacctttgggtggttctccacactatccctgtcgcggtaatccccgtgcgtgtatcccccgcagtg

SEQ ID NO: 49450 - DNA, 542 bp, Homo Sapiens
cttgcctggcttccttcttttttgagggaaagagggtggggctgcaggcagtctactggcaggacgggaggctgagtcctcagggtctcacaccctcagtgctgatgccatgccaactgcctgggacaacaccaacacgtaaggacctaattaaaccaaaccagagtcgggtgtagaccagccctgggatttccagctgtgactgggccagggcacacgttggtctcggcagtggctgtaaggtcaccttccttcctctgatgctggtttcaaccatctatatatggcatccacgcatgggatctgcaagctggagccctcctacccgcaggcttgagcacagcatcatccagccctggggaggcgcacccttaagcaagacagactgggctgaggctgacaggcagaagactaacagagcgcagtctgcacacgcaggttctgggcgacctctggccctggccatctctgcactaactcatctgaattatgaaggtggcagtcttggtcagtagtttaaagagtttccctactttttaacc

SEQ ID NO: 49451 - DNA, 453 bp, Homo Sapiens
tttttttttttttttttaaccgtaagtgcacgatgcaggtgcataggccccagaccaaactagaccaccagcatgttcatgtccagacctcggcagtggcgtgcactgcttgtgcacctcagttcctccagtgttggtttgtttgttttttaattcagcatcctgctggttttactttccaagcaagatctgttgcgactcccaaatgcgttttaatgagctcatccttatttgcctttcttcttacgtattttgtgtattagattgtgcaggagatattctagaaggcattaatggtttgcattcaaaacgatgtggtttgtccaagttattttctgtctttattactgagacggattaatctccttatttttttcttgatgatttgaagttgtaacagttgtccagctattgcttaataaaattttgcagatcaaaaaaaacctcgtgccg

SEQ ID NO: 49452 - DNA, 553 bp, Homo Sapiens
gagactaatataacttctgataatcataaaggcaattcaaccctttctgtgccaaagagatgtgatgcagatgctcctgaagatcagtgtactgttacccggacatacctattccttcacaagttctggttcttcagtgctgcttactattttggtaactgggcctttcttggggtatttttgattggattaattgtatcctgttgtaaagggaagaaatcggttattgaaggagtagatgaagattcagacataagtgatgatgagccctctgtctattctgcttgacagccttctgtcttaaaggttttataatgctgactgaatatctgttatgcatttttaaagtattaaactaacattaggatttgctaactagctttcatcaaaaatgggagcatggctataagacaactatattttattatatgttttctgaagtaacattgtatcatagattaacattttaaattaccataatcatgctatgtaaatataagactactggctttgtgagggaatgtttgtgcaaaattttttcctctaatgtata

SEQ ID NO: 49453 - DNA, 696 bp, Homo Sapiens
  misc_feature (625)..(625): n is a, c, g, or t
  misc_feature (639)..(639): n is a, c, g, or t
ctgactcttcatttttaagttccttgttacatcatggtcattttctagttttttaccagactcccatctcacaataaaatgcatcaacaagcctgaactgctgtcattcttttcatcattatcagtattttctttggaaaactgtgaaatggggtacattgtcatcctgcatttgattcatcttgagctgaatttgggtaacactaaatgttttagacattctccactaaattatggattttcttgcggctaaatgtttctggagaggtcagagttgacaaaacctcttcacaggttgctccttcttcctgaaatccttaatcctccgcatttcatgcttcaggtcatttcagggaagcctgggtttagatgcctttctgactctcagctcctgcacttctgtcatcatacctctgatactattatttatattccttccccactaggaacaggaaccacatttgtcatagtcactctcacattcctcactgcctaacagggtgcctggcataagttgggacaacagatatttgttgaataaaaatataatttgcatgtttatggagctcagctatgttctcactttttttgcttctaattccagaatatatgttaaatgatctantaatttgattattntcttataagtcttattaaacactagtcataatagacacaataaattatgccttcttt

SEQ ID NO: 49454 - DNA, 652 bp, Homo Sapiens
  misc_feature (623)..(623): n is a, c, g, or t
gcggccgcgggtgtaggctcttttgttgaacctgtattgattttttttttttaactatattgattcgtttactagaacagtctaattggggcattgaggaaatgaagactggatacttctgtatctgtgaagttggcacaggtaacatttggacatgttcatcttattcttaggaaggaaaaaatcacttgccaaaataatacatacttcatagaccactgagttctagtttttattcacactacaacattctctttaacgatgttgcaggtattctcaatttccttttaagaaaaatgaaatgtgaggagaattctggttgtaatagatgacagtacatatgatctgcaggtttgggcatatgctttcatcattaaattatctgataaagttacaagtcacaaaggagaatgagaacttaatgattctattggatttaatatattagcaagaaaacatactatttacatatgtgtagcttagtaaggcattaacataagtacaaaaactatgaaacagatgcatatttcctcaacatactgtgtcaggtatactgttttataatttggttgttttagccttattgcacaccaactcccaaaatataggttactcttgttcanaaaaaaaaaaaaaaaagcctacacctcgt

SEQ ID NO: 49455 - DNA, 686 bp, Homo Sapiens
  misc_feature (653)..(653): n is a, c, g, or t
tccaaactcgtaaagactgggaacagaatggaaagtttagacactgacattggagatagatgattctttcattccatcatccattttaatgtatgacgtcaacataaatgtgtaacaagattcattaaactagtctcagaagctctatcccatggagactgtgatgttcttacaagaacctttgtccgtcgggtattgtaggtgagaatggcatataagcagaacaaccttgccattagagagaatggaactgtatttttgttttaccagttatgagtcaacattttgtttcttttattttgaacatggcatcatgtatatatttcttttatagtgaaatgatacatttatgtgccaagaggtaaagcatcccttttcctgtccagccttccaccctccctcacatcttagtggggagccactgttctcaattctgtgggaagggtcagtgcaagtcctgtagaaatgtattttgacatcattatgagatttacacaaattcctcagtgaatgtttggttgtgatatgttaacctgcaagttttgaacattgacatgttttcgtgttaggaaacaggagctcacttttctacatccttgttggagcatgctgggaatgaagacaggtggattcttttactttctcacttctantaagaatgcacacagggtgctgcatggtggctc

SEQ ID NO: 49456 - DNA, 444 bp, Homo Sapiens
gctgcagtgggagccgcctgtctgacccttgtcaccgcacgctctgcccccaccccgttgcaagaggtcacaccatgtcagcagccttgcactgaccgcagccggcccccaggcctcagagttctggatgcttccgtgcggctccaacaggcatcgtcttcccttccgcaggtggaggggccgcttcccgcaggcatctgagctctgtgccggggccgtggccatgggaagatgttccacgctgcctcctcctcgagttttcctcggaaacactcttgaatgtctgagtgagggtcctgcttagctctttggcctgtgagatgctttgaaaatttttatttttttaagatgaagcaagatgtctgtagcggtaattgcctcacattaaactgtcgccgactgcaggcgcagtgactgctgaatgtaccctgtgtggcgacttgg

SEQ ID NO: 49457 - DNA, 644 bp, Homo Sapiens
ggaccagaggacccaaatgcagacccttcaagtgaggccaaggcaatggctgtgccctatcttctgagaagaaagttcagtaattccctgaaaagtcaaggtaaagatgatgattcttttgatcggaaatcagtgtaccgaggctcgctgacacagagaaaccccaacgcgaggaaaggaatggccagccacaccttcgcgaaacctgtggtggcccaccagtcctaacgggacaggacagagagacagagcagccctgcactgttttccctccaccacagccatcctgtccctcattggctctgtgctttccactatacacagtcaccgtcccaatgagaaacaagaaggagcaccctccacatggactcccacctgcaagtggacagcgacattcagtcctgcactgctcacctgggtttactgatgactcctggctgccccaccatcctctctgatctgtgagaaacagctaagctgctgtgacttccctttaggacaatgttgtgtaaatctttgaaggacacaccgaagacctttatactgtgatcttttacccctttcactcttggctttcttatgttgctttcatgaatggaatggaaaaccagatgactccagttaagaaaacacacccaaaaaaa

SEQ ID NO: 49458 - DNA, 701 bp, Homo Sapiens
ggctggggcagatggtccttggagttctaccagaagaagaagtctcgctggccattctcagacgagtgcatcccatgggaagtgtggacggtcaaggtgcatgtggtagccctggccacggagcaggagcggcagatctgccgggagaaggtgggtgagaaactctgcgagaagatcatcaacatcgtggaggtgatgaatcggcatgagtacttgcccaagatgcccacacagtcggaggtggataacgtgtttgacacaggcttgcgggacgtgcagccctacctgtacaagatctccttccagatcactgatgccctgggcacctcagtcaccaccaccatgcgcaggctcatcaaagacacccttgccctctgagcgtcgctggatctctgggagctccttgatggctcccagaccttggcttttgggaattgcacttttgggcctttgggctctggaacctgctctgggtcattggtgagacttggaaggggcagcccccgctggcttcttggttttgtggttgccagcctcaggtcatccttttaatctttgctgacggttcagtcctgcctctactgtctctccatagccctggtggggtcccccttctttctccactgtacagaagagccaccactgggatggggaataaagttgagaacatgagtttgggctgaaaaaaaaaaaaaaaaaaa

SEQ ID NO: 49459 - DNA, 722 bp, Homo Sapiens
  misc_feature (594)..(594): n is a, c, g, or t
tcgcgggccatgcggcggctgggcctggacgacgctgagtacgccctgctcatcgccatcaacatcttctcggccgaccggcccaacgtgcaggagccgggccgcgtggaggcgttgcagcagccctacgtggaggcgctgctgtcctacacgcgcatcaagaggccgcagaccagctgcgcttcccgcgcatgctcatgaagctggtgagcctgcgcacgctgagctctgtgcactcggagcaggtcttcgccttgcggctccaggacaagaagctgccgcctctgctgtcggagatctgggacgtccacgagtgaggggctggccacccagccccacagccttgcctgaccaccctccagcagatagacgccggcaccccttcctcttcctagggtggaaggggccctgggccgagcctgtagacctatcggctctcatcccttgggataagccccagtccaggtccaggaggctccctccctgcccagcgagtcttccagaaggggtgaaagggttgcaggtcccgaccactgacccttcccggctgccctccctccccagcttacacctcaagcccagcacgcagtatcncttgaacagagggaggggaggacccatggctctcccccctagcccgggagaccaggggccttcctcttcctctgcttttatttaataaaaactaaaaacagaaacaggaaaaaaaaaaaaaaaaaaaa

SEQ ID NO: 49460 - DNA, 843 bp, Homo Sapiens
agagctacctcctaagggttttaacgtctctgacatacaggcacactgacctgatttccgaaggctgacaatcgtttgtggaatgtaatcttgatgccttgatactgagacttgggagggaaactaagaaatggttgacagcgttcccacccatctacaatgttattttaggtgctttgtggtaagtcttttttcttagattgcgctaaaatttcttagattgttcagcgctcagaacaaaagtttgaaaaatgcattgttcatatgaatgtcatctcttttcagtttccagtatcctttttaaaaaatggcaaaagcctagatttacaatttgatgaacactaaatatttcttattaatataatctatttttgtattttacttaatgagctttaagtgcctgtcgttctgaaaattgtgtatttataattcagcttatctcataattggacctaatagcatttctttgtgcagttaggtgatgagcactgctttgaggcccaagcactagtagagatgcgcgatacaggtctagtttcggtaactgttccagacatcaagcaataaaaaaatgaataccacaaaagatgtttgattttacaggtggaagcctatggaccagcattcaaagtttaagcccctaagatgaagatttagaggggacccggtggacgggtcgccctacaggtccggtttcttggcgacccttcggagggccttctttaccttgccacggctggcggtaaacgtatcccgttcattgggcaccccctccttataatatatcgtgtgcatacatctttactcccaccccccttgtacttttgtttttaactggggggc

SEQ ID NO: 49461 - DNA, 1029 bp, Homo Sapiens
gccacggcgccccgggggtcatccacatgctcatgcaggcgtacaaggtctttaaggaggagaagtacttgaaagaggccatggagtgtagcgatgtgatttggcagcgaggtttgctgcggaagggctacgggatatgccatgggactgctggcaacggctattccttcctgtccctttaccgtctcacgcaggataagaagtacctctaccgagcttgcaagtttgcagagtggtgtctagattacggagcacacgggtgccgcattcctgacagaccctattcgctctttgaaggcatggctggcgctattcactttctctctgatgtcctgggaccagagacatcacggtttccagcatttgaacttgactcttcgaagagggattaaaaggtgcaaaaagacaactaaaatacccatttggaccaaaagccgccagattgcttagtgcctgacacagaaacaactgggaatcctgaaagagaagcagacaccgtcacaggcccctctggttagactagcatgagtgaccgaagccatccatcaacattttctaacagcaccctcatcaatatgaaatatgacttcttcacatacagattctctgtagtgtttgcatgtttcttggttgtcagtcgtctccaggtgttagctgtttcactgggaggccttctattctgaaggctagagttgccatgcttgatgtttggccgtgccctttctgcgcttccctgcttacgcggcgggttctgttcccttttggccccgtgggccacgggtcggtaacacgcggctaatctccgagcagattatgtcgggggcacacccctagggataaactttgtgacgcctcctaggcgggagccttccaattgaaatgtggaggggccacacaagagtcgagcgcacaccgcagtctacggcgcctagggcgcttaaatgacagcagacacagtactgagtagagagcacgcgccgtagacaaacgcgtggtcgctgggacgcagcaagaagaagtaggtacgaa

SEQ ID NO: 49462 - DNA, 640 bp, Homo Sapiens
tgggatctcccagtgggcagagggggagcctcgatatgcactgaccactaccctgagtgcacgagttgctcgacttaatcctacctggaaccaccccgaccaagacactgaggcagggttcaagcgtgcaatggatctggttcaagaggagtttctgcagagattagatttctaccaacacagctggctgccagcccgggccttggtggaagaggcccttgcccagcgattccaggtggacccaagtggagagattgtggaactggcgaaaggtgcatgtccctggaaggagcatctctaccacctggaatctgggctgtcccctccagtggccatcttctttgttatctacactgaccaggctggacagtggcgaatacagtgtgtgcccaaggagccccactcattccaaagccggctgcccctgccagagccatggcggggtcttcgggacgaggccctggaccaggtcagtgggatccctggctgcatcttcgtccatgcaagcggcttcattggcggtcaccacacccgagagggtgccttgagcatggcccgtgccaccttggcccagcgctcatacctcccacaaatctcctagtctaataaaaccttccatctcataaaaaaaaaaaaaaag

SEQ ID NO: 49463 - DNA, 591 bp, Homo Sapiens
ggcctggacacccatctcaacagggtcacttggtaattaacaatagccatataaatgcggatacaggttactaccctcaccctttaccttcctcaggtaacagtcgtagataccagcttttttttttttaaattggctttggccagtagctaaagtgcaagactgaattaatgagaagatatattaaatgtagtcataggggactgaggagcaagggtggccttgaagaggccaaaggaatgtccatttgctgagtttcccttccttatgtctccagtctggtgccaggtagtggagtaaaaaaggagacagtttatttttttattctatgtgcacacttacagtatacatatatatttatatcacaatttacgaaaccaaaaagttgagtttccaatggaacccttgttttttaataatcgactttttaaatgtgatcaggactataatattgtacagttattatagggcttttggggaaggggaggatagcgagaagatgctctgggggttttgtttttgcttttccttcagggttttatttttgactgttttgttttcttgttggccatttctgtattgctggcatct

SEQ ID NO: 49464 - DNA, 770 bp, Homo Sapiens
cagattttttttatatttcctcagcttaactctgctacttgatttacagtgacccataacctactcatccttggtttatagtgacacataatcttatctctttatagaaccttaaattttatcattattttcgcttagaatacagcatttctttgcttctgttgctggtttgacttaagaaataaggcagtaactctgatcaatcaattatccataaggaaggtcttttcatggtttctattaatttgttagtaccctaagtatatctgaaaaatatgtctattgagagaagatttggcattccagatggtatagtctatatatatttaaagttttgaatttgcttatatatactcagctttctttttctagcatttttgcatttacctgttaattgaagtataccccaccacatataaaagttcctcttaaagacactggactcttcctgggggttctaaaataagccaaaaagtttgatgtataaaattttttattggcctctgatgttctgtttagatcactatcctataagtaaataaatttgaaatagattcaaaatgtcctctggttgaaatctaagagtgggaatgttgaggaagttgttgatacattcttgcatggaaaagaacagttgaaataatgtgttaatacataaatacattacatgtgtgtggaaaaaatcaagacaaaaaaaaaaaaaaaaaacttttggggaaatggaccaaaaagtttaaacacatctttgggggcggggccccggagaaaaa

SEQ ID NO: 49465 - DNA, 609 bp, Homo Sapiens
gtgaacgactgcaatgcaagcgggtcttgctggctaaaatgccaggtaaagggttggttggacacagcgcttagtgcacgctgtcatcatggacatcataatcagttgtgaaaaacacgcgaacctatgacacttcttattccacactgaatgtgaaattgcatgttcagatgtttactacgaggcctggctcacaggaagtgttcagtaaaagtatgcactgttagattactgataacgcggatagatttttgtttaccataaattgttccagatttatattaatggaaggaagtgtgcatttattagctattactcaactttacaatgcaaacatcttatttctcatctttaaacatgtcgaccagtttaattgaaaagtattctgagactgcaaaatggggtgttaaaaaatactgcagttacggagctgtgtaaaccagtttctcattgcataagatacagatgtaaattgcatggagaggttgatatgcacctgtacagtaattcactcccccatttcacatctttgtcagagaatagttcttgttcatactgagtgttctaaatttgaagttatatatacaaattaaaatattttaaaaattc

SEQ ID NO: 49466 - DNA, 856 bp, Homo Sapiens
tcgattcatgaacgtcaaccccttcccagtgccccgggacctgccccaggaccctgtggagctggccatgtttggcctgcggcacatggagcctgaccttagtgccagggtcaccatctaccaggttcctttgcccaaagactcaacaggtgcagcagatcccccccagccccacatcgtagagctgacttgctgcccccggaggagagggaagtggaagagacgccggaggagtggaacctctactacccgatgcagctggacctggagtatgtgaggagtggctgggacaactacgagtttgacatcaatgaagtggaggaaggccctgtcttcgccatgtgcatggcgggtgctcatgaccaggcgacgatggctaagtggatccagggcctgcaggagaccaacccaaccctggcccagatccccgtggtcttccgcctcgccgggtccacccgggagctccagacatcctctgcagggctggaggagccgcccctgcccgaggaccaccaggaagaagacgacaacctgcagcgacagcagcagggccagagctagtctgagccggcgcgagggcacgggctgtggcccgaggaggcggtggactgaaggcatgagatgccctttgagtgtacagcaaatcaatgttttcctgcttggggctctcttccctcatctctagcagtatggcatcccctccccaggatctcgggctgccagcgatgggcaggcgagacccctccagaatctgcagggcgcctctgggttctccgaattcaaataaaaaaggggcgggaaaccccctttttgggttgtgcgcaaaaaaaaaaaaaaaagggcgggccgctctaaa

SEQ ID NO: 49467 - DNA, 813 bp, Homo Sapiens
catttcttggaacacaagtggagtatgccaaattttatatgaatttttcagattatctaagcttccaggttttataattagaagataatgagagaattaatggggtttatatttacattatctctcaactatgtagcccatattactcaccctatgagtgaatctggaattgcttttcatgtgaaatcattgtggtctatgagtttacaatactgcaaactgtgttattttatctaatccattgcttaatgagtgtgtttttccatgaatgaatataccgtggttcatatgttagcatggcagcattttcagatagcttttgtttgttgggaagttggggtttggggggagggggagtattagtacgttgcatgaaatagcttactttataatgatggaattgctttttcttttgtcttgtgattttttttttggaagtgaaatttaactttttgtgcaagtagtactattatacccatcttcagtgtcttacttgtactgtatcacattccataccctcatttaattcttaataaaactggtccacttgtttaagacagaacaaccacaagcacacagcaaaggggggggcggtacaagatagacactaggttgagcgagcttaggggcaaacagagaattggcttctggaaaggaacgctttatccgctctcagaaaaggcgacaggcggaacccagaagaaacggctggtggaagccccttcctacttctggtttgaatgcccggaggtataaaacacaggtttagcatggcaaccggcttcgttggggaggcctgcctgcagcaagggg

SEQ ID NO: 49468 - DNA, 574 bp, Homo Sapiens
tgattctttgatttgggtaatgaagaggtaatttgggacagtgtggtggtaccaggaagaaagaggattggaaaggccagtactgttttagttgctcggcactgttggttttgttttaatgtggttgccctgtccactacatggttctatcagtagtgtaatccattttcaatgtaaagctcttttagtttttgtcatagacttaaattaatattttgagaggcatccctcacctgttcatttcttctgtgttgaaatgaagtacttaaaattaccgttatacatgaactttgtggactgtaagatttgttatatatgttcaaatgccttttagctggctttttaattaatatgcctgttttgagtgcttaatacaatgtaatgtgattgtaaatcatacctattttaaatcattccttcctgtatatttgtactcagagagccttattttattcttccagcagaattactacttgtgatagttcatttacattccccagaatgtgcctctagtgtgaattttgtattcttattaaacgtgtttgctgcagtaaaaaaaaaaaaaaaaaaaaaa

SEQ ID NO: 49469 - DNA, 470 bp, Homo Sapiens
ggaacttgatactaaatttgggactctttgctgcgggagtttggctggccaggaacttgagtgacattgacctcatggcacctcagccaggggtgtagccaagtagttctaatgccacctgtcgtcttatcatctgattgcagacaaatggaatcctgtgctgaacccgaatcttccaaaaaacagcctacaatctgtgaccaccacaagatgtgccctgatggcagctgaagtttgattcagatgggcacttttcttccccttccctgcctagtttccttttgttccttgagtccacgcagaattccattctctggtcagcagacaggcttaagctaaagtattgcctctattctgtaaagttctgtacatagttcccaagcttctgcagggggtgatttttgctcttgtcctgagaaataacagtgctgttttaaaaaacatttgaaataaataccgcacacaaaggc

SEQ ID NO: 49470 - DNA, 583 bp, Homo Sapiens
  misc_feature (444)..(444): n is a, c, g, or t
aggctgggatctgccgctccctccagccaccagggggcaggagtgcactacctgctgtcagtcaccagagtggccgctcagtgcccagcccgccagcctcgctcttggaggctgctctttatcctgcctgtggttttcagctcagagctggacttctatttataagttacctgtatttatatttatatgcccgctctcatggtgaaggctggacaaggtgctcctctggcccctccttcttacctcagatgcctgaacagaacaaggcaaacccgtagcagcctctcaggagctgacaggtcctctttcggggctcaggagggtgggcacacacccagcggcctgcagagtaagcttattacccacaactgtgcccgctttgtgcttctaaggtgcacacctagcctaggtgagacactgcagccaggcaaccaccgacacacngccccttctcaaagccagaggtgagtggggcaggtgcccggggctgggtgagtggaattaggacacacacaggcttgggcttcaagttcatttattgatgcattggttggacacaataaaaccacaattgttatcaaaa

SEQ ID NO: 49471 - DNA, 640 bp, Homo Sapiens
acgcgtccggaaagcaccactgccggaactgtggccacatcttctgcaacacctgctccagcaacgagctagccctgccctcctaccccaagccggtgcgagtgtgcgacagctgccacaccctgctcctgcagcgctgctcctccacggcctcctgaacgtccgtcctcaggagcacagcctcacggacagtgccaaaccctgtgggtctccaggggcttgggaaatgtgttctttcccaagagaatcaaaggaaagaatcaaatttcttgcccggtcactggcactccagaagacagcgtgccggaaccggcagctctcacctttctgtgacttgttcggaattaactcctctggatggaaacttccatcttacttggttacatcacggctctggttcagatacaacttcatgattttgctactatcatttttcacttttcaaagaatttaacctattttacagcagttcagttctgctagtgagtagttttcctctcctaccttccttctaaaaacctgattcatgcacagcgtttgacacacatggagtctgccagtgtgccttctctgcttcagacaagagatctgccatttcatgcccttgtgactacctatcattggccctgcaataaaatca

SEQ ID NO: 49472 - DNA, 704 bp, Homo Sapiens
  misc_feature (521)..(521): n is a, c, g, or t
  misc_feature (669)..(669): n is a, c, g, or t
ggcctctgaccagctgtgcggcatgggctaagtcactctgcccttcggagcctctggaagcttagggcacattggttccagcctagccagtttctcaccctgggttggggtcccccagcatccagactggaaacctacccattttcccctgagcatcctctagatgctgccccaaggagttgctgcagttctggagcctcatctggctgggatctccaaggggcctcctggattcagtccccactggccctgagcacgacagcccttcttaccctcccaggaatgccgtgaaaggagacaaggtctgcccgacccatgtctatgctctacccccagggtagcatctcagcttccgaaccctgggctgtttccttagtcttcattttataaaagttgttgcctttttaacggagtgtcactttcaaccggcctcccctacccctgctggccggggatggagacatgtcatttgtaaaagcagaaaaaggttgcatttgttcacttttgtaatattgtcctgngcctgtgttggggtgttgggggaagctgggcatcagtggccacatgggcatcaggggctggccccacagagaccccacagggcagtgagctctgtcttcccccacctgcctagcccatcatctatctaaccggtccttgatttaatanacactataaaaagttaaaaaaaaaaaaaaaacact

SEQ ID NO: 49473 - DNA, 569 bp, Homo Sapiens
gtcatttcatagcggttacgactttggctacttaatcaaaatcctaaccaactctaacttgcctgaagaagaacttgacttctttgagatccttcgattgttttttcctgtcatttatgatgtgaagtacctcatgaagagctgcaaaaatctcaaaggtggattacaggaggtggcagaacagttagagctggaacggataggaccacaacatcaggcaggatctgattcattgctcacaggaatggcctttttcaaaatgagagaaatgttctttgaagatcatattgatgatgccaaatattgtggtcatttgtatggccttggttctggttcatcctatgtacagaatggcacagggaatgcatatgaagaggaagccaacaagcagtcatgacatgaaatagtccttttatttttatttcgagctacacacatgcttgtatataggttttatctctggttgaatccctcgaacaatagacagtacctttcccccccctttcatggcccattttattgtctgcctttcagtactaagtatgaccgttcctatctcagatcttaat

SEQ ID NO: 49474 - DNA, 598 bp, Homo Sapiens
agaaggggccataccagggcgcggcgctgggttgccacacttgggaaagcagcccggagctgggtgctggggaaggcggggcgcgtagcctcccgccgccctgcggttgggccggtggaggcccaggcgttgctaggattgcatcagttttcctgtttgcactatttctttttgtaacattggccctgtgtgaagtatttcgaatctcctccttgctctgaaacttcagcgattccattgtgataagcgcacaaacagcactgtctgtcggtaatcggtactactttattaatgattttctgttacactgtatagtagtcctatggcacccccaccccatccctttcgtgccactcccgtccccacccccaccccagtgtgtataagctggcatttcgccagcttgtacgtagcttgccactcagtgaaaataataacattattatgagaaagtggacttaaccgaaatggaaccaactgacattctatcgtgttgtacatagaatgatgaaaggttccactgttgttgtatgtcttaaatttatttaaaactttttttaatccagatgtagactatattctaaaaaataaaaaagca

SEQ ID NO: 49475 - DNA, 626 bp, Homo Sapiens
ctggcctctctgtggggaaaggggactgcagggggaagagccgggaagggacagtcaggcttctccctgggaaggtggggccagcaggagatgaccaacagggggcaggacctggggacctgggctggagggaagggcagaagcttcctacttggctgacagccccggttcccccaacatgttcccgttcactctgcccccacccccaaaggctcagcctctaaatctcagactccaccacctcttaatggctcagtccccttcaccccatttccaagtgcccccaggactcctgggccctgcttccctgaaccctgttctccaaaaccctgccccaggctaagggtggccagagaaggtcaccatgtaccacacaccaaagaagggggtcggcccaggggtgggcgacacaggcaagcttcttcggcagcctcacggcagcaaccccagccttcccaaagcagcaggcgcctccaggctggggcccaacctagaaggcaggggtcaatctaacaaaaccctaacgttgactttttttccctggtggggcttcttctgtaacatgacttgcgaatatttatataaaaacgagtgttacaatgaaaaaaaaaaaaaaaaaaataggt

SEQ ID NO: 49476 - DNA, 639 bp, Homo Sapiens
cgcgtccgctttagttgacagttcacaaacttgtgtaaaggtttgtgaaatgcatcttcttactgcatcagaccttccttaagaatgaaaccgaccacatggagggaaaaagaaaacaattctttcttggcttggttttttgagaagtttactgacaaattactgtttatcaaatctgaaatagtcacctcacagctcttcaaagaaaacctttgaaagatttatatctaaaagctgtatttactttaaaagaagtgcataattaccaaaattgtatgtactattgtacatttttacaacagcattttcttaaacataatctgtgtttaatgattattgtccattgagcctgtactctgctttccataccaagtaaatatgaaataatctactttgcacataacagaagaaactataattacttggctgttggagatttgtacttgagtataaatgtacaccagtttttgtatttgtgaactcatctgtgggaggagtaaagaaaatccaaaagcatttaatgttttgtttttgttctataaagatatgaaaatgtatttttatattattttacttatttggaatttacagagcacacctaagcaattaggatataacaaaattacttaaccatttttt

SEQ ID NO: 49477 - DNA, 630 bp, Homo Sapiens
  misc_feature (3)..(3): n is a, c, g, or t
agnaaaccgccccagcgatggaagaggatcaggagctggagagaaaaatatctggattgaagacctcaatggctgaaggcgagaggaagacagccctggaaatggtccaggcagctggaacagatagacactgtgtgacatttgtattgcacgaggaagaccataccctaggaaattctctacgttacatgatcatgaagaacccggaagtggaattttgtggttacactacgacccatccttcagagagcaaaattaatttacgcattcagactcgaggtacccttccagctgttgagccatttcagagaggcctgaatgagctcatgaatgtctgccaacatgtgcttgacaagtttgaggccagcataaaggactataaggatcaaaaagcaagcagaaatgaatccacattctagtcctttatgcagtatacaaggagaactgtcctgtaggatattctcttcctgatggtgcagaacccagaattagaagtttgtggttacagcatactctgtccttcagaaaggcgtgattctagctgttgaccccttgcagctgttggaatctctgcaagaacctctgtattcttctaataaattccctcttttatttaaaaaaaaaaaaaaa

SEQ ID NO: 49478 - DNA, 728 bp, Homo Sapiens
  misc_feature (636)..(636): n is a, c, g, or t
ttttttttttttttttatagaaaatgttgacagaaactctattaagagactttgaaaatgcagcatcattctacagaaaaatagagacctagggtagttaaacaatctgctccaaactttataaaattttagcaggaagaagctagatcacttccagacacagtgggtcacactttgtgctagcacttctgaagaccaaagcaggaggaccgcatgaggccaggagtgcaagaccagcttgtgcaacacagtgagacgccatctctggaaaaagttaaaaaaaaaaaataatagccaactgtggtggctaaaaaataacctagattttttttaacatttgaggagtttgggctctacattagacttccttacttgagtttacaacataactttacagaattaaaatactgaaagttgaatcttcagccatcaatatttatatacagagttatatggagtgttctacagagtgttctgaagtggaatcttgaaaaaaaaaagttctaaactaattatttcatgtgatgattacctgttttgttatctacaataagttttagttaaaaatgagatttttggttgggcgcagtagcacatgcctataatcccagcactttggaaggctgaggtgggcanatagcttgagcccaggagttctataccagcctgggcaacatggaaaaaccatctctacaaaaaaaaaaaaaaaaaagcccctcgtgccgaat

SEQ ID NO: 49479 - DNA, 601 bp, Homo Sapiens
  misc_feature (574)..(595): n is a, c, g, or t
ggtacactcagtgattttttgactgaaattaattctacagttgataaagatatttgcagtgccattgtgcagcacctaaggggtttgcgcgctactctgttaaaatactttcctgtaacaaatgacaataatgcttgggttagaaatccatttacagttactgttaaaccagcttcattagtagcacgggactatgagagcctgattgatttaacatctgattctcaagtgaagcaaaattttagtgaactttcactaaatgatttttggagtagcctaattcaggaatacccaagcattgcaaggcgtgcagtgcgtgtacttcttccttttgctacaatgcacctgtgtgaaacggggttttcatattacgctgcaacaaaaacaaaatataggaaaagacttgatgctgcacctcatatgcgaatccgacttagcaatattacacctaatattaagcggatatgtgataaaaagacacaaaaacactgttctcattaaaattggaggagtttgcatgtctcatgataaccaaatgtaagatgaaaataaaagatgatttacttcaaaaaannnnnnnnnnnnnnnnnnnnnnacatgt

SEQ ID NO: 49480 - DNA, 779 bp, Homo Sapiens
aatgcttagtcttcctgaagagcttgctcgaatgtacagagatgacattacaatcattgtagttcagttcaattctcatgttgtaggggcgtatcaaaaccaagaatagtgagtggctctttcactggcaattctcaaatgatacacatttaaagggcagattttttaaaaagatactactataataaacatttccagttggtcattctaagcatttacccttttgatactctagctagtcaggtactccaaattgactttgcagcagggtggcagggtcaggagagtctggtcctgcctagctcagatttcatggcacctgcacttgaagcaagtcacttctttatcacaggtgtcttgaaacattagcttcttttaccaacctgagaaaattaggatgacctggcaaataagatcttgaataggccaaaagcaagtatcttgctgtgtgtagtctcttggttaaagtgaagaaacagtactgttcacacctttcttcactgagattccagtgtacatgagaacatatatttattgcatgattttctagatacacagtctatgcattattcatatacatttattttagcctaaagtggttttcaaatccagttcttcaagccataaatgaccaagatccaagcaatctgaatttgtttttgtgattatttgactggaatgcttcttaagtggaataactatactccgttatccacccgatttcctaatgtaattgaaacattttctattttgccacacacttggagacaataagggtt

SEQ ID NO: 49481 - DNA, 1002 bp, Homo Sapiens
ccacgcgtccgaggactacagtttctcccaggatcacagaagcttgtcacctgcacagggtaccaccaggtccgtgtttatgatccagcatccccccagcgccggccagtcctagagaccacctatggagagtacccactaacagccatgaccctcactccgggaggcaactcagtgattgtgggaaacactcatgggcagctggcagaaattgaccttcggcaagggcgtctactgggctgtctgaaggggctggcaggcagtgtgcgtgggttgcagtgccacccttcaaagcctctactagcctcctgtggcttggacagagtcttgaggatacacaggatccagaatccacggggtctggagcataaggtttatctcaagtctcaattgaactgcctcctcttgtcaggcagggacaactgggaggatgagccccaagagcctcaagaacccaacaaggtgcccctagaagacacagagacagatgaactttgggcatccttggaggcagctgccaagcggaagctctcgggtttggagcagccccaaggagctctcccaacgagacggagaaagaagaaacggcctgggtccaccagccccctgacgccccctgtgcccactttggaaaataaactggctggaaaccccaaaaaaaaaaaaaaaaaaggggcggcccgcttcctaagagatattcccctccaaggggggccccaaggcttttaccgcggtaccccaagcttttccctgggaaccaaaggtggggggccccctaataaatggaagtccttaacttattaaaagctttagggccactggggcgccggtcggttttttaacaaccgggtcggtggaacttggggaaaaaaactggggctaaacgtttgggggaatcctttttgggggaaagggaaaccctttaaacttttctcggggggggggggggaccattaatattttgggagaacaaaaagtttacgcctaacccggaaagaaatt

SEQ ID NO: 49482 - DNA, 558 bp, Homo Sapiens
cgcgtccgcgccaggcaggagtttctctcggtgactactatcgctgtcatgtctggtcgtggcaagcaaggaggcaaggcccgcgccaaggccaagtcgcgctcgtcccgcgctggccttcagttcccggtagggcgagtgcatcgcttgctgcgcaaaggcaactacgcggagcgagtgggggccggcgcgcccgtctacatggctgcggtcctcgagtatctgaccgccgagatcctggagctggcgggcaacgcggctcgggacaacaagaagacgcgcatcatccctcgtcacctccagctggccatccgcaacgacgaggaactgaacaagctgctgggcaaagtcaccatcgcccagggcggcgtcttgcctaacatccaggccgtactgctccctaagaagacggagagtcaccacaaggcaaagggcaagtgaggctgacgtccggcccaagtgggcccagcccggcccgcgtctcgaaggggcacctgtgaactcaaaaggctcttttcagagccacccacgttttcaaataaaagagttgttaatgct

SEQ ID NO: 49483 - DNA, 671 bp, Homo Sapiens
tgcaaacctgtgctttctatttcacgtactgttgtccatacagttctaaatacatgtgcaggggattgtagctaatgcattacacagtcgttcagtcttctctgcagacacactaagtgatcataccaacgtgttatacactcaactagaagataataagctttaatctgagggcaagtacagtcctgacaaaagggcaagtttgcataatagatcttcgatcaattctctctccaaggggcccgcaactaggctattattcataaaacacaactgaagaggggattggttttactgttaaatcatgtgttgctaaatcattttctgaacagtgtgttctaaatcagtcattgatttagtgtcagccacgtggagcacctcggcttaaagcagctccacaaaacctgacacaacacacacaccaattaaatggattttgttgagaatttaatcattcaatttggtcaaccagaatgacttcctgtggaactctgttttatgacagataatagttttccaacttgattgagtctctgtataccctgggatattgtattttttaatgaagggcattttcaaacttgtcaacttctcttttcagcacttgaaatgaaggcttatggaattctgactgtgaaatgaatttttctattgggaaaaaaaaaaaaaaa

SEQ ID NO: 49484 - DNA, 748 bp, Homo Sapiens
  misc_feature (735)..(735): n is a, c, g, or t
aggaacgaaatccggaaggtgacgggcaaggaccccctggaacagttcggcatatccgaggaggccaggttccagctgagtggcttgcaggcgtgagcgcagggcacggtggtcagcgtgcagcgggacgggactggccctgcccagccatgaatcgcttggccatgcctggatctgttttgtttttttttttgttttttgggtcagggtttcactgtgttgcccaggctagagtgcagtggtgccacagctcactgtgaccttgaccttctggactcaagtgatcctcctgcctcagcttcccaagtagcggggatcacaggcatgagccgccacacccggccatcacacctggattttcagtgggaggtttttggtttggagacatccaaagcctgaagccaggtgggtgtgggcaggggctgcattttatgaaactgcccagcaagctgcgctccctggggccccaggatccacctaactggcctggcacctggtgccacgtgctgctgccgccaggatatgcgccttcccacaggtgccctgcctgagttgtgtgcatccaggggcctggtgagcccccaggctggtggcatggcccccctgccccgtgctgaatgaatgtacagagccagacaaagctgtgaatggcctaggggctgagtccacaccagctgtgaattctcctgcagacaggagggccctggctgtgcacctggggaagtggttgcctgnggccaggtgcttg

SEQ ID NO: 49485 - DNA, 977 bp, Homo Sapiens
  misc_feature (572)..(572): n is a, c, g, or t
ataaaatccacagattgcccgttattgaccctatcagtgggaatgcactttatatacttacccacaaaagaatcctcaagttcctccagctttttatgtctgatatgccaaagcctgccttcatgaagcagaacctggatgagcttggaataggaacgtaccacaacattgccttcatacatccagacactcccatcatcaaagccttgaacatatttgtggaaagacgaatatcagctctgcctgttgtggatgagtcaggaaaagttgtagatatttattccaaatttgatgtaattaatcttgctgctgagaaaacatacaataacctagatatcacggtgacccaggcccttcagcaccgttcacagtattttgaaggtgttgtgaagtgcaataagctggaaatactggagaccatcgtggacagaatagtaagagctgaggtccatcggctggtggtggtaaatgaagcagatagtattgtgggtattatttccctgtcggacattctgcaagccctgatcctcacaccagcaggtgccaaacaaaaggagacagaaacggagtgnccgccgtgaatgtagacgccctaggaggagaacttgaacaaagtctctgggtcacgttttgcctcatgaacactggctgcaagtggttaagaatgtatatcagggtttaacgataggtatttcttccagtgatgttgaaattaagcttaaaaaagaaagattttatgtgcttgaagattcaggcttgcattaaaagactgttttcagacctttgtctgaaggattttaaatgctgtatgtcattaaagtgcactgtgtcctgaagttttcattatttttcatttcaaagaattcactgatatggaacaggtgatgtggcataaagtgagtgcacggtatgttcarwcacagtgccttatgtccgatacagmatatgkyacgccgcrccgggggsmgcgtgtraaa

SEQ ID NO: 49486 - DNA, 849 bp, Homo Sapiens
  misc_feature (153)..(153): n is a, c, g, or t
agcggagctccgcgccggtttccaggagctgggcgcatgcgccgcgtaaggggaccggccggcggaaggaggtgctactgccggaagcgccggcgcgcttgcgcagtagctgaacgcgggcgtttctttcctccctttttttccgaatggttntgggggtagattcgagttacaaaatggccgcccggagtgtgttcggcgcggttcccccagctgtctctggctgaaccggcgctctcgcctccctgccgaacacagcgtgaggagcccccccagggacatggtgtttgagtctctgggcttgccgagcactaagtcctctgagttccgcagcgcagcaccggaagcggcgagcgcgctcagcccggcgacccctgcgggctccagacccctgcgccgctgcgccccgggtttcgccgcaaccaagacccagcgagtgcagcggcggtcgccgaggaggttcgaaaacatggccaaaagaaatgccgagaaggaactgacagataggaatcgggatcaagaagatgaagctgaagaggtgggaacattctccatggccagtgaggaagtcttgaagaatagagccataaagaaagcaaagcgcagaaatgtcggatttgaatctgacactggaggagcctttaaaggtttacaggttggtggtaccttctggaggaggacgctttctggattgggtagtggcctggagggaagccttggaagggttgcgaatggaaacaacataaccagtgccctccttcgcagtgcaaatgcagggagatccaaggtaggcttggtctcttgctgaatggctaccactggtgataagttcaattccaaataatgccc

SEQ ID NO: 49487 - DNA, 529 bp, Homo Sapiens
cacgaggtggagatgaagaagagaatgatgagccacccaaagtagtagttaccgaagtaaaagaagaagatgctttttactccaaaaagtgtaaactgttttacaagaaagacaatgagtttaaagagaaaggcataggtactctgcatttaaaacctacagcaaatcagaagacacagcttttggtgcgggcagacaccaatttaggcaacatattgctgaacgttctgattccacccaatatgccatgtacgcgaacagggaagaataacgttcttatcgtctgtgttccaaatccaccaattgacgagaagaatgccaccatgccagtcaccatgttgattcgggtaaaaaccagcgaggatgcagacgagttgcacaaaattttactggagaaaaaggatgcctgaacacgcaaagtcggctgcagaattattgccaagtttttttgctgcttccaccgccccttaaagttagtcagtttttcttctcttctttgacattctaagaacttaagatactaaacttt

SEQ ID NO: 49488 - DNA, 582 bp, Homo Sapiens
acatgcccacggaatttgattttgatgatgagccagtgacaccaaaggactccctgattgaccggagacgcaccccaggaagctcagcccggagccagaaacgggaggcccgcctggacaaggtgctgtcggacatgaagagacacaagaagctggaggagcagatccttcgtaccgggagggacctcttcagcctggactcggaggaccccagccccgccagccccccactccgatcctccgggagtagtctcttccctcggcagcggaaatactgattcccactgctcctgcctctagggtgcagtgtccgtacctgctggagcctgggccctccttccccagcccagacattgagaaacttgggaagaagagagaaacctcaagctcccaaacagcacgttgcgggaaagaggaagagagagttcatcttcttgtgagccctgggcttaggagtcaccatggcaactgaagagttcatcatccgcatccccccataccactatatccatgtgctggaccagaacagcaacgtgtcccgtgtgggaggtcgggccaaagacctacatccggcaggacatg

SEQ ID NO: 49489 - DNA, 713 bp, Homo Sapiens
ctcctggcgcgggagcgacatgatcgtgtcgtgacaacatctgtggggcacttgcccgcctgttgatggccagtcccaccaggaaaccagagccccaggtgctggctgccctactgcatgccctgccactgaaggaggacttggaggagtgggtcaccattgggcgcctcttcagcttcctgtaccagagcagccctgaccaggttatagatgtggctcccgagcttctgcgtatctgcagcctcattctggctgacaacaagatcccaccagacaccaaggccgcactgttgctgctcctgacgttcctggccaaacagcacaccgacagctttcaagcagctctgggctcactgcctgttgacaaggctcaggagctccaggctgtactgggcctctcctagactgcaggctgcagccagtccagagagaatagagcctgcccaggccttaagaccacctctcagcccagttcagttctgccttaccaaagattctgagactcatacccatttggagccagccccacttgctgccttacagggctgtccctgaggctggatctgttacaaatgagtcatgacatcatactgtaataaaagcagcttgttttctgcttgaacaatagctctgagagcaagaaggctggaaatgcacattcagaaatgaggtaagcaggacccagtgaggcacgacgtggtttactagaagtg

SEQ ID NO: 49490 - DNA, 662 bp, Homo Sapiens
gaagtgacattggagaaagcagtagcaactgtgagaaatcagcaacttgcaggaggcacagaaaactcctgctgatggtctcagcttccagcagcacaaaagcagatgatgtactggaaaatgctcagaagatgctacaaaacctcatgcctactgtctgccactgctggagaaggaatcatggtttctagaagtgcctctcattagtggactttaaagcaaatcctggctggcaggaaattctgaggaatatagctcttaggcttccagcctctaccatgcaggagagaacacagaaggactgatgtatgttggtggatccatgtatgtgtccagcacagcggcctgctggactctgagaactgggaaagatcagagcaagccttgcctcttatcttcgggaaaccagaatatgtttggggtggtaggagccacacagactcttctgagccccctcactcacttccttccccctgtgcctttcctttgagagtgaaggtgggtggagttgaccagagaaaggggagagaattcgggaaagacccaaagtgtttgtaattcttctttgtccttttacctacagaaatggtcacatggttctatttaaatagcctaataaacacatctggagcctgtcttgaaaaaaaaaaaaaaaaaatggc

SEQ ID NO: 49491 - DNA, 589 bp, Homo Sapiens
  misc_feature (539)..(539): n is a, c, g, or t
  misc_feature (581)..(581): n is a, c, g, or t
ttcagaagcagaaggaactttccaaagctgaaatccagaaagttctaaaagaaaaagaccaacttaccacagatctgaactccatggagaagtccttctccgacctcttcaagcgttttgagaaacagaaagaggtgatcgagggctaccgcaagaacgaagagtcactgaagaagtgcgtggaggattacctggcaaggatcacccaggagggccagaggtaccaagccctgaaggcccacgcggaggagaagctgcagctggcaaacgaggagatcgcccaggtccggagcaaggcccaggcggaagcgttggccctccaggccagcctgaggaaggagcagatgcgcatccagtcgctggagaagacagtggagcagaagactaaagagaacgaggagctgaccaggatctgcgacgacctcatctccaagatggagaagatctgacctccacggagccgctgtccccgcccccctgctcccgtctgtctgtcctgtctgattctcttaggtgtcatgttcttttttctgtcttgncttaactttttttaaaactagattgctttgaaaacatgactnaataaaag

SEQ ID NO: 49492 - DNA, 745 bp, Homo Sapiens
  misc_feature (588)..(588): n is a, c, g, or t
  misc_feature (677)..(677): n is a, c, g, or t
  misc_feature (729)..(729): n is a, c, g, or t
ggtgtttgtggacgtcctctgcctgtgccctgaatccgctcctgaggctaagcgctccaacgagaagggtccacgggaagccctcacctctgtaaacacaccctgggccagcgctcgcatccgaggggagccgccggatgtggaagaagactcggctttcctgcagccatttagtgccgccccatgctaggttatttgacattgtgcagtgtagagttgccttaaagtgcgtgatctgccagtgctttcttcaagtcacccttgccccgattcctcatgtttgcgctccccagggttgctcaagtggaaattttgtcagctgtttagccttttcgtacttggcgtgatgtcaacttcacttctaatctgcaaaagcagaagctgtttcctagtttacctcgcgtgtgtttacctatatggagtagctcgcagagatcacagaaatgcttgcagcctaaggcagggttttcagaccgtgggtcccagcccatttagtaaaatgggaaatcaattagcaagtggtcaccagcattacacagcaatgaagcagaataaagtaggccagaatgcatcatgtagtaaaggcanatactgttttgtgaaacttttcacccatacatctaaatgtgagaactggttgcaatgtaagacatttcttgctgggaagttttgagcanaataagttgacaacactaataaagatctgtctgtctgagcaaaggagactanactccttgggctacat

SEQ ID NO: 49493 - DNA, 557 bp, Homo Sapiens
ttgtatgctggcaaacatgggtgaatttcttttaaacctgaaaataaagaattttatttctctgatgctatcttgaagtgtacatgtttatcttattagtctggcaaaactcacttctaagaattaacctcagagataagctgtcaaaaatacaaaatggcagagattaagaacaatgattctcagactcgagcttgcgtcagaatcacctacaggacgtatggtgcggattcctgggcctcacttcagagtatctgattcagtagatctgggcttccacccaataattttcatttctaatagatttttaggtagtcatgatgttgttctgggtaccacatcttagaaccactggttaagatgtagtcatgagaacaaaagaccagaaacaacccaaaaaaatacccatcaacaaaatctggtggaagaaatcacgatcgatatacacgatggaattctatgcaactattcaaaggaatgcagaagagttccatgttctgttctaggatatcctccaggatgcattgagttttttcacttaaatcaaagtggctccc

SEQ ID NO: 49494 - DNA, 542 bp, Homo Sapiens
ttttttttttttttttttactgtccagtgcaggaaaagtctcacaaaatttcacagacctaaaatgtgcaagctagttctctttctatacagcaatattgggattcttttgaaattagcccagaaatgaattatttacacacatgaaagatgcatgcttggggttcttttatgtaagaaagagcagaaaaacttctaataaaaatagattaaatatatatatatatatttatactgggtaaggaaaacaaaagtttagtctctcctagtcacaaactcattctctctacccacaacattggattttagacagcacacatcaccatcacggctctaatgagaagctaattatagggcttgatcattaggtggcatgcccctcctccctaccctccccccaggtgcagccacgatcagctcacgtggctccatgattggtcgcaggcaaggttcctagattctttagttttagaaaaccccaaatctttaggaatggctcaaatatcaaaatgtatgactgtcctttgtgtttgtcctcgtgcc

SEQ ID NO: 49495 - DNA, 620 bp, Homo Sapiens
  misc_feature (592)..(592): n is a, c, g, or t
  misc_feature (595)..(595): n is a, c, g, or t
ctctgtgccttcttctttgttttgtgataaacataacttgccaacagtctctatgcttatttacatcttctactgttcaaactaagagatttttaaattctgaaaaactgcttacaattcatgttttctagccactccacaaaccactaaaattttagttttagcctatcactcatgtcaatcatatctatgagacaaatgtctccgatgctcttctgcgtaaattaaattgtgtactgaagggaaaagtttgatcataccaaacatttcctaaactctctagttagatatctgacttgggagtattaaaaattgggtctatgacatattgtccaaaaggaatgctgttcttaaagcattatttacagtaggaactggggagtaaatctgttccctacagtttgctgctgagctggaagctgtgggggaaggagttgacaggtgggcccagtgaacttttccagtaaatgaagcaagcactgaataaaaacctcctgaactgggaacaaagatctacaggcaagcaagatgcccacacaacaggcttattttctgtgaaggaaccaactgatctcccccacccttggattanagntcctgctctaccttacccacagata

SEQ ID NO: 49496 - DNA, 488 bp, Homo Sapiens
  misc_feature (475)..(475): n is a, c, g, or t
  misc_feature (478)..(478): n is a, c, g, or t
ggagccttgaagccatcgcacagtctagaaacttgtgtagctgagtgtgcagctcacctttaagggtgaagttaggtaaaagcaattagcagaggcgttatctatgtgattatgttgcttccttgtcagtatgttgaattttatagccctttcaatgaaataaaaaaaaaatttgtatattaccaatgtttttagtttaaataaagagtcacccttactactgttgaatttcatcccaagtgtaaatcattctataatggctgtgtctgttatagtatattacagtaactgcatgtgtcaccaagtgttctatatcaggctaggataacctagaggcagtaattttttaaatgataaaataaatctaatgaatataaactctcatgataaacctattttttccatcatcagccttttcaagtatttaaataaataactgctgtgtactgcaaaaaaaaaaccaaaaccaaaaaanaanccgtgtcggc

SEQ ID NO: 49497 - DNA, 625 bp, Homo Sapiens
aagtcctgacactgttttccaagctgtaaacctcactggtgaacgttcaccttaatgattgattctttaatctctgttttcactctcaggctctggtaagtattcgtattctcttcatcccagtctgattgcatagccacactgcccggcacgccacatccacccctgtctgcacatgagttgttctgacaacagcgctgtatacgcttcagtttttccacattgtccacggccagcacatgaaagcatcacttcttttttatgttgtgggaatctttgcaagttagtgttgcatctgattttcaggtgtacatttatttttgactgggcagataggggatttttttttttccatgtccgattcacacgctacacacccacatgaacacattcgaacttcgaaggccacacactcctgcttcataggccccacggtaagtgagttcacacctagaacactgtcctgaccgcaggacgcgtgccttggacttggtattctacatgtgactggctttcttgccctcgtctcttgaatgtttagactcttaagatcatatcctgccccaaatttcaaattaatgaaatgaagatatttcaaacagatctttgaaacctcagattctgg

SEQ ID NO: 49498 - DNA, 461 bp, Homo Sapiens
acgtcgtaaggctgcatgtggagtaagcggaggtggtgtggggagcagcaggaccatggtaaagagctaggttggatccacactgggagggtctggaataccaggctaaggcatttgtgagttcatcctgaagacttgggaatctagttttgaggtgtgtctactatctcttaattgagacaccatggaccctgagccactatttgaattaacactgatcaagtgatttgaaaacacataatataggatatttacgtttcttatagtgtgtgcagaaatttgatacctgtatctgttatgagaacctggggtagtgatgatggtaatgacgtaagggaaggtgacaaagaaagtatctatcattatgctaagtgaaatgagccaggcatagaaagtcaaacatcagatgttctcacttatttgtgggagctagaaattaaaacaattgaattcataaagat

SEQ ID NO: 49499 - DNA, 624 bp, Homo Sapiens
  misc_feature (597)..(606): n is a, c, g, or t
  misc_feature (608)..(608): n is a, c, g, or t
  misc_feature (610)..(611): n is a, c, g, or t
  misc_feature (613)..(618): n is a, c, g, or t
gggttattctgaatatactaaaaaaatccagctagattgcagtttaataattaaactgtacatactgtgcatataatgaatttttatcttatgtaaattatttttagaacacaagttgggaaatgtggcttctgttcatttcgtttaattaaagctacctcctaaactatagtggctgccagtagcagactgttaaattgtggtttatatactttttgcattgtaaatagtctttgttgtacattgtcagtgtaataaaaacagaatctttgtatatcaaaatcatgtagtttgtataaaatgtgggaaggatttatttacagtgtgttgtaattttgtaaggccaactatttacaagttttaaaaattgctatcatgtatatttacacatctgataaatattaaatcataacttggtaagaaactcctaattaaaaggttttttccaaaattcaggttattgaaaatttttcattttattcatttaaaaactagaataacagatatataaaagtgttaatctttgtgctatatggtatgaaatacaatattgtactcagtgttttgaattattaaagtttctagaaagcaaaaaannnnnnnnnnanannannnnnnacatgt

SEQ ID NO: 49500 - DNA, 731 bp, Homo Sapiens
  misc_feature (541)..(541): n is a, c, g, or t
  misc_feature (558)..(558): n is a, c, g, or t
  misc_feature (639)..(639): n is a, c, g, or t
  misc_feature (704)..(704): n is a, c, g, or t
  misc_feature (731)..(731): n is a, c, g, or t
ggttcagacaaagggggcctggagatacagagagcccaaataatgcctgctggattgtctcctgatgagtacatgtggactcacctgaggaagggaaggaagggaataatcttttatgtttcatttaccttatgaaaagtgttaaaacattgccaactcaaaataacattatttaatgcatgtgcaaagttaggtcttcccagttgtctcagtgctgaggaacctcatcagagaagcatggaagatgccaaaggatttttggaaggtaaagaaggctgaatagtgaccacatgggcctgttttcagggtcccagcttagttaagtcacccatgcacctggtcattgtgtctcccatgcacatccagcgtttctcagaagcagacccacccttaagttgacaggattgatggaacatgctctcctgctcaaggcacaacctctgggctggagtagaggactctggtgggaaggttttgctgctaatgtatttatggaatgaatgtatttcattcaaatctgtattcctctaggaaggattanaattaaacttttttaanatacagaaaaaaaaaaaaaaaaaaaaaaaaacatgtcggccgcctcgcctcgagagcttctagacattcgttggccgcggncccagtagtagtgacatgtcatactgttcctagaatctgtcagacatgctgatctacataaacgngcgcacgactcgacatcgatgatgagn

SEQ ID NO: 49501 - DNA, 680 bp, Homo Sapiens
aaattctatgcaacatttatgttgagttaccaatggaagccaaaagttctcttcccaaactgccaagaatgatacaggccataattgaaatgggaataccttttaagtttcattaggggtggggtgggagtgggacaggaacaagacttgcctagatctttgttgtatcttggggacttttactttgttgtttgatgcttaaacttcaaaattctctgtattcaaatttgattgtggcgaatctacttcaaaaaggaaaaataatccaactttgtggatattaaatggaaggtttgctgttttgatctagttgtttccagtggagcagttttatgaaatatgttctataagatgtacattttttcattgtaacatagaaattgtaaataattgattaaagtgctgcattttgatgaattttttctagccatttttaaagagaaaactaggaattgagtattttgtgtacggtatgtttccatcctccctccccttcctcctcccctcctctctctctcttcctacctatttaattttcatttgtcatgaggtttttggatttgccaatgatctgctggacatcatgccccatgtcatagagaataaagctgatgattgtaccagtcttaaattattcatgattcaataaaattgatgcttatttattcagaaaaaaaaaa

SEQ ID NO: 49502 - DNA, 614 bp, Homo Sapiens
agtaaacagtctcagcatggaaaatgccaaccaagaaaatgaagaaaaggagcaagttgctaataaaggggagcccttggccctccctttggatgctggtgaatactgtgtgcctagaggaaatcgtaggcggttccgcgttaggcagcccatcctgcagtatagatgggatatgatgcataggcttggagaaccacaggcaaggatgagagaagagaatatggaaaggattggggaggaggtgagacagctgatggaaaagctgagggaaaagcagttgagtcatagtctgcgggcagtcagcactgacccccctcaccatgaccatcatgatgagttttgccttatgccctgaatcctgatggtttccctaaagttattacggaaacagacccctgctttcgaatttacatgttcatgatgtgcccttgttgtaaacctttacctgtcacttgtttacgtgggtctcctattaccagcttctaattgaatattgtgtttttgaaccagtctgtaagatttttgttagcagaagaattttacctattgcatggaaagatgctcattatagtgaagttaataaagcacctttaaaaagcaaaaaaaaaaaaaaa

SEQ ID NO: 49503 - DNA, 838 bp, Homo Sapiens
gatagcatcagtgttgtaggagcaataggtcagatgagacatattaacttagactaaacgtgaacagtattatatggactctcacaacgctcttagagaatccgtgaatgtgaacagacaaatgtggctaaccatttgattcttcagtatgccttctaatgtggctattttatttatgtgagactctaaacctgattgtcctaatatataaaactaaaagattttgtaaagggagtgtctttagaaatagatgaaatgtagaatgttaaaaattattgctagggtagtcttttttttttccagaaacctaattagggtattaaatttggtgtttttttggttttttttttttaaacagaagcatgttatttcattcccattcccagaaagggagttaatgaagataaaaatttatttttaaaggtctttatggagagaaacttggttttctgatatgaactatggcagatgttttataaatactttcattaaaatgatgtaaacagtagtacccaacactgtaaactcagtgaaaatagtaaatgattcttttattactaagactgtcatgcatttctagaaaagcagttggcttttttttaaccataggaaggtaatttccctctagctccttggccttctaactctccgtggtcaagaccattaggtaggtacttctgtgaacttaaaaagcttagattacctcaatatttcctccacttggggtatcttttcaccttatgtttataccaacttgcttctatttcatctacaactacgttaatacttttttacacagcgttggtccctctggaaagtccccaacggggaacgtctt

SEQ ID NO: 49504 - DNA, 678 bp, Homo Sapiens
  misc_feature (650)..(650): n is a, c, g, or t
  misc_feature (656)..(656): n is a, c, g, or t
caaaaagttgaaagaaaaggcacagttaacaaaaaagggtggctagatttatcttgggtgatggaggaaatgagagaggaatgctcttgaaaggtggtctgtggatctgtctgaatagaaagagcacagtaagtatgcattgccggagaaaacgtccttgaagctgcttgtctcatgtgtatgatgtgctttttaaatcatgcccctcgttgcctgcctaatctgtgactccctaaaaactaactgggcccatgtagatggggctgcaaccagagctgaataacatgttaggctcacacatgcatcagcactgcacactggaatcattgctcttcctggactttgtagaaatcagtctcaagtgcttcaagagtctggctcctgctacttttatctgtcaggtagcacataaggtttgcagggtttatattttgtatagaatcacagttgtggagaaaaagtaataatttctcaatgaattttaaaaatgggcctattttctatccccgtggttcatctgatataattagtgttccctgtgaattccccccctctatgggaaggatgcctttactctttatcagtaataaattatgactgttttcatattgccttagggttatttccctgtgtaaaccattgtcttttgntttggntttctttagcattatgaagctt

SEQ ID NO: 49505 - DNA, 797 bp, Homo Sapiens
  misc_feature (13)..(13): n is a, c, g, or t
atctgcctgcagnaaagagagaaggataatcatttctagctactgaggctgcgaactagttctgtggcagtggactagcataagtggatgtctaagaaatttttcagttcactagactaaaatgttttacaacaaaaagcctccagttagcctcctttctagagtatatgttcagcaatgtgatctcataaaaggaaaaacaaaagatttaagtattctatataccaagtttttgttttgtttttactgtatttattttattgaggttctttatattcctgcctcttcatagtcaaggctcttagtacaggaatattgacttaggaattgtgaaaactccttaagtttcttaagttaaggatgtttggcttttttctttaattttttaaaaaccattttcctatgttaggagtgcaagaatagccagcatttccgattttgacatatgttcattttatgcatatttaagaaattatagctgcatatcccttctttcaaaaaatgttgcttttttttttaaaggaattttaatatattcctttaaaagaaagcaatttaatcaatttgcaagcaattatataaaaccacaaaggatgtactgaacctactaacccttttacatacagtttaaggtcctagcgcaaagtcctttgtttaaagggcattgactcataaatttgtcagtaatggaaggatttggaagaataattttgggatacacagagggggcctttatttttgtgaaaaaaaaaaacccttttaaagctcctcccaaaaaagaggagggggcttttttt

SEQ ID NO: 49506 - DNA, 808 bp, Homo Sapiens
  misc_feature (787)..(793): n is a, c, g, or t
  misc_feature (795)..(796): n is a, c, g, or t
  misc_feature (798)..(808): n is a, c, g, or t
gctggaccggtccggattcccgggatcaagaatgggacttggataatgacttaagctttatatgtaaagaattttagaagatcttggtgctgctattcctgctggaggaatgaatagatggctgtttcagttaagctattagtaataaaagtgaacattgctactatctgagcctacatacataacttgtgtgatttcaaattaaacttgcattatgtgttaattttcttgcatctaaaaaagcatagaattcctactcacacagctcagcaacaaccattttgatggtaacagttaatttctttcattagttttttaaattcagggttctggatattaaattaaaatggcattcttaaagattttcttcaaaaagcaatcctaaatgaaagtgtgtaaattataagaagctggcgatcttttgatatgctgtttcacaggatcctgacactggagggcagctgtcttgtgcattacttgtgtttccagcaccaaagttgtgggacatgttgctgtagactgctgcgcagtcctgggtgcattcagtctctctgcctctgcctgcctcctggtccccactttaaaggctgtgcagctccttaaataataaagctggaaaatatttttagtcgggttatcaaatttgatttacaaaaacgctaactttgtttgaaatgcaaacaggtttgaaaatatgtattaagtactttgtattctggaagcgtgaattgcttttgaagtctgtcagtattactggtatttttaaataaagaagaatttttctccnnnnnnnannannnnnnnnnnn

SEQ ID NO: 49507 - DNA, 850 bp, Homo Sapiens
  misc_feature (768)..(768): n is a, c, g, or t
  misc_feature (770)..(773): n is a, c, g, or t
ggtggggaggaactacacagtcgtgattagaatttatctgatggttttgtattataacttgtaagacctgccagaatgctagtcccgagagtgtcagacaaggaagaaatccctgggcctcttccccttacccggcccttagatttcatggagcagccacttagcattgaattgcactaccctgagctaaacgtgtctgtgctttctaagataagagcttgatccctttcttctatcttaagacagcacctcctgaaaagaatcgaagttgtcacaactctcacttattttttaaatactgcatagattgagttttggtttattaccaacccttcccagaattgcgttggatctaaaactactagatctcatcccattcccatgtaaattaccacagaccgcagtaccggggctggagcggagtgaagctgtctgctgtgagaggagtggccatgtgagggcatggagtcattagtctcacaaacacactttggactgaagaagatcatttctttttgttcgtgaggtcactgtccaggcctctcatatcatgaccagacggcggggtctccatctttctttcactcctgtgggccctggctgctttacacaatctgttctataagggtcaggtgtttttcaggttgggaacgatcctaaatactcaaaattggttttcaagttaacaagttctttttaccgtcctttaatgccaaaattgaattaataaaataatctttttgtaccacaaaaacaccacacaaaaanannnnacatggtgggccgccttcggccccttcaaaagttttcttaaaccatttccttgggggcccggccccccttaagtaaa

SEQ ID NO: 49508 - DNA, 777 bp, Homo Sapiens
ctgcatccatacgtggaagtaacagtttactaagtaagctcattcatcagtcctatcatggaaccatggacacagtttctctcagtgggactattccagttcaaatgcttttggaaattggtttggacaaactaaagaaagattatatcagttttttcataggtcaggaacttgcatctttgaatcatttggaatacttcattgctccatcagtagatatacaagaacaggtttatcgtgtccaaaaactccaccatattctagaaatattagtcagttgcatgcctttcattaaatctcaacatgaactcctcttttctttaacacagatctgcataaagtattacaaacaaaatcctcttgatgagcaacacatttttcagctgccagtcagaccaactgctgtaaagaacttatatcaaagtgagaagcctcagaaatggagagtggaaatatatagtggtcaaaagaagattaagacagcttggcaactgagtgacagctcacccatagaccatctgaattttcacaaacctgatttttcggaattaacactaaacggtagcctggaagaaaggatattctttactaacatggttacctgcagccaggtgcatttcaagtgaagtgtgctgatgaagttctctattagcacaagccaaaaagagaaaaagaaaaaaagggtattattgtagaacctgaaaacagcaatgtatggaaactctcaaagcagaaaagggaggaggatccctgagattctcttatgaagctccaaat

SEQ ID NO: 49509 - DNA, 642 bp, Homo Sapiens
  misc_feature (254)..(254): n is a, c, g, or t
  misc_feature (470)..(470): n is a, c, g, or t
  misc_feature (512)..(512): n is a, c, g, or t
  misc_feature (591)..(591): n is a, c, g, or t
  misc_feature (621)..(621): n is a, c, g, or t
  misc_feature (629)..(629): n is a, c, g, or t
agataacattcaccatgtcctctctgtagggtttctcatgttttgtctttatcacctggtttctggagaagcagctgcagtctgagttatgataccacttgtggtgtatcagttgcttagggtggggaagaagtataggcttgtctgtattcctctgtgccgggagctggagtcaagattggaagtggaacctaagtgtcaagagttgacagtcatgtccttcctactggcaaaactcttctgagcccagtggnatgggtgggagctggtctcataacctttgtgactagagaaaggatctttttcttaaactatgctttatgagtttgtccctggagagctgcttcttgaagtgtcttggcgcttgcttcggaactttcttggagtaaattaagacattcataattgcaaacacaactctaaaaaatttgacagtaaatatgatcagctagatcataccaaaagtaggnccaaccctagtttaatagtttttaaattggtgaattattagntgtattccatctcgattaccttggtccctagagaaggtttcttcagatatgccaaatgtggttatcagagcacctaganttttggacaaatcttaacctatcagtgccncggttaantaaagagaggtgc

SEQ ID NO: 49510 - DNA, 880 bp, Homo Sapiens
  misc_feature (800)..(800): n is a, c, g, or t
cagcatcacttacacatcccaaaactaaaaagatcaactcttccaactgagaaaagactcctggctttgaatggaaacttacagcagagagtcacaggccacggcaacaacaacgacaacaacaaacatttggaatattattctcaactcacgttttaataatacatcttattatttttctagtagagaaactacaaatcagcctcttcaacatttatatacagtttaataagcctcttgcaagttacttgttctctcacctgaggtatttttttcctccccaccttgcccctgttcctcccttcctcttctccctttgcaagaggaaatatttaacatatttgggtccaacttcaataatgtaataattaatacattaaaagcatttaacttcctttctagaaaaatgcacaggctaaggcatagacaaaacaaagagaaatgctgagaaatttgccactggagacaagcaatctgaataaatatttgccaaaagttctttttatgtcatatagtgtcaggatttgaaggagctattttttttaatgttgcaactagcaactcatcttcggaagacacagccaggagaatgaagtagaagtgaaaggtttataaatccatttgtaagcatttatcccatatattttaaattcaagaaaaattgtgtttatctttagaattttgtattcaatactttatgtactatgtgactcatgcttctggataaataaagcaccaaatatgtatctgtaaccacaatcacacatattatcttaaatatatatctatataacagctcnaataaaaaaaaaatggcaacaaccaagcacgaatacaaacaaaagagcacaagagaagaggggagcgggaataaaaacgc

SEQ ID NO: 49511 - DNA, 510 bp, Homo Sapiens
ccgagcctcccaagatggcggtgtgcatcgcggtgattgccaaggagaattaccccctctacattcgcagcacccctacggagaacgagctgaagttccactacatggtgcacacatctctggacgtggtggatgagaagatctccgcaatggggaaggccctggtcgaccagagggagctgtacctgggcctgctctaccccacggaggactacaaggtatacggctacgtcaccaactccaaggtgaagtttgtcatggtggtagattcctccaacacagcccttcgagacaacgaaattcgcagcatgttccggaagctacacaactcctacacagacgtgatgtgcaaccccttctacaacccgggggaccgcatccagtccagcagggcctttgataacatggtgacgtcgatgatgatacaggtgtgctgagtgagctgtgctgccagccatcgcagaggagcccgcgcacgactgtggtggggccgtcggtctgttctggttg

SEQ ID NO: 49512 - DNA, 456 bp, Homo Sapiens
attaatattgttaaacttctgtgctgttcctgtgaatctccaaattttgtaccttgttctaagctaatatatagcaattaaaaagagagaaagaggaaatgattcctgcgtttcttggaacccagaatacaaacccagcctaacatgcagcaagcctgctagaccttgtgggtcagagggctgggtccttgcctcacaggctgcctctgtccccttgcaattccattctatttctgccacatgccaagtgctatgacaggtacaaggcaaataagaacggtagaacacagcttcccccagcccacttccctgttctaaagacaccacatagacagagagcagcagacaggggccagcaggagctgtagttcagatcttcttggtcattccttgccgctgttatttgaacaaataaacacagcgcaaaggttaacaagtttttgccttctatagcca

SEQ ID NO: 49513 - DNA, 415 bp, Homo Sapiens
gtttaagggtgggtctggtatgattttagtaagcatgtttggacttagtactgtctgtgaagtgtaagtagttattgtactgaaataatctagggccctacagtgctgatgacgtcgtctcatggagtgtgtgggtgtgtgttccatacctgttatgtcggaaggcactctcatggcaggcccatttggctctttgactttgggaactaaccaggcacatctttatcattactgatttctgcagtttcaggaagttgagggtgcttgctgcttggaggccttcctcgacatatcaaaggctggctgggcgtggtggctcacacctgtaatcccagctttttgggaggccaaggtgggtggattgcctgagctcagagttctagaccagcccggccaacatggtgaaacctcatct

SEQ ID NO: 49514 - DNA, 795 bp, Homo Sapiens
gggatggtataccctatggtatcctatatgggatagcctattgctcctaacctacaaacctgtatggcatattactgtactgattactgtaggcagttgtaacacagtgctaagtatttgtgtatctaaacatatctaaacatagaaaaggtacagtaaaaatatatatatagatatatataagatataaaatggtacacctatttaggacatttaccatgaacaagttggcaggactggaagctggctctgggtgagtcagtaagtggttagtgaatgtgaaggccatgatattactgtgcactactgtagacttttataaacactatatacttaggctacataaagtaatttcactatgatgttaccatggctgtgtccccaggcagtaggaatttttcagctccattgtaatcttacgggatcatcatcgtatatttggccattgttgaccaaaagttatgcagcacgtcattataattttgatgtgtcacaaaacattactcatttgatttcccccacccccgccaaccatttaaaaaagtttgccggctaggtgcggtggctcatgcctgtaatcctagcattttgggaagacgaggcgggtggatcactcgatgtcaggagtttgagaccagcctggccaacatggtaaaacgccgtctctactaaaatacaaaaacttagctgggtgtaacggcggatgcctgtaatcccagctacttgggaggctgaggcaagaaaaatcgcctgaacctggggaagcggaaattgcagtgaaccgagaatgcaacc

SEQ ID NO: 49515 - DNA, 564 bp, Homo Sapiens
ttttttttttttttttttaaccccgtaattgtagaatcatgtttactcaacgtttttccccagctgcctcagtaactgggcactcggaggccttggcacgggttctggaggacagacagcaattctatgagtgctcactgagatacttgctggagacctcagaaaacacaagtgccttctccacggtgcaattcagacttcagtgatctccagtggtcaaaagacatttacccttaatatcagacaacatttatattttagtgaagaaacaagttctcgggtggggaatctatgtttcactcagatttatatgtttggaggaaaaaagcctttttttgtaaaatatttaaatttatataagaaaatgttagaaaaaaatatggggagtgtatataaaacttgctttattgcatggggcaggggaagtccaggcctaatactcctaaagtaagagttgggtcctttttttcttcaatacaactgtgctgtaccttgtaaagtattttatctgctgcttatttgtggaatgaaacctcaaacaaacccaaagggggagggtagggc

SEQ ID NO: 49516 - DNA, 656 bp, Homo Sapiens
tgtggctgaagttacccgaagttcagcttgcagtgtaattcagaagagttaagaccagaagtactggaatcatacttcctttcaggtcaaaacattttgtgggaaatatcctgttcgtgacctaggagaaacaagacagaaaacaaatctttcttcatttatgaatttcttactccatacaagcagtttatggatgtctgggcaatcatagcacttgccatttaaaaacatgctacaggggcacattttctgtggttaaaaatgatctccagaataagtgtaaactgcagttttcctttgcattgagggttttggctttttatttgtaaattaaatcaagatgttacccactccttggtgtggtggtcttgctgcgtcgtgttgggaagtagtatggcagcaatgcacaaattcagaatagccaagaaatccctcctttttaacgctctgtgcctgggaaccattagaggaggtttaaaaaccatccctcatagcccacaattttgggtcaactcttaaaattgggaataagaaactgggacttgtgggagaaaaatcgttcttacttgaacatgaactggcttcagcaagcaaatagcgggagtcggtaccaggaagcagtgtgtgcttcggggatgcgtggtgccgtaacctta

SEQ ID NO: 49517 - DNA, 747 bp, Homo Sapiens
actatggattggtctgtataccacttatctaagccaagtaaggttaaaaatcagtgtgttcacaaaatccttcaatgatactatcataggaacagtttgctatctttgtgacaaataatgaagacctatctagaataccaacttattggtactaaagaaatcagtcaatatttacatgtatgcatagtatattaattcagattgtaatatatgtgtagcctgctagtagcttttcaatggaaaaagtgaaaagagcttcatgttaacttttttaattttaataggttgcttcttcaagtggaagaagtatttgactgggggtcagaagacctgggttggaatcctagttccatctttctgtaataatgtaggtctgctctgcccatcctctgccctcctccctcagaaaaatctctgcaaacccatgatgtccaacagacatagctcatattggtcacagctaacggagttaactacctaaccaagttgggcctatctaactggctaagaaaaccaataacttctgggacttggtcaaaatgatgcattgtcttgcaagagtttttaattgagagacacgaggaagttgctagtgggttgtgtatgctacagctgaaatatcccatagggcagcaagattaatgtacagaagaagccagtcatggctaggcatggtggctcacacctgtaatcccagcactttgggagggtgaggtgggagaaccctgtctcaaaaaaaaaaaaaaa

SEQ ID NO: 49518 - DNA, 1014 bp, Homo Sapiens
  misc_feature (825)..(825): n is a, c, g, or t
  misc_feature (961)..(961): n is a, c, g, or t
  misc_feature (971)..(971): n is a, c, g, or t
  misc_feature (975)..(975): n is a, c, g, or t
  misc_feature (995)..(995): n is a, c, g, or t
  misc_feature (1009)..(1009): n is a, c, g, or t
ctgaagaaatgttttatcaacttagtaacatgcttccccagatcttccgagtatcatcaacactcactctgacatccaagcactaaacccttatagattgacatgctggcagaagatgattgttaaactctccaggaacttgtgctatgctgggaatctgtcaagcaaaagatgcccagaaagagaacttgcagctcaatccacaaatcaagatacatgtgtgtgaaaccattccaaaaatttatatactgcacaaactggtgatcaacccctaacttaaacacttaaagtctctttatgaatttctcttttttttttctctgtgttacctgtgaatattagtaatctaaaactttttatttatcacacatggacacttgggaaaggaaacttgattatatttacatggaggcatttgactttttcaagaggcttgactcgtctcaggtgcaatccttaattaaacatacaaacaaaattttccttttactttctttgccaaaacaaaatgtaaaagcactgaaatatacattgcaagtacaaatttcctgtgaaaatctttttatagaaacacaaatgtataagacaaatgtgcgtgttcttttaaattctcctgtttcagaatctctttttaatctactcctaaggatgtacaagttagagtcagaagacgttttggattttttccctctctctcatcctcccgctgtgcccttgcacttgcatattaataacatttcatggactgggaaatagtgtcctttttttgcaagcttgatgtccagttagtctaaaccagcacctggcagtattttagtgctcatncacatttgtgacaatcacccaagggaagatcattttctacattttctgtcctcccctgcggttctcagcttggcttaaaccatttcctctaccttccttgccattttttttggcggaataaaatgtaattcccccnatttctggcnttcnccgggttttccccctccctnttttcccaatgggnttttt

SEQ ID NO: 49519 - DNA, 674 bp, Homo Sapiens
  misc_feature (635)..(635): n is a, c, g, or t
ggccctgcagacctttgccaagacctcaggcaccatgaataactacccaacatggcgtcggactctgctgcgccgtgcgaaggaggaggagatgaagaggttctgcaaggcccagaccatccaacggcgactaaatgagattgaggctgccttgagggagctagaggccgagggcgtgaagctggagctggccttgaggcgccagagcagttccccagaacagcaaaagaaactatgggtaggacagctgctacagctcgttgacaagaaaaacagcctggtggctgaggaggccgagctcatgatcacggtgcaggaattgaatctggaggagaaacagtggcagctggaccaggagctacgaggctacatgaaccgggaagaaaacctaaagacagctgctgatcggcaggctgaggaccaggtcctgaggaagctggtggatttggtcaaccagagagatgccctcatccgcttccaggaggagcgcaggctcagcgagctggccttggggacaggggcccagggctagacgagggtgggccgtctgctttcgttcccacaaagaaagcacctcaccccagcacagtgccacccctgttcatctgggctgcctggcagagagccttgctgtntacaattaaaatgtttctgccaaaaaaaaaaaaaaaaaa

SEQ ID NO: 49520 - DNA, 581 bp, Homo Sapiens
  misc_feature (517)..(519): n is a, c, g, or t
ataatttaggtataaattctgtgacatgctcttgagctttaccctagttgaacatacatgtgtagatttacacatactgtttcattctaaaatctagaaattgttcattaaatcccatttgaggtataagtcactcaggaagttaaaatatctctacacgtatatttttacattaaaaatacagtgttagcataaatccccttttcaggaagaacaaaaatgtcagtgcatagttagataaaatggtaaaatgttttactgaaagcatacttttttggaaaatagattcatgaagtctttaagtgctgcttctgtcagtcaaacgttaaaaactttgtcattttcaaagtgcccagactgtgtacctaagacacatgtaatggagattgtacaggttgtttttttgtttgaacctttgaaagagtttaatcttaacgttttctaattttaaaattttaaaatcttgtttaacaaaagcttgtattaagatactgttttcatttcattacagaattgnnnataaaagttcatttgttgaaaaataaggatcctttttaataccacagcatttgtactgttcc

SEQ ID NO: 49521 - DNA, 697 bp, Homo Sapiens
gtgacccgaatgtcagtgcagttggcagctgagggtgtttgtgtgacctgaggtcacccttgtaagaggctccctggggcctgcatggtacatcctcccctctcctgggggaacccagctggcccaggatttgtggattgcttagaaagatccttttgggcagcctgaagactggggagggttttcctccctcctccacctccacccacattccacttaccctttccctcctcatcccagttggtaacattcccacctgattagtgtggggagttgctgctgcagctgagttctggttttgcccagcaggatcacacacgtgcggccaggaggctggcaggtggaatcagggtgtgcaggggtgcagcccaagtccttttctgctggaaaatgggctgggtgacttcacttgcgtttttttggtatgtagtgggagtaggtccccattcttcccccttgccctttgctttggggtttctaccctaaaaattgaccacggaaaagtgaaaacaagcatgagtagatcctgcttccaatgggggccttcccgtctgcttactgcttaggtttcctgcggtgggtctgagcaatgcagaaagtttcttacaatttctctggattgaaacaagaaatagctccctcgctcctcttcataaatttctcagagaaaatctaagttaccaggaagtagccaaag

SEQ ID NO: 49522 - DNA, 437 bp, Homo Sapiens
gcacgagcccacacagacaacacgcacccacacagacacagagggaaggggttgggatggggacagggtgcacagcagggcggggtaggaccccagcccctcccaaaacagcctctccttctcccatagacccctttcttctccccttccccacggtaggaacatagcgtgtttatattttatggccaaactattttgaattttgttgtccggccctcagtgccctgccctctcccttaccaggaccacagctctgttccttcggcctctggtcctctctggtcccctcctgggtttcttacgtagttgatttttcctctttagtctcccccgacctgcgcccagccccgtggcccctgcccctctcctactctctgtggcagtttcatatttgctaagacgaatttgctcattaaacattttgttgtattttactt

SEQ ID NO: 49523 - DNA, 758 bp, Homo Sapiens
  misc_feature (730)..(730): n is a, c, g, or t
ataaactgctttgtgaagtatgcacacggagacagtgtaatggaccaaaggcaaatataaaaggtgaaaggaagcatgtttacaccaatgccaaaaagcagatgctaatttctcttgctcctcctgttcttactcttcatttaaagagatttcagcaggctggttttaacctacgcaaagttaacaaacacataaagtttccggaaatcttagatttggctcctttttgcacccttaaatgtaagaatgttgcagaagaaaatacaagggtactctattccttatatggagttgttgaacacagtggtactatgaggtcggggcattacactgcctatgccaaggcaagaaccgcaaatagtcatctctctaatcttgttcttcacggtgatattccacaagattttgaaatggaatcaaaagggcagtggtttcacatcagcgacacacatgtgcaagctgtgcctacaactaaagtactaaactcacaagcgtacctcctattttatgagagaatactgtaataatatcaaaagcactttttctggaaacacatttatggcttttataatggctgaaataacgataaaaaaagactaattaaaatcatgttcacttaacattaaatacatgccagaagaaatcatgtttatttaaatattgaagggaaaaatacctaaaaatgtacaaaggttttatattgtcatagtggtttttattcctgctttgnttctggaaaggaaatcctgaattactta

SEQ ID NO: 49524 - DNA, 2447 bp, Homo Sapiens
ctccttcctcagcggcgggaagctggcggcagcggcggtggcggtggctgagcagaggacccggcgggcggcctcgcgggtcaggacacaatgtttgcacgaggactgaagaggaaatgtgttggccacgaggaagacgtggagggagccctggccggcttgaagacagtgtcctcatacagcctgcagcggcagtcgctcctggacatgtctctggtgaagttgcagctttgccacatgcttgtggagcccaacctgtgccgctcagtcctcattgccaacacggtccggcagatccaagaggagatgacgcaggatgggacgtggcgcacagtggcaccccaggctgcagagcgggcgccgctcgaccgcttggtctccacggagatcctgtgccgtgcagcgtgggggcaagagggggcacatcctgctcctggcttgggggacggccacacacagggtccagtttctgacctttgcccagtcacctcagcacaggcaccaaggcacctgcagagcagcgcctgggagatggatggccctcgagaaaacagaggaagctttcacaagtcacttgatcagatatttgaaacgctggagactaaaaaccccagctgcatggaagagctgttctcagacgtggacagcccctactacgacctggacacagtactgacaggcatgatggggggtgccaggccgggcccctgcgaagggctcgagggcttggctccggccaccccaggccctagctccagctgcaagtccgacctgggcgagctggaccacgtgatggagatcctggtggagacctgagcaggagccctgagtgctcacagccgcctctgacgcattgacacgtgagcactggctcccacggagggtgcgcctgccgccagcggcccagccttgctgccctgtctgctgattctgagaaatcccagaacagcccattaccagtggggctgcagccctaggcccgtcccactcacctcccccctgtggagggccaggcagaggctgttctggaaggcttcttgtcttctgacgtccccacagccctgggcccctcgtgtctctttgtgtcccccactgtagaggacggtgagccgcagctgcatcaacctccttttacctttagataggtgaatttttacaattcagttttacatgtttcgggcagtattttgtcttaagatatattttttaaactttttataccttatctctttagattttttcagctattttcttaaaagtatattttttctataaacatcctttgctgctacattagaacttttatagcctaaacaattgcagttggtgtgtttcatttttttaaggtttaaataagggttttttgttttgttttgttttttgcagtgagcatcactacagtctcagtcaacagtgtgaatgtatcatgttttactttaaatgtgtgtgtgatacttcttcattatgtcctgcgctgcagtgagacctgggtgaaaatcaggaaccgcacacagccacatcttcctagacctaagagtaaattatggaggattttatttatgtctatttatatgtaaatgtcattgaagacaaaggtcaaatatttgtctgtttgtagatcacaggcaccagttggtcttcagggacctcatagcccctcggtggtgccttctcaaggcagtgttcctggaggctcccgtcagggtcagcccatgcacctgccctgggtgaggaagtagcattgctgctggatgagaaacgcctgcgctgctctgttagactggtgctgaaacaaaaggttaaggctaggttgaagtctagaatgaaagaaatctgaatccatgtcattcataaccccttgatctgtagtgtcatgggtgctgccgcaggcagggagtgagctgggggtgcctgcagccttccactcctgccccgcctcaccccacatgctccctgtttctcatgctttctctaacttcctcaccccttaaccaaaaaggtgtgttttcttttgtgcatatagccattcttaaatatcagtgatgtaaacctcactttattaaaaaattatccagcaaacaaaatgggaatgtggtgttagttacgacccacggcctgaccctccagcaacctttctgcaggatcagttctgctgtattatctggtggtgctttctaaggtggggaaaggaattgcacttggctgcattaaatggacgctgggttacttttatttccccccccacagggttgcagagcaaattctttttacattgttcagcgcccggctggggttgggggtgtccacgacctctgacagcccccgatgtcgaaagttaatcctcatggaccctagtttaaagggtatgtattttataggaataaatctaaagcactattttgtttctgtatagcatttttatcttttagaaacatcatttgttcagc

SEQ ID NO: 49525 - DNA, 615 bp, Homo Sapiens
atcccttatataccctaaagttttcatttctctgttttctagaataatttttggtaatttatgctttgcataagtgagtttctggtgcctgttttaaagaaatcttgaagaactgtccgtgtggaaaaaaatttcttcaggatgttttatcttggcctgatctttttacatttctgagccggtctgtatccttcactctacagtagtggtaatttcagaaatttagtagtataaaatattgttgtccatatgttaaaatctatatgccaccactaattttttatccatgaatactgggtggcaaaattaagcacctacaaatttaaaatattttctaaatgttaagaactttctgtcattaaatagtattttgggataaattttctagaatattctattacatcctctttactaagcatggtactaggtaggtaattagagaatatgagcaagattcatgttatttatttttaataaagcaggtattgctgtctctaagccagatctggtcacctgtctggagcaaggaaaagatccctggaatatgaagggacacagtacggtagtcaaacccccagttatatgttctcattttgctgaaaacttttgcccagg

SEQ ID NO: 49526 - DNA, 732 bp, Homo Sapiens
  misc_feature (635)..(635): n is a, c, g, or t
tagggcagagaggagggcttgctcatctgaacaggggtgtatttcattccaggccctcagtctttggcaatggccaccctggtgttggcatattggccccactgtaacttttgggggcttcccggtctagccacaccctcggatggaaagacttgactgcataaagatgtcagttctccctgagttgattgataggcttaatggtcaccctaaaaacacccacatatgcttttcgatggaaccagataagttgacgctaaagttcttatggaaaaatacacacgcaatagctaggaaaacacagggaaagaagagttctgagcagggcctagtcttagccaatattaaaacatactatgaagcctctgatacttaaacagcatggcgctggtacgtaaatagaccaatgcagttaggtggctctttccaagactctggggaaaaaagtagtaaaaagctaaatgcaatcaatcagcaattgaaagctaagtgagagagccagagggcctccttggtggtaaaagagggttgcatttcttgcagccagaaggcagagaaagtgaagaccaagtccagaactgaatcctaagaaatgcaggactgcaaagaaattggtgtgtgtgtgtgtgtgtgtnggtgtgtgtgtgtttaatttttaaaaagtttttattgagatacaagtcaataccataaagctctcacccttctaaagtgtaaaaaaaaaaaaaaaag

SEQ ID NO: 49527 - DNA, 627 bp, Homo Sapiens
ccacattcctgttataatgacttatgagtataaagggatttataagggccatttcaaattacatttttctttaaatatccaaagttcttatgtggaaacaactgcaatttttatgaataggctggtcttgcctttaaaaatatgtttttaaagagcaaattctgcagaattaattattaaaaagactatgggactttggagaggctttcattaacattgtccctaaactacccttagttctacccagtggctcagaacttggggcaattttttttcccaggttatatgtggcaatgtctggagacattggttgtcacaacttcgggggacagtaccggcatttatgcatagcggtcaggggtgcagctaaacatcctacagtacacaacccacacatcaggagcaagaacacatccaattcaaaatgtcagtaatgccaagactgagaacccctggagtaagcctcacaaaagctcttatgacctcacagggcagctgtcttattgtaatcccaaatctacctcagtgatttccttgacattcaaaacacctgtctctactgaactttagagttcttgatttaccaccactggaatttgctctaccaatggcaaaaaaaaaaaaaaa

SEQ ID NO: 49528 - DNA, 1176 bp, Homo Sapiens
  misc_feature (604)..(604): n is a, c, g, or t
  misc_feature (787)..(787): n is a, c, g, or t
  misc_feature (834)..(834): n is a, c, g, or t
gaagcggcagcacacggagaccacttggttgaattctgttggaactctactcaaatctaggggcgtcttctttggacccacaatgggggcaagccttaataatatggaagggagtttgggctttagagatccctttataaaagctctgggggctgagccctgagaattcagtgacaacaggaccaacctgcgctgcctttgactacaagtgggccgtgcagctggttcctctcgagcgagtgtccctaaataggagtttacaagatgtctgggggtaaaagcactgtgcttttcagtggtggctgcgtgaaagggagcgacactcagctgtgtgttcctgggcttgtgtggtacttagaacctcagttctattacgttatagtcagacatttttttgacagtatgagacagactgcaggatgaaaatatttgtcaaaatcttaactgaatgtttactggaagtacttgagattccatttgagagttgtattgttaataatttcatgtcagtgaactgatatctgatgtttatgatatggtgtctttttcttgaaaacaagcttccaagggctagaaataaaatagccaaaaaatgctgggacanaaaaaaacaaacccgccacccgatacccactacaccaccaaaaggggcgggccgccttctaaaaagatatccccctccaagggggcccccaaagctttaacgccttaacccacagctttttttttggacacaaaagatggggtccccctaattaagttggaatccggttattttaattaaagncctcagggccacccttgggcccgcgcccgcgctttttaacaacctcntcccgtggaaactgggggaaaaacaccttggctaaacctttgggcgaaattttttttggggaaggggaacccccttaccctttccggggggcggggggaaaacaaaatttggggaccaaacctccccctctcccgcagaatttttccaaccctcctctaagggggaaaatataaaaaaatttcttaaaccgggcaaaaaagggggtttacacataaaaccccgctatagaccttggccgcgcttttaaaaagcttttggccttacctgcaacaaaggggacttttttaaacaaattttttatccccacgggcggcctaaaggggattctcctaattcgtgct

SEQ ID NO: 49529 - DNA, 724 bp, Homo Sapiens
ggaactgtgtgctaaaattgaacaatttttttgagattatggttgcaatacttggcgtggaatcagctttacataaatataccttgtatgcaaacgatgataaactagtcaggatgagcagagctgcctgacctcttgatttctgctgcaaaagacatatacactgtactggggtcactatttatgaaagcaattggttaggacctctttttttcctctcagggaactaatgctctgaaaagggatctgggcacaacagtttcagtgagtgcttttgagcacacttttatttttatatagtaactaatggttaagattgatggtggcctggattagcaaagaggaagacagcttttaacacagttccctgccttcacaagaggtgtcagattaagatgtgaaagctgcaagaatgttgcagtgaacaccatttcagagctctcagtgtgcagttcaggaattaagatacttggaatagctgtggaggaagaacctaaattgcaaagatctgctattgccagctctcaacccaagtcagtgaattgtcaacctgcatatcctaaaaatgtcaaaatgctgcatctggttaaatgtcggggtaggggggaagctgaaggtgctcgcttcatttgccttgtttactcatcctgccctgtaatgtctgtaatcctgaagatggaataaattgtaacatttagtttctatccaaaaaaaaaaaaaaaaa

SEQ ID NO: 49530 - DNA, 1057 bp, Homo Sapiens
  misc_feature (765)..(765): n is a, c, g, or t
  misc_feature (911)..(912): n is a, c, g, or t
gagttccgtgacaagcgcatagccaagcgcgtggcggccagtctacacaacacgcctatgggtgcccgcaggcgcagccccttccgttatgatctttggaacctcaagtacttgcaccgtttcacctggtcccacctcagcgagcacctcgcctttgagcgccaggtgcgcaggcagcgcttgagagcggaggttgctcaagccaagcgtgagaccgacttctatcttcaaagtgtggaacggggacaacgctttcttgcggccgatggggaccctgctcgcccagatggctcctggacatttgcccagcgtcctactgagcaggaactgagggcccgtaaagcagcacggccagggggacgtgaacgggctcgcctggcaactgcccaggacaaggcccgctccaacaaagggctcctggccaggatctttggagccccgccaccctcagagagcatggagggaccttcccttgtcagggactcctgagggcctgggtggccccttccatttcctggccctgctctgcttcctgtctacctcatactagaatgatcgtgactacccgggcagacattttactgtgtttctcagaccaagtgtctactgatggcccaaacatggagttttgtgggcttccactgtccccactccgaactcctgtatgtgcctggctgagtcacctaattcatactgtcatactagcataattatgactattgcatatgcttgttttgtttgactcttggctgcctacgtctgtanggtcccctgaaaatcccacttcctgcccccagaaagggcctttatttccaactagggagataatgcctagtccaggcaatctttctctgttagcagtccacgggtggagggtggtattagcatctttttttatgtaaaaaaatgannttatgggggggggaatggggtttgggaaaaaatacattttcctattggattttatagaaataaaaatatttttatggccctcttttttttttttggggggggggggggggggggctatttggaaaaaattctcccacattttttt

SEQ ID NO: 49531 - DNA, 564 bp, Homo Sapiens
ctgcgggggatctcagcgcagagaagttgagaggacccatgaaggaagcaaggacacggggcaggcacctggatgttgagagtggagatgtggcgctccaggttctgcttggcctccatctcctcgtccagctggtcttgcaggctgttccgctcctcctccagctggcgcagcttcgtagacacgttgagcttctgccgggtttcttcttgaagcagctcctgcaaaagggatgcaaagaggtcccagggacctgccccgaggaaggccaccccccaggtcccctggatgatgtggcaggacactcacctgggtgtcctggagctgggaactgagggacgccacgtccttggccagcttaatggccttcccctcggcctcgttaagcatccctgtgacgctctcaacttcattctaagggtgccaagagactggttagtcaaagcctctagaaggggatcctcgttgaaaggagccctttttactcaaaacacatgggctagtacttgaggtgttcactgattgagaaaatacccgtgaggtatgggactctgataaaaaaaa

SEQ ID NO: 49532 - DNA, 475 bp, Homo Sapiens
  misc_feature (377)..(377): n is a, c, g, or t
  misc_feature (429)..(429): n is a, c, g, or t
  misc_feature (440)..(440): n is a, c, g, or t
  misc_feature (446)..(446): n is a, c, g, or t
  misc_feature (455)..(455): n is a, c, g, or t
  misc_feature (460)..(460): n is a, c, g, or t
  misc_feature (470)..(470): n is a, c, g, or t
attcggcacagtaacttcattcctcatgttgttcctggataagtcatttcatctttcttagccttaaatttcccaactgtaaatgtggaaataatgtccatctcctagggttgatatgaagggttaataagatattttaaaagcctaatacttagaaagtgctctgtaaatgttagtataaatgttagcttgatccttggacagttaaatctggaggtgagattggagtagatgatttctagaagttccatgtttgctttagaagccttagtttagaccaggtgcagtggcttatgcctgtggtcccagcactttgcgaggccaaggcagggagctcaagaccattctgggtgggcatggtgagaccccccatcttntacagaaaattacgttttaaaaaaattagggcagatgcgatggtacgtgccngtggtcccaantacttngggagactnaggtnggaggttcanttggg

SEQ ID NO: 49533 - DNA, 1116 bp, Homo Sapiens
acaaggctgcaggaaagattactgatgccttcagttctctggccaagaggagcaattttcgtgccatcagcaaaaagctgaatttgatcccacgtgtggacggcgagtatgatctgaaagtgccccgagacatggcttacgtcttcggtggtgcttatgtgcccctgagctgccgaatcattgagcaggtgctagagcggcgaagctggcagggccttgatgaggtggtacggctgctcaactgcagtgactttgcattcacagatatgactaaggaagacaaggcttccagtgagtccctgcgcctcatcttggtggtgttcttgggtggttgtacattctctgagatctcagccctccggttcctgggcagagagaaaggctacaggttcattttcctgacgacagcagtcacaaacagcgctcgccttatggaggccatgagtgaggtgaaagcctgatgtttttcccggccagtgttgacatcttccctgaacacattcctcagtgagatgcaggcatctggcacccagctgctataaccaagtgtccaccaactacctgctaagagccgggagcatggaacgtgttgggatttagagaacattatctgagaaaagagttcacttcctgctcccaggatatttctcttttctgtttatgaagtacaacccatgctgctaagatgcgagcaggaagaaggcatcctttgctaaatcctgtttgaatgtcattgtaaataaagcctctgctctcaaaaaaaaaaaaaaaaaactcgaggccatctatgtcggggtgccggaaaaaaaaggtaaatgaaatggccccttgggcccatacctggtattcctggaccccccttttcttggaaccaaaggggggaaaaattggcacggactctcctaataggggagcccggttaaatttcgaaaaccgcacgcattaacttggttttaaaagaaagccgacatcttacgcgccgtacaaatataccgggccttaggtgagttgtcgcattttctcttggtgacccctaagttggacgcaatctcggctgccgtgtttccggtggaattgaacccctccctaaagggctcggggccttttatcttttgg

SEQ ID NO: 49534 - DNA, 760 bp, Homo Sapiens
gacccagggaaggcagcggccggagcgcgcaaggtgttgaaagacagagaagcgaagacagagacgtggaaagacagggagagagacacggagagagacgcagaaggacagagacgtggagaaagcgctgagagctcgcaggttcattaaagaaggcaaagcactggtttctctccttagaaaagtaggtttcttggcttgatgtagactggcttgctttgatttttagtgaagggaatgtacgtaaaacaaaatagggcttggctggtcaaaggagacaagcaggatggatggatggatggatgaatagatagatggtgtttgcatgtaaattgcagagaaaacaaaaccaaagctgattggaaacaattaattgtgggtgtctgagggggaaggtcgcagctttgggcagctttgagaagcggtacaagagctctgtgcctgtgtgtccagccctggagccagccagtgcatttattttaagctcttagaagcaactccttggcccaggaatgcgtgacccctgagatgggtccacgcatctctctacacgtccttctctccgtgggatactggactcgtgcctctgcgcccattctcttctcacgcatatccatgagctttaatttcactttctgatcacggtacgtccataaagccagtattacacttaaatgaagtattcttttttgtaatcgttttttttaaaaggtaaacaaatttaataaagctaccaataatgttaaaaaaaaaaaaaaag

SEQ ID NO: 49535 - DNA, 703 bp, Homo Sapiens
tcattcccggggctgcaggcgccctctacagtcgcagctgtcacaccactacctgtggctgccacagccccatccccagctccagtcctcccaggattcgcctcagcattcagttccaatttcaactccgctcttgttgcacaagccggtttatcatctggacttcaagctgcagggagttctgtttttccaggccttttgtccctcccgggtatccctgggtttcctcagaatccttcacaatcatccttgcaagaattacagcataatgcggctgcgcagtcagcattgttacagcaggtccattcagcttcggctctggaaagctatccagctcagcctgatgggtttcctagttatccttcagcgccaggaacaccattttctttgcaaccaagcctgtcccagagtgggtggcagtgaatacttttaacttttattctccttcagagcaacatcagaattgcctgagaactgcaatgaacaatctgacaaatgtgaagctggccaaaagtcggaaaatgagaatgagggtaatcctggagaaattgtgacaacaatttgaaaattgtggttgcattttaaagtgtgaacactcccctatgtaaatatgctgacaataaattgtatggagaatggtatttaaaaagtgtttggagacttttcacctgtcctataaaattttgaattgtgtatgtgatct

SEQ ID NO: 49536 - DNA, 630 bp, Homo Sapiens
cttacttatatatcaaagtttccctcataatgtctgctctgtgtcactatgtaccctcccctgtcctccattccccacaccaagagtattatgagtattaaatgccacgtgggcaggttccccaggcaatgagggggtgggcctgtcaaatgcaggccatgcagaatgccgcagggcgggagacgggtgagccaagggagccgagagttccagataacagagtgcacagcaaatgccatggcccgcgtccagcaaccaggagaaacagaactgctgagctcagaataggccaaggccgcgtctgctagcagggagcaagggcacagcctgctgtctggcctcttctgccccatccctccaccgggacatggcccagatgagaaagagctgccagacggcaagtcaagcgtggggcgggagaggacaacgttttatgcaagagtggattctcggagcctctgcactctccatcagggctgctggcatggaaaacacagagaaaccatcacctaggacttgattgaactactggacttcccagaagagtccaatttaaagcaaagaggtccagagaaaaaagcattctagtgacatttttatatatttaaaaactggaaaaaaaaaaaaaaa

SEQ ID NO: 49537 - DNA, 773 bp, Homo Sapiens
cagtagaacctgctcagaaccaggaaatatgttcctctggaatggaccccaatagtgatgacagctccagcctgggcaaacagagggagactccatcgccccccccaacaaaaaaaaaagtttcccatacactggcctgccccaaaacccactaacaattttagcaaaacagtccaggccaaagaggaagcatttcatgttcaataagaaacccagccattccgcatggctggttcctgagtggctctggtgatactctccagccacctgctgacattcagaatctcagacctcgggactgctgttgcggtaccgtgtgtctgacacctgccagcagccctttgctatctgcgcgcaggatgggggtgactgcccagacattcccgctagataggctctgatttccggggcagcctttcagatgcggcagacatacaacacctgtactttagagttttaagggaaaaaaaatcagaagtgctggttagatagtaaaaacttaggataacttagaaaggctagttttagcttcctttgtggctccctggtgcaaaacaattagcagttatgcaatggacctgattctagtttattctaattaagaagtgaggccgagtttgacttcgttcctgaatacaatcttgagtaactgggaaagtctgagtgaaaggatggcctcattctctttctaatcttgctggtttcaagattagaaaatggcattatttgatctgaaatgtttgagaagacacgaataaagttacttgggcaga

SEQ ID NO: 49538 - DNA, 583 bp, Homo Sapiens
  misc_feature (514)..(514): n is a, c, g, or t
tatgctagatctctacctgtgtttcattagtattatctaatgtacttttacatatttgtaaaaacaatttttggtaaaatgtgatgaagatggatttcacaaatagacaaaaaagaagaaaactaccttctgatcttgtattttgaaagattgatgtttgcattttacttcagtaaacaattgctaaagacatcacactagaaacatatgcaatgtttttattacatacttctactggacatcacagaattctttgggttctttgtaatttaatgaataggtctgaaaacttatgaccaatacttgttataacttagaggactttgttttattccaaataaggaatgaatttgcatttaaaatcttaatgaatgttttcaaaactgaatagataacatagtactctaactaaagtctccaagttatgtattataatattacatagtagtatgcttaggctttactatgtattagccttttgttggactgtgtatgtattttaccatatgggttntaatgataatggtgtatgactgctttacatgagtccttatgcatccagatgttataataaagtggaatg

SEQ ID NO: 49539 - DNA, 579 bp, Homo Sapiens
ggagcatcagctgtggcccacagagagccttgctgagaagggggcaggtaaagcagagattttagcattgccttggcataacaagggcccatcgattccctactaatgagaggcagggagagcatgggcaatggagacccaccaatgatccccaaccccggtgggtactggctgcctgccctgggccagggaatggctccttataccaaagatgctggcacatagcagaacccagtgcacgtcctccccttcccacccacctctggctgaaggtgctcaagagggaagcaattataaggtgggtggcaggagggaacaggtgccacctgctggacaatcacacgaaaggcaggcgggctgtgtactgggccctgactgtgcgtccactgctgtcttccctacctcaccaggctactggcagcagcatcccgagagcacatcatctccacagcctggtaaattccatgtgcctctgggtacaaaagtgcctcaacgacatgctctggaaatcccaaatgccacagtctgaggttgatatctaaaatctatgccttcaaaagagtctctgttttttttttt

SEQ ID NO: 49540 - DNA, 728 bp, Homo Sapiens
  misc_feature (721)..(721): n is a, c, g, or t
tgaccctgggtgccacccctgccccgtgtgtgccccgggtgttctcagtggttgctgaaggcaggtagagggtgctgtccagtatcccccatgtgaaggtcacttcccttctcatggagtcagctgagcatcagctcagccctgccatgttcccactcaccctcctcgcctcctgtccggccctgggtttctagccgtgcctgaggcatcactctggcccattgacagatgagaggtctgaagccttcctggccacaggcatcactttctcctcctcctcatgccctgccttgtccttgtcgtgttgccatggggttctgagaggctgggagttcacagacctcagacacagctgagtccgacaaccattggggtggggctgcatcagtctccggagtggcccgccacctcctgaagcagggcctggcccacccaaggtgcctggggcaggcgggcaccgtcattcgctgccattggcttctcagatgtatttcaaggactaaagtgggctctaagatctaagatggcccggcgcggtggctcccgcctgtaatcccagcactttgggaggccgaggcgggcggatgagttgaggtcgggagtttgagtccccgtctctactaaaaatacaaaattagccggacaaggtggcgcatgcctataatcccaggtactcaggaggctgaggcaggagaatcacttgaacctgggaggcagaggntgcagtg

SEQ ID NO: 49541 - DNA, 640 bp, Homo Sapiens
  misc_feature (148)..(148): n is a, c, g, or t
  misc_feature (610)..(610): n is a, c, g, or t
  misc_feature (619)..(619): n is a, c, g, or t
  misc_feature (639)..(639): n is a, c, g, or t
ggccactgaagatgatgagaagcttattgaggaaatccagaaggaggctgaagaggaacagaaaagaaagaatggagagaacaccttcaaacgcattggacccccgctggagaagcctgtggagaaggtgcagagggtggaggccctnccgaggcccgttccgcagaacctgccacagccacagatgccaccctatgccttcgcgcacccacccttccccctgcctcccgtgcggcctgtgttcaacaacttcccactcaacatggggcctatcccagccccgtacgtgccccctctgcccaacgtgcgggtcaactatgacttcggtcccatccacatgcccctggagcacaacctgcccatgcactttggcccccagccgcggcatcgcttctgatggccccgaatccccattgagcagcacaaagcccgtttggggtaggagtgtggatggagaaccctcccccaaggctggtgtctgtaccattgcatcctaagtcagcttgaagggtaggctggttttcttcccacccctttcctagaagggctactgctcctggaagagtggacggatccataataaagacgtcccaaatggtggagttcgganagagctgcnatgtgaactgcccttccctng

SEQ ID NO: 49542 - DNA, 699 bp, Homo Sapiens
aggacctcctgcagagaaacccctggaagaactctctgcttctacttcaggtgtgccaggcctttctagtttgcagtctgacccagctggctgtgtgagacctccagcacccaatctagctggagctgttgaattcaatgatgtgaagaccttgctcagagaatggataactacaatttcagatccaatggaagaagacattctccaagttgtgaaatactgtactgatctaatagaagaaaaagatttggaaaaactggatctagttataaaatacatgaaaaggctgatgcagcaatcggtggaatcggtttggaatatggcatttgactttattcttgacaatgtccaggtggttttacaacaaacttatggaagcacattaaaagttacataaatattaccagagagcctgatgctctctgatagctgtgccataagtgcttgtgaggtatttgcaaagtgcatgatagtaatgctcggagtttttataattttaaatttcttttaaagcaagtgttttgtacatttcttttcaaaaagtgccaaatttgtcagtattgcatgtaaataattgtgttaattattttactgtagcatagattctatttacaaaatgtttgtttataaagttttatggatttttacagtgaagtgtttacagttgtttaataaagaactgtatgtaaaaaaaaaaaa

SEQ ID NO: 49543 - DNA, 962 bp, Homo Sapiens
  misc_feature (756)..(756): n is a, c, g, or t
tgaccttggggagccatctgaggccaagatattgacgggggggattcctgggtcccattttcagcgcccagggtcacagatccacagtgggaagttctgtgggacacattggcactgagccacaaagaaggtgtggccagaacaacttgggctcctgctgaccaatgtcctctagggcctaggggacagaggaacacagagtcacagcttcaggggccgaatgagcatggcggccttcctgagagaatatgccccaccacgaaactcagcccagtagacaccatcctggtagcggcttcggtagtggccgccgtggtgccacacaccgttgaggttggagtgggcacaggcatggtaccaccagcctccccgctggtacagggcacagttacctgaggggagagagagagtccatgtcctctcaccagaataaaagcctctacctgcacctcacagtgcaaggcttttgccaggcatcccctggcccctcccattcttattgaatacaagccctgatcttccatctcctcagcaaaaaaataggagccctggccccccaactttcttcagagtaatagccttaattccttccctatctccttaccaaagtacaagtcacatctttcccaccttttctgcaaactaggagtctaccgttcattcctttatcaaagaaaagtatctacttcctttctagaataagagtactagctctcaccctctgccctttacttggacaggagtcttgattctttntttgcctcatcagagaagggatctggactccccatccccccaacaaggataaaagtcctgaccttttggtctcttgaacggaataaaagcttgcttaatccctatacttaaaaaaaaaaaaaaaaaaaactccagggcattctttggtcggggggccggagaaaaagaggtaatggaaatgggcacatgggcccataaacctggtt

SEQ ID NO: 49544 - DNA, 677 bp, Homo Sapiens
ttatacttacaaaaatctagaaatggagagggaactgttttgaataaggatttaaaatacctgcacaaggatagagagaaactatgtgactcattctgtgaaaagacttcttgcagttgtgagttatttagaaatgatcaaaatttgtaattaggctaatccatttagtgattcctaatattttgtactcacagagaactaattgactaaacaacttgaacgctagtggtttgtccttagacaatctgtctttgaatttaaagtctttatcgctaagaccttgactttaaatttttcatcactacaaccttgaatttaatttcaggtcttcaacatgatgaccttggatttaatttaaagtcttcaacactatgcgctttatcatattattcacagatgcatttttgaaatgtagtatgtaaaagtatgtaacgtgctgtttattaacaaaagattgttcacaacatctcatgtagtttaaatttgtaaatactgcttctgttttgtttctcctttatacacttgactgtctttgtgataagtgacatgaattttatgttaggattaagtatgttttcctgaaacttggattttttctcgtaattatataattgagagtttagaatgaaatccttcaagtgttaaaaatcacattttaaaaagcaaattttggttcc

SEQ ID NO: 49545 - DNA, 869 bp, Homo Sapiens
  misc_feature (825)..(825): n is a, c, g, or t
gtttcggtccggaattccgggaaaatctctccacctcctctaactctctgaaaactctagagttggagcaagtcttccatttgcttcttatccccttaaaagaatgccttccacttcccaacagcccccatcaagggaccccaagaggccaccatgctcttatctcgcactttctttcctattccccttgcctgaatctggagtggggttgagccctctgccttcaaccttaagatttaggaagttctttccccaactgtctaacttggaaaggtagatgagtctgaattttgaagtaacgaatgcaaattccactcagcagaggcaatgttatttatgtacatagggatagtggaatgagttttaatagattctgtccaaaaggggtttgttcctcttatttcctctatgtaggaagttgtgtcttaggcaactttatcagtatcaatggaaaaatgataggcactacaatgaaatggcaggatgccaatatgagatatttcaggaataataagaaatacagtttgtttgtataaaataaactatctcaagaaagttttcaacgacagtgatagtgttcatttgtaagagagagttctagaacttcgatgtccagtgcagtagccactacccatatgtagctgttgagcatttgaaatatggttagtccaaattgagatgtgctctaaaggacaataaaaggttaaatatctcctaattttttgtattgattacatgttgaaatgttaacattggaaatattgggttaaagaaaaatacacaattaaaatgaatcttggccaggcgcagtggctcacgcctctnatcccagcactttgagaggccagggtgggcaggtcacctgaggt

SEQ ID NO: 49546 - DNA, 984 bp, Homo Sapiens
ggatcttccacacgagtgggattctggccttcagagaccaggagggagtgtctgggccgcaggtgtggcactgtggtgagagtgtgtgtctttgcacacacagtgcagcgggaacggtggggctggctggtgctgaagacagacacactcctgagccaaggtcttgtcttcaacctccccgtcccgttgtcccattttgctctgtgaaggtgcaaatccctttcttcccttcccatctcaggctctcctgttttccctcagggtccagtatgcctttgagctttagctgttagaaaggaacctccgtgacttgacacagctttcacagctggctgctaggaccggcgggctgggtgttcacgtgtgtctgtgtcatggatgcaatgcaggccctggaggactgtgcgtcacccgtcaaccagagcgtgcctccgggccagcttccctccaaggaatgagtggatttcatacaggatctctttattgcacagactgaatggctttacatgtttctaatgtgaattaggcatgtgaagcagtgggtgtccacccgtgtccctcatgggtgagccctccagctgtgagcccaggcagtgtggtcaccgagtgaggaccctcctcaccaggaaccgcatccctgtgctgcctccacctgagagttgctagggggttcttgtcgagatcatgtcatcagcacccctaagtcaagtcacgggtttccatagccaggcagttggtatgtacaattcagttcagcgtatgaacttgtatctctaatctgatgtccattttttatattttttgaaactgagcacaatgaaatccctttcctgaatcattttcccctttgggataataaaaaaattgggggaaaggggctatgaatgaatttttatgccaataaatggtatccagtggtgtggcccatggccaaaaaaaaaaaaaaaaaaaaacttccaagggccttcctatttgccgggggga

SEQ ID NO: 49547 - DNA, 677 bp, Homo Sapiens
  misc_feature (610)..(610): n is a, c, g, or t
  misc_feature (628)..(677): n is a, c, g, or t
tgctgcgccacttcccctatgcccagcggcagttcctgaagctcggggggctgcaggtcctgaggaccctggtgcaggagaagggcacggaggtgctcgccgtgcgcgtggtcacactgctctacgacctggtcacggagaagatgttcgccgaggaggaggctgagctgacccaggagatgtccccagagaagctgcagcagtatcgccaggtacacctcctgccaggcctgtgggaacagggctggtgcgagatcacggcccacctcctggcgctgcccgagcatgatgcccgtgagaaggtgctgcagacactgggcgtcctcctgaccacctgccgggaccgctaccgtcaggacccccagctcggcaggacactggccagcctgcaggctgagtaccaggtgctggccagcctggagctgcaggatggtgaggacgagggctacttccaggagctgctgggctctgtcaacagcttgctgaaggagctgagatgaggccccacaccaggactggactgggatgccgctagtgaggctgaggggtgccagcgtgggtgggcttctcaggcaggaggacatcttggcagtgctggcttggccattanatggaaacctgaaggccnnnnnnnnnnnnnnnnnnnnnnnnnnnnnnnnnnnnnnnnnnnnnnnnnn

SEQ ID NO: 49548 - DNA, 649 bp, Homo Sapiens
ctccattaacagaacatttcaggtaagtgcagttgctagtaaagcgaagctgattatccgtggaaaacactatttacctattttccaaggaaggaagtattgagattgacattccagtccccaaatacttatcttctgtgagctcacaagaaactcagggcggccccttagctcctatgactggaaccattgaaaaggtgtttgtcaaagctggagacaaagtgaaagcgggagattccctcatggttatgatcgccatgaagatggagcataccataaagtctccaaaggatggcacagtaaagaaagtgttctacagagaaggtgctcaggccaacagacacactcctttagtcgagtttgaggaggaagaatcagacaaaagggaatcggaataaactccagcaaggaaatggccagttaagtagtgtcttctctctccaccaaaaagaggaagtgcctccagcttttctgggggtctcataaagagcagttttactaaatgattgtatgcttatgctgaacacctttcatattggagaatcatgcatttgggtcactaattatctcaaaatatttcatactaataaagttgaattattttttattggaacaaaaaaaaaacaacaccacacacaacaaacagggg

SEQ ID NO: 49549 - DNA, 838 bp, Homo Sapiens
gttgcctgtgtccctggagtgttacacagtgcctcctgaagacaacctggccctccttcagctctacttccggaccctggttactggtgcgctccgcccacgttggtgccccgtgctctatgctgtggctgtggctcatgtcaatagcttcatcttctctcaggacccacagagctcagatgaggtcaaagctgcccgcaggagtatgctgcagaaaacatggctgctggcagatgagggtctccggcagcacctcctgcactataagcttcccaattccacgctcccagagggctttgagctctattctcagttgccccctctgcgtcagcactacctccagagactgacttcaacagtgctccaaaatggggtatcagagacctaggatagttgatatagatggaaagatgggtacgttgtcctgtatccagcctttcaacagatgtctggccagacgaagaacattgtgtcctaatggtaggcaggagaccaaggagcagaaggcttgccttcctgggagcaggttgtttgagctgttttagagcagtgagccctaccattacatcctgatatctggggcttctgaaggtctgtgctgggagtgaagagtggcttagctatttacccgctctttggggacagggcaaactaaatgcatcccttcttacctaactcccaaccccctgcctgggctgaggcatatgaatgctatagttgtgcattaaaataaatggttttttaatctcctggaaaaaaaaaaaaaaaaaaaggggcgggcccgctcctagaagtattcccttccaaggggggccccaaagcttaaaccccgaaaccc

SEQ ID NO: 49550 - DNA, 762 bp, Homo Sapiens
ggaagctggtgggaaggcatctggcttgtggcctctgatggctgagcctttgtcctgtccacaggggtggaggcagcctcacccagccatccaagccggtggtcagtgctgaggctgggtgggggagcctccgatggacccaggagtgggaggctgctcctgatggcagttgagccccctgcagccttttgcagtgtccagatgaagcccacagagaccctcctccatgtacacacagctgtgagggtagcaggagttggtgttgaagggagagcccagccacgctcaggtccccaccacacatggcctggggggctccgcccttggctgagctggagggcttggggtcaggaccaagggtgggtccaccctgcttggaaagaagctgtcctggcttttggagtcagcgggggaggggcactgcccgggagctggtgtcttgttggaaggggcagctgggagtagggagcagccgagccacaggctgcccacggcatcgtcccctgcctcgggtcagggggccccttgactggaggacctcacaaccctgggggtgtccatggcctgttcctgggagctgcaccctcatcagattctctgtagggggagaagtcatatcttttcctcacccatcacaagcttcatggctgagacctgttagaaacaaaatgcttcctcggtgccacaaagaaatagcactcaaacattaattttctcagcaaggcaatttttacttctatagaagggtgcgactcgcagatg

SEQ ID NO: 49551 - DNA, 666 bp, Homo Sapiens
ggcccccgacagctcagccagacttcccctatggtcagtatggttacgggcaggacttgagtggcttcggacagggcttctcagaccccagccagcagcctccttcctacgggggtccctccgtgccagggtcggggggcccccccgccggcggcagcggctttggacgagggcagaaccacaacgtgcaagggttccacccctaccgacgctagcccgcggcgccgcgacgtctgcacggcccagacccaggattccaaacttgtgaactcgtgacaatcacaaacttggcggcaaagtggcgactcaaccttgggggggggggcgggggggagggcgcaaggcttttggagcggctgtgggtgtcgtctggactgaggtttttaaatatttctttctctaacccatcagcacaataaaaaaaagtcactggttcaacaacagggtttaaaaaaaatgtcttcagctttaattcaaaacttcaggtttctttttcttccttttttttggaaattattttcctgagccttttgttttacggtatattgtaaacttttatgttaaagaaaaaatatacatttacaaattgtgagatttttaagagaaattttctacgatgtatactggcttattttttaatttaaaacggggtttccgtcggcactg

SEQ ID NO: 49552 - DNA, 768 bp, Homo Sapiens
agaccatcaaaaactgcctgtcagcggcggaggacaagaagctaaagtccgtcgcgttcccgcctttccccagcggcagaaactgctttcccaaacagactgcggcccaggtgaccctcaaagccatctcagcccactttgatgactcgagcgcgtcctcgctgaagaacgtgtacttcctgctcttcgacagcgagagcatcggcatctacgtgcaggagatggccaagctcgacgccaagtagccgccgcactttccagcagggatcggaggacgacccgagtcccaagagtggggttttgctttttaaaaggagagaggaggggtgatggcaggggagtggagggtggccgggcaggtcctgccggcgcagggagccctctgcccttcacactctcctccaaaagagcctccatctgtaaggaagcaggtctccgcgaggggtttctttccatgtgttttcctcctgttgttttagaacttttttaaaaaaacagacctcgttttagatttatagcattgacttttacacacattcacacaagaaaaaaatcctttcaaaattcttaaatcttctgttcctcctttttccaagggaagagggcaaaaagtggcctgggctctgttggtgtgcgtgttccgtggcggagagaagaaaatgggaaagacatctcactggtgcttttctcttttgttttagtgccccccgcccccatccctataatatctgtaactactcctaaaaaggttttgattcaggctttttt

SEQ ID NO: 49553 - DNA, 916 bp, Homo Sapiens
tcctggagctgtgcctcagtgaaggggcccagcctgaggaaccctggctcttttctttaaagcccaggccccacttacataaaacatttcagggtcactggaaacagtgaagtgccatttgttgaagcctactgcatgccagcccactgctcatccacgtggtctgccatgcctacgaggaaggccagcgcatgcaggactggtctctaatgctgtggtcattgcacagaagggaaaggtctcaaggaagagtcaactgggacaagcacaagcccaccggacatggccttggtaaaggttagcagactggtgtgtgtggatctgcagtgcttcactggaaataatttattcattgcagatactttttaggtggcattttattcatttcctgtgctttaaataaacaaatgtaccaaaaaacaagtatcaagctgtttaagtgcttcggctacttgtcccctggttcagtagaggccccggtttcccagttgttgactgtgacaggctcagcatgagctcagcagatgctgtcttaatttgtggatgatacaaaaagccaggctttgggatacaagttctttcctcctcctttgatgccgtgcactgtgtgaagcagatgtttttgtccggaaaaaaaaataataggcttggaaaaaaccaccacgaacccccccaacaaaaaccctcgaggcctctaatgccggggggcggaaaaaaaaggtaattgaaatgggccaatgggtacttacttggtttcccggaaccccaccttctttttgaaacaaaggggttaaatcttgccgtggtcctcccaaacagggagcgccctatttaatttcccaataaaccccgggctacaccccgctattaaacagaatacaggttggcgacaacccggggaaattttatacgccgc

SEQ ID NO: 49554 - DNA, 797 bp, Homo Sapiens
acatgctagttatttacctgatgcccttgcttgaaggccctataaattcttatacttaaaacaaaaagccagtaatgagttgtgatcaccccaaaaggcacagttgggctaaaataatgatgatatcaggggtaaacatatttttttgagaagttggtctggatctctgaacactgacaatttgtcattttgtctcagttgtcaaagtaaaaaaagcccagttgtcatccgtcttcaatatttttaaccagaaagtcacctgagtacggagtcccaatataaagtatttgggaccacctccctaacaaagctgttagggtaaattctgtgtgcacgcccaactccctcctgtcttccacagtctcctacaaaaaaaacagatggagaataatgtctacatgcaatgtgtttttactgcaatggtattttaaaatattttcaagaagagaaatactttaatatgtcaagtatgtccagagaaaaaacctgtagttaaatatcagttgtgcaatttcttcctacttgcctaggctctaattagtcagcaatcaggtttaataaaggacatttgaaatttctgttatcatgaaaccttttattctaagggagatttttaaatgaaatgacaagaacttaatgtaatacttgtctctagaccatgttaccctgttaaaattgctgtatggttaatgaaacaggtgtaatcagcatctggaattcatatgtaatctgttagaacattccaagaactgcaaagcgacaagccacaggcacaaaacaaacgacgaacacaaaag

SEQ ID NO: 49555 - DNA, 675 bp, Homo Sapiens
agcgtttgtgtttgatcttcttctgaacaacttaggagaaacttttgatcttcagcttggtagatttaattgcccagtgaatggcacttacgttttcatttttcacatgctaaagctggcagtgaatgtgccactgtatgtcaacctcatgaagaatgaagaggtcttggtatcagcctatgccaatgatggtgctccagaccatgaaactgctagcaatcatgcaattcttcagctcttccagggagaccagatatggttacgtctgcacaggggagcaatttatggaagtagctggaaatattctacgttttcaggctatcttctttatcaagattgaaagtcagtacagtattgacaataaaaggatggtgttctaattagtgggattgaaggaaaagtagtctttgccctcatgactgattggtttaggaaaatgtttttgttcctagagggaggaggtccttacttttttgttttccttcctgaggtgaaaaatcaagctgaatgacaattagcactaatctggcactttataaattgtgatgtagcctcgctagtcaagctgtgaatgtatattgtttgcacttaatccttaactgtattaacgttcagcttactaaactgactgcctcaagtccaggcaagttacaatgccttgttgtgcctcaataa

SEQ ID NO: 49556 - DNA, 580 bp, Homo Sapiens
cattaaatattttcttcctggttttggagactaagctgataaactttttttaaaacttaagcattgtcattgctattttttttaatttgactttcctaggagtttaagaacagtgaaagttagctttgcaccttcaaatgatcttgaatgagggaaaaatcagtttgattccaaggatatttcttgccttacatggtcttttttttgacagtctgtacacctttattattaggttttgaattatttatgtaccagatattatagttttaaacattttaatattctctgatctttagaattatttatgttcaaattttagttgggaactttgtttcctacttaagctcaggactttttaccctctgaattgagtgcctttgagtgacacatgctaatagaaatttcatagtaaatgtaaataaggtcagaggatgtaatatggagcctgatgatgaagcattaatgtaaaaatggaacttatttttgtcaaaaatgagatgtacacttgtcatgatttatgtatgttgaccttttgtgtttattactgttttgaaaatagccatgttcattttctttccag

SEQ ID NO: 49557 - DNA, 678 bp, Homo Sapiens
tataacttatgaaatttcaagtgtttcataagaagcatctttctgaggcacatcttcatttcagatgtcattgcagtttaggacacaatatttccctcatttgtgttttttaaaaaacatagctttgatttttttttattcttaaggtcagaattaaaaagctaaatgaattccaggcttcaaactcccagaattatagctggttcaagcctaaaatgtgctatatcaactgtctacgggggaagtgccgagtagttgtggccttcgtggagtgttttttggagctctcgcctgtcccccacccccttccttcagctgcttctgtttgttcctgctgtagtgccttcagccatgaacataccgtttaatcagtggtgtattaaaatggacctgtacagtcagcaatagctaggccaaaatcgattggctatttttaaaaggaaaaaaggaagatagaaaattgctcttttaatctaggtaaatcaaatcgtgcctgcttgctttccacctgtagctaagtgtaggcaagagcattctgattgatgacagtgtttctttgtgcttctttattcatgcttatccacttggggtaaaagcaccagggtatcttcagaacggagttttcacattcacgtcagaaagcttgtgctctttttctctcagaaaaaaaaaaaaaaa

SEQ ID NO: 49558 - DNA, 593 bp, Homo Sapiens
gtgagtggggagaaggcagcagccctggtggatcgatacagcacccctgccagcctcctggccgcctatgatgcctgtgccacccccaaggaacaagagacactgctgagcaccattaagtgtgggcgtctacagaggaatctggggcctgctctgagcaggaccttatcccagctctactgcagctacggccccttgacctgagcttatgccgtgaaacagcccccagcccccgtctgtcccccaacccaggctagccagccttttaacaacatcttttggggtacaattagaatctaagtgtttgcagccatatgtgtcatgtagaagatgcctagccctggggaccttgtgaaatacgcaggaaccagggataccatctggtccagtggtttttaaacaaagctgcttagcacctggaattccctggtcagggagatggagtcagtggggcattgcagcttggaatctattttatgtcaccagttggtcctcatcaaataaaatttccttaggagtgcagagggctcattgggaaaataaaaataataaaaataaataaaacttcctaaaagaaaagattgaaaaccaaa

SEQ ID NO: 49559 - DNA, 671 bp, Homo Sapiens
cacattggagtttgggattaaaaacaccaaaaaaaaaaaaatgcatttggttctctctacactggctaagaatattgctctacactgtaagttttaaacgttacgtttctgtatgaatgtagtgtgggtttgagtagcattgtgtgtgagtggccccacaggtacattcaccctctagtgcagcccctcagtttaatgaaggaaaaaaaaacaaacacaaagccttaagctctttgagtacttcctttaccaaatgagcatggttctaacacctggagctgggcctacattggaaacaagcccctcctgccctctgtccattcttagagcataccttcatccactccatgctcagcacgtctcatcccaagcgacaattagttggctagaaacacttttctgtaattttaaacttagactgttttgttacaaatttttgcaccattctgttaaagatgcagaattgggcttttttattttttacagatgaaataagcccttacctttcctcttgtctctggggaatgtcagctgatggttcttatttaaggttttgcattttgttcactatccactactgttcgttagccagaaattctctagtgatctgaagcaatgtgactgaagaccagttttaagttatgtgttggcaagttgccttatatttaaaa

SEQ ID NO: 49560 - DNA, 633 bp, Homo Sapiens
acaaatcttacatgaaactctcataaaccatgaaaatgtagctggccttcgggccttaggcatgaaataagcatgaggaacatattcccctaacttctacccccagcccagcaagttatcctttaagaaatctcctaggaattctggagtttgaaaacaattgctctatgttattcctgcttccagtctctaagtaacaagggcatttaaaagcatagtctcttaaggtccactatagtggttctttatttaaggaataactcagctgggtgcagtggctcacgcctgttatcccagcactttgagaggctgaggcaagcagatcacttgaggccaggagttcgagagtctggccaacatggtggaaacccatctctacaaaaaatacaaaaattagccaggtgtggtggcgtgcacctatggtcccagctatttgggaggctgaggcaggagaattgcttgaacctgggaggtggaggttgcagtgagccaagattgtgccgctgcactccagcctgggtgacagagtgagactctgtctcaaaaaaaaaaaaaaaacttcactggccgtccgtttacaacgtcgtgacttggaaacccctggcgtacccaacttaatcgccttgcagcaca

SEQ ID NO: 49561 - DNA, 554 bp, Homo Sapiens
  misc_feature (502)..(502): n is a, c, g, or t
cccttcccggatgtccttcggctgtgggaggtgctgtggacagggctccctggccccaatctgcacctgctggtggcctgcgccatcctggacatggagagggacaccctcatgctgtccggcttcggctccaatgagatcctcaagcacatcaacgagctgactatgaagctgagcgtggaggacgtgctgacccgcgccgaggccctgcaccgccagctaaccgcctgccccgagctgccccacaacgtgcaggagatcctggggctggccccgcccgcagagccccacagcccctcgcccaccgcctccccgctgcctctgtcgcccacccgggccccgcccaccccgccgccctccacggacacagccccgcagcccgacagcagcctggagatcctgcccgaggaggaggacgagggcgccgactcctaaccccgccaggcagcctcgttctgcacaggcactttagcccgagccaggcacacctgcgagggggcangtgtgctccgccgccctgctgataagctggcttcattaaactgacacttctc

SEQ ID NO: 49562 - DNA, 581 bp, Homo Sapiens
ttcgttaacggagatgacttaagttggcagcagtaatcttcttttaggagcttgtaccacagtcttgcacataagtgcagatttggctcaagtaaagagaatttcctcaacactaacttcactgggataatcagcagcgtaactaccctaaaagcatatcactagccaaagagggaaatatctgttcttcttactgtgcctatattaagactagtacaaatgtggtgtgtcttccaactttcattgaaaatgccatatctataccatattttattcgagtcactgatgatgtaatgatatattttttcattattatagtagaatatttttatggcaagatatttgtggtcttgatcatacctattaaaataatgccaaacaccaaatatgaattttatgatgtacactttgtgcttggcattaaaagaaaaaaacacacatcctggaagtctgtaagttgttttttgttactgtaggtcttcaaagttaagagtgtaagtgaaaaatctggaggagaggataatttccactgtgtggaatgtgaatagttaaatgaaaagttatggttatttaatgtaatt

SEQ ID NO: 49563 - DNA, 606 bp, Homo Sapiens
ggcagaagtccagaactgcccatatagatgcccttctacatcctggagcccaaatcagtcatgtgggtgggaagttcccagggcagtggtcacatcgtgaaaattagcaggaaaggcggggcctttcttgtcatagctatttctgaggatgaaatgggagacatatgcccagcacctgatgtaagtttatataatgtaatattatgtacctaccactaagaaatacatgaaccgtgccatgaggacagtaagtgttcataaagcaacatgaagcaagaaacagtgcagggtgcccagtgcacacactagagagaaattgtgaacattaaggacaaggagaattggtgtctttctaaaacatacttatttaaaaacacatacccacttactaatgtggaattacacagtttgtaacaagaaaacagtctctcccattctctagtactgctcccctacccagcagtcacttccagttcattcagctatttttaaaatgtgcttatatgactcttgcttgatatatcaatcttagacattacctgttgactccctgttgtcatacatgaggctttagctctcttttgtcagcaaccctcccccatccct

SEQ ID NO: 49564 - DNA, 729 bp, Homo Sapiens
cgactacatgtttcaacaagcagtgaagaccgacaacaaactgctcctggaaaaccggtccaaatttcttcaggtacatgcctcctccggacacaagtactccctgaaagaggccctttgtgaccctactgtggctagccgcctttcagacactaaagctgctggggaagtcaaagccttggatgacttctataaaatgttacagcatgaaccggatcgagctttctatggactcaagcaggtggagaaggccaatgaagccatggcaattgacacattgctcatcagcgatgagctcttcaggcatcaggatgtagccacacggagccggtatgtgaggctggtggacagtgtgaaagagaatgcaggcaccgttaggatattctctagtcttcacgtttctggggaacagctcagccagttgactggggtagctgccattctccgcttccctgttcccgaactttctgaccaagagggtgattccagttctgaagaggattaatgattgaaacttaaaattgagacaatcttgtgtttcctaaactgttacagtacatttctcagcatccttgtgacagaaagctgcaagaatggcactttttgattcatacagggatttcttatgtctttggctacactagatattttgtgattggcaagacatgtatttaaacaataaactaaaaggaaataatctccacgtactacaaaaaaaaaaaaaaaaaa

SEQ ID NO: 49565 - DNA, 650 bp, Homo Sapiens
tgtttttctcccaagttgacttggagatataaaacctttttgggtggtgcaatctgttaaagttaacatcatagttgtgaatccattctaaggcagaaatttaagaacaagcttcgtcttttgaggaagaccgtaataaaagataatccttcttttaattcgtgtctcttgctttaaagaaaagttaccttgcattatagttaatatttctactggtgtttcctcttagaaacttgagagactattgtcagtgagctgaatgattctgcaaaatcagggaaaagtagtctttagattaataatgtaggattcagaaagtctatagtgtctccctctttgtgggtaggagggaatgggagcagatagaagctaaagataatttattctgcaggttctggcagtcagaataactggcttttaactttattatgcccgggtacaatgcatattatgtcaaacaaatataacttctttaaatattcacatgtaatcttctcattttgcatgtctagtatttgatgctttgctataaagctacaggtccacaatccctttttcatagaattctgaaatccaaaaagtctttaaaaaaattttttttatagcttccttgatgtgaccttaactgatttgggaaaaaaaaaaaaaaa

SEQ ID NO: 49566 - DNA, 814 bp, Homo Sapiens
cccacgcgtccgcgccacatgaactcaaggcccttcgctggaaagacagctgggacatcttgatccgaaaacactagaacaagagtgtggcaaagaacacccgtgctggggtcgggacgaggttgaagggtcttggtcaatgtacgtaatgagcagggtgggccccacgctgggaggacacgggctgggctgagcagggcctctagtggaacacatgggggtctcattgaaaagctctctgatgagcacctccttttgtgcaaagttaattttttctcgacaataaagatattccgtgtcttcacccctgaactaagacacagggagtatttcagaggccagcgtaggagtcatcgacaacgaaaagccgagaacccaggccagcagtggagcctcagcagaccaggcctggtccttgctaattgctgcagggtggagtttgatctggcagacccgatcctccttcatgaacacccagcaacctgagcaagtcccggccctgccctcagcgagcccggcaggcgtcccgggacagctcagtgttggagggccactgaaccacgagccaggctggggcttgcatgtccattgtctatgacagcgtcaagactggcccttggcaccgtgcttgtgtggaaacccttcccctctgagactccactgagacgtggtgagtgaaatcttcctcgttccagtggtcaaggtgtgtcatccatacagtccattgctttgtcttttttcaatgttacttcaaaaggaccatggcaaaaaaaaaaaaacaaacaaaaggggggggcaaaaaatatcccggggc

SEQ ID NO: 49567 - DNA, 1053 bp, Homo Sapiens
caccccgaaaccagcagaaaaacaaaaaggcctctgaataatggcttgacttagcactgagagctatttaataactttgttccgttaattagtactaattaagtggatagatagaatggttttcctgtttgtccctcccatgtttaaaaatctatccaaggttcatgttccaaagtcaagcctattttaaagaaagactgagctcactagttcagtatattttattctcactgacaaaacttggggggagatgtgaatatgacctggtttagagagggtttgttaaggtttatactatttttggattgtgactatccgtcgagagtgatggtttttatctgtcttttgtacattgttttccctttctacattttgctaattatcctgtatataagtttaatatatcactttttaaaagaaaacaattctaccattttaaattcatgtttcaactcctacaaccaaatgagaaaaatcagggatgagcagctttatcccatttggggtattttcgtaagtgatttacatgtgtcaattttagtaatacttttacttttttgtaacttcatccttcatatatgcttgctatacaggtatgttcatctttgtgtacagaggtttaataaattagcttctcactactacaaaaaaacacaacacacaacccacacaaacaccccaccaacagcgaacaaaaaaaacacaaaacacaaaacacacacacccaaccacacaacacaccaagacccaccaaccaccacaaaaagcaggcagacggcagggaaaacacttccgaggggaacaacacgacctcgcacaatgctatatgatacgagcgagcactagtcactagtgttggtcgtcaaatatagccagaggaggatgaacatatacaccgactagggaggagaagaaaaattgagctgagattttagtatggtaaaccaccactctcggtggtcgatcatggaagaccaactcaacatagaccatgcggagacaaccatgggatgagtcaccagttcgcacgaaagcgaagattataacgacgaa

SEQ ID NO: 49568 - DNA, 980 bp, Homo Sapiens
ctgattttatcccagctgtcggggatattgatgcattcttaaaggtcccacgtcctgatggaaagcctgacaaccttggcctattggtattggatgaaccttctacaaagcagtcagaccctacggkgctctcactctggttaacagagaattctaagcagcacaacatcacacaacatatgaaagtaaaaagcctagaagatgcagaaaagaatcccaaagccattgacacgtggattgagagcatctctgaattacaccgttctaagccccctgcgactgtgcactacaccaggcccatgcccgacattgacacgctgatgcaggaatggtccccggagtttgaagagcttttgggcaaggkaagcctgcccacggcgagagattgattgcagcctggcagagtacattgacatgatctgtgccattctagacatccctgtctacaagagtcggatccagtccctccatctgctcttttccctctactcagaattcaagaactcacagcattttaaagctctcgctgaaggcaagaaagcattcactccttcatccaattccacctcccaagctggagacatggagacattaaccttcagctgagacacttcccaagctgctgtttcaaggctgagctggcccctctgccccagctgagatggacagatcgttgtcagctacttgatgtccttgcccatgccacagcttggctcaggggcagtgcatgtcctgctgccctctctgccagagggcacagaacatgtttgtttaatgaacctgcctgcctcagattgctgtccccggagagttaatgcatctacaccactgtgggggrtttgagttataagaattggaatttctgagatcccatggaggttagattgggaggaaagcttaaaagatgtcctttttgtgagagggatggaattgttttctttcattcgtaaagttagtgagtaaagattttataaatcaaa

SEQ ID NO: 49569 - DNA, 613 bp, Homo Sapiens
ccagccagcccatccacttcttccactcctccccgcaggccccaaggcatcactccggccaccctgtcccgctactgcttacacaggccgggttcccacgcagaggggaggctgctccacccctactctcctcccttgctcccagcagcggaagcgcctctgacccttggcttgagtcccacgtgggggaggaggaggcaggcagcaccagcaggggtccaccaagagcccagaccagcccctctgccctcctacccgggcctcgaagggtgtggcacaggctacgtgttgagcgtggcctacgtgagccaacaagaagcaggggcctctgagtgccaagcgacgtggcgggctccacgttagcccaggctctgagagccagcccaggggcggcgctgctcagcttgggctggtccagggcctgcccaggctggggcacctttgcctcctgaggcgcagcgcactcctcccctgcccaagcctactgcctcccgctgccgccagtaccccctccagccccacacctgggcctccccctgccactcccctcccttgctcccctctgtccccagggatcaaacagaagcagccgtgggcaaaatacaatttcatt

SEQ ID NO: 49570 - DNA, 734 bp, Homo Sapiens
  misc_feature (563)..(563): n is a, c, g, or t
  misc_feature (566)..(566): n is a, c, g, or t
  misc_feature (703)..(703): n is a, c, g, or t
gctgacatttgaacagaggactttctgactccagatttcctacccctaagccccctctttaaatgtaagataggctaatagtgccttcctgattagaggtgttctaagctctcaataagcctctgtacacaaaaggacctagtgtgggggctacccagagtgggcgctcagtctgtgttagaagaagatgctacgcggtgctaatttccttttatggaaatcttggttagctaaagcagacaagggtctccttgtgataactctaaaggcttgcacaaatagtttccccagagagctgtatacacattagagttgcgtttttgtttattttgagctgtcttgttaaggaaggatttatatgctggcgttgatgtaggacagcaatcaggcaatgttttctgcctttgacagttggtgtgatagtttgcttccagtgaagtttgactcactgtatctggaagctgtcagaagtgggagcatgaaaaggtcatgacggatggctgtggataagtggttaggggagggagctggtaagggagacaaactgcctcccttgtttcaanaanaaggggctgaccctggctgctcccggccagcccccgtgctcttttcttccccacctgcctgagctggaaagaagcctgccgggctccagttttgagaggggcaccaggttgggtgtagtgtagctcatgagcccttnccagcagcgcaacccctggcataccactaga

SEQ ID NO: 49571 - DNA, 649 bp, Homo Sapiens
  misc_feature (433)..(433): n is a, c, g, or t
  misc_feature (485)..(485): n is a, c, g, or t
  misc_feature (531)..(531): n is a, c, g, or t
  misc_feature (547)..(547): n is a, c, g, or t
  misc_feature (559)..(559): n is a, c, g, or t
catgttgtgcatagttcatgtttcctcaccacccagtcctttctcctgctcatcaaaatcagcatacacatttttgactgtacacactataaatggcatcaaatttggatatttttcttaattatgacatgcaaggtaatgtgagtcctgccagtattctggtggataaggtcttctgagtatttggttgcttgtcacaacattctccaagcagtgatatttctaaagaggagatacatgttgaaaacggttttaatttacacttccatttcctgattacatttggaaatactttgtgtaaaccatcccccttccacctccatttgtctgttgaaagattttaagttggaaacagttcctgtctgaaaactcttctgagaaccacaaaccttgtgtatggattcggcatggagccctcagctggcggctctgngtgctgacggccgctggagaggtgggctcccctcgtgcactttattgcctgngcagttttgcttgatcttttgtgactttgagccttttaagtagttngaaatgatagacttanaatgtttcatanatatgttttatgtaacagactttgacattatttaaacgagcatgtgtaatgtaacttttctctttgaatcatataaaacttgatttacat

SEQ ID NO: 49572 - DNA, 716 bp, Homo Sapiens
  misc_feature (635)..(635): n is a, c, g, or t
cggcaaagtgcaaatgaaaagtcttgatggcatggactggagcggggacagtggggatggagaaaggggaatggattgtggatgtgtttagaaggtagattcgatgtgaaggatgaatctggcttgaccttctgggtggctgatgggccatttactgagatggggcagcctggaagaggaacagaagcagggtcggggtggagggagaatactaaacttagcttgagacattttgcaataaggaagctatatctagagtgcttatgtgactcacctaaggccactcaacaagtttgtggcagaactggattagaactgcacagaaaacagccaagctgggatttgaacccatgtagtccaactccaaggcctctgcccctaaccactgtgccataccacctcccaataatcaacagcaaaattataggtctaacaatgttttatagacacccctccatttatgtgatgggtttgcatcctgataaacccatcataagttgaaaatatgatcataagttgaaaatatgatcataagtcaaaaatgtatttaatatacctaacctaccaaacatcatagcttagcctagcctgccttaaacatgctcagaacacttacattagcctacagtgggcanaactatccaacacaaaatctatattgtaataaagttataaagaatttttgataaaaaaaaaaaaaaaaaaaaacctgagca

SEQ ID NO: 49573 - DNA, 595 bp, Homo Sapiens
aagataatcaccccaaatgggttcagaccacaaattccaagttcctgcaagacttgtgtggattgtggttgctgtgagtctgtgagatgtggatctgtctggcacaagcgccacctagtggccagcctgggactctggtggtaatctatcccacacttcagcactcaaagtctgtgtggtccgtgtagggtcggatccatacatgtagagctcaagggtaagcccaagagttcatgagcaactttcaggggttgctctcccgaagcccttcctcattgtaacctgcccagtagtgtctgggtccctgggctctaccttttcagccctccagccagcttgggtggttgaggcttgatttaccctactctctggtgcacttgactgaaccacgtcagagctaagcagcgagaagccagagagaaaaagcatgaaggtttccccaccctctggggacctcagactctctggttggaaaggaagtttgcctggcctgatgactttaattatctgccatttctcactagggccacaaaatttcttgaggtctggggcacagagaagaaaaaattttagaaaaaaaaaaaaaaaaaaagga

SEQ ID NO: 49574 - DNA, 570 bp, Homo Sapiens
aatctaaagttcttttgagtttgttgcccgttttatgcttgatgtgtatagtaatagggtaggctatttattttattaaaattttttttagagacaaggtttgctgtgttgcccaagctggaacttgaacgactgggctgaagtgatcttcccacctcagcctcccaagtagctgggaatacaggtgtctgccaccatacccagtttcattttgttttttatacccgaagttcatttcctttgtctccctaaaactgaactgtaattttgggaggttttcattagtggaagctcttcatttataaagctatttgaaggggtttaggaatttatatcacatggtaattgtagagaaaaagaagctatatacctcaaaatcgtgccctctttacatatgtcttatcaggtataacatgttgaaatgtcacattagtagtaaagtggggtttatttatatagtggttaagaaatgtcagtttacactgctgtatacttcttcttctgtgtccctaaggcctggtacagtgccaagcacatacttggtatccaatacatattcgttggatgaat

SEQ ID NO: 49575 - DNA, 532 bp, Homo Sapiens
gtttggtttttgcacaaaagtcatttaaaaaaatctgagtaattgtcaaatattaaaagaaagatattcttcctgtaaggaatacagtttttagtcaaagtggccattacatcctctttttaatttacataatacagatacttgagaaagttgttgtggtgttgtatgccaagaaaattctttttattggtgcctatattgtaacaattatttttaatgcattgtattttgaagtaacggttcagttaaatttttcacctgctgtgtaactgaaacacaattacagtttataatcatctgtagaagtctggagataattttgcaactcatgttatgggttaaatgaatattttgtaaaagtaaaagcaacaaatttataaattgattatttgaaactttacaacacaattgcatcccaaatacaaattgtattgcttattcattatagctattcgtcctgtaatctgtttctaggtgaagcatactccagtgttttaggggttttgaacaataaactatttcaaatttcaca

SEQ ID NO: 49576 - DNA, 597 bp, Homo Sapiens
cctagaagagctccctgcaagtgtaaatattaaggatgacctgtgcaaaattatacccacaccagcactagtggtaattattctaaattattgccaaaaagttttttttaatctgtctttcaagtttacagaaaagaaagcagtaaatgcattgatgtcattttattatgtacatatatcatgtgcattcaagctgtgtgacaagatatatcaatataaaaacaaggtatatactttattattttttgaaaacaaggatattgtgatcaattttaccctgtaaaacatatttctgtatttataggtcttaaacatgatgaattttttctattacaagtttatttaaaactgctttctcaagtcgttattgatacagcaagtgaacctgctgcagacagaagcagaggaaagccaagaacagcctttattggtgaagaaaagaatgaatgattctttgtaggcgccatcagccacttttagaagccatcagccagtgtgttgggaaaagaggtttgtcaagtgttggcctatgggaaggtggtcaatgaatgttttgatgaaatgaatgtttttgtataatggccttaaacttttctg

SEQ ID NO: 49577 - DNA, 497 bp, Homo Sapiens
  misc_feature (456)..(456): n is a, c, g, or t
atcaaggccacagatgctatggcccacgtggccggcttcactgtggctcatgacgtgagtgctcgtgactggcaaatgagacgtaatgggaaacaatggctgctgggaaaaaccttcgacaccttctgccctctgggccctgccttggtgaccaaggacagtgtagcagatccacacaacttaaagatctgctgccgagtgaatggggaagtggtccagagcggcaacaccaaccagatggtattcaagacagaggacctgatagcctgggtctcccagtttgttaccttttacccaggggatgtcatcctaactgggacccccccaggtgtcggtgtattcaggaaacctcctgtctttctcaagaagggggatgaagtccagtgtgagactgaagaactaggtgtcatcatcaacaaggtggtgtgatggctcctgcacaggccctgcacatangatgagggcatctgctcccactcagcctagcccagggaaag

SEQ ID NO: 49578 - DNA, 811 bp, Homo Sapiens
  misc_feature (649)..(649): n is a, c, g, or t
  misc_feature (701)..(701): n is a, c, g, or t
  misc_feature (703)..(735): n is a, c, g, or t
  misc_feature (737)..(738): n is a, c, g, or t
  misc_feature (745)..(745): n is a, c, g, or t
ggagttacccaagggatgtcagttttttatccctctgcatgggttggattttccaaaatcataatttgcagaaggaaggccagcatttacgatgcaatatgtaattatatatagggtggccacactagggcggggtccttcccccctcacagctttggcccctttcagagattagaaactgggttagaggattgcagaagacgagtggggggagggcagggaagatgcctgtcgggtttttagcacagttcatttcactgggattttgaagcatttctgtctgaacacaaagcctgttctagtcctggcggaacacactgggggtgggggcgggggaagatgcggtaatgaaaccggttagtcaattttgtcttaatattgttgacaattctgtaaagttcctttttatgaatatttctgtttaagctatttcacctttcttttgaaatccttcccttttaaggagaaaatgtgacacttgtgaaaaagcttgtaagaaagcccctcccttttttctttaaacctttaaatgacaaatctaggtaattaaggttgtgaatttttatttttgctttgtttttaatgaacatttgtctttcagaataggattgtgtgataatgtttaaatggcaaaaacaaaacatgattntgtgcaattaacaaagctactgcaagaaaaataaaacacttctttggtaacncnnnnnnnnnnnnnnnnnnnnnnnnnnnnnnnnncnntgtcggnccgcctcgggccctccaagaaagcttttctaagacccatttcggttttggccgcgcggggccccaa

SEQ ID NO: 49579 - DNA, 533 bp, Homo Sapiens
cttttatgtatgtataaaatgcaatgaaattaatacaaaagtaactggagataatgataataatgtgatagtgttctgcagaattataggctaggctaaaaatctcaaaagtcaagtaagttagtatttgctaaagtcatgtagctgacaatatagtgatgaaagacatatgagaaaacattgtccacatccaaaactgaacttctgtctaactaccctagtgggcctgccctccctgcacctcttattcactatgctgactaatggcatcatccacccaggtcatccaagcctaaaccttggaggtcatcttaagcaccacctccccagacctttacaactgctgaccctcagaactagtcagtcgttaaccagcttctgacattacctaaatttctcccaaacccatcccaattttgtacccaattcttctgacttaatttaagtctatcatttttgtcagaattactagatgaattcttcagtcatatgtatagatatacacgtgctccacaggttaaaaaaaaaaaaaa

SEQ ID NO: 49580 - DNA, 708 bp, Homo Sapiens
  misc_feature (674)..(674): n is a, c, g, or t
cctggttctcagaattttaaccaaaaggagttggctccaaccaatgggagccttcccctcacttcttagaatcctcctgcaagagggcaactccagccagtgttcagcgactgaacagccaataggagcccttggtttccagaatttctagagtgggtgggcatgattccagtcaatgggggaccgcccgtgtctaagcatgtgcaaaggagaggagggagatgaggtcattgtttgtcattgagtcttctctcagaatcagcgagcccagctgtagggtggggggcaggctcccccatggcagggtccttggggtaccccttttcctctcagcccctccctgtgtgcggcctctccacctctcacccactctctcctaatcccctacttaagtagggcttgccccacttcagaggttttggggttcagggtgctgtgtctccccttgcctgtgcccaggtcatcccaaacccttctgttatttattagggctgtgggaagggtttttcttctttttcttggaacctgcccctgttcttcacactgccccccatgcctcagcctcatacagatgtgccatcatggggggcatgggtggagcagaggggctccctcaccccgggcaggcaaaggcagtgggtagaggaggcactgcccccctttcctgccccctnctcatctttaataaagacctggcttctcatcttt

SEQ ID NO: 49581 - DNA, 566 bp, Homo Sapiens
  misc_feature (518)..(518): n is a, c, g, or t
aaaatgtgataagaagtttgtatacatttctggattatagattattatttatcttttgaaccagagctaaatggtaaaagaaaaaaaatcagtgatgattgttatgttgatctcccacaattaatttatcttttgacaaaggggataaagagtttcagtttagctccttttgattgtatattattttttgcttttttattgtgaaaagaggtaggttttatttgtggagagagagttgaagattagggaaccagtgattttaattatgctactttttcttctaagagataaattgatatatcattcagtgtcatgaaaaacatgaatgttgtacaattttcttcctcaaaaaactttttaaatgtaagtatccttattttttttttaaaagagcacaatgtaggtgtatttgagtattttcaagaaaagaataaaaacattaatgcagtattaggttaactggatatcaactaagccttgttaacagttaaagtattataactttttttacttctganaattaaaaataaaatttatttctgcaatttcaaaaaaaaaaaaaaaag

SEQ ID NO: 49582 - DNA, 612 bp, Homo Sapiens
ctcagtctcaaaagaaaaaaaaaagtgggattattaggtcaaacggtacgtgtgttttaaatttagatatactcaagatgccctttagataggatgtctatttcaaattcccatcaacagtgtattagtattcaattccatatattcttgctagtgatttgtcatctttagcttgttgggagtttaaagtagtttgaaacagttttctgtttctttttcagcatcaggacttacttccatagcttaactcttcggagggagctgataaaaatgaaagatcagtgacaagggagtggtgtagaccagtggtcttcaaactttttggttgcttaccccatcactaaaaaattttgagcattaagcaggtgcggtacatggttctgtggtcccatctacttagttggctgaggcaggagaatgtttgaggccaggagttcaaggctaaagttcactgtgattgtgcttatgaatatagccgctgtactctagcctggacaacatagcgagaccatctctttagaaaaaaaaaaaaagatgagatgggaagaatgaagtcagaaaaaaaaaattgataggacttcgtgttgctgctttgagaaaaaaaaaaaaaaa

SEQ ID NO: 49583 - DNA, 875 bp, Homo Sapiens
  misc_feature (728)..(728): n is a, c, g, or t
ccattcagggatggtcaaacaggtcgctcttcagacttttggaaaccagactacaattatcccagctggtggtgctggttataaagttttagcacttttggatgtgcctgataagagtcaagaaaaagctgatttatacatccatgtgacatacatcaaaaagtgggatatatgtgctggtaatgccatcttaaaagccctaggggggcatatgactaccctgagtggtgaagaaatcagttacactggttcagacggcattgaagggggactccttgctagcatcagaatgaaccaccaggccctggtcagaaaactcccagatctagaaaagacaggacataaatgagcataactgattacagggtacagttcttcacagctgaaatggttagcctgagatgctggaagcttcaaaggattggtggagactatgcatggttaaggccatcccgaactttttaaagtatttatgaagcatcagagacttattttccctgtaatagaatgcaaaatcagggaaaatgggttgctttgtgtctcaagtattgtctttatttttgagactattttcatacagttgtcatacacaaggcgcatatatatatttgtgaattaaaatctgtagctgagtctacattgttatgagtcaccattttcacacaacatcatgaatcttcactgttagtactttcatatagaattcggttgaaggaaagattgatttnttgtgtagatgtttaatataactttacaactatatctcattgaaaaataaagtcattggggggatttttaacctctaattttggatggaaaagcacaagaaagccaccacatttcatttaataatgccaacaaaatgtttggtaatt

SEQ ID NO: 49584 - DNA, 552 bp, Homo Sapiens
tgccctttttgtgtggtttccttttgatacaactacggttattcataatgtatacctagaaaagtgaaattgaaaataccaaaagatgtatcatttttatttgaatccatcatgcagtgtacatttcagataatttccttcagtctccagataggagtgtatccaaacatctaattttatgtgcactgtgtatcttatatgaatgttttattttatataccacatgcaaaaatgtccatatgcactatttaaatgttttaaataatatattccttctttataatgctaaatctatatgagtaccatatttttataagtcagtggtctgactggtttcattttagaattaacagctgcttcaatatgttattcaatgttaatgtttggctgtgagtagaatatgtaaaagtggcatggcagcacttatgctctgtgacagtattgtgtgtcatagttgagcagtagctggtagaattaggcagttggtgatagttttactttggtacaaataaaaactgtatatctatatacaaataatatatagatatatat

SEQ ID NO: 49585 - DNA, 907 bp, Homo Sapiens
gtaccctaaaataagaatacatttttgacagaggcttaatgttttaacaaaagagtgtggacatttttattttaaaatttaggcaaaagtcactatcaaatggttgcttatttgtctcacacagccatatagtttttcctggagggttttgttttgttgttgttgaaaagactttgcttacagctagatgaaactttctatagaaaaaaaaattgttgaaaggtccagttctcagtaccatgtgagttaatgatactacaactaagttctttttaaaaagtgattaatgtattttataaattaccttttcacatatgcaaaatctgtttctactacaatgttatttttactaatgccttattgttgcactctttttgaaatatcctgcagtgaatatatgaatcaatttgggcttaaaactgaaagccagttggctgaaaggtttgaaatacgtaccccagtaaaaccattcaatcaataattggtaaataatattttaaaattgtttttaatctgtatagatgacattttgtagctttgtacatgttgttaattaagggcatataattttacactcaaagtataattgctgaactcaggggtgggtagacttcaaaaatatgtctgctatagaaataacttgaaaaaaaaaattaaaaccgtggccagccaccaaattgtggacactggttatatactgctagttaacaattaccacttttaaaaaattatacccggtttttggtctatcctggactagaataaattctccccaatgatctctggtcaggttttattaagttggcccttggttaaccaagacagaaaagtccttttgaattactccataatttttaaactggcttttttaaaatgaaaaattggccgcctggtaaaattattgtat

SEQ ID NO: 49586 - DNA, 639 bp, Homo Sapiens
cctgggtggcgaacttcggacgagggccttctgccctctgccctgcatgggcaggcatttgttccctacctgggtggcctgctcccctgcctgggccctgacttcagctccctgtagtgaagtccaggagggtgggacaggcctgtcaggcctctgggaatctcccaaatcccagaactcaccactcaccatgggcctttaaatgcagtaaactccacctaaccagattcaggggcactatgcccactgcctcctcttcagactctttgcatttcagtgaagagcctggaagaaacccaggggcctcctatgcacagatcttgcagcccagaaccaagtcagcctccctgcgactgcccaggcacactgcccaccaccccacccccgaaacaatgccagcccgctgctttttctatcctcccagtcacctttgcagacaaagaccaggggcagctcccgagggcactgtgaaggctcccatgccacacagtgagaactgtagcctctgcgtccaaggcacacagggtactttctggacccactgctggacagacttgaaggtgtcatgcccggtgtgtgcaggaggaaactaacagttcagtaaactctgccttgaccaaaaaaaaaaaaaaaaaaaaa

SEQ ID NO: 49587 - DNA, 973 bp, Homo Sapiens
  misc_feature (527)..(527): n is a, c, g, or t
agcaggtgcacttcaggacacacctggaggagaagccgcacgtgtgccagttctgcagccgtggcttccgagagaagggctcactggtgcggcacgtgcgacaccacacaggcgagaagccgttcaagtgctacaagtgcggccgtggcttcgccgagcacggcacgctgaaccggcacctgcgcaccaaagggggctgcctgctggaggtggaggagttgctggtgtctgaggacagccccgcggcagccaccaccgtcctcacggaagacccgcacacagtgttggtggagttctcgtccgtggtagctgacacccaggagtatatcatcgaggccactgcggacgatgcggagaccagtgaggccacggagatcatcgagggcacccagacagaggtggacagccacatcatgaaggtggtgcagcagatcgtgcaccaggctagcgccggccaccagatcatcgtgcagaacgtcaccatggacgaggagacggcgctgggcccagaggcggctgccgccgancaccatcaccattgccacccccgagagcctgacagagcaggtggccatgacgctggcctcggccatcagcgagggcactgtgcttgccgcccgggcagggacaagtggcactgaacaggccactgtgaccatggtgtcatcagaggacatcgagatcctggagcatgcaggcgagctggtcatcgcctcgccggagggccagctggaggtgcagacggtcatcgtctagcatgaggtctgcggggtcctggccgggcagggacagggcagaggactctgagcgccccacccatgcctgcctggcctggtagagaagatggcacaggatggaggcgcccaagacggacagtgtacataagagtttcttgttgctttacaataaamcmtgagacctgcmgcttgtgatgttgttggmgtggcagctccgcggctggtgcacacctttg

SEQ ID NO: 49588 - DNA, 931 bp, Homo Sapiens
  misc_feature (764)..(764): n is a, c, g, or t
agttctcaggtgtggctggggaagcccccagcaacccctctgtcccagtagcagtgagcagcgggccaggccggggagatgctgacagtcatgctagtatgaagagtctgctgaccagcaggcctgaggacaccacacacaatcgccgcagcagaggcatggtccagagcagctccccaatcatgcccacagtggggccctccactgcatccccagaagaacccccaggctccagtttacccagtgatacatcagatgagatcatggaccttctggtgcagtcagtgaccaagagcagtcctcgtgccttagctgctagggaacgcaagcgttcccgcggcaaccgcaagtctttgagaaggacgttgaagagtgggctcggagatgacctggtgcaggcactgggactaagcaagggtcctggcctggaggtgtgaaggtgctgtatcccggaaatctatctggaccctggactgcagtgcaggagatgacagagtgaggagggcccagagcagaattctggccccagaactctgtgcccaggagccatgccttgagcagtattagccgtgtgtgtatgcatgtgagtgtgtgtgtatgtgtgtgtgtgcatgcatatgcatgtgcatgtgtgtgagctccttgaacgcacggagcaaaataaaattttcttagcctcccggcgagcccccccccccctcttcccccgcccttgccccggccttctcccccccctcccaacctaccccttacataaaaatttntatacaggggcgggggccccccccttccctcttcttcccccctgcgcgcctctttcttgtatcctcaccccgatttgttacgccgctacgccgccgcttctatattccttttcatgcaccgcctggcgtcgccttttgcgcgccgacgcccccccgcccccttttcc

SEQ ID NO: 49589 - DNA, 590 bp, Homo Sapiens
tcctggtcggcgtgggactggaggcgaccccctctccaggtgtctccagcgccatcttcttcgtgccgggcttcctgttgttggtgcctggagtctatcacgtgatcttcatctactgcgcggtcaagggccaccggggcttccagttcttctacctgccctacttcgagaagtgatcgcggcgcagcgtggaccccttgcgcccatgggggcgcccctcttgccctgttccgttcccctcatctcaagggaagaggccctccaggaccctcgaaaccccagcccctagggagtttgctcaggaagttcggggcatgcaggcctggccctgggaaagccgcccgtcgcctgctctgtgccttaacttattctcgggccgtgcggctgctaggttgctgttattttgtgctaataaaagagtaattaattccaaaaaaaaaaaaaaaaaaactcgagggggggccccgtacccaattcgccctatagtgagtcgtattacaattcactggccgtcgttttacaacgtcgtgactgggaaaaccctggcgttcccaacttaaatggccttgaagacatccccctttcgccag

SEQ ID NO: 49590 - DNA, 733 bp, Homo Sapiens
  misc_feature (274)..(274): n is a, c, g, or t
  misc_feature (633)..(633): n is a, c, g, or t
tcaaattgaaggttaaagtccatcactgctgtttcttaggctcaatggttcaccacctcctcctcttcccaagatggcatctccaggaagaaacaatttagacgacttcctaaggaaggcaggggctgctggtctcctggggtcctgcttgtatccactgttgaaatccttggtttcacttgtgatctgtggtctgttttcttgacatagttgaggccaggcaataataacacctccactaccacctccaaaactctcagctcagctttcctgnagtcatggatcctctgtctgagacatgcactctgcctggccctggcgcaggcagcctaccttgcaggctctgcatggcgttaccttgcctctcacccagggtgcccatggcaatgctcctgacttgcatctctcacctactttccatgtcccccactggggacgtacaggaacttctgaaactgtcccctcaggttcaaaccatggggaaccagcagggtggggaccctcagaccctctgtctcaccaccttgtgtcacatggtcatctctaccacccctcaacccccacagctgctaacttctggcctgaaacaagtgttctcctcccataaggtcccaaatgggacacaagttttantgctctgggattcttccaaacttaactgactctgaccctgacctgttcaggattttgagaggagccaaaacacgtgcctggcccctgtaggcatttgaca

SEQ ID NO: 49591 - DNA, 549 bp, Homo Sapiens
  misc_feature (27)..(27): n is a, c, g, or t
agtggcccctgtgcccccactgtgggntaggaacacgcgtcatggtgttcttgtcggaatgtgaacatacagcaccctctagcattacgaatctcttaggatttttaagattgtatttgataatacttatatttcacagggcacacttttggcacacctcagagcacactgctgctattttgggtcatatcactgtaaaatacataataagtactacttaactgtgacatgaagaattggaatcccagagggcaacatttgatttgactaagatcaggcataagatagaatttttgtcatttttccttgcagttttattgacttagtttatgagcttggataaaataattttttgatgaatcatgtcaataaaaggaaaaataatgtaactacctcataagtctgataaaaggaagttgctagtgttttatagaatttctgaaggtggttaaatcaagtatgatttcaaaatatcaactagttccacttttgtgattgcaggatgcttcttatactaaagttctcataaataataaatcagcttatgcc

SEQ ID NO: 49592 - DNA, 558 bp, Homo Sapiens
gcccatgagcaccaagcggcgcctgtaggaggagcaggagcctctgcgcaagcagtttctgtctgaggagaacatggccacccacttctctcaactcagcctgcacaatgaccacccctactgcagcccccccatgaccttctccccagccctgcccccactcaggagcccttgctctgagctgcttctctggcgctatcctggcagcctcatccctgaggccctccgtctgctgaggctgggggacacccccagtcccccctaccctgcaaccccagctggggacataatggagctctgagtgctggtggacagtgcccctcccaccttccttcttccccacaacagaagagaccagcgactcccgcaaagggacaaggttcctccctctcctgcggagtaggcatctgggcaccaagaccttccctcaacagaggacactgagcccaacggagttctgggatgggaggggtgggagcatgggaagggaggcatcccacccccaagaagaactgaataaagattgctgagcaaaaaaaaaaaaaaaaaacaaaaaac

SEQ ID NO: 49593 - DNA, 692 bp, Homo Sapiens
ttttttttttttttttttagtgatccacaagattgagaaaatattataaagtagacaagaatgttattatctaactatataatattttctcaatcttgtggatcactaaaatataacaaaggattgttttctatgctaattttcaggttgtccagttaaaccattatttggtatcctttgagcaggttagcctttcaactatttagagtttcttctcagaaacattcatatattatacaggaaacattcatagtttatttgggaaacattcatattttatacaagatgtacaaatttaagactagacaattaaaaaaaaaaacacaaaattatagccgcaacactatcctagctgcattgtggtgattatattgttccgttagctgtccattatatacaactggattttaatcgtgctattcacagaggggccaaagcactcatctaaaggtaaaggcgctcaggtttaacgtgcactttcatagccccatgaaaacacaaccattatatacactgtaaacaccatagggcatgaaatccacctccagccacaaacatcaatctcacaggatcaagcatacgaggtctaaggtggggtgcctgacttttctttttaagaaacttttcatctaaaagtcctgctattcttttcacaggacaatattcacttatttcaaatatgttgccagtgc

SEQ ID NO: 49594 - DNA, 705 bp, Homo Sapiens
cggagtccactcctgggcccactgtgcctctcccctcagtgtcccttctgacagtgactcctctctctccagcgctgcctgtttcttccccctcctctaagctactcttccttgagccctccctggctgcttcctctcgctcatccgtcagatgcaatctgtgggccgcccctctcccctggccgctaagcagcctccattgatttccgctcgtgtttataggatttccacttagccgtgatcagtagttaagcacaggaaaatcccttgccaccccccctcccttggtcgatgccattgattctgccagcggctcctaaaccgccttacagctgagttagaagatgaggagaggcagcagggatttccctgccttgggatgtgggaaacagaagaaaagttgaggaaatggttgggaatcgctgttagaactctagaaattctaatctgactttgccactgtgcccagctctggcccagagggtagagtgcctcctgtggaagtttaggggcaaatttgttccctgacctggagagggttagaaagaaccaacagctgccccctccccgcccccgtgttgagacaggttctcaaggctcaggggaagatgcatacctcctatgtaagaatgctcttcccttgctgttattcatacacactttccacttcaaatatacccaaatatggctttcctcaaaaaaaaa

SEQ ID NO: 49595 - DNA, 739 bp, Homo Sapiens
  misc_feature (641)..(641): n is a, c, g, or t
tcaggctgcaatgacagaatgtggtgagcagcgtctactgagactactaacattttgcactgtcaaaatacttggtgaggaaaagatagctcaggttattgctaatgggttaatgcaccagcaagcaaaatattttatgttttgggggttttgaaaaatcaaagataattaaccaaggatcttaactgtgttcgcattttttatccaagcacttagaaaacctacaatcctaattttgatgtccattgttaagaggtggtgatagawactattttttttttcatattgtatagcggttattagaaaagttggggattttcttgatctttattgctgcttaccattgaaacttaacccagctgtgttccccaactctgttctgcgcacgaaacagtatctgtttgaggcataatcttaagtggccacacacaatgttttctcttatgttatctggcagtaactgtaacttgaattacattagcacattctgcttagctaaaattgttaaaataaactttaataaacccatgtagccctctcatttgattgacagtattttagttatttttggcattcttaaagctgggcaatgtaatgatcagatctttgtttgtctgaacaggtatttttatacatgcttnttgtaaaccaaaaacttttaaatttcttcaggttttctaacatgcttaccactgggctactgtaaatkagaaaagaataaaattatttaatgttttaa

SEQ ID NO: 49596 - DNA, 737 bp, Homo Sapiens
  misc_feature (733)..(733): n is a, c, g, or t
ccatgtggtgaagaactcaagggtggggataaagtgctgatgacctgtgttggcattggtttctccaaccttagcaagaccctcaagtgataaccatcacaagataaggccccaatgcctacagacaaagcagaagctgccacggacaccaatgggaccaagtccaaatggattaatccaggacagaatagccacttgcttaattttctgtgaagaaatatcaatatacaaataaaagacatccctgtagcatatggtttccagctgtttctccagtggcattgccattgcccaggaggggcccagtcaccatgagagctcccttgccttacctggaggaagaatgtgccttcaggccacagtcgtgctgctagaacagtctcatagctgcagttcagctgtgcttcctcagcctactatcataggcttcctcagccctctgtcatatggctgttttccaaacctgtggagtctgttactgttctttctgcaaggactcacctccttgagccttggtttttgttgtagggattaaatgagataatatgagtggcagctcttcatgagtcctgcagtgctaagcaaatgtcagaaattggtgtattagactatttatctttgatcttctgaatggattgctgtcatggacacggacacggatcttcatctggttcattgtatttatatgtgagggatggatggctgcggggctccaagtaagttattgggatgntttt

SEQ ID NO: 49597 - DNA, 672 bp, Homo Sapiens
tgccacattaccaaaattaattaagtaaactttatagcctgtgggagtctattatatattatttgcaaaagtagtaaatatattatgtttcatgatgactcttgatgagatgctagaatgtaaccatacatttatcttatttgaggatagaaatagcatggatttcaacatcacttatttatctgtataattggaaataaaacaccgatatgatagagaatcattccggcattacctaacctcttctgcagttggatctatgtattttcattggtctactgaaaacaaacaatacaattaaaagcactaaagattattatattaattcaactttgatctgatatatcacttaaactaaaggggtgtgtgtggtgtatgcttgtttcctatttctgctctttaaagatactttgaatcaataaaaccattagtctacaaatcaaattgtgaacttaatctctagaaagagaatataactcagccatttataggaatttaggttcaagtacaggatatatgaaatcttttcccagtatttcagaatgtacttaattcacaggcaggatgcttcaatgcaaaatcatgaatatttttaattcaaaactaaaatgtcattaatatgtatgtatgcaaatgtttatcttattttctgaaatgcatctactttcatgg

SEQ ID NO: 49598 - DNA, 810 bp, Homo Sapiens
  misc_feature (732)..(732): n is a, c, g, or t
  misc_feature (781)..(791): n is a, c, g, or t
  misc_feature (793)..(793): n is a, c, g, or t
  misc_feature (795)..(795): n is a, c, g, or t
  misc_feature (797)..(798): n is a, c, g, or t
  misc_feature (800)..(800): n is a, c, g, or t
  misc_feature (807)..(807): n is a, c, g, or t
gggagcacacaggaaacccctaactttcctataccccacccgcctcttcccctttctgtcccgggatacctggcggcaagagacttcttggctattgtccatgctcccagaatcaagcataaatgccagacacggcgattgagaagccaatcagtgaaccctttggcaaagcccccatccacacctggcactcccctctaccaatccctggcacagggttcctggagagcaggtgctgtacattttacagctttacaatggggctgttgacagccataattagggaggcatgaattatgcggctataatgcagagccctacaattaaggcgggaatgaggggctggaggcagcaaacggaatctgccctatgagcgtggctgttgagtcctgtctcctgggtctgactttccgtaatatgattggggtacagtagaggtgattaatggggctggcatctctctttggcctgaggttctgtattctgggaaaggtacacagggtggagtagggagaagctgccccaggaggcgatgtagtggtggaaagaagaggcagagaggtcgtcgtcgtcgcccagcagcaagggctgcaaaatagtagaactcgtggttgctttggacaggtgtgatttgtgcaagccaggttcaacccttgcctcaagaaatcagatgggacccatttagtgtcctttcacctgtgagccaagcccccatttgaggacatctatcgnattcttgggtggctggtctccaaatagaattttttaagggataaacccnnnnnnnnnnnananannanaacgaanggc

SEQ ID NO: 49599 - DNA, 786 bp, Homo Sapiens
catatctcgttgttgttgttttttttaagacggagtcttggtcttactccccaagcaatggtgcgatttcgtctcagtgcaacctctgcttcctgggttcaggctattctcctcctcaacttcccaagtagctgggattacaggcgcccaaccacacccagctaatttttgtatttttagtagagacagagtttcaccatgttggccaggctggtctcgaactcctgacctcaggtgatccacccgcctcagcctcgcaaagtgttgggattgcaggtgtgagccactgcgcctggccacatgtgtatatcttaaaggaaataatgctaggtaatttagtcaggtgcttgatgagcatttgtcatcatcatacggagtcaatttgtctttttctataaaagttctttttgtaaatgattagttgcttaactgctttaatttcttctaggtaccttacctgtcatcaggatctttttaccacaaataagaaaccttaaagcataaaacttggttcagtcttcacatttcttaaatggaaggagaaagggaataatagggagatatctttatctcaaagccaactgttgttgacttttccagtggcaggggtatgatgctaggacttcagatttcctgattccccatcctagtgccccttttgccaaactaggcaggctttcacagcttttggagcctaatttaagtttttcttggtaagaacagaaaactccattcatagattttaatttgtcattatttgcttatttactgaaaaaaaaaaaaaaa

SEQ ID NO: 49600 - DNA, 1019 bp, Homo Sapiens
  misc_feature (742)..(742): n is a, c, g, or t
  misc_feature (760)..(761): n is a, c, g, or t
  misc_feature (771)..(771): n is a, c, g, or t
  misc_feature (787)..(788): n is a, c, g, or t
  misc_feature (790)..(790): n is a, c, g, or t
aagaagtatgagcagctcaaggccatgcggaccctcagttggaagcacaccctgggcctggtgaccatggacgtggagctggccgaccgcacgctgtctgtggcggtcaccccagtacaggcggtgatcttgctgtattttcaggaccaagccagctggaccctggaggaactgagcaaggcggtgaagatgcccgtggcgctgctgcggcggcggatgtccgtgtggctgcagcagggtgtgctgcgtgaggagccccccggcaccttctctgtcattgaggaggagcggcctcaggaccgggacaacatggtgctcattgacagtgacgacgagagcgactccggcatggcctcccaggccgaccagaaggaggaggagctgctgctcttctggacgtacatccaggccatgctgaccaacctggagagcctctcactggatcgtatctacaacatgctccgcatgtttgtggtgactgggcctgcactggccgagattgacctgcaggagctgcagggctacctgcagaagaaggtgcgggaccagcagctcgtctactcggccggcgtctaccgcctgcccaagaactgcagctgacacatcgcccgcccgcccgcccgcccgccaggcgctgccctgcaggtgctctcgtcctcccgtgccagcccccgcccgcccgtgtcccagaatgcactgctgaggagcatgcccacccccacccccgcagtgtgcagattanagcaagtcagatcttccnnccacaaaaancccccccccccccccnnancccaaccacacaccaaacccacccacaccaagggcgggcccctttaaagtatcccttgaggggccccagctttacgggtaccccagtttttcttgtaaaaaagggggtcccctaaaggggaagcccatttataaatctaggcccctggggccgccctttttacaaacctcccggaacctgggaaaaaactggcatacctttggggaattctttttggggaaggaaaccc

SEQ ID NO: 49601 - DNA, 769 bp, Homo Sapiens
ccccgcgtccgcccacgcgtccggccggcgccgcgcccatagccggacggggatctgagctggcaggatgaatgtgggggtggcacacagcgaagtaaaccccaacacccgagtgatgaatagccgaggcatctggctggcctacatcatcttggtaggattgctgcatatggttctactcagcatccccttcttcagcattcctgttgtctggaccctgaccaacgtcatccataacctggctacgtatgtcttccttcatacggtgaaagggacaccctttgagactcctgaccaaggaaaggctcggctactgacacactgggagcaaatggactatgggctccagtttacctcttcccgcaagttcctcagcatctctcctattgtgctctatctcctggccagcttctataccaagtatgatgctgcgcacttcctcatcaacacagcctcattgctaagtgtactgctgccgaagttgccccagttccatggggttcgtgtctttggcatcaacaaatactgagggatgggttttgggacagctccatgggcatggggaaggcactgaaacagaggactataaaacatccttctcttattctccatactgtcttctacacctttaaagcctgagaactatacaacctttcccagactcccaagaagagaagagattggcaaatgggggctcctgggcccagtcctgctagtggcaagtttctttgaatcaagaaggcaggtgaggtaagggccaaatcactct

SEQ ID NO: 49602 - DNA, 476 bp, Homo Sapiens
cgtgggttggcaagtaattttgcaactttcaagtgcgctctttagaccaatgcattgcgtttctttccctgcttttgagatagtaggaagagttcttggtggtgtccccccccttcaattcttcagttgtatagtagttatagggaagatatgggtgtttttctttattattacttttttttttctgcaggtcagtaaaaggatttaagttgcactgacaaaaataccaaaataaatttgtatttttaagttcccatttgaaattgctggcgctgctggccggatgcatttttgagtttgtattagttgataaattaacagtaataacaagattgtatgaaccgcatggtgcttgcagttttaaatattgtggatatttgtcctgcatcagaaacgagctttggtttttacagattcaactgtgttgaaatcaaacctgccgcaacagaaattgtttttatttcatgtaaaataag

SEQ ID NO: 49603 - DNA, 727 bp, Homo Sapiens
gggactcctggcctcaagcaatcctcccacctcagcctcctaaagtgccaaaattataggcgtgagccactgcacccggcccctatttgaagacgtcttttgtaaaagctagcttctagaacctgagaaaagctcttttctcagaggagatactccttttgatatgttaatgattaagagtggttgcccaggcctagtttcagtggcagaataggatggaattaaaaagcagaactcatctggcttcagcagattgccaccaagaggatacaggtggtcaggtcctggctggctttgtctttgggcctgggcaggcttaggatttgactttctttgaagtacctgatgctgattgattccactaatagtaggaagcaagagacttaactatgagggacgttatgtgaatcttaagtcttaccagtccttgcattagtacattaaatttggatgttttggaagcaaattcatacgatcgtgagtgatttctccaaagaaaaaaagccttgtccagcctgaccaacatggtgaaacccatctctactaaaaatacaaaaattaactgggtgcagtggtgcgcatgcctgtagtcccagctacttgggaggctgaggcaggagaattgttgaaccctgggaggcagaggttgcagtgagtcgagatcgcgccactgcactccagcctcggtgacagagcaagactccatctcagaaacacacaacaaaaa

SEQ ID NO: 49604 - DNA, 817 bp, Homo Sapiens
ttcagcccaacactcaccttgaaggctcagacgtgcagcttctggaatacgaggcgtcagctgctggcctcatccgatccttctctgagcgtttcccagaggatggacccgagttggaggagatcctcacacagctggccacagccgatgcccgattctggaagggccccagtgaggccccatctggccaagcttgaggaagatgtgtggccttgcccccaattccatcagaccaaggctgcaagtggccctccattcgtgtgtgtatttaggggctggggagggggaggggcaggagcttggaccttggtactacctcagctaagggtggtgacacaaccccttccatttgtcagcactttccagcctgccaattgcttcccctctgtgatctcatttcatctgcactgccatacgtggagtgagcaagacagggcttaccatcctgtctaccagatgaggaaatggcagttctgagaagtcactggtctagatcccgcaggtggcacgtgacagctagggttcaaaacgttctcaccaaatccaatgctcctcacatattaattcctataaccagacgaataaatattagagacaaccacaagaaagcagacgacctcccacaaccgcgagcacacagcaccgacgacgatcacaccaccggacgaccggcaccgcgacccacacaaccacaacacaggcgcccgcccaccaagaactccccccggggcgggccacgaatagaacgcagcccgccactgcatgcaaacaacgacggcccaccccaacgacccaccgaacaacagacgagcccgcc

SEQ ID NO: 49605 - DNA, 424 bp, Homo Sapiens
ttttttttttttttttttttggcacatactagaaaggcagtgcctcagcccttccctgaatccatggaggtgttctgtttggggctttttagactgctgctgctcagctggttgcttgaactgacagtaggccagcctgttctctgccattccctagtcatcctgtgcctcaccacagcttgcttagagcaagccttttctcagaccttaggcacagcctctcctttttacctgatcaatgttaaatgtaagcacccctgatcccaggacataaggaaagatgcccaattgtacttttgttctatagcctgtgaaatggctagttgatcatttttccacaaagaattaggtgttaagagttttccttcaggctttacttaggagaatggactaagctgaaggtgtacttcaccagcaagagtca

SEQ ID NO: 49606 - DNA, 500 bp, Homo Sapiens
catcctgtgcctcaccacagcttgcttagagcaagccttttctcagaccttaggcacagcctctcctctttacctgatcaatgttaaatgtaagcacccctgatcccaggacataaggaaagatgcccaattgtacttttgttctatagcctgtgaaatggctagttgatcatttttccacaaagaattaggtgttaagagttttccttcaggctttacttaggagaatggactaagctgaaggtgtacttcaccagcaagagtcaactctagaattcaggatgttccttctattgttttcttagccatctgtcaggaaatgtaactttggttttatttttggcttattccaaggggtaagccagaaaatagaaatgattatttctgattaatagcagaaactttttcaatctcaaatatataaggtgtctgctcttttaaaagctctaagctaagtcaagagctaggaactgttgatacaaataaaagtttttgaaggg

SEQ ID NO: 49607 - DNA, 581 bp, Homo Sapiens
ggacgatgatgcagaggttgaggctatcctcaattcaggtgctaggggttattccgccccttaagtagatctgaggcagacccttgggggtgtaaaagagagtcacaggtaccccaaggagtagatgccagggtcctaagttgaaaatgatgtcgattgggggcgggggacactgtatttgatatttgtgatcagtgatcattgttcaactgcgaaatagagtgtttgcttttgataatggaaaattgtattcgttttaaaattccgtttgttgagaataacaatatgtttaaaaatataattgaacaaatttttttctttgtttcctgtcattgacatttagtataacagttttgctaacgttctaaaatgaagtcgttccatcataatctatgatcttgtacagcacttatagaaataagctgttcttttgaagttgaaatacccagtaaaatgttgaagaaggatggaggatttcttcatatctgacgtttctgaaaccctttgtgtctgctgttgtgtgaagattgacatttaccatgattttccttagttactgcagaacatagagaaaaataaaa

SEQ ID NO: 49608 - DNA, 713 bp, Homo Sapiens
tgtgtatacatttgtaatggtgataaccacaatgtgttcatacatttgttctaaatgtttgcttatgatttatcctgctaactttcattttcttatagcaagcagttttttcaaaaatgaatttttatttaatgtggttcagtattataataacaaagcattttgtagaactggttttttttctcatttatttttgtattccatacaatgtgaccaattgacttgaatatgactagccagtttctatgttttgttagatataaaattaaatcgaatttgttgaatactgttcttggcatttaaaaaataagaccttcttatcttgggccacatgtcaaaagaaaaaggaaacaaaaatatattaaaaataagacttttcattacccatgataggacttttgtgatatggctaatctcagtacacatttcaacttaaaacctttttatttacagcaccataattttaaaatttacttgcaatcttggtaagactaaacttgcagtgtttttctaaaagggaatttgataggtaaacttgatttaataaaaattaaatatcatttctgtttacaccaaaattatcagaagtaggttgattagtcattataacacttaccatatgattctattaagaagtcaattcagtagcatgtatatcaatttatatagataggtagatagttttggatgattgaggcatgcttatttatgaa

SEQ ID NO: 49609 - DNA, 631 bp, Homo Sapiens
aatagccactgtcatatcatttttaaaggaatataaattatagggccttttgtttctttgggtttttttttttttagagacaagatctctccgtgttgtctaggctggactcaaacttctggactcaagcaatcctcgcaacatcattaatagctgagagtagagacttgagccaccacacctgactatagggcctttttgaaaggaaaattgacatcatcaaaattttaaatatattcagtctatttctcaaaaactcaaagaatactaataaatgtgtactcaggtatatgtacagaaattgctgtaacattataattttaaacaatttaaaacagactgagtttccaaagttagggtacaatgaaagaaaaggtggcttatttatactctggaatattttccaagagttgaaaaggatgaggatacacacacacacacacacacacacacagtttgggtatccctaatccagaaattcaaatgctccaaagtccaaaactttctgacccaccaacatgactgatgctcaaaggaaatggccactggaagatttcagattttcagatttggaatgctcaaccagtaagtatataatgcaaataatccaaaatacaaaaaaaaaaaaaaa

SEQ ID NO: 49610 - DNA, 923 bp, Homo Sapiens
catttggagatttactttgtaagatttctgtgatgctgttttataccaacatgtacggaagcattctgttcttaacctgtattagtgtagatcgatttctggcaattgtctacccatttaagtcaaagactctaagaaccaaaagaaatgcaaagattgtttgcactggcgtgtggttaactgtgatcggaggaagtgcacccgccgtttttgttcagtctacccactctcagggtaacaatgcctcagaagcctgctttgaaaattttccagaagccacatggaaaacatatctctcaaggattgtaattttcatcgaaatagtgggattttttattcctctaattttaaatgtaacttgttctagtatggtgctaaaaactttaaccaaacctgttacattaagtagaagcaaaataaacaaaactaaggttttaaaaatgatttttgtacatttgatcatattctgtttctgttttgttccttacaatatcaatcttattttatattctcttgtgagaacacaaacatttgttaattgctcagtagtggcagcagtaaggacaatgtacccaatcactctctgtattgctgtttccaactgttgttttgaccctatagtttactactttacatcggacacaattcagaattcaataaaaatgaaaaactggtctgtcaggagaagtgacttcagattctctgaagttcagggtgcagagaattttattcagcataacctacagaccttaaaaaataagatattttgacatggaatctgcttgcctgaaaataaacacctttagggactccactgggaacaaaaacttttcaaggttcccttcaacctgtggaaaaagtggcccttttttgggacacaaacaatttttttccccccctccccaaaagaaaatttaaccact

SEQ ID NO: 49611 - DNA, 534 bp, Homo Sapiens
ggtgtctctgagccgagggcatgtgagctggggcctaaacaactagaaggagagagccgcgtgaacatccggcgaaggggacccaggcagagagaaaaggaaatccaagccctgaggtaggaatgagcaggtcagattcaaggcagtgaggtcaggccgcatgaacctggaggggaatcggggacttcatgcgaaactccagcctaggctttcaaagtcaaagggtgatacagtgggtaccaagctcctctgctccccactttgtagagcctagcatgaggtggcatgtactagaattggatcctaggtgcttagccctgcaatatcagggcctcactggtgggagctgcctcgggctgggttgcttggtcatagagccatagaaggaagctgtcagcccggagtgcctgccacctagacactgatgccattgtgtgctgcctcaagactgctggagtcaggacattttatagagccttttccagttttactaaaaaatttttccattaaaaaaaaaaaaaaaaaaaaaaggac

SEQ ID NO: 49612 - DNA, 576 bp, Homo Sapiens
gtgaatgaggctgtgcagctggtcttccgcaaggagggctgggctttggagtgagggcagtgcggtggaggtgagggggtgagcctggacctgtgggcgagtcccattggctgggctctggcctgatcactgggctcaggtcagggcttggttcccttgccacccttcttgctgccccatgagtgtggcattactggtcacttggaagaagacagtgactctttttccctgctgggtagcattttgtatggaacggttggaattttctgggcccagttcccacgtgcctttcgtggcagtctaacctcaggccattctcttcccctgtgtgcctcagtgtccttctcatttcagtagggacttctgaaatgggggaggcagtgtggaatactgtggatgtctgtgcagagcctttgccggcactgaaggcatgcagcctgtcggcagagtgtcttaacaccagatgctactttttactgtattgtagtttattgcccggagatgtggggcttttatttttaaataaagataatcataagtaaaagacagaacaagacaacagagccaaaacacaag

SEQ ID NO: 49613 - DNA, 641 bp, Homo Sapiens
accacacagaggaacaaagcaaggtgcccccagagcagaagagaaaggcgggctctacctcatggaccgggttccagaccaaggctgaagtggagcaggtggagctgcctgatggaaagaagagaagaaaggtcctggcgctcccctcacaccgaggccccaaaatcaggttgcgggacaaaggcaaagtgaagcccgtccatcccaaaaagccaaagccacagataaaccagtggaagcaggagaagcagcaattatcgtccgagcaggtatctaggaaaaaagctaagggaaataagacggaaacccgcttcaaccagctggtcgaacaatataagcagaaattattgggaccttctaaaggagcacctcttgcaaagaggagcaaatggtttgatagttgatgatggcagcaggctgggtaagaagctgggttgtgtactttctggtgacactcctgggctcctccccatcccccgtgtctctcactgagggaaagaaaatccccaagggcactgccactgtgctcggaggtgccctggactgtgtacatctgaactttggtccatcctttgatgtgtggttcgttagccacaaagagaaatatctgaaagtcaacatgatgcttcttgcatattatc

SEQ ID NO: 49614 - DNA, 747 bp, Homo Sapiens
cattgactgtctagtagccatggttgtcaaactttccgaggtcacattcaggcccctgttcttcaagctgtttgattgggctaaaacagaagatgccccaaaggacaggttgttgacattttacaacttggcagattgcattgctgaaaagctgaaagggctttttactctgtttgccggccacttagtgaagccttttgctgacaccttggaccaggtgaacatctccaaaacagatgaagcattttttgactctgaaaatgaccctgaaaagtgctgcttgctgttgcagtttattttgaactgtttatacaaaatcttcctttttgatacccagcattttataagtaaagagagagcaggagccttgatgatgcctctggtggatcagctggaaaacaggcttgggggagaagagaaattccaggaacgggtgacaaagcacctgataccatgcatcgcacagttttcagtggccatggcggatgactctctttggaaaccactgaactaccagattctgctaaagacgagagactcctcgcctaaggttcgatttgctgctttgattactgtgttagcactggctgaaaaactaaaggagaattatattgtcttgctaccagaatccattcctttcttagcagagttgatggaagatgaatgtgaagaagtagaacatcagtgccaaaagactattcagcaactggaaactgtcctgggagagccactccagagctatttcta

SEQ ID NO: 49615 - DNA, 688 bp, Homo Sapiens
ggattaaaggaagaagacattttgaataagagccttgatgcaaaagaaccaccgtctgacttgacaagatgaagacgtacccatttaatataactatgatgcacttaaattgaagctatgccacaggatagaaaatgaattacaacttaaatacatgttggaagtgtaacactgtttttcaaggtttaaaaaaattcctaatgccttttagccttctttaatatttttaggtaaggaaagtatgtttggattttttcctctttgtaggtatatgagattgaaatgtgaagtatttggacaacaaacgtcaagcaatgggaagccattttgatttcttgagtaatcttgtaagcattaagtgaatgacaaagtagtagtgtaacttatttcttatgttataacttcagtcaattaatataaggatagtttttgttgtatgttcactaagtggttaatataatagccattgaatatactaatctttcatcttagagaactatacaacttttattgtttcttaatggaacattctggctaaccagaaaaagtgagaaaagtagtaccttgggatgtgtagtcaagatgacaaattttaagactggaaaagctctaaacaggcttaatgattcttcaggtagaatgatcctgagaagtgatgttttgatggaataaagtgcatgtgatgatt

SEQ ID NO: 49616 - DNA, 531 bp, Homo Sapiens
ggcacgaggtaaagctcagtttcctttttgttttattgtatgcgttgggtttgcagcatgaacttgcacagataatgcacgttttctggttaagtaaacatgatgcacactattctgtaacagaaagccctattgtgccttacctgtgtgcttttgtgggcaccttgtttatgaagaataaaaaatgatttgttatctgaagagaataaattttaaattctcagtttatgtctcagatgctaacgtgtgaaaatataaatatatataatatataaagtaaccagtcttcctgtattttatgtgcatcatagtgatttatctgagcttagtgacccccatcttgtaacctgttgcaagagtgaatgtaaaaaatagttatggcattttaaaaggtcgcctttgatgcagatgcatctttttcttgcttctaaaacatatttcatgtaaacattgtacatttattattgtaatatatactattatgcagcttattttacctgaaactgttaagccgaccaagatccctccttg

SEQ ID NO: 49617 - DNA, 812 bp, Homo Sapiens
ccgggatcaccgcaggcagcgctccagtcgggaatggccaggatggcgccctcttgttggagtttttggttagcttttacgttttcttctccacccacggcacaggtgataaaataggatccttggtgcggagcttaaaattatgccagaaagccaacagctcccctcgtggggccttgccttaaacttgcctggtttgtacattttttgccggacgcatcaagaagcaatctgtgacaaagtctgagggtcttcctttatgcttgccctccacactaagagaagttggcgtctccctcctgggaattgttttgcctttctgttcatctgtgaactgttttttgtttttaattactctgtaccccatccgaatcagggcttctaccactgctgatgcaaaaccacaaagggacctacctgagccaccgtcctagccaagcgagcaaacctgcagggggtttggaagtggacttggtcaccgcagaagcgtgtgcgccgttgggggaagagctgcgtcacagccagagggacaaagtgtgggtgatcctggagacgccagtttccgagattgttctgcatattcatttgcacattgttgtctgggttggacatgcgtgtgggcttcagtgtgaggcttttaatatgtatatcctgttatcaataaaacaattatccaagtggttgaatcctgtgagacttggcaagtgtgtgcaaatcaagtatacttgacttttcaacctcttctttcaatgtaacttttatatgaaataaagtaatcaattaacagttctcaaaaaaaaaaaaaaaaaaaa

SEQ ID NO: 49618 - DNA, 632 bp, Homo Sapiens
ttgaatttaggtgacactatagaagagctatgacgtcgcatgcacgcgtacgtaagcttggatcctctagagcggccgcctactactactaaattcgcggccgcgtcgacccttcactcaaggcattgacagcttagctgtgagggtggacacacatatgtgtatttacagtgcagtgtaaatagttctgtagtagaggttaactccatatttctgtgaggtcactgaggccttatggactaactctgtgaggataggagttatatattcttataagacaaaacaaaacaggacaatgttacaagagtaagaggttcttacttgtacataggctttcctgctgaaaacaggcccctgctgtacagattttgggtacataatttagctcttttagtcaatccaagagatttaagtgaccccccccccccgtgttttttttgtttttgtttttgttttgaatgccatgtaaaggctttttggttaagacctcacttttaaaactgccttaagtataaatagtacctttggaatatatttagttcatcatttgagctggcttcatactgggtttctcagccttccttcagcctgtaatatttttcaggccactgtttaccttggctcaataaaag

SEQ ID NO: 49619 - DNA, 577 bp, Homo Sapiens
ataatttgtatcttttaatataaaagaagcttttaacttttccagcctattataataactgagttatattcactgtggctcaaactaattggcattgtggaacatttctttaccttcaaagttttctccaccaatcatttcagttctattgcagtcctggtgccatatgtcccctgcaaattgtgaaagtaattagtgacaaaatagcagcctgctccttttcaatggcgaaactgtcggcattagcagttttgggtaagctggcggtactataacacgtactggaaacctgttcctcatcaccacctaccagattctggaaatgccgtcttctagaaaacgatggcgtttgtggtggtcttcttttgaaaggaacagtaatttgtgtggatattgttaaagtgtttaaagaatattttgacaattaagtttacattttacaattgctttattttttattaaaatagttgtatataaatattaccctatttcactgttgttcaagtaaatctaaaccttgtagacaagtgagtcatctgatatgtatagaagctgtgatatatagagtacatttatt

SEQ ID NO: 49620 - DNA, 690 bp, Homo Sapiens
  misc_feature (15)..(15): n is a, c, g, or t
  misc_feature (20)..(20): n is a, c, g, or t
tccacaggttatttncaggnaaattcttctagtgccagcgtttcctcgtcagtaactagtggcttaactggatgggcagcttttgcagccaaaacttcctctgctggtccttcaacagcaaaattgagttcaacaacacaaaacaatactgggaaacctgctacttcgtcagctaaccagaaacctgtgggtttgactggtctggcaacatcatccaaaggtggaataggttccaaaataggttccaataacagcactacgcccactgtacctttaaaaccacctccacctctaaccttgggtaaaactggccttagtcgctcagttagttgtgacaatgtcagcaaagtaggtcttcctagtccaagtagtttagttccaggaagcagcagccaactaagtgggaatggaaatagtggaacatcaggacctagtggaagtactaccagcaaaactacttcagaatccagcagctctccctcagcatcccttaaaggcccaacttcacaagaatcacagctcaatgctatgaagcgattacagatggtcaagaagaaagctgcccaaaagaaactcaagaagtaatgtggccaagtaggtttttgtatcatattagcctaaagatgaaaggcttattattatgatataatctgtaatacactgtaatttaataaaagtcttcataatcaa

SEQ ID NO: 49621 - DNA, 548 bp, Homo Sapiens
caggcactgggtagagcacctggtccacgtggattgtctcaggaagccttgaaaaccacggaggtggatgccaggaaagggcccatgtggcagaaggcaaagtacaggccaagaattgggggtgggggagatggcttccccactatgggatgacgaggcgagagggaagcccttgctgcctgccattcccagaccccagccctttgtgctcaccctggttccactggtctcaaaagtcacctgcctacaaatgtacaaaaggcgaaggttctgatggctgccttgctccttgctcccccaccccctgtgaggacttctctaggaagtccttcctgactacctgtgcccagagtgcccctacatgagactgtatgccctgctatcagatgccagatctatgtgtctgtctgtgtgtccatcccgccggccccccagactaacctccaggcatggactgaatctggttctcctcttgtacacccctcaaccctatgcagcctggagtgggcatcaataaaatgaactgtcgactgaaaaaaacaaaaaag

SEQ ID NO: 49622 - DNA, 690 bp, Homo Sapiens
  misc_feature (659)..(659): n is a, c, g, or t
tgctatctctctgaccaggagaatgctcagaggcttcggttgcaggacaggatttggatcatccacctcgacatgacctcagaaaggagctggacacacctgccctggggccccatggacctgattgtcagcaaccctccctacgtcttccaccaggacatggagcagctggcccctgagatccgcagctatgaagaccccgcggccctggatggtggggaggagggcatggacatcattacccacattctggccttggcaccccggctcctgaaagactctggtagtatcttcttagaagtggacccaaggcacccggagcttgtcagcagctggcttcagagccggcctgacctgtaccttaatcttgtggctgtgcgcagggacttctgtgggaggccccggttcctgcatatccggaggtctgggccatagcatggctgccctgtggatgccttgtcagtgccgccagcctgaccagaggggaggtggatggcactttccagagcccaggttcttatggcatttcccagggttctgtgatttccccatgctctgcatttctaggatatttctaggacacctggattggctccatcacatcagagtggctgagggcagttgctctgtgttggtgaaattgctgtgggggtatcggnggatatggccagtaaagtattgagagactaa

SEQ ID NO: 49623 - DNA, 772 bp, Homo Sapiens
ggggccttgccaaatggtttggctcagatgtgctacagcaacccctgccctccatgcccgccaaagttatcagtgtagatgaattggaataccgacagtgagcagggcaggcagactcaactaagcccggacctgtggtggcacactgggcaggaccctgcttcatctcgggttggtttatgggcttttactttggagcactctgtgtgaagctgtttggtggaacccatgcatctggtgtggtccgcattatgatggaaggatcttaaccagtcgagtggagtgtacattgtctgaatacaggatgcacaatgttgtcaatcctggaaatggtctttcttttttgtaagatatgtgaatgaagtgttggtgtcctcaccaagaggtggcacctaagggttctgaggaaataaatgtatagacccttatgtacagacctgtgtataaacaacttttgtatatacatataggatagcttttttgaactatacagctgtacataaaagtagctgatattaattaggcctgtgtcaacagtttggatttttttttcacttgtacctttggggattttcttttggttgaataaaattgcatatgctaagtgggtgaaatcccctcaccccccccttctaccataataccctgtccgcccgcctccgccccttaaaaaagctttctaaaaccatttcttttgggcgcgcgggccccccataggccaagcggaacatgggcccaaacctgttttcctcaaggaataacccggggcccg

SEQ ID NO: 49624 - DNA, 559 bp, Homo Sapiens
  misc_feature (523)..(524): n is a, c, g, or t
  misc_feature (526)..(527): n is a, c, g, or t
caaaaataaataaataaataaatgaataaagagaatgctaatcatttctgggttcactgcgactcactgtagtgctggggatcccccttgtaacactggaactgaaagacagtgatgaaagctatgtcaagcattcattattctgaagaggaggagaaatgccacatacctttcccatgggacctgtggtggaatgaatccatacttctgcctcacttcgagcagacttttgttctcggcgctcctcacgatggagtttcatgcttcattttcacatctctctgcacaattagattgggagctccttgagggcagagtacgtgccttaatctttatctttgtaatgccacaatgaacagagtgcctcctggtacactgtaggagcttaagaaatactcactgaatgcatgaatgaatgaatgaacaaatgaaggaatgactaaggatgtttgtagtgctataatatagaatgggatttactctgctttaccagttagtttcataataaacaaatagtctgtannannaaaaaaaaaaaaaaaaaaaaaaaaaaaaaaaa

SEQ ID NO: 49625 - DNA, 792 bp, Homo Sapiens
gggattattagacattggttatatcattggtaagatggagctgtaccatcttaaaaatattctaataaactatattttcatagtagataattcatattgttatgcacaagtcatggaacagtgaactacatacttgttggaaataaaacgttcatattgaattgtgcagactatatgttaagagcaaacgtctttctacttacagaagtacgctcttcagggtcagaatttcaatcacgaggtcaggagatcgagacccatcctggttagcgcagtgaaatcctgtctctactaaaaaatacaaaaaaattggcctggcatggtggcgggcacctgaggcaggagaatggcgtgaacctgggaggtggagcttgccagtgaccccagattgcgccactgcactgcagcctggagactccgtctcaaaaaaaaaaaaaatttcaatagttaaaaatggatgctgagtttaaaaaaaaaaaaaaaaaaaggttgagttgaaagaataaggagattagaaaaccaaaaaagtacttagccccctgagagttttttttggtttgttttcccgtaaaaaaaataaatttgtgggattggggggaagaaaaggaatgtttccccggaaagaaacaaagaaattttttaaaaacgttttgaaggggcccctccgagaaacgtggggtcccttgtggaaaatgtttccacaccaaatatataaccctggaaaaattgtgtttggagacctctccccccccccggcgggggtccctaaaagccccccctctcttaaaaaca

SEQ ID NO: 49626 - DNA, 549 bp, Homo Sapiens
tttttttttttttttttaaatttggctttatttattttcaacctggctcaaaaagcgtttgagggaactgcttacaggaatgcatgcaataagattttttaagataataagttttcgaagtcagcataaggggaaattgttataaaatagaataagaaaatgagtacatgtgtgtgaaagaaagagagagagaaataactgtaagaatacaggagggctagcttaaaattagctggagtagcatcctactgcaacctttaaattttaagagttttggagaatatcttcctttttggcctattcatttccccaaaatccactgttatagatgaattcacacataactgtcatatcacaactgctcattgatacagaatgaaccaaaaaatgtaaaaaaaaaaaaaaaaaagcgcacagatttggtataatcatttaaattcaacttcacccagtgaagataataactagtcggtagttaacatcatcttaaagatgaatgagctgatgtgctagggtgaggttaccattaagaagtagaggacaggcatg

SEQ ID NO: 49627 - DNA, 633 bp, Homo Sapiens
  misc_feature (104)..(104): n is a, c, g, or t
  misc_feature (372)..(373): n is a, c, g, or t
  misc_feature (465)..(465): n is a, c, g, or t
  misc_feature (519)..(519): n is a, c, g, or t
gcctatctggacccctgcctagggtggatggctgctggtgtggggacttcgggtgggcagaggcaccttgctgggtctgtggcattttccaagggcccacgtancaccggcaaccgccaagtggcccaggctctgaactggctctgggctcctcctcgtctctgctttaatcaggacaccgtgaggacaagtgaggccgtcagtcttggtgtgatgcggggtgggctgggccgctggagcctccgcctgcttcctccagaagacacgaatcatgactcacgattgctgaagcctgagcaggtctctgtgggccgaccagaggggggcttcgaggtggtccctggtactggggtgaccgagtggacagcccanngtgcagctctgcccgggctcgtgaagcctcagatgtccccaatccaagggtctggaggggctgccgtgactccagaggcctgaggctccagngctggctctggtgtttacaagctggactcagggatcctcctggccgccccgcanggggcttggagggctggacggcaagtccgtctagctcacgggcccctccagtggaatgggtcttttcggtggagataaaagttgatttgctctaaaaaaaaaaaaaaaaaaaat

SEQ ID NO: 49628 - DNA, 605 bp, Homo Sapiens
caggaatgagttcgggctatactctttgaaactgcctttgtgagcaaagtgctttggcaaggcaagggtctccctcagcagggctaggtgcactacagcctctttccccgtgtcccgttggatctgagctgtgtagcacttgttgcattacaaagaaaaagacttctgcaggaaatagggtagagaacaggctgtctagtcagatgcagcttgatctgtggcaaaaccaagtgtggtctttcagcttcagtgtgttagcatcccagcacctgagatggggtttgtgggcaagttgattttgccacactgtagggcccaggtggtcccattgccaccgtgaagccaaattctagcccaagtctggtagagcagtcgggcagctagttttcgggggaggatgatgtggtgggacagaggaccttagtggcctattacggagccctctttccagactaaattcatagccgagagctcggggggatggtagagttaaaatttaaaataattttctaaattctggttttggatattaggggttaagtgggaatttggcaacagtttattaagtgatgttctaattccataaattttgtgtcggactttta

SEQ ID NO: 49629 - DNA, 760 bp, Homo Sapiens
  misc_feature (593)..(594): n is a, c, g, or t
  misc_feature (596)..(597): n is a, c, g, or t
  misc_feature (604)..(605): n is a, c, g, or t
ggggttgaaagtatatatttatcatataaaacttgatgcgttttgcactactctttccatttatatgctgcaaacaactacagtctttgaaatatggaaaatcagcagtctaaagtttgttttaaattctaaatttaaaaaatcttcaaatctgaatataccgcaaatgtcatgagaagtttgattcagtaacttgtgatggaggattctttggtatcttactgtttggttaaggcactaattttacttacctattagattttgaaagtatctgagatatacaaatctccctgtaggaaatgtgaaagaaaagcacaacaaaactagggttttttgttcatttgcttgcttttatgattttttttggtttgttttaatatcaggtggatttttgtttctaagcaatatatacataaaatcaaccaacatatctgaaaaggatcatgaaacctgagaaatgctaatggagatttgctggtacataggaatctagcaaattcaggaaccaaggggaaatgttgtgagataacatttacattgtcaacctttattgactttgttttttacaataaaaaaaattttacaactttaannannaccgatnnaataaaaaaaaaaaaaatgttcgggccgcccttcggcccttcgaagaaacttttctaaaacccatttccttttggcccccccgggcccccagttagggtaaatggaaaacaggggccataagcctgttttcccctaaggaaaaaccccggggtcc

SEQ ID NO: 49630 - DNA, 624 bp, Homo Sapiens
cagcacgtgagcctgcactcactgcggcctttgtaacaaaaccagttgtggtcctcagcatttgaagcagctgcatacttcagagtaaactatttttcattatttagttttgtcacaagaaatcgaccattgtactactctcacttacagcagttaaacagcatagaactaaaaacctgtctgcatttccattttttctttctgtatggttgtgggttttaggacatagggggttaggagaaggggtttcttgatcatgtcatgaattctcctttgtcctgtttctcctgtttcatttctcctccgcctgctgtatattacctgagctggtgttgtatcttcaagtccatatgcgtatttgcagacctttcctgttcccactcttgttggctcttctgatttatgcacagatggttcccagcatgtgtccagtgcttcatggatgggaccatcccagcaactaatcagacttcctgccagtgtcctaacccccagggcaccctgttcaaccatatttaaaaattggaatttgtataaagttgcttccaagttttataatgcatcattttacatcttttgtaattaaaagcatcacaatgaggggtgtctctgcaaaaaaaaaaa

SEQ ID NO: 49631 - DNA, 565 bp, Homo Sapiens
ggcacgaggcaagcattcttctattttcagggcaactccaacaacattgccaccgtggacatctccgcaggcttcgtgggcttagacacctacgtggaaatcccagccgtgctcctgacagcgtttgggacgtacgcagggcctgtgctgtgggccagccacttagtgcacttcctgagctcagaaacacgcagtggttcagcactgagtcatgcttgcttctgctacgcactgatttgttctattccagttttcacgtacatcgttttggtgacatctctgcgttatcatttatttatatggagtgtattttctccaaaacttctctacgagggaatgcacctgctcattacagctgctgtctgtgtattcttcacggcaatggatcaaaccagactcacacagtcttagactaagctgaacactggaaaaataatacatgcttaaagtctgctgttattctaaaatgaaagatatgaattcaacaaagttgatggataactttctttgactgctctacctgaatttagactaagcagtgaatagtttaataaaagatcacttt

SEQ ID NO: 49632 - DNA, 619 bp, Homo Sapiens
aagctttttgctgtccatgaatcctctgtggcaactgtaatcacagagccagaagccagagggccagggatatgagaggctgacaaacatcaggggacatctggggaggagatccctgtcatgtctcttgtgccatggagctattatggctggtcttccatttgctttttctttaagtgaaaaccatttttctactttgcttttctctccatacttaaatggtcagtagctactgagtggtgctttatctgaataggcctggatcgaagtaaaatagaaatgggactggctttccacaggaagtaaactgcttcagagcccacagtcccctgctcagtgtccggaaagaagtcagtcatccctgttggcagtaaatcttcccacaggccgtccattagagatttaactagatatgttcaatagaaagagtctgaggcaagtggaaatgaggaacggaaacttaggttgggagaatattttttttttattcattctgtttgcttaattcagagtacagtttgtgctatttcatatctgtactccaggcagaaatataacttgaaaatactgtgtctaaagaaatttcagtgttctatcattaaattatttacttaataaa

SEQ ID NO: 49633 - DNA, 890 bp, Homo Sapiens
aagaactttatgaaaagatgataactgtcccctctcttattggttttcctgcattttccagggaagctgctgaccccttaattctctttataagagttcaaatgacttctttcacagatgtcaaaccaccagtgttcaaagtgaccctgcttcattgagtcctgaaacagctcacttcctttgagagctagtgtgacttgctttgtgggacactcagtaactttgggttttgactctttaacgggtgggcactggaccatctcggtgggagtgcttgtgccactctggaaggctgttccctggggttgtgatgtttatcatgccacttccttcttacctgtgccaacagacctatttcactgcctcagcgtacaccagacccttcagaaacctctctggtgtcacccagatagattgtgcttactgagacaaatgaacgtttacttgatttagaagataatgtgacagaatgatgtcaggttaggtcaaagccaagggagtgacagaatctggaaaatcaaacaatacaaaaagccctaaatgaactgttaactatttgatctttggatgtaaaattgtaatgcgtatatgtacaaatgtacaatttttacatgcttttaaaaaaggttagctttgtgaaaataccttgtttggtcaatgactttactgggtaatagaaccacattgaaacttgatggcaagtaatacaataaggcaggccagcccgtttttctctctgaatctggctggtttaggaagagcctggggtttatcgacgagatctggaagtaactattccttttccactggcttgcagtccccccatgttaggccgtggtaaagggataagtaaaaggaattttagggagctagaaaccaaatttgcccat

SEQ ID NO: 49634 - DNA, 690 bp, Homo Sapiens
tctacatatacaaacaagggtttgggttttagttttttttttttaaggtgaggactcagaaaatcaaagggctagtagaaacagtgttatgttgggaagcaaggtacccccaaagatgttccctgtaggtcacggcactcccaaaagcacacaagcacatacagacatatgcatccccacacacgcctatgcacaaacgtggattatcgcacagactgggaggtttagtggtgcatttctcctctgttttctttttaatatacatttaaaatacagtattatcactttataaaacatacattaagcctaataaatggaccaataagccaaactatcagtattttgtatatcctgcataaactctaatttagttcctcaacatattttcagtgtttatgcagacctttagagttaagcctttgtatttccatgttattccacaatatgcaatatttctctgagtagcttctgctatgatattcttatgaagaaaaggggcaactttctgtccactataggagagaattcagccgaagatatgagagtaatgagagacattttccagtcattggatcgtgttttcttttgtccattattgtactgtgctgtaccacatttatttctatattcattttgtaaaaaatttaaaagtgctattttgtttgtatttgaaaatctctgtgaataaat

SEQ ID NO: 49635 - DNA, 927 bp, Homo Sapiens
cccacgcgtccgcacatcacacactcttcgatgctttcccacagcccctgctccgctcctctccgtaagaaactcacttcactgtttttcacttttcacttctggcttttttgtggcccaaggccaatataggattaatatctgtgttccagcttcagccagaacgatatgtctgtccatctttctcctttcttccagcacacacagctaagagataagaaggctgcaaggattggggataaggagtatattttcaagccaagaaccagtagaaaacagaaataatggtgctcccaaatattcagtaccttgggcaatccaggaagggtttaaagagacctgttgctgcatagaactctccctgccctaccccttaactccaccttagtgccagggccgagggctggtctgcatgctggaagaggttgagagttttggaattgattccatgctaaatgtcagttaccagtttggattgatgaaagtgatttttctgctttacctttttcctgtcagaaaggttttcctctgtgctacccttaacttagggatgaacagactataactaggaaaggaggaaaggtatcagggatttttaagtccgtttagagagcaaaccatattgtgcctcttcatcttgacccaggctcttatagataggtcctaaacattgctgttcactagattatcttaacaaataatactcagctaaatatttgcatttaggaatactcctaaaacagatattgccaactagatacactgcctcaatcttgaccagacaagagaacagttaagttctctcagttgggtagtaacttgaatacartctatttatcagttggkttcacacagaggttcaagtggaagccattcwcttaaagctgacagaaaattaaaaaaaaaaaacacttacawcyggctttt

SEQ ID NO: 49636 - DNA, 502 bp, Homo Sapiens
gatgagcccaacatgaaccctaagcttgaggacccaaggcgccccgacacctccttcctgtggtttacctccccatacaagaccatgaagttcatcctgtggcggcgtttccggtgggccatcatcctcttcatcatcctcttcatcctgctgctgttcctggccatcttcatctacgccttcccgaactatgctgccatgaagctggtgaagcccttcagctgaggactctcctgccctgtagaaggggccgtggggtcccctccagcatgggactggcctgcctcctccgcccagctcggcgagctcctccagacctcctaggcctgattgtcctgccagggtgggcagacagacagatggaccggcccacactcccagagttgctaacatggagctctgagatcaccccacttccatcatttccttctcccccaacccaacgcttttttggatcagctcagacatatttcagtataaaacagttggaaccacaaaaaaa

SEQ ID NO: 49637 - DNA, 618 bp, Homo Sapiens
  misc_feature (559)..(559): n is a, c, g, or t
cagtgtcacaaagccatggcagagggtcctagcggcgccaccctgccccagcctgaggaggagggagagggaggaacaaccctgggcagacggggtctcagggacctgtgtccttccgcctccagagctgcccagccacgggctctcagggtgctggggcagccccaggtcccctcttgaactcagctggggccaggggccctcagaatgaaggcaggcaccaggcaggagcagcatccccctccttgacggtgctggcaggagggccgcgccatgctgactgcttgaacctctgctgacctgacagtgctggcgggagggccgcaccatgctgactgcctgaatctctgctgaggctgcctgcctgccgggcccagctcagcgccctctccactgcgaatcagtggcgatcatgtgatttctatttctgccccacagggtaagggacgagtcttctggaaggctctgccatggacatttgtcctcgggctcaggaggcccccaccctgccccacacctgcccctaatcactgcagtgtccagcccagtgttgaacagnatgtagcgtctgtctcattacgagcaaataaatagactttcattggaaaaaaaaacaaa

SEQ ID NO: 49638 - DNA, 501 bp, Homo Sapiens
agcaagttaaagataggacatgtctgagagctttggagaaaatcaagattcagttagaaaaaggaaataaagaatttggtgaccaagctgaagcagcacaggatgccaccttgactacaactactttccaaaatgaagatgaaaagaataaagaagtatatatgactccactcaggggtgtaaaagcaacccaagcatcaaagtctactcagctaaagactaamagaggacagagaaaagtgacagtttcagctaggacgaacaggaggtgtcagactgctgaagccgactctgaaagtgatcatgaagttccagaaccagaatcagaaatgaagatgagactaccaagacgagccaaaaccgcagcactagaaaaaagtaaacttaaccttgcccaatttctcaatgaagatctaagttaggaaagacgatggaggtggaatcctttaagattatgtccagttatttgctttaataaagaagaagttacccttgtcaaaa

SEQ ID NO: 49639 - DNA, 714 bp, Homo Sapiens
ttttttttttttttttttcaatccatcaaatgtcattacagatttattaagcctgatgtagaaagacatttaacagtaacatctccagaaagcataaaaagagcacttctattcagtcttgtgctttgaaaagctaaatatatttttatcatataaataattcttttcatgttttaagtgcatctgtgttttttttcttctctcctttaattttcatttttcaattggccaaagcagaagtcgacgttgactgaaatgaagccatttgcaaagctaatggtgttgagaggcatgtctctgctattccgtatcagctaggtttcaggaaggtggttcaatagctgcagcattaaaatgagggacagcctccagcaaaatcataattgaacacacccaggtcctcaatgtcagcagttgggtttcctgatgcaaattacgatacggtttcagatgggaacagtctatttccaataactgctgagtgggggaaaaaaaagagacttttttttttttcaacacaaaggcaagagttatcatgtataaaaatgtaaataatatacttatagaaacctttttgatggaaatcaggggctccatataaccttggcgaatgtgttgtttttttttcacaatagctcaacaaagtagtgtctgttatttagggctttattacagttctcaaagtagaatgattttccttaaaaaaaaactctt

SEQ ID NO: 49640 - DNA, 567 bp, Homo Sapiens
tttggctatgaaaatttgcaatgagatcttaacaagtccgtgctcgccagaaattcgagtctatacaaaagccttgagttctttagaactcagtagccatcttgcaaaagatcttctggttctattgaatgagattctggagcaagtaaaagataggacatgtctgagagctttggagaaaatcaagattcagttagaaaaaggaaataaagaatttggtgaccaagctgaagcagcacaggatgccaccttgactacaactactttccaaaatgaagatgaaaagaataaagaagtatatatgactccactcaggggtgtaaaagcaacccaagcatcaaagtctactcagctaaagactaacagaggacagagaaaagtgacagtttcagctaggacgaacaggaggtgtcagactgctgaagccgactctgaaagtgatcatgaagttccagaaccagaatcagaaatgaagatgagactaccaagacgagccaaaaccgcagcactagaaaaaagtaaacttaaccttgcccaatttctcaatgaagatctaagttaggaaag

SEQ ID NO: 49641 - DNA, 626 bp, Homo Sapiens
gcacgaggagaagaggagctaagaaggcccgaaacgaaaaacttctttaaggacatgccccagccacggcttgctctcaactgtgttggtgggaaaagctccacagagctgctgcggcagttagcgcgtggaggaaccatggtaacctatggggggatggccaagcagcccgtcgtagcctctgtgagcctgctcatttttaaggatctcaaacttcgaggcttttggttgtcccagtggaagaaggatcacagtccagaccagttcaaggagctgatcctcacactgtgcgatctcatccgccgaggccagctcacagcccctgcctgctcccaggtcccgctgcaggactaccagtctgccttggaagcctccatgaagcccttcatatcttcaaagcagattctcaccatgtgatcatcccaaaagagctggagtgacatgggaggggaggcggatctgaggggctgggtgcaggcccctcagttggggctcccaccttccccagactactgttctcctcactgcctcttcctattaggaggatggtgaagccagccacggttttccccagggccagccttaaggtatctaatagagtctgaactctcgcttccaaaaaaaaa

SEQ ID NO: 49642 - DNA, 769 bp, Homo Sapiens
  misc_feature (769)..(769): n is a, c, g, or t
aaaagcggtcggtccggattcccgggatctggcccaggcaatggaaactgcccttgcgcacttggagtctctcgcagtggatgtagaggtggccaatccaccagcaagcaaggagagcattgacgctcttcccgagatcctggtcactgaagatcatggcgcagttggtcaggagatgtgctgccccatctgctgtagcgaatatgtgaagggggaggtggcaactgagctgccgtgccaccactatttccacaagccgtgtgtgtccatctggcttcagaagtcaggcacctgccccgtgtgccgctgcatgttccctcccccactctaaagaccaaggccgtttactcctggtctgattattttccccatctgaaatccacaatactgcaggagccctcttgaaattaacaatggaaataaaaccaatcagtcagttagcctaaacctattgattcctcgtgattatttccaatgtgaaaacagttgtgtatgattgcattaaaaatcatatcatcttttagaggttagaaaagggaaaactaaactttctaaatgctacttgagattgcagtaagaagatacgttttctaacctgaaagttaaatcgcatttgttttcttcagtagaatgggaatgtgttgctgttacttgtaatgtcaagtttatctgttaaatatgtccaaaaggcaaaatcatttttgttgcatgttatgggtcgatgttcctgtaattgcagtgccgtaaaagctttattaagttgttcttn

SEQ ID NO: 49643 - DNA, 818 bp, Homo Sapiens
ggtaccaaacttaaaaccaaacactcatttaaaagtaggttaagtgatcatggatcattgttattagctttgtggctttgtgaaattctaaaggaatcaaataattcatcatgatttaaattttctagagattttgatttttttataatgtttctttcctgtagattgtgttcttgtttctctctctctctctctctctctctctctctctctctctctctctcaaaattacagtgttcattgtcattgacctcagcagcaaatttgacttgaattcacttaggatcgcaggaatcaggggaaagtgattttaaaggtggtttctccagcacattttaagaaaagggaccaaaagttattttagcttcctcaatagattgcatgttgcttattaggataataaattaatattaaatgcaatatatgtcttgtctttattatggcatctatttaggagttgctcacatcactgcagtagggctctgcaaataaaataatgtaacctattatcatggatctaatgtactgtaactttatcagtgacaggtaaaatctcaaataacaagtacgaacattgaaacaattacctcataagatttgtaaaagtaaaattcttccaatagatttcattcttgtcattttggaagacgaccctgcaatccacctgtttgtaactttttcaataaaatagacctctgtattacctgtaaaaaacacaaaaaccggaagcgcacttccccctgtccggccgccttccggcccttccaaaaaagctttcctagaccaatttctttttgggcgcgccggggccccaaaac

SEQ ID NO: 49644 - DNA, 792 bp, Homo Sapiens
gcacaacttccacaatttcacctcgcagaaggggccgcaggatcccagtgcctgccgctacatcctggagatgtactgcgaggaaccctttgtgcgggagggcctggagtttgcggtgatcagggtgaagggccagagcttcatgatgcatcagatccggaagatggtcggcctggtggtggccattgtgaagggttatgcccctgagagcgtgctggagcgcagctggggcacagagaaggtggacgtgcccaaggcgcccggactcggcctggtcctggagagggtgcacttcgagaagtacaaccagcgcttggcaacgatgggctgcatgagccgctggactgggcgcaggaggaaggaaaggtcgcagccttcaaggaggagcacatctaccccaccatcatcggcaccgagcgggacgaacgctccatggcccagtggctgagcaccttgcccatccacaacttcagtgccaccgctctcacggcaggtggcacgggcgccaaggtgcccagtcccctggaaggcagtgaaggggacggagacactgactgaggcgatgggagctgcccaccagagtgcctctgagcagctcacagtgtgtgcccagatgtgccacccctgtgggcagcaagaagctgggatcgctgcagccatgttttcccggccatgccggcgttgtaacctcaggaccttcccttgtaggaacagctttctcgaatctgttttcagctcttgcattgcatagatgaacctcagcatgtaaagaactatttttttaaagaagtg

SEQ ID NO: 49645 - DNA, 555 bp, Homo Sapiens
  misc_feature (524)..(525): n is a, c, g, or t
  misc_feature (534)..(544): n is a, c, g, or t
  misc_feature (547)..(547): n is a, c, g, or t
  misc_feature (550)..(550): n is a, c, g, or t
gtgcttggccgtccctgccattagcgcgtaacgagagactgcttgctgcggcagagacgccagaggtgcagctccagcagcaatggcagtgacggcgttggcggcgcggacgtggcttggcgtgtggggcgtgaggaccatgcaagcccgaggcttcggctcggatcagtccgagaatgtcgaccggggcgcgggctccatccgggaagccggtggggccttcggaaagagagagcaggctgaagaggaacgatatttccgagcacagagtagagaacaactggcagctttgaaaaaacaccatgaagaagaaatcgttcatcataagaaggagattgagcgtctgcagaaagaaattgagcgccataagcagaagatcaaaatgctaaaacatgatgattaagtgcacaccgtgtgccatagaatggcacatgtcattgcccacttctgtgtagacatggttctggtttaactaatatttgtctgtgtgctactaacagattataataaattgtcatcagtgnnaaaaaaaannnnnnnnnnnaanaanaaaaa

SEQ ID NO: 49646 - DNA, 871 bp, Homo Sapiens
  misc_feature (793)..(793): n is a, c, g, or t
  misc_feature (795)..(798): n is a, c, g, or t
  misc_feature (810)..(813): n is a, c, g, or t
ctacttctgcaatgatgtggtggccccaggagattcaaccagagaccggaccttggaccagcagtgcactgtgagtcgtccaggactggccgtgattgcaggagccctggccgtggaattgatggtatctgttttgcagcatccagaagggggctatgccattgccagcagcagtgacgatcggatgaatgagcctccaacctctcttgggcttgtgcctcaccagatccggggatttctttcacggtttgataatgtccttcccgtcagcctggcatttgacaaatgtacagcttgttcttccaaagttcttgatcaatatgaacgagaaggatttaacttcctagccaaggtgtttaattcttcacattccttcttagaagacttgactggtcttacattgctgcatcaagaaaaccccagctgctgaagatctgggacatgaagcgaacaatgaaaaccctttggaaatggccccccctgtggggggttaaattttttcccccgggccgcctgtttgaagggacttttccttttccccaaaaaaagaaatgttttgccccccggcccgggggagattttggggccccccccttccaaaacccccggggggggtgggggaatcccccccccctttggggtccccaaaaaagggggccccccgggttttccgggttttcttcccggggtttttaaaaaaaaacacccccccccctttgggggggggaaaaaaaaaaacccaaagggggggggcggggggcccctttttttttttttgcccccgcgggggagngnnnnaaaaaaaaaaannnnccccaaaacccccgcgggggggtgttttttttttttgtttggggggggggggaagaaa

SEQ ID NO: 49647 - DNA, 609 bp, Homo Sapiens
aggatccccggttcactttctagcaccatatctttcagctactgaacacatcagaattggttttactttttaggttgttgattttttttaattaactattaactaagaataatacttattttctaattataagccaaaaacccctgggtttttttctcattgattaagccacttatttttataaggtatatttaaataattcccatcttctgatatgattttaaactctaaatcatgtgttactgttacaaaactttctctctccatgtaatcacacttagttatgagcaaagcagtgagaaagttgaggtgataaacaactttgcagcattaatgtaacaaaaagtttcagtatttgtcaggaaaacaaaagcttaggctgttaaataaaagctattctattttggtaagttgaaattcaagaatgtatatataatttcttaaatgtaagagtgcattaaatcaaatacaaaaatgggtttttcaatgcatcattatttattgccataacaaattgtttggtccaaaatgaaagctatattcagaaggtttgcacctcaaaattgagtactaattaatgaaatgtctgtacaaaataaagtgcaagca

SEQ ID NO: 49648 - DNA, 663 bp, Homo Sapiens
ttttttttttttttttttcacattctactgtttattacacatattacattcttaaataaaaatgcgtcacataacattttttgcatagatatcttacaatataccaatttaaaaaagaattatgaaacagaccagtaacaaaaataaattttttcttcattaataattttgtaacattaacataccaccatcatataatacaaataatagttttaaatcttaagacttttgtacagcaaaaaaacttgacaaagtaatatatttatatatatatatatataaaaagcttaaaaaaaataaaatgtcaaaaaaaggcataaccgagggctataagactgggtacttctgtgatatattataaataccagagaaggcctgagagaatgtgacggggggaggcggggaaggagacggggctgggagtaggtctctccaaacacacttgttagacacatctggcaaaaagaaaatgtatagtgcaaaaataaatttattcaagcaactgttaagaggagaatagagatttgaaagaaaagtttcagtggctgggaagttgtgtgggagtaggaagtgggagaaggagcttgacgcgggggcgggtgggggcttgtggaaaggaaggggaggcttcaaaaacattagacatttatttttgcctctgtg

SEQ ID NO: 49649 - DNA, 1419 bp, Homo Sapiens
  misc_feature (591)..(591): n is a, c, g, or t
cggacgcgtgggcggacgcgtggggactggaggatggaagcctcagtaggccacagccagagatagagccagaagcagcagtgcaggaaatgaggcctcccacagatctcacacattttaaagaaacccaaacccatgaaaacatgtctcaacttagcgaggaagaacagaataaagattatcaagactgtagcaaaaccacttcattgtgcgcaggaccctcagcatcaaagaatgaatatgagaaaagcagaggtgaattgaagaaaaagaaaacacctggtccaggcaaacttccaccaacactttcttccaaatatcctgaagatgacccagactactgtgtgtgggtcccacctgaaggtcaaagtggagatggcagaacccatcttaatgacaagtatggctattgattgcttcagaatcccaaaagaaaaccttgtggaccatgtgacatggaatatttgggataatgtatcaaattgaatggccagagaagtttagatgattatttgtaagatctggtgactggcttttcgttctgtgttcttggcttcctaaatttatctgcccatatgattctcatgcatntgatatttatgtttaaccagtgtctatatatgtgtgtcacccagggaccatatgtttcgagaattcgtgacgtgagagacatgatctattagatagaaggcaatgtcacacaacacaaaagggggcggcaaaaatccccgagggccacttaacgtaccgcttctgtcaagggcgctaaggggtaaaaagcgaggggcgttaaaaccggccgggacagcactgggctgagaaccacctggtggcgaaggaaccccagcaaacggaacaacgatgcgcagcactgcagcgcgtacaacaaccacacaccgccacacaacacgcaccgcccaccacacacgcaagcaccacacacacaaccacacacacaccgcccacaccacacaccaacacccaccagcacgagacgcagacgcagggaggagcacgacgcacagcagagcgagacagacgagaagcgcccgggccagagcagagcaggcggaccagaggcaacaaggagcgcaaagcaaacagcaacaccggcgagaagacaggaagagatacaacacagacaaccgataggagcagcaagacagacgacgcagaacagaggcacagcgcgaagcgcggggggaggaggggggaggaggggagggggagggggaggaggaggggggaggaggggggggcgggaggaggggggggagagggaggggggggtggggaggggggggccgcgggcggggcggagacaggtagaggcggggcacacagccagcaagcgcgacaccgggcgcgggggggagagcggacggcagagaggcagcggcaagacagagcgacgcagga

SEQ ID NO: 49650 - DNA, 590 bp, Homo Sapiens
gtatcatataaatgtcagcactaagtaatgtcttgtttgtggctgaatatttttcgtagatgtttttgaagttgacatgacttacgtgcatttaaatatatattgccatccttagtttgtaattaagatttggaatatggttgtggatttctgagcatgtgcagactggtctagctagttcaggaactggtgcatgtatttttcaaagataaagaaagtgtactgcgaaaatatgcaggaagattaattttgtggcagttttctaaaactgacaaccaggtgggaccaaagtttatgtgcctttagtcttaatttaccttgcattgtaatattcagttttaataaatcttcaaaatattttgtatttaggaatagatctgactttaataaaaacatggctcagaatctacaggtcaaattaatttgaacagttcttgtcaatccgaattgttgattctgtttaaatgaccaatactttttgaaattgatgtacttagtttcaagattcatagattctgttatctatgtagacagaatggtcatgtatattttctattagttgagtttttacatctttagaaatgtaaaat

SEQ ID NO: 49651 - DNA, 841 bp, Homo Sapiens
gctcttcctcttcacctttgggctgctgccgtggattgacaactttgcccacatctcggggttcatcagtggcctcttcctctccttcgccttcttgccctacatcagctttggcaagttcgacctgtaccggaaacgctgccagatcatcatctttcaggtggtcttcctgggcctcctggctggcctggtggtcctcttctacgtctatcctgtccgctgtgagtggtgtgagttcctcacctgcatccccttcactgacaagttctgtgagaagtacgaactggacgctcagctccactgagctggctgcgggctccagcggccgtgtgctccagcaggccagagccagacacgacctccctgagcctcacaggcttacaggagtcacctgctccatgtggggactggcctgtttcctgaacacagacctctttcttgtgccttgttcacttctgttgaacccctcgtactgccgggcatttattatactacttcctgtcataaccttctaacttgtttcttgacgacacctcatgtgggccccaatacaatggggaccctgggaagccggttgttaggcctggccccatttaaaccgttgaaaaaaccgatcggacgacgacacagcagagacaccacaatgcagacaaacaagcaccgtgagagcgaggaacgacactaccgagaaacaaaaatcacaacaaacaaaaagtgacggagaacgcaacacaaagccgaagctaacatgcaaaaaacacgagcagggggggaggcgcgcacaagacaaccaaatcaccacacgggccgcggcagacaacaaagaggaaggagcgagcgg

SEQ ID NO: 49652 - DNA, 544 bp, Homo Sapiens
cccacataatagaaacttattttgaaaaataaatgttgaaacatttagtctcgcctttgttcacatatgaaattagcacgtcttcatttggcttcaccttaatattgcctctcctgtgtactttcctcactgcagaagaaccaacagcaaccatttctggggctgtaatttctggccttctgtaagcttttatgtcaagagagcttttagaaatcttttctttgtgagggcagtattaaaatttaaaaaatgtttttaagtttcttttaaacatattctcttgaagtcctttgcttttcatattgcccttgttcaagttcatacactgttaaatattctcttccctttgcttttcttcattttgtcaataaaagattttattttattttattttttatttttggcacagtctcgctctgtcacctaggctggagtgcagtggcacaatctcggctcactgcaacctctgccttcccaattcaagtgattctcgtgtcctccgcctaggcaacagactgagactcagtctaaaaaaaaaaaaaaa

SEQ ID NO: 49653 - DNA, 615 bp, Homo Sapiens
cgccgctccgccttccgtatcaaaacctaaatagaagttgttgttaccgtgtgccaatgtgtcccatgtgggttgtgccaggtagagaaacaggaagtcaatcatctgtgacagtctctattctgtcgttttgctccttggtatttgatttgcactatatttagttgaagcctgttcactgtttaaaaccggaggtatcttcaaaggcatggagacctggttccagtaaatgtcccaccagtggggtatagaaagcatgctcatgaccctgccgtgtcgtctgaggtacccgttcttatcctagtggttcaggaagagaaaacgcagtttgcactttcaagacagcttctctaaggctggcatgttatctccttgctttgctttttgccgttttaaaatgtgtaattgttccagcattccaatggtcttgtgcatagcaggggactgtaaccaaaaataaacatgtatttgtgtaattggtttgaagaagtcttgaatagctctttactgtcttacttggggttgataagatttgagtgtttgcaattttttactaaatgtagctccaaagtcttaaatggcttgtttgttcttaaactgttaattgatgaaact

SEQ ID NO: 49654 - DNA, 636 bp, Homo Sapiens
aaaatttggtaaagtaactaaactaaaaacttttccaatatgagcatccattggatattctagataaaatattacagatataactagcatcctttaaaatgcatgattgagattagaaaaacagaaaaggatatttccaggggcaagacatgcaagaaataaaatagaactgggaactaaacaggtaaaccctggatctaaatttgtggttggtatagtttggataagggagagccatcagttttggcaattgagtggcttgaatattcttgttcaccccaggagagatgtggctttgcaactctgcaaggtagtgtattgggactaacacttttaaaataaggattttaaatgagattttcaggacccctgaaacgacccctgaaaatctacatgtttggtgaaagggtgtactagggaaaaaatatgtatatgcatatgtctagctacctaccttaataccatgataattaacatgatttgatttaactgtcatcttactatctttgcctaggatctaagtggaaatttataaccattgtcttatacctcaaaagacttgatgtttgaatttatactgctcagtatggtgtgaaaatgcctgagctgaaaaattaagtgaaaaaaaaaaaaaaa

SEQ ID NO: 49655 - DNA, 396 bp, Homo Sapiens
atggtctgtacttttcctctgtccactcaggaatttggagcccttttttgtacttgcaaaataatttatacatcagagctcttaacccagacacgtgaattatgtacgttgtgttccagccactccaagttcttttcttctgtctatacctttggtccttaagaaccaaagcttgctacctcctagccccttttctgttaagaactgccatgcagaagtctacattcacactgagacttctttcttgaatttggaaaaaaaaaatctgctgggtgcgatggctcacacctgtaatcccagcgctgtggaaggctgagaggattgcttgatcccatgagtttgagaccagcttgggcaacatagtgagaccctgtctctaccaaaaaaaaaaaaaaa

SEQ ID NO: 49656 - DNA, 645 bp, Homo Sapiens
  misc_feature (519)..(519): n is a, c, g, or t
  misc_feature (553)..(553): n is a, c, g, or t
  misc_feature (645)..(645): n is a, c, g, or t
ggagaagaaggaaagtccccctgtgtggtaactgtattgttctagaaatatgctttctagagatatgatgattttgaaactgatttctagaaaaagctgactccatttttgtccctggcgggtaaattaggaatctgcactattttggaggacaagtagcacaaactgtataacggtttatgtccgtagttttatagtcctatttgtagcattcaatagctttattccttagatggttctagggtgggtttacagctttttgtacttttacctccaataaagggaaaatgaagctttttatgtaaattggttgaaaggtctagttttgggaggaaaaaagccgtagtaagaaatggatcatatatattacaactaacttcttcaactatggactttttaagcctaatgaaatcttaagtgtcttatatgtaatcctgtaggttggtacttcccccaaactgattataggtaacagtttaatcatctcacttgctaacatgtttttatttttcactgtanatatgtttatgttttatttataaaaattctgaanatcatccatttgggttggtggtgtacagaacacacttaagtgtgttacttgtgacttcttcaagtctaatgatttataaactttttttattn

SEQ ID NO: 49657 - DNA, 583 bp, Homo Sapiens
cacattagtgccagttagtgccttcggtgtaagatcttctcatcagccctcaatttgtgatccggaattttgtgagaaggattagaaatcagcacctgcgttttagagatcataattctcacctacttctgagcttatttttccatttgatattcattgatatcatgacttccaattgagaggaaaatgagatcaaatgtcatttcccaaatttcttgtaggccgttgtttcagattctttctgtcttggaatgtaaacatctgattctggaatgcagaaggaggggtctgggcatctgtggatttttggctactagaagtgtcccagaagtcactgtatttttgaaacttctaacgtcataattaagtttctcttgtcttggcatcaagaatagtcaagttttttggccgggcatggtggctcatgcctgtaatcccagcacttggggaggccaaggcaggcggatcacatgaggccaggaattcgagaccaacctggtcagcatggcaaaaccccgtctctactaaaagtacaaaaattagccaggcgtgatggcacgtgtctgtaatcccagctactctg

SEQ ID NO: 49658 - DNA, 744 bp, Homo Sapiens
ggataaggagggaacatatcataactgcactgtgatgaagaagctgttccccacagaggagaagctctgctttctttctctccaactttccttttttcaaatcagcatgatgtgcctgtgagcatggaagacctgctaggaaaagtcctctcagaagaatgttggccatgagactatcattcagaggaggaggggatttctctcttcaaggccataacagtggaagaacagtcatatgccattggaagtcttggccagcagtcctgaatccttcctgaagagttcagaaaatagatgtggtattgctctgaggaccaggcaggaggaactctacaacctgagtttgcctttgtgaggcattagtatagaccaaataaaaagctgcagaaattggaaagtttatgttttaaataaatgactgtgataaatatcagattatttgcacatttatggtactacgagtttataaagtccaagatggtgtgaaattggttctttttacttttatatttttgcttgaatcttaactctggaaatcacctgatgtagaagaagactgtgatgagctcatctgtggaacatcacaagtatcgaaaatacagtaatgggatgtttcctttctaatccacatttattgtttctttcgaaatcacgtctaaaaaatatgactcagactatagcccgttgtttcccaaacttcagtctctttagtactacttggattattttcttaatatttatctt

SEQ ID NO: 49659 - DNA, 587 bp, Homo Sapiens
cggacgcgtggggtgaactgacaaggagtgaagcgcccacccagcggatggacagcacccacctgggtttactcaagggtgtgcattcattttaggtgggatcgccacaggatttcatgttattttccttacggcttccttttcactgacctcatttgttgagttaatgtaagttaaatgtgtttatgatataactccactgtacatcatcctttgagtagtaaaggataaaagcatatatactacctatatgtatgtgctgtatgtgggcatttcattgagatctaattaatagctagcctatttatggttattcgttttagtaagttctgtgggagcaaggtatttaaaatcaaaactaataactacatcatggtttttgattaggatctaaatattcaggttttaagcctgctgcaaacttttaaaatattatgatagattctgtactacatgtgggaaacaagcaagaactaaataatcaaatgttgtcaaccaaaagtaatagttgggtattggagatttttttaaaatgtttttatgttattagctatttggagttaaataaaaacagaacaaggaaaaaa

SEQ ID NO: 49660 - DNA, 595 bp, Homo Sapiens
  misc_feature (541)..(541): n is a, c, g, or t
caatgtggtcctttcaagaattagccatgagtctcaaaaaggcaataaatggctctaagtggacaggtttgcttcaaacaagtaacatctacattttgtcttttttttttcagttctcctgttatgttctggttgaaatcacctgtgtgtcttaatttctcaattcctttttggcaagaatatcaagcaaggtgaatttaacattatgtttatgttttgttttgttgctgtaactaatagttaattggactgattcttacccagccctggtcaagaatctgtgaggcatgtgactgaagtactaaattaaacttattttgaaaccaaacctaatttttaagccaaaaggtgtaatagtgatttaatacaggatgaaaaacactgaatttttaagactgtaggtggactatgttagtagttttcaagcaggatgcctgtattcagcattcaataatgctaaaatccctttcagcatgaaatttgtatgtttttatcctttgctgactaaaataataattgtttagggtatcataagatctgntagtacaaaggatattctgtttctatctgcaatgcatttgataatcatttctat

SEQ ID NO: 49661 - DNA, 581 bp, Homo Sapiens
atctggaggctgtatgcccacgtatatggaaatgggcagagtgaaaagcctgatgaaaatgaaaaggcattccagtgcctctcaaaggcatacaagtgtgacacccagtccaattgttgggagaaagatattacatcatttaaggaagttgttcaaagagccttaggacttgcacatgtggccataaaatgcagtaaaaacaaatccagttcccaagaagctgtacaaatgctttcttctgttcgactcaatttacggggcttgttatctaaagcaaagcaactttttacagatgtggcaactggagaaatgtccagggaattagctgatgacataacagctatggacaccttagtgacagagctccaagacctaagcaaccagtttcgaaatcagtattgattctgctggaagcagattctggaaaaggtgctttcacctgctggtaaaagatacatctgtatatctgaaatgcaagatattgatttttaaaataaatttgttttatgacttaaaaaaaaaaaaaaaaaaaaaaaaaaaaaaaaaaaaaaaaaaaaaaaaaaaaaaaaaaagggccacat

SEQ ID NO: 49662 - DNA, 569 bp, Homo Sapiens
accaagtcagaagacctgcctagcagtgagcagatgccaaatgaccaggaagaggagtcctttgcagagggtcattccgaagcgtccctcgccagcgctctggtggaaggggaaattgcagaggaggctgctgagaaggcgacctccagggggagtaactcggggatggacagcaacatcgacttgactattgtggaagatgaagaggaggagtcagtggccctggaacaggcacagaaggtacgctatgagggtagctacgcgctaacatccgaggaggcggagcgctccgatggggaccccgtgcagcccgccgtgctccaggtgcaccagacctcctgagcttagagccaccgtgccatcctgtgctgtgctcaagcgggcagccagggctgaagaacaaactcttgcacatctccagcacgactcacccactcctgcgttcctgtccaggcagtaatcattgaccatatagtcatagtaagacacacgagaccaggctttaccatgaaagcgacctgtcacggactccacttttaatttgctcttaggttctatctctgtagaat

SEQ ID NO: 49663 - DNA, 551 bp, Homo Sapiens
gcgtccttttttttttttttttttttttttttttttcttttaatatagatagggtctcactatattgcccagctcactcctgagctcaagggatcctcccaccatagcctcccaaaatattggaaatacaggcatgagccactgctcctgaccaattcacaaatttttttaaagaacaaacgtgctatcatcgatacatactgttaggttgtctttttttaaaaaacctaatgtaatttgttcatctttttatatctgtaaatatagctcaacacagttatattctttttgtgaatgtattatatctacaatttaccttttttcttagattttacatgcattttcccaaatctttgtgtttgcctatctgtaaaggtaatacattctgattacaaaaaatgaaaatgttacatagaaatgtaccgttatccatctaccagataactattattaataatgtgtatttatttttccaggaattaaaaaacatctatcatataagtattgcaaataaaacttaaaaagcaaaaaaaaaaaaaaaaaaaaaggac

SEQ ID NO: 49664 - DNA, 708 bp, Homo Sapiens
atccatcatggaagaataccttgtacttttccacsgaaatcactggataccacaacacaacaaaagattggtggaacgagaatgcstacacgcagccacaggaatccagtttccatggaaaccaaaagcagttgcttgcctgctcagcaagttgaaactgaaggagtggctccacataaaagaaaaataacttgaggactgtaccatggaaaactaaatttaaaaaaccagttataacagtgtttaatttagataagtttgagggaaaataatcagtaggcaagaggaacatttttcctgtagtagctagagtgccttgaaaaaatgtgttggctatgtgaaggaatatttcaactaaaatggaatggtatgcttttcacccttaaagtttgaggaggatcttgatatgttttaacattatcatggsagggaaatatataaagaagaaaaatatttttacattaaaccttttctaaaaattgtaaatagaaaaataatttggttttttatcaagaacaacacttatcgttatgtattgtgttagttatattgccagtctgttgcgactgactcaaaaagttaaatgttgccactgckgaagatgattatgagcatcgcaaactttgtttctgacccattttgacagtttttatatactcctttaaaatgatgaatgttacaggttaataaagttaatacctttaaaaa

SEQ ID NO: 49665 - DNA, 646 bp, Homo Sapiens
ctgaagctgcaggtgttgatcgagtcaaagagccctgacatagccatgctttttgaagaagcctttgtgcacctgaaaccccaggtttgtctgccattgtggatttcctgggcagagtggagtgaaggtgccaaaagccaagaagacactgaggcagtctttaagaaagctctcttagctgtcataggtgccgactcagtaaccctgaagaataagtacctggattgggcttatcgaagtggtggctacaaaaaggccagagctgtgtttaaaagtttacaggagagccgaccattttcagttgactttttcaggaaaatgattcagtttgaaaaggagcaagaatcctgcaatatggcgaacataagagaatattatgagagagctttgagagagtttggatccgcagattctgatctttggatggattatatgaaagaagaattgaaccacccccttggtagacctgagaactgtggacagatctactggcgagcgatgaaaatgttgcagggagagtcagcagaggcatttgtagctaaacatgctatgcatcagactggccatttatgaagatgaagaataccgtccgctttgtgaaatagtattgcaagccagcccccgtgggcaaatttgttattgagtc

SEQ ID NO: 49666 - DNA, 828 bp, Homo Sapiens
tcattgtgtacatttttatattctccttttgacattataactgttggcttttctaatcttgttaaatatatctatttttaccaaaggtatttaatattcttttttatgacaacttagatcaactatttttagcttggtaaatttttctaaacacaattgttatagccagaggaacaaagatgatataacaatattgttgctctgacaaaaatacatgtatttcattctcgtatggtgctagagttagattaatctgcattttaaaaaactgaattggaatagaattggtaagttgcaaagactttttgaaaataattaaattatcatatcttccattcctgttattggagatgaaaataaaaagcaacttatgaaagtagacattcagatccagccattactaacctattccttttttggggaaatctgagcctagctcagaaaaacataaagcaccttgaaaaagacttggcagcttcctgataaagcgtgctgtgctgtgcagtaggaacacatcctatttattcgtgatgtcgtggttttattatcttaaactctgttccatacacttgtataaatacatggatatttttatgtacagaagtatgtctcttaaccagttcacttattgtactctggcaatttcaaagaacatcagtaaaatatttgctttgtaaaatgcttaatatcgtgcctaggttatgtgggtgactatttgaattcacacctgtcttggatcctcaataaaagaatgtggctatattggggacaaaaaaaaaacaaaaaacaccaaacaatttttcccctctcgccccaaaaattttaaaa

SEQ ID NO: 49667 - DNA, 883 bp, Homo Sapiens
  misc_feature (712)..(712): n is a, c, g, or t
cagatccacagccacagtccagatatgtagcggttctgtaaaccttaagggtgctgtgaaatgcagagcttatatccacagcagtaaacccaaagttaaagatgctgtgcaggcagtaaagagggatatattgaacacagttgctgatcgttgtgaaatgctatttgaggatctgcttttgaatgaaattccagaaaaaaaagattctgaaaaagagttccacgtcctcccttatcgagtctttgttccccttcctggatccactgtaatgttgtgtgattataaatttgacgatgagtcagctgaagaaatcagggaccattttatggagatgttggatcacacaattcaaatagaagatttggaaattgcagaggaaacaaacacagcttgtatgagttcttctatgaatagtcaagcttcattggacaacacagatgatgaacaaccaaaacaaccaattaaaactacaatgttattgaaaattcagcaaaacataggtgtgattgcagcatttacagttgcagtccttgctgcgggtatctcctttcattacttcagtgattagggtgaggcacaaagagtttcttgatcatccagagaacattgacagacaattatgaataataaagatgttaacaatccatctgtatttaaaacactagcagccagatctgctgccatgatgcctatttggtgtgtttctgattanaatgaaatcacaagctgccttgtttagcctgctttacattgtaggtggcccgcatttccagaaataacgttatgcatctagatggaagctgcatgtaacaaatcattattatctatttttaaaagctttcaaatgatgggatatgatcatagatttttagtcttactaatc

SEQ ID NO: 49668 - DNA, 797 bp, Homo Sapiens
cctcctctccctggcgggcaaaaggaagcgcagggggaacctgcccaaggagtcggtgaagatcctccgggactggctgtacttgcaccgctacaacgcctacccctcagagcaggagaagctgagcctttctggacagaccaacctgtcagtgctgcaaagggttttctatggatcactgccaaacattgggatcatctcctctgtccagaggtcttcaacaggaagatgccagctggcaccactgcactgtgatgggggccctctcctctgctgactctgccgtttctccaggcctccgctcagtgatgagaccaagagatcggagacaagcatggtgctgctgcttctgctgcttctccagaaaatccctgggacacctttgttccagcctggtttcctgggctgggctcaggaaagctgccaaattcagtcctatgttgggtccaagctgcccctgtgctgtttctgtcaagccaggtgtggacattccaagttcatatgcgtgaacaaaagaaaagaggaacccagtggatgtaacagaaccgactccagttgaatgtttagatttttgctaaactgttttctttttcccttttttgctgtggtttgcattcacggcagtagttagcccaggtgtggggaacgagagtgcactgcatgatagcgttctggtgagctgggaaggacccaccactgccactgaggattgttttggaagaaaggaatatttttatcttggggaccagctaagtctctgcagtagtgtgaaattccaaatggttgttttatcattg

SEQ ID NO: 49669 - DNA, 521 bp, Homo Sapiens
caatgggtcttcatcatacaacagttcttcattaaatgtacctcttaattataatattctgataccctaaggcaaattgtgttttttgagcacagtaactatataaaaacaggctgctttaaaaggactagcctgcagaaagtttccaaatacaagtacattgaatctactgtccaatttggcttgttttcaaacttcaacagatgtgtgatcatatcatttgttaattgcctggagtagaggattacagcatattgagtggtagctaacgtatgttttacaatttatttttgccaagaatcaaataaccatatggctaacattaatcaagaaattatgttttatgccttaacaatgtacaactctttttactaattgaaatatacttcataaagaccaagccacttttgtaattgtcatatctttgcagcacatgctcaggacagcaatggaaatgttcccagcatgtatgccttgttcgtccagaattaattgaacaggtcaataaaggagactatggg

SEQ ID NO: 49670 - DNA, 1037 bp, Homo Sapiens
gcccagggctctcggatgcagggagcctgggcccaaacagcagcttccggagtcggaaggagctgaggaagaagactgactgaaggagcttgcgacttttccgcctcggcaaccggacccagcagcaagcaggacgggcggcgctctgctactggtcccgttaagccagagtagcccaagccctgaagtcactgctcatccggaatggaaatcccgccgaccaactacccagcctccagggcggccttggtggcacagaactacatcaactaccagcaggggaccccgcacagggtgtttgaggtgcagaaggtcaaacaagccagcatggaggatattccaggaagaggacataagtatcaccttaaatttgctgttgaagaaattatacaaaaacaagttaaggtgaactgcacagctgaagtactttacccttcaacgggacaagaaactgcaccagaagtcaacttcacatttgaaggagaaactggaaagaatccagatgaagaagacaacacattttatcaaagacttaagtccatgaaggaaccgctagaagcacaaaatattccagacaattttggaaatgtatctccagaaatgacgctcgttctacatttagcctgggttgcctgtggttatataatatggcaaaattctactgaagacacatggtataaaatggtaaaaattcaaactgtcaagcaagtgcaaagaaatgatgactttattgaattagactacaccattctacttcataatatagcatctcaggagattattccctggcaaatgcaagttctctggcatccacaatacggcactaaagtaaaacataatagccgtctgccaaaggaagtacaactggaataaacaaaaaccctaacactggaagtgtaaacatgtctattgatgtgtatgccaatttcactggcatctagcttatgaggccaataatccaaagtgtcayttatataatgtyttgwtacatatagaacttwwgrgtcawatamaagwtcmtactaaaatgtcttaaa

SEQ ID NO: 49671 - DNA, 1197 bp, Homo Sapiens
  misc_feature (111)..(111): n is a, c, g, or t
  misc_feature (746)..(746): n is a, c, g, or t
aacagaccaacaaataaacggccccacgccacaccaacaaaccacccccacacgcgcccacacccccctctctgctttcttccgctgccccgctgctatcgggtgggtggnaccgggtccggaattttccgggaatttaaggtacatgttccaaaatactttgaaaagctaaatgtttcccatgatcgctcattcttcttttatgattcatacgttattccttataaagtaagaactttgttttcctcctatcaaggcagctattttattaaatttttcacttagtctgagaaatagcagatagtctcatatttaggaaaactttccaaataaaataaatgttattctctgataaagagctaatacagaaatgttcaagttattttactttctggtaatgtcttcagtaaaatattttctttatctaaatattaacattctaagtctaccaaaaaaagttttaaactcaagcaggccaaaaccaatatgcttataagaaataatgaaaagttcatccatttctgataaagttctctatggcaaagtctttcaaatacgagataactgcaaaatattttccttttatactacagaaatgagaatctcatcaataaattagttcaagcataagatgaaaacagaatattctgtggtgccaagtgcacactaccttcccacccatacacatccatgttcactgtaacaaactgaatattcacaataaagctttctgagtaacaccttantaccacactagactcccaccaactaacatacacaaacaaaaacaccatcccaactaccccccctacccttaaacaatctaaccggggggggcccgccttaaaaaaaacccccccaaggggggcccacaaattttaacgggtacccccagcctttttttggaaaaaaaggggggccccccaaaaaagggggaccgccaatttaaaaaccttaggggaccctgggcgcggacctttttttaaaaacccccccggacaacggggaaaaaaaacgtggcaaacctttgggggaaaatttttttttaaacaaaaaaccccttttcaatttctgtcggggggggggggaaacccaaaattcggggaccaaaattccaccctccctaataagaaatattttataaaaaatctttttataggggggtaaattatatttacaaactctcttttcggaacg

SEQ ID NO: 49672 - DNA, 589 bp, Homo Sapiens
aagtctgcctctgcctctgcctcaccctgctggctcctggtgggtttcatcccaggcagagttgacattgctggaggggtttggtggactcctaagaatcatgaaaccacaggagcatgtttaggaagagatttgtctctggtccctgtctctgaaaggacacagatgctaaatatttattgtcttagatcatggattcctgatacctctcactcaaggggaccaaaagggacccccccgtgttcatcccttgtaaggtgagttcagtctacgttgtctctttccagtcactggatgcgtggcaccaactggtcaatgggtgcttggtgccataccctgctcaccctagtctctgcaggccatgtcctgaagggttcctcaggaggtcgggactagggtgggagaggcactatctgagacctgcaatcactcttgttggtcttgagcccattcatttccaaaacatccatctttctccacagtggctgcctcctcatttggctcctggggcctgcagtggaggttctcgcacctctgcagcccctagattcctggcaacctcccctcccctgacacacttgggaggctg

SEQ ID NO: 49673 - DNA, 386 bp, Homo Sapiens
aatttaattttttaaaaataacctgctgactcactggtttgtaatggaggacagagtcttgtctagatcctcgaatttcgtgcctgtctccaaggcacatccccacatcccgtcacagtgctgcaggattagggaggattgcttccagctgaaagagatgggaggccataaaggctctttcttctggatgacgttggaaaggaagaaacatggagttagaaatgcttatgtctccacacgtagcctcttcctgggcaaccctggacacgtctctgtctgccaaggtgatcattgtacttgcaaatttacctaacctgttgactgcctgtgttacatttactattgaaccagctagagttcaaaattaacttttgatcactgacttt

SEQ ID NO: 49674 - DNA, 704 bp, Homo Sapiens
  misc_feature (674)..(674): n is a, c, g, or t
  misc_feature (690)..(690): n is a, c, g, or t
ccagcactggcctgggcatccggtggtaggggctgcaggaccaggactcccaggaggccgtgtccatgtgtgacagcagaaccacatgccccaagaccccagggcttcccccaaaattctgagtgagctgcagggtgtgctgggacccgagtaggagctaggactagccaggacccgcagccgcctcgtcacctccagttgggtgcctctgggttcccactggctctgcccaggtggggtggggtggcccaggcagcagaaggttccctgaggtcccagagcctgttccgttggccctgggccgaggcccacaggtgctgcccttgctgctgctggtcgggcacccaagtgcgtgaggggcttcagcctgtcccggggttgcctgaggcagagcaagacgggttctcacccctgacttctggaggcttcccttgaagctctgtgcaaaaggtgggagacagagctggacctgcaggggtggtcccgccacaaccctgcgtgtggaccctggcaggggggggtgccaggcccctggaaagcaggggttaccgttacgaggctgtggtccggggcaagccaagtacgaagcagcagccatcgcgggctgcatcatcccccagccaggtccccaccaggcctgtctcccagcgtttgtctaataaacgcaccctccntaaacacgcctacganaaaaaaaaaaaaaa

SEQ ID NO: 49675 - DNA, 376 bp, Homo Sapiens
gcacgaggttaaagaaactatggcccaaagataataaatattttcaacagctagttactgtcagataggatttaaacctaaatctgaggtgagaggtggctattgtggcttttctagatgtcagttctttgtttcagttagtgaacaagacttgttgactcttccttaaaacattttaaatttattagttccatgcatttggatcacatttatgtcaatatatgtccatattccatacctgattctcatggcgtagcctgcagaccagtctccttcagtgtattccctttctaatgctctctcacttgacaaaataagaagtaccttttaatttgattattagctattcagattatagttctaaagcagtgctttt

SEQ ID NO: 49676 - DNA, 577 bp, Homo Sapiens
tgcacacttctgctcaagacgctgggaggctattcctggggcctgggcccagctcctctactatcccccgacccatcctcagccagcgctgcccccatcggctctggggaggacgaagtccagcagactgcagcgcggattgccggggccctgggtggcctgcttactcccctcttcctccgtggcgtcctggcctacctcatctggtggacggctgcctgccagctgctcgccagccttttcggcctctacttccaccagcacttggcaggctcctagctgcctgcagaccctcctggggccctgaggtctgttcctggggcagcgggacactagcctgccccctctgtttgcgcccccgtgtccccagctgcaaggtggggccggactccccggcgttcccttcaccacagtgcctgacccgcggccccccttggacgccgagtttctgcctcagaactgtctctcctgggcccagcagcatgagggtcccgaggccattgtctccgaagcgtatgtgccaggtttgagtggcgagggtgatgctggctgctcttctgaacaaataaaggagcat

SEQ ID NO: 49677 - DNA, 655 bp, Homo Sapiens
gtgcagagctgagttcaagtcctggctctaccacttgtcagtggtgtaacttggaggaagatgcttagcctgagcctgttttatgttttgaagattgggtaattgtccttccttcagtgttcctgggtgaggagtaagtgaagtcatgtctataagagatgtagcacagtctccggcatgtagaaatggtcagtaactcctagtgtgtagctagcctctgatgagatggtaaactcaggaggctggcaccacggctgtgctactcacggtcatgctggagggatgcagaaactaaatgaatccacagctacttactcatcttgcctctggcaggttcaccttaaaattgttgctaccaagcttcctgtggtcaaagagcccttgaggaagcaagctccacggccaccatagataacccattcctgaaagtttttcataaacccccacttgttgcttttaaaattttataagcagcttacacatgtagaaaatgatcctccagcccaccaccacatagtaatcactgacactgtgaggtgtctcagctggggttctgctgtgtgtgtgtgtattttacaaaatatgtatggtttctgttcagctcttttcagttaacagatgaacttttgtatcattaaatattttcgaaaacatg

SEQ ID NO: 49678 - DNA, 618 bp, Homo Sapiens
ggctgttgcggacagagcttcagaaacttggtgagtctctccaatcagcagagagagcttgttgccacagcactggggcaggaaaacttcgtcaagccttgaccacttgtgatgacatcttaatcaaacaggaccagactctggctgaactgcagaacaacatggtgctagtgaaactggaccttcggaagaaggcagcatgtattgctgagcagtatcatactgtgttgaaactccaaggccaggtttctgccaaaaagcgccttggtaccaaccaggaaaatcagcaaccaaaccaacaaccaccagggaagaaaccattccttcgaaatttacttccccgaacaccaacctgccaaagctcaacagactgcagcccttatgcccggatcctacgctcacggcgttcccctttactcaaatctgggccttttggcaaaaagtactaaggctgtggggaaagagaagagcagtcatggccctgaggtgggtcagctactctcctgaagaaataggtctcttttatgctttaccatatatcaggaattatatccaggatgcaatactcagacactagcttttttctcacttttgtattataaccacctatgtaatctc

SEQ ID NO: 49679 - DNA, 783 bp, Homo Sapiens
  misc_feature (735)..(735): n is a, c, g, or t
  misc_feature (755)..(755): n is a, c, g, or t
ccacgcgtccggaaagcgtctctacaaagtgatccggaagctgcaggacctggcaggaggcattttccctgaagatgagatcccagagaaggcctgcaggcgcctgcttgaagggaggcggcagaagaagacgaagaagcagaagcgtctgctcaggttgcagcaggagagagggaaaggtgagaaggagcccccgagcccgggcatggagaggaagaggagcaggaggaggggtgtaggggccgaccccgaggcgcgggcagaggctggtgagcagccaggcacagctgagcgggccctgctccgagatcagcccaggggccgtggccagagaggggctcgccagagaaggaggacacctcggcccctgaccagtgcccgagcaaaggcggccaatgtccaggagccggagaagaagaagaaacgcagggagtgatgtggccgggccaaggacaggcagggagggaggccaggcctcgcttgcaccgcgggacgaggctgaccgggctgttctgtagactcaggaccgtggctccagaactcctgtgccaggcgggagggaagggcggcactggagagatgggcccatcattaggggccagcatcccaggaactggacctttccccagagcctccgcctgtggctgtgatgaccttgggccagaaggtcaaactccgaagactgaaactctgcctgcagcaggactggccgccctggcctgtgggggggttcanaaaataaaatgccgcgcagncccttgccaaaaaaaaaaaaaaaaggcg

SEQ ID NO: 49680 - DNA, 3415 bp, Homo Sapiens
tcgagcagaatgcagcagaagttgtggaccttaccgttgatgaagatgaacctactgtagtaccaaccacttctgcaagaatggaatcacaagctactagcgcttccattaacaattcaaatccatctacctctgagcaggcctctgatactgcttcagctgtcaccagtagccaaccttccacagtgtcagagacttcagctactcttacaagcaatagtaccactgtgcacttctataggagatgactcaaggagaactacatctagtgctgtaacggaaactggccctcctgcaatgccaaggttaccttcctgctgtccccagcactcaccatgtggagggtcgtcacagaaccaccatgcattaggacatcctcatacaagttgctttcagcagcatggtcaccattttcaacatcatcaccaccaccaccatactccccacccagctgtcccagtttctccttcctttagtgatcctgcttgccctgtggaaagacctccacaagtacaagcaccttgtggagcaaatagtagttctggtaccagctatcatgaacaggcattgccagtggacctgagcaacagtggtatcagaagtcatggaagtggcagttttcatggagcatctgcatttgacccctgctgccctgtttcttcctcccgagctgcaatctttggccatcaggccgctgctgctgccccaagtcaacctttatcatcaatagatggctatggatcaagcatggttgcgcagccccagccccagccccctccacagccctctctctcatcatgtcgacattacatgccacccccttatgcctctttgacaaggccacttcatcatcaagcttctgcctgcccgcattctcatggaaacccccctcctcagactcagcctccgcctcaagtggattatgttattcctcatcctgtacatgctttccattctcaaatatcttctcatgcaacatctcatcctgtggcacccccaccaccaactcacttagccagtacagctgcaccaatccctcagcatcttcctcctacacaccagccaatttcgcaccatattccagccacagcacctccagcacagagactgcatcctcatgaagtgatgcagaggatggaagttcaaaggaggaggatgatgcagcatccaacgcgggcacatgaacgccccccaccccatccacataggatgcacccaaactatggtcatgggcatcatattcatgtgcctcagactatgtcctcacatcctcgacaggctccagagaggtctgcctgggaactgggaattgaagctggagtgactgcagctacttatacacctggtgcattgcatcctcacttggcccattatcacgcacctcctcgacttcatcacttacaattaggagctcttcctttaatggttcctgatatggcaggctatcctcacatccgttacatttcatcaggattggatggaacatcattcagaggtcctttcaggggcaattttgaggaactgattcatttggaagaaagattaggcaatgtcaatcgtggagcatcccaggggacaattgaaagatgtacatatccacataaatacaaaaaggtaacaactgattggttctcacagaggaaactgcactgcaaacaagatggggaagaagggactgaggaagacacagaggaaaaatgtactatctgtttgtctattttagaggaaggtgaagatgtgagacgtcttccatgtatgcaccttttccaccaagtgtgtgttgaccaatggttgattaccaataagaagtgccccatatgcagagtggacattgaggcccagctgccaagtgaaagttgacaccatgtttcagaactcttgccctccctctcattcccatccttcctggtactgcagtcaaccaaagatggcatgacttacctgcgcagatttggaagcattgaacttagagtgctggctctgctatatggtacaactaatgctagacctacagtttatgtatacagttgattttgatgtatttataaaagcttttttttctagatttgacatttttctgtatcattttactgtatttttgcatggttccttgtattgcatttctttgcacatattatgggcttgtgaccctaaacttgcaggcaaggttagctgctttagtaagtagaattttgtggtctttttgttttttacatagtaccaagccttgataattatgaattttttatccattactaacctttaatttaatcaatcatgtactttagtttaatgtataaagatcctctagaaaatgataatattgtgtattaagacattccttaattaggacaaaatggctgctgtatatttactatatggagttctgagttaaataccatccttaatactgggaacagaatacaacccatataaatcagatgcaggtggtagtcacatcaccagagtgatcagtataaattttcttggtgtatccttttcctttcaacacagtgcagataagagttgaatattgatatcatacatttagactgctgttctgattgcatttatctttttcctacatcatttagaattttatttccctgattcagtttctgctgctgtgaaacagctctgatgaacactaaatattaatttcaattagctagattgtacatacttgcagatttaacaaaattttagggaaattgaaaaagacatgtagaatttgttgtcttctgctaagcacgaaaagttaagatatctgcttacattgattttgtagacacattaagtcaagatttggaatttaagtcactggcaggtatctgtgcattcatagaacttataaaggtcccaggatcacttttaagggatttttattagtttaaaggtaaataaagtcagctgaatctacatgtctcttgttttatttctctctaaacttgaaaacagtaaatctgcagatactgtgaggcacaaattatactgtcaacctactgttgctatggttatatactcccacttcatacattaccaagagtcgatcactgatttaaaatttttaatttctatagttaagatttactgcataatatagaatataaagttaagttaacatactaacatttctcctttggaggaagttttaatctacttcaggatgcatattattatcaagatactttcatataccggatagcctaattttatttgtttaaatatgcttaatatgccccagattgcaaatgcatcccgtccgtaatatcactgtctgtatgtggaggacatgttcccatggatcatatgtgaagatgtcaataagcttgcattaagccacctgctttgtaagtggattgattaataaataacttatatttctattgtcaaaaaaaaaaaaaaaaaaaaaaaa

SEQ ID NO: 49681 - DNA, 752 bp, Homo Sapiens
  misc_feature (724)..(728): n is a, c, g, or t
  misc_feature (730)..(730): n is a, c, g, or t
  misc_feature (732)..(732): n is a, c, g, or t
  misc_feature (734)..(744): n is a, c, g, or t
cagcgagtgcaagaagctgttcagcacagagacgtcactgcaggtgcaccggcgcatccacacaggtgagcggccatacccatgtccagactgtggcaaagcgttccgtcagagtacccacctgaaagaccaccggcgcctgcacacaggtgagcggccctttgcctgtgaagtgtgtggcaaggcctttgccatctccatgcgcctggcagaacatcgccgcatccacacaggcgaacgaccctactcctgccctgactgtggcaagagctaccgctccttctccaacctctggaagcaccgcaagacccatcagcagcagcatcaggcagctgtgcggcagcagctggcagaggcggaggctgccgttggcctggccgtcatggagactgctgtggaggcgctacccctggtggaagccattgagatctaccctctggccgaggctgagggggtccagatcagtggctgactctgcccgacttcctctttggcacctccattccctgttgctgaaggccctccagcatccccttaagcatctgtacatactgtgtcccttcctcttcccatccccaccaccttgtaagttctaaattggatttattctctcgtgaggggggtgctctggggtccttgacacacataaaggtgcccccccaccttccacctcttagcactggtgaccccaaaaatgaaaccatcaataaagactgagttgccnnnnnananannnnnnnnnnnaaaaaagg

SEQ ID NO: 49682 - DNA, 393 bp, Homo Sapiens
tcctctgtggtcctgcagctcccccaatcacctgccacagtgctctccatcctcccagctggcagagatctctcctgctccccctgtggctcttcttgtatggaccgcggctggcaaattagcctctttccacccctcctagcatttttataatccaccctcccctgcagcacctagcccagtgtcctcaggtagggggaggtggggaaataatagatatccctgcagttgcatttagtgtgtgtgtgatgtgtgtgtcactttctgtaaaatgggttcttgcaggctcacctcactgacaggtccccacaatcctggcagctccaggactgtcagtcagctgctggcctttccagatgctcgtaggggtcttccatgcttcatggagaaatg

SEQ ID NO: 49683 - DNA, 675 bp, Homo Sapiens
ggccaggtgaggttggggcctgtgggccgccagtccatacggtgctgtcactgcccatcttcggtgacaccctggggtgaggtgctcagcaccttcctctcgaggagccacattttcctcctttgtgttaggggacataacaagctctgctgggcttgagggacccagaccaggtgtctgcagtcagctcctgagacacagctggccggcacaacaggtgttacatcaggggtttcctgtggccgtttgaactttgagcatttatctaaattaaattggcccagggttggctggtgggtcacccagcagaggcttctccccatagcacgaggatgtgttgcctgggcacggtgactgcggttattcctggaggtcggcagacatgccaaccttgggctatttgagctggagaagctatgtgatgctagccggtggctttctgggctaggccccagtttgaggctcccctgggaactagagccaggaacagccagtggcactgacaaggggacggagtccaaggcgttattgggccacctgacagctggacagaaaaggggcagacacaccgaggatgcgatttaaaataaatgcagcactgtttacttgggacaaaaacacacaacacaaacaacaacaacaccccacacaaaaacaaaaaaaacaagaggcggc

SEQ ID NO: 49684 - DNA, 605 bp, Homo Sapiens
atgctcttagaaagtggggctgatccaacaattgaaactgactctggatataattctatggatctagctgtagccctaggctatagaagtgttcaacaggttattgagtcacatttgttgaagctgcttcaaaatatcaaggagtagacacagtcatcagaaaatgtctgcccttttgtttacttcttggtccttataaatgatagttttgtttacttataaatttttacctcagttgcaatatttactggtttttagtaggttttaataaatatttctctgagtaattcactggtttataataaatgtaatactctttttataactatgttttactgtatatttaaaattataaattaatgttttcgtggcatgtaaatttttatggtacagatagttatcatcagtctttgtatcaagtgctgtaatttgacattttcagaaattattctaccctagtcatcttcactcgtgtattaagtcattcactttatatagggtttgctataaatccctagaaaaaaattgttcttattgttgaataaaaaagtgcacagtgtgattgtttacaaaatgatattataaataaataaaatacttcttct

SEQ ID NO: 49685 - DNA, 1137 bp, Homo Sapiens
  misc_feature (1137)..(1137): n is a, c, g, or t
ttctccggatgcgctggtcctgtgaactcttcctgctggtgtccatcagcacctccgtgatcctcatgcagcacctgctgcctgccagctactgtgacctgctgcacaaggccgccgcccatctgggctgttggcagaaggtggacccagcgctgtgctccaacgtgctgcagcacccgtggactgaagaatgcatgtggccgcagggcgtgctggtgaagcacagcaagaacgtctacaaagccgtaggccactacaacgtggctatcccctctgacgtctcccacttccgcttccatttctttttcagcaaacccctgcggatcctcaacatcctcctgctgctggagggcgctgtcattgtctatcagctgtactccctaatgtcctctgaaaagtggcaccagaccatctcgctggccctcatcctcttcagcaactactatgccttcttcaagctgctccgggaccgcttggtattgggcaaggcctactcatactctgctagcccccagagagacctggaccaccgtttctcctgagccctggggtcacctcagggacagcgtccaggcttcagccaagggctccctggcaaggggctgttgggtataagcgatggtgggggggacaaaagacaaaaaaatcccccaagagctttggatttttgttacgtactggtttctttgataattgatgcgataagggaaaaagtccctattttttatactccccgttgggcccccgccctggaccgataccattaccgcccgagacccccctatttgcttgcccctctcgtttcccaccttgtttcccccttattcccccggggttccccccctttttgattgtgcacgccgccaattcctaccaaaaccagtcctaacgaaagaaccgatgtatatccaacaggccggttggccgcgccagttacaccgcgttcctatacaccccgccggcaatgtagcctcccccctacccttatataggtatctctcaccatatagctggaggcctgcgcacgggagatgggtacccttctcctcttgttgcccagcgcacactcgcggtctcttcgcttatttattttttcgcgctgcgccggcgaggactatcccccacgttcttcttttn

SEQ ID NO: 49686 - DNA, 846 bp, Homo Sapiens
ggcatattttttattaatacctacatcaaatggaaaatatctgaaattttttttccatagcaggtattttctactagaagtagttttactacttttcatttagaacagagtatgagtcttaatctgaagtctttttcatgcccttgttttaaaaaaactactttttttggcctcaaaaaaatcaagggtgtaatttttaataaattgttaatcctatgttttgtaattttcattttaggagcttgacttatttttttctctctcataaaaacacatttgcgttaattgtaggagaaattttctcagcattttgcatgttctttctaatctttgctggtctgaatatattggtagtaattactgtaattattcaacaaaaagcatatccgttcaaaaatttttccactatgtcttttttctagtggctactgttttagttttctagttgaatatctctgacaagctttccgtatggttctgttatattttcatctacatgcaatgcgctattaattttattaaatgaaaactaatcccccttcatgtgggaactataacccacagaccgccccccccccatgcctaacttcgcccctccccctcccaatcccacccccctatcatatggctcaaaccccgtccacgccccccctccctgcttattgtatccccttccaggcgcatcgcaactcaattgcctgccctcccgtttctttttgggcggcttgttcctgggccccttgcaaaaatcctcttataaacccccctcctctggggggccgcgcgttccctttctggagtatcccaaaccgcgggcacaaacgctggcccctccaacgaaaaacg

SEQ ID NO: 49687 - DNA, 581 bp, Homo Sapiens
ttaactgagtacttggatatgaaaaatactcgtacggcctctgaaccatcagctcaactaagctatgccagcactggacgagagtttgcagccttttttgccaagaagaaacctcaaaggccaaaaaattctcttttcaagttcgaatcgtcctcccatgccatcagtatgagcgcctatctgcgagaacagagaagggagctctatagtcggagtggagaactgcaagggggtcctgatgacaacttaattgaaggtggaggaacaaaatttgtctgcaaacctggagccagaaacattaccgtcatattccacccattactaagatttattcaggagattgagcatgctctgggtcttggcccagccaaacagtgtcctcttcgagagtttctcaccgtgtacatcaaaaacatctttctcaatcaagtcttggctgagatcaacaaggagattgaaggagtcactaaaacatctgaccctttgaagattctggccaacgcagacaccatgaaggtgctgggagtgcagcggcctctcctacagagcacaatcattgtggagaagacagttcaagacct

SEQ ID NO: 49688 - DNA, 627 bp, Homo Sapiens
ttctggcttgcactagtgttttgccctaaatctaaggatggtgcctagtggtggccctgtgttctgaggacagagagagctggaggggtggagggaaatgcatcggcactcatttggtgtaaccaagaagagggggaaagatgtcttgatagaatcaaagttgccaaaaacaaagaagagtttatcaagcagatttctaacatttagtagaaactacttcatagctctcatttttagggggttctatctataatttatggtaaatagttgggaggcaaagggaagaatgtgtgtggggggattattaatttgaagtataagctaaattgtttattaaaaagcctattttggatgaacaagtttagagagataaactgactaatgtgtcctccagtttagaatttcaccttacccgacccaggcacttcttaaaaacacagatcctcagtgcagctctgccagcatcaaggcttttaaaatatgtagtatttaggccatttaaaccatacttattactcaataacccaagaaacaattttgggttagccatctaatatagcaaataaaatagattttttaaagaaatccaaaattgtcttaaaggaatggaccccttgaaaaaaaaaa

SEQ ID NO: 49689 - DNA, 713 bp, Homo Sapiens
  misc_feature (699)..(699): n is a, c, g, or t
  misc_feature (707)..(708): n is a, c, g, or t
  misc_feature (713)..(713): n is a, c, g, or t
ggtaccgggccgggggcctgcaggacagcgacaccgaggatgagtgttggtcagatactgaggcagtcccccgggcgccagcccggccccgagagaagcccctaatccgcagccagagcctgcgtgtggtcaagaggaagccaccggtgcgggagggcacctcgcgctccctgaaggttcggacgaggaaaaagactgtgccctcagacgtggacagctagggtctgctgcatctgcccccttcttacctcgtgccctgcagggctccagggctatttggagggaccttgggctgcacatctggcctgcctgcaccagctgcctgggccccaccctcctgactcctgctgatggttaagggccgggagcagatgctgccaaggccacatgcagggatgcacccacaatgtaccaaagcaggctgggcccagggttctatttattgccttgctctgccctctcccttccccggttgtgggacaagagccctccctgaacccctgcaaccctccctgaacccctgcaaatgaaaccaaacgtccacctgggtgtgttcattccttcctgtccttcaaagtacttgatagcctttcataaggcctggcacatgtgtcctggttgtgtgtgtgtgtgttggtgagtgaggtcaggtttgcgagtgttttgataaataaatacataaagggggaaaaaaaaaanaaaaaaannaaaan

SEQ ID NO: 49690 - DNA, 733 bp, Homo Sapiens
ctgaccggggcgcagcttttctcgctgcagagggaggagctgcgggcggtgagccccgaggagggggcacgtgtgtacagccaggtcaccgtgcagcgctcgctgctggaggacaaagagaaagtgtcagagctggaggcagtgatggagaagcaaaagaagaaggtggaaggcgaggtggaaatggaggtcatttgacctgccaggcgcccttcgcaaagagtgacgaggccccgtgggagaacggactcctcagactctccccaatagcggaagtcgatcttctgaaggatggccaatctgctccggccctggtcttcccccatcccggtggacagacttaacgatccttgctgcagtccctccggagaggatctggactggctgggagtggggagggcgtggagacagtctacggaaagcgctagcagacccccgagagggtgcagtggagccctgagcattgtaatatgcggcccagcctataaacagcctccgtgcttagcaaaaaaaaaaaaaaaaaaaaaaaaaaaaaaaaaaaaaaaaaaaaaaaaaaaaaacatacaaaaaataaaagaatagtcaacaaacaaaataagaaactatagataatataaaaatgaaaataaaaaagagatggggtggggcccttgtctttactctctccctctggagtgggcacactatattatttcgccctccccctctttttttgtatgagagggctctttta

SEQ ID NO: 49691 - DNA, 569 bp, Homo Sapiens
acgatgcaaattatactttgacaacttactatctcagcgggcctattgtggaaaaatgaattttgaccacaagaatgaaactctaagtatatcagttcagcctggagaaggaaataaagctgctttcaatgacatgagagccttgtctggaggtgaacgttctttctccacagtgtgttttattctttccctgtggtccatcgcagaatctcctttcagatgcctggatgaatttgatgtctacatggatatggttaataggagaattgccatggacttgatactgaagatggcagattcccagcgttttagacagtttatcttgctcacacctcaaagcatgagttcacttccatccagtaaactgataagaattctccgaatgtctgatcctgaaagaggacaaactacattgcctttcagacctgtgactcaagaagaagatgatgaccaaaggtgatttgtaacttaacatgccttgtcctgatgttgaaggatttgtgaagggaaaaaaaattctggactctttgatataataaaatgagactggaggcattctgaaatgaaag

SEQ ID NO: 49692 - DNA, 830 bp, Homo Sapiens
tttctgatgaaaatgaaggaaaagaaatgtgtgttctgcgaatgactcgagctagacgttcccaggtagaacagcagcagctcatcactgttgaaaaggctttggcaattctttctcagcctacaccctcacttgttgtggatcatgagcgattaaaaaatcttttgaagactgttgttaaaaaaagtcaaaactacaacatatttcagttggaaaatttgtatgcagtaatcagccaatgtatttatcggcatcgcaaggaccatgataaaacatcacttattcagaaaatggagcaagaggtagaaaacttcagttgttccagatgatgatgtcatggtatcgagtattctttatattcagttcctatttaagtcatttttgtcatgtccgcctaattgatgtagtatgaaaccctgcatctttaaggaaaagattaaaatagtaaaataaaagtatttaaactttcctgatatttatgtacatattaagataaatgtcatgtgtaagataactgataaatattggaactttgctagaacaagaccctgtagtaatagtaataatagttgaagtttggccaactcttaataaagttattttggtaactaatgttttatggcacttaagaataattagcagcgttaaatttgttgtattaagcacttttaatttttatccttcctaaaaatagtttatgtatctgacaagaaacttacttaaaccatgtgtccttcccatctttttgtcatcttgttccttcaaatgccctcctccatctgcttgagattcccttgtcttcactttaaagccagagtgcagtccatgat

SEQ ID NO: 49693 - DNA, 582 bp, Homo Sapiens
agtgcgggtgtggggagggatttcacaagtggttattaacggccagttcagcaagaagtgttgagtgtgtacaaaggggagggctggaagtgttaactccagacccgttggctgcttgagttgtttcttatattctaaagcagcagtccctaacctttttggcaccagggaccagttttgtggaacacagtttttccatggacggggtggtggtggaggatgaaacttccacctcagatcatcaggcattagagtctcataaggagcacgcaacctagatccctcgcatgcgcagttcacaatacggttctaagggctttagagtaagcagctttttcacctgtgggcctctggtgagaaattctgtaaattgtgataatcaggctggattttaatgctgcttttccagtacaatgttagagtttgggttcattaaaattaggcaaactcccattgggttagggcttctctcattccattttgtggctaaccttactgtgtttcagcccttgctgaaaattcttctgatatgtgttgcccttcctcacagccctttggccattgggagtttggctgtccctc

SEQ ID NO: 49694 - DNA, 701 bp, Homo Sapiens
ttgttgaatatacctctcattgcattagttgtaatggtgctagtgctgggtgctgagctcagctgcccggatgacctttccagactgaaggacatactcccctaacagctgggagtgctgctggctggccatttacttccagcccttatgaggagtttcccctgctgaagagccctgcctgccccagatcatacccccttcctgcctgtaacccttaccggctccatatggggtacaaagggctggcctcctcaccccaacttgggaaaccctctggggccatcccagctccagagccccttgtggggtcagtgagacctcattgtggccacattacagcccagtgcctctccctgacaagcctgtacccagccggctcagcccacagcactgtcctatgaaccttcctgcacgccattctccacctcagtatctgctttcggggaacccaacctgcgacagtgcttctgtgtgttttcagtcctgcaggtttgaactctgactttggagacttttccagttatctcgtggaatgacagattgtgcctgtatgatatcaggcacaattaatgcaaattaaggcagacctatttattctagatgtgaattgctatttattttaaatgttgattttatgtgttatgtgactctgaacttattgccaaataaaagttggatgttacaccacccacacaaaaaaa

SEQ ID NO: 49695 - DNA, 779 bp, Homo Sapiens
ctttagagtcgagggaaatggtgtgttgtatttgagagaaattataagagccatcacctccagctacaggtcattcctgtcccaatcagctgctctactactgatgacattaaagatgccttcattacccaggcacaggagcagcagatagagctgttggaaatcccagagcactctgacatcaagcagattgcacagccaggagcagcatatttttatgttgaacttgacacaggagaaaagcttttccacagaattaaaaagaattttcctttgcagtttggaagggaggtcctggccagtgaagccatccttaatgttcctgataagtctgactggaggcagtgtcagatcagcaaggaagacgaggagaccctggctcgccgcttccggaaagactttgagccctatgactttactctggatgactaaaacaaagggaagaactttttatgaactccacaggaagtagtaaagcttttttttttttttaattaaaagaattttttttgagacaaagtctcgctctgtcacccaagcaggattgcagtggcataactgtggctcgctgtagcctcaacctcctgggctctagagttcctcccacctcagcctcatgagtagctgggaccacaggcgcatgctaccatgcctggcaaacttttttgattttttatagagacaggagggtctccctgtgttgcccaggctggtctgtaatgcctaggctcaagggatcctctgccttggcttcttaacctgctgggattacaagcatg

SEQ ID NO: 49696 - DNA, 839 bp, Homo Sapiens
tatatgaattctaattctttttcactacatatgttttaaagagttacatacagtgatttagaatggtttacagttaatgctgatcttgtattttaaattccaacactttgtgtcactacctcctctaatggttagtatgatatgctagcagactgtatgaggtctttttttaaaataccacttttagtgtcagtgaaccaaattctggaatgtcttaacagctctaaatcttacttgtcttgaaaatgattggggtttaataccactgctggtggttcacacatcatcccatccttaatatgcctgacaggcatctgagcaaaggtttttagtaattgaatttctctgcagtagtccttcaagcacttgaatgtaaacctttagcatttattcgtttaatgactactgatacgaatctcaagcagatttcttgctcttaaaagttatgtttcactgagttctggtttgtgtagctatattttatatagctagatattcctcacagtgaacatgaattgtaataattggttatttccttaagtctttagattatcataatttcagattatcgcacgtctgtgattcgagaggtgagttatttaagaggccgtttcaggacatgggaattggaatgtaaacctgtatctctgtgaacttttacatgataaaatataaccttctttgtgcaaaaaaaaaaggaacaaaacacacttggggggcccggccagaaatttttaaacatcttggccccgcccgagaagagaagggctttttcagaaccgctcttgttgctttccaaaaagccggccgtctacaaacacggggggggccaaagcaag

SEQ ID NO: 49697 - DNA, 582 bp, Homo Sapiens
ctttatatagatagtattttatattttattctcacccgaagtattcacacaatctttttaaaaaaaatttgaaatggcattttgtattgccacagaggtaggatgagccatatattagtgaaatgttttattttgtaaaatataaatggattatttgccatcattagtacctctcaacttactttttagaggacaagaaacaatctgtagattggtttccatacagggaagttctccgtcctatgcaatgtttctaattaatttgcttaattctgagccattaatcctgctacactttgaatgatacattaattcagactaatctttgggggctttattttgtaagttagaactttcaagggaaacatgttcaacactattattttgttataaatttataactttgttattacattgtgtaacaaatataaggtttacgagctatgagaattggtgctatcaccattagctatttgctgtaatgtcaagaaaatgttcaccagatgcaagaatgtaccttttctttttagaaagccaaatgtactttagacatgaatgcaactatttaaagaatagcttcat

SEQ ID NO: 49698 - DNA, 649 bp, Homo Sapiens
tttccatcaaagccctctgagaagtgagacctcagcaattccgggagccacatagagacagacttggcaagggaccccctggttctgagccagtagctgccatctggaaattcctcttttagcctctccttagaggtgaatgtgaatgaagcctcccaggcacccgctgaatttctgaggccttgcttaaagctcagaagtggtttaggcatttggaaaatctggttcacatcataaagaacttgatttgaaatgttttctatagaaacaagtgctaagtgtaccgtattatacttgatgttggtcatttctcagtcctatttctcagttctattattttagaacctagtcagttctttaagattataactggtcctacattaaaataatgcttctcgatgtcagattttacctgtttgctgctgagaacatctctgcctaatttaccaaagccagaccttcagttcaacatgcttccttagcttttcatagttgtctgacatttccatgaaaacaaaggaaccaactttgttttaaccaaactttgtttggttacagttttcaggggagtgtttcttccacgacacacagcaacatcccaaagaaataaacaagtgtgacaaaaaaaaaaaaacctaaatgctactgt

SEQ ID NO: 49699 - DNA, 855 bp, Homo Sapiens
  misc_feature (682)..(682): n is a, c, g, or t
ccggaattcccgggatctgcgggacaagcgggcgtacagccagaaggcccagaactcatggaaaaagcggcaggtcttcaagtcactctgccgagaagaggcagagacacctgcggaagccacagggaagccacagagagatgaagccggcccacagaggcagctgccagcccttgatggcagcttgatggggccggagagtcccccagcacaggaagaggaagcccctgtatcaccccacaagaagccagccccccagaagcggaggagggccaagaaggcacggctgctgggccccactgtgatgcttggtggatgcgagttcagccgccagagactgcaggcctttggcctcaaccccaaacggctgcacttccgccagctgggccggcagcggaggaaacaacaggggcccaagaacagctcctgagcaccagggagcaggcaggggcctcaggctcctctcctcaaatcaagccctggacaggtctcgcacccacaagtactatctgctgcagagatcctctcatctgtggccaggcacgcctgtaatcccagcactttgggaggccgaggtgaaaggatcacttgagcccaggaattggagaccagcgtgggcaacttagcgagactccatctctacaaaatgtggtgacacatgcctgtagtcccagctactcangaggctggggaaggaagatcacttaaggccatgagtttgaggctacagagagctatgattgcaccactgcactccaaccctgggcaacaaagcaagaaccctgtctcttgaaaaaaaaaaaaaaaaaaaatttaaaaaacacgttgtaagctgtgtgggtaaaaaaaaaaaaa

SEQ ID NO: 49700 - DNA, 586 bp, Homo Sapiens
ctttatatgtagtggatctcaagaagttcaggagaattggagcaggtgacaggctcaggagccagtatcaagctctcagtcaagatccaaacagtctttcaaacctagatcaggatctccccaataatatgatttaccaagtcgccattaagtctcttcctcaagactggctgtggtgtgaaacctggtgtgatgatgaatccaaacaaagagccaaaacaattgatctgtgcaataatcccaaaacaaaagaatccaaactaaaagctgctgccagaattgtcccagaatgggtggagtatgatgctgagataagacaactattagatcatcttgaaaacaagaagcaagatacaattttgacacatgatgaactctagcactggtgtatatgagaaggaaggcgaaagcatgacaggaaacctgccgcctgctggggaagtctggagcccctgctgagacgatttggaagtctcgttaagatcagtgacatattctttaattttaaaaaattgtaattatttaaaacagttatttaatgtattgaatgagtttaagttatataataaatgaccattgagtattt

SEQ ID NO: 49701 - DNA, 649 bp, Homo Sapiens
  misc_feature (16)..(16): n is a, c, g, or t
aaaatctctcactatnccctctcctcctgcctgggacaggaatcatccctttgtccagtgtatccacaatgtatacactcattatatacccattttataatgcccattagtcatttctattatcagatcataaaaaaacatagtacatagagggtttggtattattcatggtttcaggcattcagtgagggtcttggaaaatatcctccatgatgggggagctactgtaatactatgaaattggaaaaaccaaaatactcatcaagaggatggactatggtacacatgatgaagtattaagtatcaatgaaaaagagagagtcctacatgtccggcatggaaggatctccaggagacaatgttaaaagtttgggggaaaaattgaaagacaatacctgtaatacatatgatactagtgatgttaaatcacatcacacacacacacacacacacacacacacacacacaaatactgtatagtgtacttctacaagtacatatttgtgtattatatagagagaaggtctggaaggatactaaccaaactgtcaacagtagtttggtagcgtgcattagctttaactgtaatgtttgatgtttttgaatatgcatttatgtattgtttgtgtaatgacaaattaataaatta

SEQ ID NO: 49702 - DNA, 583 bp, Homo Sapiens
ggcacgaggatgcttctgtttattaaaaaaagaaaccttccaatgtccaaaactgctaaccctcgacgtggccgccaagttagtcgctccttgctaaccggtgagtgaccgcggccccgagcctggggctggacgcaggtcccaggacatgctgctcccttgtgtgagtgaccgcggccccgagcctggggctggacgcaggtcccaggacgtgctgctcccttgtgtgagtgaccacggccccaagcccagggctggaggcaggtcccaggacgcgccgctccctcatgctgcccgggcccttcctccaagaccatacagagcctgaggggcaccttggcttccgcctgtgctagctttgccatgtcatctggaataatacttgaaattttgatttttggaaaaaaaagttttttatcttttgttgaaatcacctgttatccttgtttgtaaactgataacttttttgcttcttctcaggaatacagttttcaactgttgtcttgctcttgatagaaactgagaagcagcaatctgtatttgtggaggaaagtcctctcttttgcatattctaataaatgag

SEQ ID NO: 49703 - DNA, 930 bp, Homo Sapiens
  misc_feature (774)..(774): n is a, c, g, or t
tctccccctctgcagcccatcctgggagtgtattaactggagggaagatgggtcttgcagtacatttgttttgcccagccatcactcttttttgtgaggagcctaaatacattcttcctggggtccagagtccccattcaaggcagtcaagttaagacactaacttggccctttcctgatggaaatatttcctccatagcagaagttgtgttctgacaagactgagagagttacatgttgggaaaaaaaagaagcattaacttagtagaactgaaccaggagcattaagttctgaaattttgaatcatctctgaaatgaagcaggtgtagcctgccctctcatcaatccgtctgggtgccagaactcaaggttcagtggacacatccccctgttagagaccctcatgggctaggacttttcatctaggatagattcaagacctttacctcagaattatgtaaactgtgattgtgttttagaaaaattattatttgctaaaaccatttaagtctttgtatatgtgtaaatgatcacaaaaatgtattttataaaatgttctgtacaataaagttacacctcaaagtgtactcttggaatggattctttcctgtaaagtcttatctgcgactctgtctcgggaatgttttgtctgttgccgtcagccgaactttgttatggagggagcagcctcacacaagcagaaacactcctgtggatggtattgtagcatgtattgtttattttagtcaatagaccctctccttataaatggnggttagtcttcctgttgcatttcatgggccttgggggtttcctagcagaagatttttggagcccctttgttgggacaatacccattacatactttgagccacgtataatactttgtttttgaaaaaataaaaagcctgcagatttgtggtgaagtt

SEQ ID NO: 49704 - DNA, 588 bp, Homo Sapiens
agcacctctagctgtctgcctcagtgggtcagaagcgatcaccctgttgatacacattgtatctctgtagtttcaggagacgctgccggtaacggcgtcggtccgtggctgaggcccaaaccgtcttttctctcagagggtggggagggaggtgggggcagcagaggcctgggctgggtgccctgtgcacgccaccccacttccgccctacccctgggacgttggccttggctggctagttgggcaccgtgtgcctgccctccaagggcctcctctacgccaatgaggcctcatctgtgctctcgctgggcacgtggcttcatgtcagtaagcaagatgcttcttaataacccaccttctgccccactctattccttatcctgctgcccctgtaggggtcaagggccctccgtctacaccctcttcttctcctccatcctttattcagagtcatctcgcccttccccatgggtgggggaacctgtgtttgtttgtgtgcacatgtaaactttaaatattttaagcagaaagtccttacctcctgtaacacatcaataaagtacaatcattgtgaaaaaaaaaaaaaaa

SEQ ID NO: 49705 - DNA, 728 bp, Homo Sapiens
gcgtccgggcaagcagaagtgacccgtctcttgctggagggaatcagtagcactcacgtgaaccacctgcgctgcctccacgagttcgtcaagtctcagacaacctactacgcacagtgctaccgccacatgctggacttgcagaagcagctgggcagatttcccggcaccttcgtgggcaccacagagcccgcctccccacccctgagcagcacctcacccaccactgctgcggccactatgcctgtggtgccctctgtggccagcctggcccctccgggggaggcctcgctctgcctggaagaggtggccccccctgccagtgggacccgcaaagctcgggtgctctatgactacgaggcagccgacagcagtgagctggccctgctggctgatgagctcatcactgtctacagcctgcctggcatggaccctgactggctcattggcgagagaggcaacaagaagggcaaggtccctgtcacctacttggaactgctcagctaggcaggtgcccccatcccccccgcattctggcctaggcaggagaggatgggcgcagccctgccacttaacttgtttgttggtgacacagttgttcagagtggggagaattcaccccattctgtccctgcccctagtcacctagctgtgagggtgcctgaggctgaatggctccacccctcccccagccctgcttctgacctgtggctctggagcccctgccc

SEQ ID NO: 49706 - DNA, 604 bp, Homo Sapiens
ccaagtgctctgccagggctgtagccaggcagggccctaagccagggctcctggacccaggctttcccataccacgggcccaggactgtggctccttttctaaaccacctctgggactcagctccccccgccaaaaaaaatgggtctccttctgggctccaggattgtctccccactccagcatccccaaactggtactccctgacccaggcccccaatcctgggctcttacagagcctccatgagtcaagccccctccccacacctggactccagaattcaccctctcccctgcagtctgggttcccagactgagtcctctccccaaatcagggctctagacccgagccctccaaacctggactctgggacttaggcccccttaaatctagacttctctttataggtttcaggtctcctatgggtgcctgggaagtccttgaaagtggactgttctcaggcttgacctgccccaccccatccccgcggttgaggctgtgggggcagcagatcaggagcccactgataaggggccctagggtacagggtgctgcccagcaggtcgccaccgagtgtcttctcattttatttcagctccattttg

SEQ ID NO: 49707 - DNA, 697 bp, Homo Sapiens
gtcactgccctgagttcaaataatgcgagctgaggacagtgatctgcaactcccagcatgtcatgtggtctcttagaaatccatgtgactgtttccaccatcttgggcatttgtggggacccccagactggagggagaaagccctacaaagtggatgggagtgtggggctgaacttttccctacccttaactttgtgtctctgggacctccagggacctggcccctcaccaatgcatatgaagagtatgcttggggaagagcttaggaatggggtgggcatgggactgctgggtagcagcctttgagcaaatctgcatcttctcttatttctgacctttttccacgtgcccagtcctatttctgccagttgaaggcatactaatattctttatactatttaatcttttgcagaaaccttactattataacttgctactctccagataccaattcttcatgccgagagcatcggaaatgtttttgtgtcttactgatgttttcatgatcaacttgtaaatgtaagcagttgacttcataaaaggtattttaactattcttggagtcctttgctacccaagcacctggtttcaccatgcgatcactgacttctctacagtgaagactctttcttaatataggatttcgctgtgctcttttgattaaaaatatctaaccttaaaagacgtaaaaatgtat

SEQ ID NO: 49708 - DNA, 412 bp, Homo Sapiens
ctttgcactgattaattttaagcaattgaaagatgcccttcatatgggtttgggtttgtctttctggtcgtcagcgtggtggtggaaacagctgaagttttaggagacagcttagggtttggtgcgggccacggggaggggaccgggaagcgctggggcttgtttctgtttgttacttacaggactgagacatcttctgtaaactgctacccctggggccttctgcaccccggggtgaggcctcctgcctgcctggtgccctgtcccagccccaggtcctgtgcagggcacctgcgtggctgacagccaggctcttactccagccggggctgccagcgcatccagccagcccagccctgtgaaagatggagctgacttgctgcaggcgacctgatttatagggcaagagaag

SEQ ID NO: 49709 - DNA, 716 bp, Homo Sapiens
  misc_feature (58)..(58): n is a, c, g, or t
  misc_feature (108)..(108): n is a, c, g, or t
  misc_feature (158)..(158): n is a, c, g, or t
acgaaaagtgactactcagatatggaaagtcacatcgaagactatcagaatatacccntgtgttcataggttactggggtacacgtctaagttattcaggcatctctntgcttaaaattgagcttgtaaatgtgactgatgagcgaggttagaagtgnaagaaattcctgtgcatgttctataatctgacaccctgaaagcaagtttcctttcgtcattcacatgctcttgttctgccgtgactgttcaggtgtatggtagtaagtaaatgtattaacatggtgaacagtagtaatattctatcatagagtattagcccttgcaagttttcagggcgtcttttccgacttcagtttttgtgataaagaatgtgaacagttgttagatgttctcagtgattcaactttaaaacaaatttctcgtgatgattcatttcaaaatcctgagtgagtctgactgaaaaatacgagagaaaagagagtggtttccgtttgcagctacacagctgtgtgcatcgacgttctcctggggtgtgtgccaagcgaaacccaggggtgaattggattcttgaagagaccaaagcctgtaactgtccagcttctaatttcaaaacgggtccattagggcttcgttgtgttaacaagttgacaccatgactagtaaatgtaaacgtgtatgtataaaataaagtttagcaaattaaaaaaaaaaaaaaa

SEQ ID NO: 49710 - DNA, 601 bp, Homo Sapiens
ggcctgtttgtttgtttgtttaaaacatttctccatcactcattccaggtcccagagcaaactctctctgctctcggagcctgtgacactggctatgtgctccacagtttcagtcccaggtcatactctccaacagttttcagagctccatatatatgtagatgccatcctttctaaaaacttctcacgacctcctggaatattcctattgatctcattttatttagcatcagctcaagaaactaagtcttagtgcacagtatcacaacaaagaaaaagctttgtttttataactggtaaaaacaagaaaagattctcatcaaaatgaaaatataaaattaatcatttctcaccaaagagtatgcctgggagcctccagctgttaaaagacaatgctattactacttcttatcaaaaatctgtaatgccctgtgatttttatgatacttcttcaatacaaagtgttaatatgtgtcatcagtataataacaaccaacaaaatgccactttcagaaaactgtatgtaaattttttgtaacaatgtaaaaaagaaatggggagtaagtgttcacatcattaaaaggctttgaattcatggaaa

SEQ ID NO: 49711 - DNA, 617 bp, Homo Sapiens
gtccgtgaagttcaatcccttcgttacctcggaccgcagtaaaaaccgcaaacgtcacttcaatgccccctcacacgtgcgcaggaagatcatgtcatccccgctctccaaggagctgcggcagaagtacaatgtccgctccatgcccatccgcaaggacgacgaggtccaggtagttcgaggacactacaaaggtcagcaaattggcaaggtagtccaggtgtacagaaagaaatatgtcatctacatcgagcgggtgcagcgtgagaaggccaacggcacaactgtccacgtgggcattcacccaagcaaggtggttatcaccaggctaaaactggacaaggatcggaaaaaaattcttgaacgcaaagccaagtctcgacaagttggaaaagagaaaggcaaatataaagaagaacttattgagaaaatgcaggaataaatagaacctgttgtgcaaccacggtttaaccggagattttgaggctagggtgtgtttctttcgaacttttcggaatgtctggaacatttcatttcctgttttgttacctgtgcctctgtaaatctacttttgcaattttaagtaataattttatgaataaaaatgggaaatgctt

SEQ ID NO: 49712 - DNA, 695 bp, Homo Sapiens
taattgacaattttctgaaaaatcccgtttcagcagacttaatgaaggtgaaagcaacccttatgtgctttctacttatttgaatgttcctcaagtattttatattaaaaaaaaaaagaaggaaaagagaaaacagtgcctctgtttttagaaaactactgctcagtaaagttgtttaaaccatttctggtagctaatgacaattttatattaaattgtatactaactttagtgagactgatttttttagttgtttacagtacaaatacttgtatttgttttttaattgcagtatttccaatgtcgcagtaatttagtaaaactctgtggctgccttgattttgacagattttgttaatataaactgattgttaggcaattagttatatttatgcataaatcaattgcactataattcatgaattatttattacaatattttctaatgaattcatgtatctgtcttgtgttgtaaatgtactgtaattctgttcctactttgtgttgttatatatctaaatctgattgtatgaattttaattgttcagttaacgtgtttctaggttgtaatttgtagtaaagcacttcaatgcttttgcacttaaatttacaacactgttggtgtgtgattgatttactcattcagtaaaagaaaaaaagaaaagaaaagaaaaaaactgaaaaaaaaaaaaaaa

SEQ ID NO: 49713 - DNA, 639 bp, Homo Sapiens
actggaatctctctctctgccgcctcagtttgtctgctggtctcttggggggccaggccctgcacgtctctcctacccggcctcaaatggtgctgctgcccatgatggtaccacaccagggcctcagcctggcccctcaccacataccctttgccttttagaactcagtgccatcctgggtgcccagggcagagcaggctttgttcgcacctcatctgctgcagaaccacatcctgaggagtctcagcttatcctggagggaattgggaacagtgtcactgggaagtgaaggcctagccctgtggcttccaccagtctcctcctgcagtgccacgtggtggcatttctcgcctcacaccaagaagcagcaagtggaaaatttcaggatacaaagcacataacaccccataagagatgattatgtttttagaagcaagagcaaaattatgaaacctctagagatttgggtcatgttactccatttgatgaagattctcactaccgcccgctcctcccataggagcctacactaagtccaagtgtgagccattcacagactagaacacaaggagggagagagactcttaaacgtaaataaaaatgcaattcactcacaactctaaaaaaaaaaaaaaaagg

SEQ ID NO: 49714 - DNA, 654 bp, Homo Sapiens
cctgggctacctgaccaagtacgactgctccagtgcggacatcaaccccataggcgggatcagcaagacggacctcagggccttcgtccagttctgcatccagcgcttccagcttcctgccctgcagagcatcctgttggcgccggccaccgcagagctggagcccttggctgatggacaggtgtcccagaccgacgaggaagatatggggatgacatatgcggagctctcggtctatgggaaactcaggaaggtggccaagatggggccctacagcatgttctgcaaactcctcggcatgtggagacacatctgcaccccgagacaggtcgctgacaaagtgaagcggtttttctccaagtactccatgaacagacacaagatgaccacgctcacacccgcgtaccacgccgagaactacagccctgaggacaacaggtttgatctgcgaccatttctgtacaacacaagctggccttggcagtttcggtgcatagaaaatcaggtgctacagctcgagagggcagagccacagtccctggacggcgtggactgaggccggttccttcctggaggcctcctgtcctcggggaccccagcacctcatcatcagcattgctggagccaagggtaggagccctacactaggagccc

SEQ ID NO: 49715 - DNA, 525 bp, Homo Sapiens
ggtcgacagaacatctaccccgcagagctcgaggatttctttcacacacacccgaagtgcaggaagtgcaggtggtgggagtgaaggacgatcggatgggggaagagatttgtgcctgcattcggctgaaggacggggaggagaccacggtggaggagataaaagctttctgcaaagggaagatctctcacttcaagattccgaagtacatcgtgtttgtcacaaactaccccctcaccatttcaggaaagatccagaaattcaaacttcgagagcagatggaacgacatctaaatctgtgaataaagcagcaggcctgtcctggccggttggcttgactctctcctgtcagaatgcaacctggctttatgcacctagatgtccccagcacccagttctgagccaggcacatcaaatgtcaaggaattgactgaacgaactaagagctcctggatgggtccgggaactcgcctgggccaaggtgcaaaaggcaggcagcctgccagggccttcctccgttcaagc

SEQ ID NO: 49716 - DNA, 641 bp, Homo Sapiens
ggcacgaggccgcggaactacttcgggctgttccccagggtgaagcctcaaaggagtaaagtctagcaggatagaaggaggtttctgaggctgacagaaacaagcattcctgccttccctccagacctctccctctgttttttgctgcctttatctgcacccctcaccctgctggtggtggtccttgcctccggttctctgttctcctggaagtccagggaagaaggagggccccagccttaaatttagtaatctgccttagccttgggaggtctgggaagggctggaaatcactggggacaggaaaccacttccttttgccaaatcagatcccgtccaaagtgcctcccatgcctaccaccatcatcacatcccccagcaagccagccacctgcccagccgggcctgggatgggccaccacaccactggatattcctgggagtcactgctgacaccatctctcccagcagtcttggggtctgggtgggaaacattggtctctaccaggatccctgccccacctctccccaattaagtgccttcacacagcactggtttaatgtttataaacaaaatagagaaactttccttataaataaaagtagtttgcacagaaaaaaaaaaaaaaaaaaaaacgatt

SEQ ID NO: 49717 - DNA, 582 bp, Homo Sapiens
ttaaatgttctgtaaattattagccaaatagaactgtaatggggttgtatttatgggcgcctagaaagaaacacaaggacttggtaggccaggaagaaaagattttaaaatttagaatgaatagcccttctgggttttctttttgacaattcttggacttgaggtaaaacaaggaggattgtggccggatttcagatcccaaagccagcctccatcttaggcctttgcctcattgtgccttttaggttttcttacccaccgtctcctgttttgtcttttttttcttttctcctacccctatcttgggacattcagaaactgcctgggtggtttgagaagagacaacccagtttgatctgcaatacaaggatccattcgtaatctctctctcactgatgttattcccccatctgccgtcttggttcatctcaccacagaagggcatttagtcctacccagccatcggctgcgtatgacagcaggatggcacttcccatttctctgtggttagtgctcgagtgaaaacctctttcagctgagtcctctgaggttctgctgttgagtcctgggtggctgatggaa

SEQ ID NO: 49718 - DNA, 705 bp, Homo Sapiens
cctttaagaacaggaaagataaaaattcaagatattttagcatgcagcttcctagatgatttattggagctaagggatgaggaactgtccaaggagagtcaagaaacaaattggttttctgctccttctgccctaagagtttatggccagtacttgaatcttgataaagatcacaatggcatgctcagtaaagaagaactctcacgctatggaacagctaccatgaccaatgtcttcttagaccgtgttttccaggagtgtctcacttatgatggagaaatggactataagacctacttggactttgtccttgcattagaaaacagaaaggaacctgcagctctacaatatattttcaaactgcttgatattgagaacaaaggatacctgaatgtcttttcacttaattatttctttagggccatacaggaactaatgaaaatccatggacaagatcctgtttcatttcaagatgtcaaggatgaaatctttgacatggtaaaaccaaaggatcctttgaaaatctctcttcaggatttaatcaacagtaatcaaggagacacagtaaccaccattctaatcgatttgaatggcttctggacttacgagaacagagaggctcttgttgcaaatgacagtgaaaactctgcagaccttgatgatacatgatctctgaaagactagactgtcttatattatgagata

SEQ ID NO: 49719 - DNA, 634 bp, Homo Sapiens
  misc_feature (362)..(362): n is a, c, g, or t
taagaaactcttgatagctatgtctattttatatcagtcactgagactttttttttaagtttttatttattattaagacaactttgccaaaaaagtcccctaagcacaactatttacatttctttatagcctcttctgatctctaacacatatgcagttttaactgttattttcatagtaactgatcttttgtctaaggatttttacctgaaagcacaatgtattgagtctcttgaaaatcatctttcagatctttttacagaatgaacttatgcactgctactgtagtattctcaaggaatatatgtaaacacaaatgtatgcctgaggttggtttttgcagaaaacagtctctgcttctnaaaacttctatgtctagtcttccataggaaatcctcactgtttaaccatgtgaggagcctaagtcattaaacggatcatgtctgtacattgtgtaatgaatgaaaagcacataaatgtaatctactttgaactttgtaaaaatgatgtgtggaggctattcttgtttctccatctcaagtcctgtgtgtgcacgtgtgtgcaagtgcacatgtgtgtgtgtaataacacattgtaaagaacagaaattactttaaaaaataaacagaaatgg

SEQ ID NO: 49720 - DNA, 639 bp, Homo Sapiens
ccgtcgacccacgcgtccgcgctgtggcccggcgggagggcctggaggctgcaggggctggtggggcctcagctgccagctactcgagcacgcagttcgactctgccggcggggtggcctacctggatgacatcgcttccatgccctgccacactggcagcatcaacagcacagacagcgagcgctggaaggccatcaatgcctgagggcagctgccagggcctgtggaggacaggccagagaggaggccagcaggcccagagtccccaggggaggaggaccaggtcaagggacgttctgtgggcagtagccctgtgtggccctgttcccaccatgagtctggaggccccacctccctggggctcccaatcccctttgccatctctgctctcactggggaccctcctccccttcccacctgctctcatactgctcagtgacatggcccaggctttccttccagggccatgcttggcaaggttggctgagggcaccctccttctctgcacccttggcacgagggcagggctggctctcccaatgcctccatcccatccccatggtgctttggcctcctcaaagcatccaccatggtggatggactgaagtgtgtatattttcttgatctattttttaata

SEQ ID NO: 49721 - DNA, 701 bp, Homo Sapiens
  misc_feature (582)..(582): n is a, c, g, or t
tgcaaagacaagattgccatgcaaatggatggttttggacatacgagtcttctccgcacatacatgtctaaagttgagttttatacactgaatgtggaagaaccgggtatcatatcttttttaaaaaatgtcagtgtagaaaacatttgggaaaccattttcctacatgatagaactgccttactagatttctatttgtagctctcattcattgttttttatcttagtttgcagaaaggtgttgaaatgcttctctagcccaaacagcgacatgctaaagtccccttcttcagagtcaatagagtagttgttaaaggttttaaattgtactttctccaaaattagcatgcagctatttaatagggaatctagatttcaccaagattcaaatcaaagcaacatttaaaggaataagacctgttcactagcattttcaagggggttctaaagcattcaagtgcttaaaagccataaaaaatgacttcttaattcctgcctttagtgtcaacttttaagttaatacaggtttcaattgtggcattaggaaaaaaaaaaaccttgtgatgctatggttgggggtanttagggagagactacatgaaattgtgtgcccctattttctttctgatcctaaatcattttgttttataaatcagctatagcatctttctagaattaggcctgaatatgttgaatgttaa

SEQ ID NO: 49722 - DNA, 618 bp, Homo Sapiens
  misc_feature (522)..(522): n is a, c, g, or t
  misc_feature (604)..(604): n is a, c, g, or t
  misc_feature (607)..(607): n is a, c, g, or t
  misc_feature (609)..(609): n is a, c, g, or t
gcgctaggacctggagggctagtcggcgggctgcgcgtccggccgctagctgagctggaggccaccggccagagccgaccccaggagtgagagagacaggggcgtgcgtgagttccggcggcctgcaccgggcaaaccccgtaccttcccagcatcggctcagcaacccacgtgcatccaggccggtcaatgtcattgagtcacctccgcgccttggccaccctggagtcccgagaatccgaagttccagacaaatgcccaaactacattcctgcatgttcgaaagcgtaaattgcaaagcacaaatccagttgtagattgtggccgggagcagtggctcacgcctataatcccagcactttgggaggccgaggcggacagatcacgaggtcagcacttcgagaccagcatggccaacatggtgaagccccatctctactaaaaatacaaacattagccaggcatggtggtaggcccctgtaatcccagctactcggtaggctgaggcaagagaatcacttngacccgggaggcagaggtttcagtgagctgagactgcaccattgcacttcagcctgggcgacagaccaagactccatctcanaananttcctggcc

SEQ ID NO: 49723 - DNA, 871 bp, Homo Sapiens
  misc_feature (544)..(634): n is a, c, g, or t
  misc_feature (636)..(636): n is a, c, g, or t
  misc_feature (638)..(642): n is a, c, g, or t
  misc_feature (647)..(647): n is a, c, g, or t
  misc_feature (649)..(650): n is a, c, g, or t
  misc_feature (653)..(656): n is a, c, g, or t
  misc_feature (658)..(660): n is a, c, g, or t
  misc_feature (662)..(663): n is a, c, g, or t
  misc_feature (667)..(674): n is a, c, g, or t
gggatgaaaccccatctctacccgttctggagaacaggtcacgcctgtcctggagacagtgtgccgggaaaagggaacgtggtactcactggatgcacccaggccggcccgagcctcccaccgcagacagtgtggaacagagtgagcctgagctgcccaaggcgatgccctttgtgctgtatgactggaggcctctccgcgtgggtacttgggggtggggccacaaatctggcgaaaaacttcatgctggccgccgtgaggttttactccagcgttcccgccattgtcatggcgggtcttcgtcctaaactgagaagaaaagcattcctgtttgatcaccgccttagttaccagttctggatcagtcagtgtttctgcatggaataacaaccattaaaaaaagcactgggttctgccctttcatctttgtaagagattcttgcctctagcaatgacaacctgtgatgtctcacagtagagcacttagtgcagaatcaggtccccacggctgttgctcaataaaagtggcggaataaagtgcaannnnnnnnnnnnnnnnnnnnnnnnnnnnnnnnnnnnnnnnnnnnnnnnnnnnnnnnnnnnnnnnnnnnnnnnnnnnnnnnnnnnnnnnnnncncnnnnnccccncnnaannnntnnnannacannnnnnnnaaaaatgggggggcccccctgcggcccccaaaaaaagttttctaaaaaccatttcctttggggcgcgcgggggcccaaaaggaagaaagggagaaagtgggccacatacgttggttccccaaaagagaaacaccggggccccgaacaaaaagggggctggggggcttcccccccgcaaataaaaaaaagcccgccgg

SEQ ID NO: 49724 - DNA, 506 bp, Homo Sapiens
tcaaagtctctgcccagggaatactctgactgacaaccagagaaagctctttttcagacgccactaccctctcaacactgtcaccttctgtgacctggatccacaggaaagaaagtggatgaaaacagaggggggtgcccctgctaagctcttcggcttcgtggcccggaagcagggcagcaccacggacaacgcctgccacctctttgctgagcttgaccccaaccagccggcctctgccatcgtcagcttcgtctccaaggtcatgctgaatgccggccaaaagagatgaaccctgccccttgcccagggccagtgccatggggaaggggcttgtggggaggggacccatgaatcctgaccactcttgaacccagaaggaggactttgggccaatttcggaggagagaagaaagtgcaacgtggggagagggaagtgaattgcgaaggggagggggaaaagagagagagagagagagagagagagagagagagagaaagatgga

SEQ ID NO: 49725 - DNA, 772 bp, Homo Sapiens
  misc_feature (736)..(736): n is a, c, g, or t
cagtaagtcacttaaatgacaagacaggattctgaaaactccccgtttaactgattatggaatagttctttctcctgcttctccgtttatctaccaagagcgcagacttgcatcctgtcactaccactcgttagagaaagagaagaagagaaagaggaagagtgggtgggcctggaagaatgtcctagaatgtgttattgcccctgttcatgaggtacgcaatgaaaattaaattgcaccccaaatatggctggaatgccacttcccttttcttctcaagccccgggctagcttttgaaatggcataaagactgaggtgaccttcaggaagcactgcagatattaattttccatagatctggatctggccctgctgcttctcagacagcattggatttcctaaaggtgctcaggaggatggttgtgtagtcatggaggacccctggatccttgccattcccctcagctaatgacggagtgctccttctccagttccgggtgaaaaagttctgaattctgtggaggagaagaaaagtgattcagtgatttcagatagactactgaaaacctttaaagggggaaaaggaaagcatatgtcagttgtttaaaacccaatatctattttttaactgattgtataactctaagatctgatgaagtatattttttattgccattttgtcctttgattatattggggaagttgactaaacttgaaaaatggttttaaaactgngaataaatggaagctactttgaaaaaaaaaaaaaaa

SEQ ID NO: 49726 - DNA, 553 bp, Homo Sapiens
gtccgctgcggagttcgagaccatgctgctgttctgccccggctgcgggaacgggctgatcgtggaggagggacaacgctgccaccgcttcgcctgcaacacgtgcccctacgtgcacaacatcacccgcaaggtaacaaatcggaagtacccaaaactgaaagaagtggatgatgtgcttggtggagcagctgcctgggagaatgttgactctactgcagagtcgtgtcccaaatgcgaacatcctcgtgcttacttcatgcagcttcagacccgctctgcagatgagccgatgaccaccttctacaagtgctgcaatgctcagtgtggacaccgctggagggattagggccaggatggcccagctgccctagtgtgtgcttgccttgtccctcggggtagatgcttagctggcagtatgagtcgtgtgtcctgagggtctttgctagtgtggtggaaagataaaccttttgaggtgaagagccagggggtcaggaaatatggcctatctgccaggcagggtggatgaagtcatgaatgtctgggagttttt

SEQ ID NO: 49727 - DNA, 736 bp, Homo Sapiens
  misc_feature (559)..(559): n is a, c, g, or t
ctctttgttttaggagtcacgtgaacacacaactctcctatattcctcacgaacctcaggattgagcaaggtctttgtaatttttttggttcactttattgacctgggagcaaggtgctaattctgtggtcagtattcaatgtttttttcagtggagctttttctttgggccatatttgccttctaatacattcctgcaatatgtagtggtgatttcccttagcttcctcctactacctcttatactcatctccccaaattatttgcctcccttaaataagttttcctagaaggtaagctggtcaggcaatttgaaaaatattagatcccaagaaatctattccgtttgcattggacttctcggattccatgtgtttgcagcaggactacatcgaactctgatgtgccggattgtggcatgtctgcatgtctcatccatctattgtttttggtaactcagtttggaatttcagtgtctgtcttccctgggttgacattggaatcagcctctcctttgagcttattttaactcttgagcaacataacatagatttaatgngaacagtttataccaaagggcagcctgtgcctgtttatggatcctctctgcctttgtacttgaagagcgcattttacatttccagtcctttcacagacaggagctccaaccttacgatggagaattaaacttgcttgtatttccactttgtggatgaggaacaaaaaaaaaaaaaaa

SEQ ID NO: 49728 - DNA, 754 bp, Homo Sapiens
  misc_feature (164)..(164): n is a, c, g, or t
  misc_feature (703)..(703): n is a, c, g, or t
aaaattccacagttccgtggtttgtaaagcaatgcattgaagctgttgagaaaagaggtctagatgttgatggaatatatcgagttagtggcaatctggcaacaatacagaagttaagatttattgtcaaccaagaagagaagctgaatttggacgacagccantgggaggacatccacgttgtcaccggagcactgaagatgtttttccgggagctgcctgagccgctcttcccttacagtttctttgagcagtttgtggaagcgatcaaaaagcaagacaacaacacaagaattgaagctgtaaaatctcttgtacaaaaactccctccgccaaatcgtgacaccatgaaagtcctctttggacatctaactaagatagtggccaaagcctccaagaacctcatgtccacgcaaagcttggggattgtatttggacctacccttctgcgagctgaaaatgaaacaggaaacatggcgatccacatggtctaccagaaccagatagctgagctcatgctgagtgagtacagtaagatcttcggctcagaggaagactgacagacaagacaagctactgaatacgttcacatctgtcttgatgcctaatatttttacatttctgtaaacatatttctgaaatattttttgcctttcaagcgacagatgcctcattttgtgaaaacttaatgatgattttgggnttaagttccaaacatttgaataaaataattgacaataaaaaaaaaaaaaaa

SEQ ID NO: 49729 - DNA, 901 bp, Homo Sapiens
aagagtttcattgtggagagaaaaagcaaatggtatgccacaagatcactctgatttgagaaaagggaggaggggaagatagtctgaatggaaatctgaaatacggaatgttttagagaaatatgtcacttgcatatagaatgttttaattgaggtataaattaatgagacaaagtgaaaaagaaattatattcagataggactgcactacattatttgtcacacatggatctgttaccatcaggtcaattcctagtatgcataaattttttaacccttttaaaagagacctatgttgaaaacccctgaaaattcactgaagaaaaatcattactctttttctcagtaaatcatatcatctgaaatattacaaatttcaaatttctaggtgctatattaattcaatattacaataactcttacctaattattcttacaagttttaagttgtggtagtttagtgatttttttaaaagatgtgtgaaatgttctctgcaaaataattcaggccactgtctccttttatatattattataattatttattatgaagaccagtgaattacgatatttaaagtgagagaacttaattatttgcaaaggtaagttacagcttgttttttgagagaatcaaatgagtttacttttgttcctgttgtttttaactagctttaagtttaaagatggaagctaagcaatggaaatgctatacgtttttgacatttattaaatggtaccaataaaggatttttattaccaaaagttaaaaaaaaaaaaaaaaggggcgggccgctcctagagtatcccctccaaggggcccaaggctaccggcgtacccaacctttccttgtaccaaaagggggtccctaataggtgggagtcggaatttataaggcttagt

SEQ ID NO: 49730 - DNA, 498 bp, Homo Sapiens
ttccacatgtacgactcggacagcgacggccgcatcactctggaagaatatcgaaatgtggtcgaggagctgctgtcgggaaaccctcacatcgagaaggagtccgctcgctccatcgccgacggggccatgatggaggcggccagcgtgtgcatggggcagatggagcctgatcaggtgtacgaggggatcaccttcgaggacttcctgaagatctggcaggggatcgacattgagaccaagatgcacgtccgcttccttaacatggaaaccatggccctctgccactgacccaccgccacctccgcggagaaactgcactttgcaatggggccgcctccccgcgtagctggagcagcccaggcccggcggacagcctcttcctgcagcgccggtacatagccaaggctcgtctgcgcaccttgtgtcttgtagggtatggtatgtgggacttcgctgtttttatctccaataaaaaaaaaaaaaaggtttgttaat

SEQ ID NO: 49731 - DNA, 778 bp, Homo Sapiens
tacagatctggagagcaggaggccaggacaaggacaaaggctggaggatggagtaggacccaggggctctgccatcctaggcatcattcaaggtcttttatgaagactttacagatgtcctctgtaaatagcatcgagagtggagttcagctcctttctctactttttttttggtctgatggcacatatttattgttctgtggtctaatcacagtgtttctaaatgtaaaaagtgcatatgttggtgtagctagtcccgcgacattgagctcctctgcatgaagacactgggctcctgcatccagctgtttttattgcaaactagctcctttctcccacactgggaactttagtccacgaggctgtcaccaccctggtagcactgggccaggctttgtagctcctgcagcagctctgctacgtcatcgtgctccactccagcatccatgaagctggcccagcgccgcaagtcgagtttggtgaggtctctggccaaggcttccagggtctggtgcagggacgaagaggaacacagtgccccaaacactgggatgctctccactgctgtggagggagaggaaacagagacctgtagatggatgattattctgccctgggactcgccaaactgataaggaagtccaaccttagtagacttgattgtaaactcaacaaatttggtgtattgtccccttagtacaccagtactccagaggaagaatgcttttcttgggagccatagggtgaataaaggaatgtttaactgtgaaaaaaaaaa

SEQ ID NO: 49732 - DNA, 1000 bp, Homo Sapiens
ataggattccctcttctactttcttagacagcagggatgtcagggtctcaaactgcctaacactttgtagcttttcttaacacaaaagcaccccttctctcctaacttgggctctgaatactttcccaacaggaagtctgatctgttgccagacttcttggttagatggctcatacatttatctagagaagcacactcttgcttgctgtcaaactttagaccaccatggaaggtctaagggcatcctgtgccagggaaactttttaaggaattttatctatgggataaaccccatattccctctagtgtctactggtggctctaatactgctttgtgctgcctgccacacttgccctttgagcctgcgaatggccgctagtgagcaagctctgcttcagagcagtctagttaggtagaacagggacttaccagcttcccaaagggatctactcaccattgccaaactcttcatttccacattttgtgtaggtgtcagggaaccccaaactggtgttgctttggggtctctaaaggagattggctgacaccaccatttcccccagatccagattctctgagggaggttgtttcttgagagtagatccagagtgtcaaggatctgttagatcctggaatcccttcttgcatccatccctccctggtagctaggtcccgatatactcctgtcttgtgagattgtcgagatgagatgggggacactcttcctctgtccttcctctctcctttcctccatagcaaggacgaccttccctgctccatgcccagagtatagctagaatcccttcccctccctaccctctgaatgtgtgctagatcaggtgccccactgtgtttcctgaaatccttgggagcsggatctccccatctcccctactcactcttcccttttcttctctcagtgttgtctgaataaagtgtgaaatcttttgtgttttctaaattgacattttcaatgaaaaaaraatcacaaaaaaaaaa

SEQ ID NO: 49733 - DNA, 755 bp, Homo Sapiens
  misc_feature (704)..(704): n is a, c, g, or t
  misc_feature (740)..(740): n is a, c, g, or t
ttcacctgcaaaatatgattgctatttacaacgggcaacctgcaaacgagaaggctgtggatttgattattgtacgaagtgtctctgtaattatcatactactaaagactgttcagatggcaagctcctcaaagccagttgtaaaataggtcccctgcctggtacaaagaaaagcaaaaagaatttacgaagattgtgatctcttattaaatcaattgttactgatcatgaatgttagttagaaaatgttaggttttaacttaaaaaaaattgtattgtgattttcaattttatgttgaaatcggtgtagtatcctgaggttttttccccccagaagataaagaggatagacaacctcttaaaatatttttacaatttaatgagaaaaagtttaaaattctcaatacaaatcaaacaatttaaatattttaagaaaaaaggaaaagtagatagtgatactgagggtaaaaaaaaattgattcaattttatggtaaaggaaacccatgcaattttacctagacagtcttaaatatgtctggttttccatctgttagcatttcagacattttatgttcctcttactcaattgataccaacagaaatatcaacttctggagtctattaaatgtgttgtcacctttctaaagctttttttcattgtgtgtatttcccaagaaagtatcctttgtaaaaacttgcttgntttccttatttctgaaatctggtttaatatttttgnatacatgtaataatt

SEQ ID NO: 49734 - DNA, 637 bp, Homo Sapiens
ggaactcgttagcaactgcgagcagaagctttccagtcacacatcaaggcgcttgatcacaatggaaaaggtgaagaaatttgagaatcgggaccagtattcacatctgctaagtgatcattttctgccataccaaggtcataattccttccgtgagaaatattttagtggggtaacaaaaagaattgccaaggaagaaaaatccacccaggaatgaaaattaagattttgacaatgaagaaagaataagaatttgatttaaaaagacatctggatgtgaactttcatgtatgatccagaaaataggtacggttttaaaatattttatatagaaaagctacaaagtaaattgagcaatgcttttaaagttatctttgttttatagacttttttgttgtatgtattacagtctttataatcttatttaatgtatatttgtactttcaagtactgatggagatagactcaaaacagttatttttttacaattaatctacaaagggaattaatattgttgacttttaaaacatctgctggatatattatatgcaattaatagtagttaagaatttattcatttggtagatatgtttatttggtttttggttgtcatcgatttacattgccactaataaac

SEQ ID NO: 49735 - DNA, 567 bp, Homo Sapiens
cacctgttaagcatcaagctaccacagaggctccggccacctgggctccaccagcccagcccccctgggctccgtgtgcgctgggcctcatccccatctatgggaggaaactgaagctcaggaggctgtgtggcttgcggggtctctgggttctgggccccactgttccccagtgaagcccttgtgggaaggttccgggagcaggtggtgtcctcagagcagcctcgcctgctgaccccactgggagaggcgccgtgcctcgggcccctggtgggagctccgctggctcctgtctgaacctcctcgcagggccaaaggctggcttggcctgtgtttcccctggcccaggcctcagcccctgcgtcggaggtggggctgtgttgggcccattgtcccccgccctgggtggcttcctcttgcacagcctggagcctgccctgaccacagcccagcagctccctgtgaacacctctttgtcccttcactgtcggctgtttctaaacccagacactgtttgtaatagactggaaataaaatgttcttttcttaaaaaaaaaaaaaaaaagg

SEQ ID NO: 49736 - DNA, 499 bp, Homo Sapiens
  misc_feature (340)..(340): n is a, c, g, or t
tgcacagtaagcatttatttttcagaccatttttgaacatcactcctaaattaataaagtattcctctgttgctttagtatttattacaataaaaagggtttgaaatatagctgttctttatgcataaaacacccagctaggaccattactgccagagaaaaaaatcgtattgaatggccatttccctacttataagatgtctcaatctgaatttatttggctacactaaagaatgcagtatatttagttttccatttgcatgatgtttgtgtgctatagatgatattttaaattgaaaagtttgttttaaattatttttacagtgaagactgttttcangctctttttatattgtacatagtcttttatgtaatttactggcatatgttttgtagactgtttaatgactggatatcttccttcaacttttgaaatacaaaaccagtgttttttacttgtacactgttttaaagtctattaaaattgtcatttgacttt

SEQ ID NO: 49737 - DNA, 586 bp, Homo Sapiens
  misc_feature (69)..(69): n is a, c, g, or t
cctccccagctccggagggggtcctcctcgctcctccttcccagggaccagcaccttcaagcgctccanggccgtgagggcaagagggggacctgccaccagggagcttcctggctctgggggacccaggtgggacttagcagtgagtattggaagacttgggttgatctcttagaagccatgggacctcctccctcattcatcttgcaagcaaatcccatttcttgaaaagccttggagaactcggtttggtagacttggacatctctctggcttctgaagagcctgaagctggcctggaccattcctgtccctttgttaccatactgtctctggagtgatggtgtccttccctgccccaccacgcatgctcagtgccttttggtttcaccttccctcgacttgaccctttcctcccccagcgtcagtttcactccctcttggtttttatcaaatttgccatgacatttcatctgggtggtctgaatattaaagctcttcatttctggagatggggcagcaggtggctcttctgctggggctgacttgtccagaaggggacaaagtgcaatacagagccttccct

SEQ ID NO: 49738 - DNA, 476 bp, Homo Sapiens
gtatcggccattatggccggggggattcagctctagaggtcacagtatcctcgtttgaaagataattaagatcccccgtggagaaagcagtgacacattcacacagctgttccctcgcatgttatttcatgaacatgacctgttttcgtgcactagacacacagagtggaacagccgtatgcttaaagtacatgggccagtgggactggaagtgacctgtacaagtgatgcagaaaggagggtttcaaagaaaaaggattttgtttaaaatactttaaaaatgttatttcctgcatcccttggctgtgatgcccctctcccgatttcccaggggctctgggagggacccttctaagaagattgggcagttgggtttctggcttgagatgaatccaagcagcagaatgagccaggagtagcaggagatgggcaaagaaaactggggtgcactcagctctcacaggggtaatcatctc

SEQ ID NO: 49739 - DNA, 562 bp, Homo Sapiens
tggcaacgttgaagttccaaaagattcttttataaaagttctgaaaacacaatcttctaaataattggtgggaaaacaaagaattttcattgcaatttgtaatatgctgacaacagaaagaaaattataaaatttgcttgttactttcagggtattcaggttcaaataacctactagtctttcgttgaaagggagtagttagtgggtaggcaagagcttagattttgaagccatgttgcctgttctcaaatatctgttccaaccactcactagtaaggtgaccgtggccagattaacctttgtttcctcttcagtaaaatcgagattatactactacctacataagttgttgttgtgaagattaaatgaggtaatacgttaaatattcagaggtgcaagacacatagtaagcactcaattgtaactacagttaagtccttaaatgccatcgaaaggttcttagaaactgactttaagcaaaatgacacgtagcacaatgttcttgaatgatgtcatttccttaagtggtttgtaacatcgatgaggaaaaaaaattggttta

SEQ ID NO: 49740 - DNA, 2109 bp, Homo Sapiens
gttcagggattgtttggtccttctcattatttctattttagtacaagtgaaacagcctcgaaaaaaggtcatggcttgcaaaaccgcttttaataaaaccgggttccaagaagtgtttgatcctcctcattatgaactgttttcactaagggacaaagagatttctgcagacctggcagacttgtcggaagaattggacaactaccagaagatgcggcgctcctccaccgcctcccgctgcatccacgaccaccactgtgggtcgcaggcctccagcgtcaaacaaagcaggaccaacctcagttccatggaacttcctttccgaaatgactttgcacaaccacagccaatgaaaacatttaatagcaccttcaagaaaagtagttacactttcaaacagggacatgagtgccctgagcaggccctggaagaccgagtaatggaggagattccctgtgaaatttatgtcagggggcgagaagattctgcacaagcatccatatccattgacttctaatcttctgctaatggtgatgtgaattcttagggtgtgtacgtacgcagcctccagggcaccatactgtttccagcagmcaacccttttctcccatcacaactacgaagaccttgatttaccgttaacctattgtatggtgatgtttttattctctcaggcagtctatatatgttaaaccaatcaaggaacttactctattcagtggaaacaataatcatctctattgcttggtgtcatttataggaagcactgccagttaaagagcattagaagaggtggttggatggagccaggctcaggctgcctcttcgttttagcaacaagaagactgctcttgactgataacagctctgtcaatattttgatgccacaataaacttgatttttctttacattccttttatttttcctttctctaaatttaatttgttttataagcctatcgttttaccatttcattttcttacataagtacaagtggttaatgtaccacatacttcagtataggcatttgttcttgagtgtgtcaaaatacagctagttactgtgccaattaagacccagttgtatttcacccatctgtttcttcttggctaatctctgtacttctgccttttaattactgggcccttattccttattttctgtgagaaataatagatgatatgatttattacctttcaattatatttttctcagttatactagaaaatttcataatcctgggatatatgtaccattgtcagctatgactaaaaatttgaaaaagataaaaatttctagcaagcctttgaagtttaccaagtatagtcacattcagtgacagcccattcattccagtaaagaatcatttcattcactttgggagaggcctataattacatttatttgcaatgtttctcttcgctagattgttacatagctcccattctgttggttttgcttacagcatatggtaaccaaggttagatgccagttaaaattccttagaaattggatgagccttgagattgcttcttaactgggacatgacatttttctagctcttatcaagaataacaacttccacttttttttaaactgcacttttgactttttttatggtataaaaacaataatttataaacataaaagctcattgtgttttttagacttttgatattatttgatactgtacaaactttattaaatcaagatgaaagacctacaggacagattcctttcagtgttcacatcagtggctttgtatgcaaatatgctgtgttggacctggacgctataacttattgtaaagaccttggaaatgtggacataagctctttctttccttttgttactgtatttagtttgtgataaatttttcactgtgtgatatttatgctctaaatcactacacaaatcccatattaaaatatacattgtacctgaccctttaatcatgttatttatgccaccaaggttgtggatcttaaggtatgtatggaaaggaactcatttatcaaattgtaagtaatacagacatgccatttaaaagaggtaaattcttgttttctatattttgttagtaaattctcaatgaaataaaaaaaaaa

SEQ ID NO: 49741 - DNA, 837 bp, Homo Sapiens
  misc_feature (648)..(648): n is a, c, g, or t
  misc_feature (801)..(804): n is a, c, g, or t
  misc_feature (809)..(809): n is a, c, g, or t
gggggtgggattatgggtcaatgttgaagaatttttaagtctgtattatgtttaaaacatgaatgatttgaaagtttaaatttttaatttttatatgtggaaattcttcctgttggctaaaggggaagctcaagtggtgtcgtcttttgtgctgttaaatatatattctattctttggaagaaggcagagagaggagtcttattatttttaaatgctcctagttgtatagtctgtctgttgtacatagagttcagcttgttttttggctccagtaggaaaaaaaatccatccatctgagatggggtcctgttgtttattatcactctagaagttatacattgatatttattctttctgtccccacgttgtggcacctgtagacatcttcaaaattggcagaaaagataatagttataaaaattttagttcatttatttttaaactcctttcagattattttaccattaggaggaggtagattgtttcgtcttcctgtctgatttttgttttgtagtatttaattttgtattcctctgcagttttaagaaacagtgtttttcttcggtttgctggaacatgggcgttagagatggtaataaaccgtggtcctttttgcgatgtcacgactcttcacctgcctgggctgntgtgcacacagtgcagcctggatcctgtcgatctttacttgtggcggagctaatggtcacattgatagttgattacactgtggcacgaatttatgcagaacactgttattaataaaggaagtaaagggctgcaagatttgagagctgccaccnnnncgccngcccgcaccgccgcccgcgccaattccc

SEQ ID NO: 49742 - DNA, 696 bp, Homo Sapiens
  misc_feature (672)..(672): n is a, c, g, or t
ggaacctgagtaggtagtgtggccaagagatcagcacaacctttgcaggctgacttgctaagtctgacagtgacaaacttgtgagcttactgcagtcagtcacagaggctgttctttttcacacaccccttcatgcccggctttccccatatccacatgcagagggcgagctcataaaactacagggaagcgtgaaatgatggctttggtagctgtttactgggtaaccccactgtgacactgtccttttcatgtgatgtggaaacctacttctgtcctccaaaccatgaaatgtgtcatctagactgcagagtacttgagtgctttgcctcccgatatgccagagcttgtggtccaaagcccattcctgtgtgtccgtcctgccatttagccacagaaggctgcggagtgaggcggcagctagcctggccagtggctgtcccgtggaccgacacctgcgcccccttctgcaagcaggattttctggtgccaacactcattcatcattcccgatcaactaggatgaatttaagactgtgctaccatgtgttctcaagtggtagtttaaaaagtggatttttaaagtgcctttcaattgtctgtgaacgtctaaaggactgatttgtctcattttgactggtgagtctttaatgggtgccatttaaaaaacanaagctattttttaattggcctttt

SEQ ID NO: 49743 - DNA, 738 bp, Homo Sapiens
  misc_feature (698)..(698): n is a, c, g, or t
  misc_feature (700)..(712): n is a, c, g, or t
  misc_feature (717)..(724): n is a, c, g, or t
gggggatgtattcttctgctgctgcttattaaataaagaaagcctgagtgttcttagatggggttattctgagatgagggtcttagcctacagttctttttgaaatgaaaggtgctttgttttttaattatattcatcttttcagggtaaatttgtttttctgagtttctcgtaatgctcatttttacatgctgctactagcttttttttttaaaaaaagtaaaagttgctgctttctaaaatattaattgccttatatttgaaagtgccattgcaatcgtaagtagactatgtatttcctataatgatgtctgatatttaaataggaaatcagacaaacaatattcagaaagtttaagcatataaactttttatttttaacttgcctaaatccctgtattccaaaacctgctgcatcataataaatatatctatatatatttagcataagacgtgatatttttaatttcttttttaaaaaattatatttgtctcttagagttaaaattttctttatataatattgtcatatgtcatagttttaatacaattcacatgatttctatgtttcttaatgatattttgttgtgtaaaattgatcggattgattaaaaaacaaattctctggaaatttgtgcgttcatggctttttcgtattctttatggctttttaataaatatacaatgggttaataggnannnnnnnnnnnnnggaannnnnnnnaaaacatgttcggc

SEQ ID NO: 49744 - DNA, 835 bp, Homo Sapiens
taagatgggcgggattgttgtaaaagctatgttttaaaagagctttctaaatgtaaagtagtgataatttcaatttgggtagcgtgtttgcaaagcttccaatatttgatgttggttaagctctactatgggcaactgaagatggataaagaaaaatgaaaactgaatcggtgcctgcttccccctgttttcccaggattagaggaaaaaatttattgtataatcagcttcttggttttgaattgcttcgaggcatggttttattccttattactttagacctgtagttttcaacactgacagcactttaaaaatctttgcctgggcctcactcttgagagattctcatttaatagttctgaggtgggtcttggatataactatttttttaaacacctgtcctgtttccctccattcctctcatgtgcagacagggttgagaaccagtagactaatggtcgtttttcctgtttaaaggagataactaatttgagctgaagcaatgcttcttaattagctttgttttgtttgctctgttggtggcttgttacaactgaattattgtgttattactatttcattgttacagaaataaagtaagcaatttcgtgatgtgagtatcagtgattaagttaactaactttgtactgcatccagaatgttggtttgcaattgagtaactggtctgctgccatcttctggtgctgatgacatgcgatccaaatcagacaatggtaacatgcctggcaggggaccggaacactcgactttgggtcagagggctacgacgcggtggcccaaaagggttacaaaaaccgttttttgtggccacggc

SEQ ID NO: 49745 - DNA, 925 bp, Homo Sapiens
  misc_feature (626)..(626): n is a, c, g, or t
  misc_feature (661)..(661): n is a, c, g, or t
  misc_feature (777)..(777): n is a, c, g, or t
  misc_feature (779)..(779): n is a, c, g, or t
  misc_feature (789)..(794): n is a, c, g, or t
tctaccagctgtgccgagacctggacagctccttgcgtcccagctccagtccaggccccagagccaccgaggcccagccctgggtggagccaggctactgggagtcctggcccagccggagcagctccatcctggaggaggcctgccggcagttccaggacacactgcaggagtgctgggacctggaccgccaggccagcgacagcctggcccaggcggagcaggtactcagctctgcgggccccacctcttccttcgtcttctgaacgtggcctatggcccaggacagcctggcaggtggcctcgctgcccccagttcccctctctgcccccacactcgtcttagttgcttcacactggtcactggccctgcacactgggctattgctttatccctatcctgagagcagcccctccccaccatccctccacatgctgcaaggacagactgaagggctgtgagcaggtgtaagggctcccacatccgtgagcctgtgtccgcagctgctgccactctgggctgctccagcctgcaacttagtggaaggaattacttcctcctgaggctacaggcgagaaaggtagggatgggccagcctcccgtctcagctgttgggagacagtangcaggctgagtggcccagagcactcctgggagtgngactcccctgccttgcaaatgtggctctccagactgctcctgcacttaccccctccccgcaggaccttctctgcccgttcttgtccacacatctattaaatgcttctgttttccananaaaaaaaaannnnnnaaaagggcggccgcctctaaagtatcccctcaaggggcccaaggttacaccggacccaccttttttgggaccaagtgggcccctatagtggaggccgattattaaccttagggcccggggccgcccgttta

SEQ ID NO: 49746 - DNA, 638 bp, Homo Sapiens
tattagctaattgtgccaggggctgttatatacatatatacacaaccaaggtgtgatctgaatttaatccacatttggtgttgcagatgagttgtaaagccaactgaaagagttccttcaagaagttcctctgataggaagctagaagtgtagaatgaagttttacttgacagaaggacctttacatggcagctaacagtgctttttgctgaccaggattggtttatatgattaaattaatatttgcttaataatacactaaaagtatatgaacaatgtcatcaatgaaacttaaaagcgagaaaaaagaatatacacataatttctgacggaaaacctgtaccctgatgctgtataatgtatgttgaatgtggtcccagattatttctgtaagaagacactccatgttgtcagctttgtactctttgttgatactgcttatttagagaagggttcatataaacactcactctgtgtcttcaacagcatctttctttccccatctttctattttctgcaccctctgcttgttccctcatattctgttcttccgactcctgctaacacacatgcaacaaaaaagggaagggagtgcttatttccctttgtgtaaggactaagaaatcatgatatcaaat

SEQ ID NO: 49747 - DNA, 670 bp, Homo Sapiens
gctcgaggccttaacctatctgcctgaggttggcctgagattgtgagtcaacgactttgctatcttttcctcagtgttgaactttcattaagaaataaagtcctagcttcttacagagaggggtccaaatggtgaatgctcatcctgcctggattcaaggaattagctcagagattggcccctagcttttctgcctttgtagggacagcaaaaggggaaaatttgctgcagaaaattccaaaagattgctgtagctctcacagggaagtggtaaagatcagctaaacctgggttggggtgctttctgcccagtgggtcttggcataagtagattaatcctgctcttttaagaaaaggcaacttattcaggcagtctggaaagggggttctcagaaaactcagtttctttattccttcttttctcccaactactgttgctggttatagaggtctttggactctaaagaccaatgtttggccactaactggactaatatgtatctttctgtgatttcatcatagaggtccgttttgtgagggtttggggtgcagaaaactttgattaaatcttaatgggaggctgggtgacctggattatctacagtgagcagacttaaatggaacagaagtttatgtgtccaaatgatggaatcattaaacctgagtgact

SEQ ID NO: 49748 - DNA, 910 bp, Homo Sapiens
  misc_feature (512)..(517): n is a, c, g, or t
  misc_feature (519)..(546): n is a, c, g, or t
  misc_feature (548)..(549): n is a, c, g, or t
  misc_feature (551)..(551): n is a, c, g, or t
  misc_feature (553)..(560): n is a, c, g, or t
  misc_feature (562)..(563): n is a, c, g, or t
  misc_feature (568)..(569): n is a, c, g, or t
  misc_feature (595)..(595): n is a, c, g, or t
  misc_feature (610)..(611): n is a, c, g, or t
  misc_feature (613)..(613): n is a, c, g, or t
  misc_feature (723)..(723): n is a, c, g, or t
  misc_feature (728)..(728): n is a, c, g, or t
  misc_feature (749)..(749): n is a, c, g, or t
  misc_feature (754)..(754): n is a, c, g, or t
  misc_feature (776)..(776): n is a, c, g, or t
ccacgcgtccggcggccttacaagtgcgatgactgcggaaaggccttctcccagagctccgacctcatccgccaccagcggacccacgcggcgggccggcgttgacctggggccccagcaggggtgggaggtgtgggcagaagataaggggccagggagctagaggaacctttagggaggatagtggagaagccgcaggagaatggaggagctgaggatgctggaagaagagaaccagggtggaggaagtgacatgccctggagacttgtgggaagtgggttggagggaggccaggccggcagcgggaggccctgggagaaatggagagaggtcagcggagggctggcctcagccgcggctccttggtgggtgcctggcttggcaactgctagagcagggaggggggagggcaggggattacctaattagagtgggttagcttagattggtagctgctgaaactctcgttgagtcaggagcgggtaaaaggtaggtggggttggggagttgnnnnnncnnnnnnnnnnnnnnnnnnnnnnnnnnnncnncncnnnnnnnncnnccccnncccccccccccccccccccccccccncccccccccccccgnncnccccccccccccccgggggcgccccccccggcggggggccggcccccccccccgccccgcgcgtggccgcccgcccccgcccccccgcccccgcccccccctgccgcccnccccnccccccggccccgcccccgcnccccnccgccggcccggtccccccccntccgcccccgttgcgtgtgcctcccccccgcctcccctttccgttgccccccgtcttccgtcccgccttttcttccgcgcctctcgcttcgtttgctcgcgccttccctcttctcgcccgccgtttcgtccccc

SEQ ID NO: 49749 - DNA, 657 bp, Homo Sapiens
  misc_feature (614)..(614): n is a, c, g, or t
aaaaaaaaaaaggcttttcccccaaagtatcatgtgtgaacctacaacaccctgacctctttctctcctccttgattgtatgaataaccctgagatcacctcttagaactggttttaacctttagctgcagcggctacgctgccacgtgtgtatatatatgacgttgtacattgcacatacccttggatccccacagtttggtcctcctcccagctacccctttatagtatgacgagttaacaagttggtgacctgcacaaagcgagacacagctatttaatctcttgccagatatcgcccctcttggtgcgatgctgtacaggtctctgtaaaaagtccttgctgtctcagcagccaatcaacttatagtttatttttttctgggtttttgttttgttttgttttctttctaatcgaggtgtgaaaaagttctaggttcagttgaagttctgatgaagaaacacaattgagattttttcagtgataaaatctgcatatttgtatttcaacaatgtagctaaaacttgatgtaaattcctcctttttttccttttttggcttaatgaatatcatttattcagtatgaaatctttatactatatgttccacgtgntaagaataaatgtacattaaatcttggtaaaaaaaaaaaaaaa

SEQ ID NO: 49750 - DNA, 616 bp, Homo Sapiens
ttcgagggccagaggcgcgaccccgcgcacccggcgctccgcctgctgcgccagcaccgccacctggtgaccttgctgctctggaggcccggctccgtgactccttcctccgatttttggaaagaagtgcagctggcgctgccgcggaaggtgcggtacaggccggtggaaggagacccccagacgcagctgcaggacgacaaggaccccatgctgattcttcgaggccgagtccctgagggccgggccctggactcagaggtggacccggaccctgagggcgacctgggtgtccgggggcctgtttttggagagccatcagctccaccgcacaccagtggggtctcgctgggagagagccggagcagcgaagtggacgtctcggatctcggctcgcgaaactacagtgcccgcacagacttctactgcctggtgtccaaggatgatatgtagctcccaccccagagtgcaggatcatagggacagcgggggccagggcagcggcgtcgctcctctgctcaacaggaccacaacccctgccagcagccctgggaccctgccagcagccctgggaaaaggctgtggcctcagggcgcctcccagtgccagaaaataa

SEQ ID NO: 49751 - DNA, 811 bp, Homo Sapiens
  misc_feature (29)..(29): n is a, c, g, or t
  misc_feature (722)..(722): n is a, c, g, or t
gtaccattgcaaaagtccctttccggggnggctccttgtagtgacgctgcaggacgtcaggtgccctacaaaacgatcatgaagcaaataaatagttctatttctggaaacctatgggataaagatcagcgggctccttattataactataaagatcctgctggccactttcatcaagtatggtatgataaccctcagagtatttctttaaaggcaacatatatacaaaactatcgcttacggggcattggcatgtggaatgcaaactgtcttgactactctggagatgctgtagccaaacagcaaactgaagaaatgtgggaagtcttaaagccaaagctgttacagagatgaacatcttttgtcaaaccattaagagttagaaagatgatctgtatcaacagatctagtttcttgcatttttattatgttgctatatacttttgttatccgtatactaaaaaaaaagaataaataaatgttttgattgtttgaatttgaaaaatacacacgaatgtcctcagtatccaggaacataaaggcaagaaacaagtcaacttacctattaaatattcctctattagatgtttcaacactataatttaattgggaaaaattgctttcagaattttattatgccatatttcccttcttatagtaaaatatatgctcacgaatcaatgctgatttttaaaatatgtataatctgaagtggaaattgnttgcttagagtttttaaaaacctagtctttgaaaagcagtttgtgctatacctttcccccacccttcaataatcctaaattaaaaccta

SEQ ID NO: 49752 - DNA, 704 bp, Homo Sapiens
cttcgtgcgcgaccccttcgtgcgcctgatctccgccttccgcagcaagttcgagctggagaacgaggagttctaccgcaagttcgccgtgcccatgctgcggctgtacgccaaccacaccagcctgcccgcctcggcgcgcgaggccttccgcgctggcctcaaggtgtccttcgccaacttcatccagtacctgctggacccgcacacggagaagctggcgcccttcaacgagcactggcggcaggtgtaccgcctctgccacccgtgccagatcgactacgacttcgtggggaagctggagactctggacgaggacgccgcgcagctgctgcagctactccaggtggaccggcagctccgcttccccccgagctaccggaacaggaccgccagcagctgggaggaggactggttcgccaagatccccctggcctggaggcagcagctgtataaactctacgaggccgactttgttctcttcggctaccccaagcccgaaaacctcctccgagactgaaagctttcgcgttgctttttctcgcgtgcctggaacctgacgcacgcgcactccagtttttttatgacctacgattttgcaatctgggcttcttgttcactccactgcctctatccattgagtactgtatcgatattgttttttaagattaatatatttcaggtatttaatacgaaaaaaaaaa

SEQ ID NO: 49753 - DNA, 575 bp, Homo Sapiens
gaagtattgaagttatttctcaagaaaaaggtggtggtaaaaatatgtaaaaggaaatacagaggcagtgaaatagaagatctagtactccttgatgaagaatcgaggcctgtaaacttacctccagcactaaaacatcctcaagaattactataatgtgtccaaaatatcactgcatacaatatttggtatttgaagagaaaaactgacttttgtatagtataaaacacaggctttcacaaattttgtattgctttttttccagttttgcagaaaatttacattctagttctcttcacacagtagcagttgtaaataatttatgaatgacagtacacattaaaaggtatgcattagcagcatattagtatgctgttttatttgctgaagaaaatactgtcttctatttttaatgatacattaggtacgatgtgtagttcggtagagtcctaaaatttttgtactactttcaatttggtgaaaatgtattaagttgtctaccatgttttcttttctagctgaataaaccacatcaaaggaaagggaccacagtatttgaatgtttgaaagtctgt

SEQ ID NO: 49754 - DNA, 853 bp, Homo Sapiens
taccaccacactcagctaagttttttgttgttgtttttttttggtagagacagggttgcgctctttcgcccaggctggtctcaaaattgtggcctcaagcaatccttccacctcagactccaaagcattgggattacaggcatcagccaccacacctggccttgaacattttttatttgttaatttcatgcgtgacgaaacccaaggatcacccatgtcaaccacaaagttggcattccctttagtagaacctcactaaacggaaaggctgtacaacgcaccgtctagccacaggagaactaatcttctatcagttgccctttcttctttggagtttttatgtaacttacccttgtgagacaagttttctacttgagaaactcctagtacaatgtcttatactagaagcctggataaatactattaactactgtttcttatattcacttcagaaaatcagtggctccacattgtttgagccattagtgataacaaatttggatctacttactcaagtcttatgaattctgtgcctttcatcacattcctagcccactctcatcattactgcagaagggtgttgtgatgaccagttttatactgtgttttgatatgtctagcaataacttaaagaaaaaaaaacctgggaaatcttcaacatgttattggaacatatatgtatgtacttaatgtatatacatggcttaacttatacgttatggcagctctgtattacagttgatctcattgttctgaaaaaaaatcttaatttcatgggagtttatcccctgtgaaactgcaatatgactgtagagagtcaaacgatgttcctctacaaccaccaccaccaaac

SEQ ID NO: 49755 - DNA, 679 bp, Homo Sapiens
gcaagacaggatgtgatgttcaagaacgagttctttctgttgtcctgaatgaattagatggtgttggacttaagacaatagagagaagaggaagtaaatcaagtcaacaggagtttcaagaagtttttaaccgaagtgtcatgattattgcagcaacaaatagacctgatgtgttagatactgctttgttacgacctggaagattagataagatcatctatatcccacctccagatcacaagggcaggctttctattttaaaagtctgtacaaaaaccatgccaatagggcctgatgtctccttagaaaacctcgcagcagaaacctgttttttttctggagctgatcttagaaacctctgcacagaagctgctttgctggctctgcaagaaaatggactagacgcaactacagtgaaacaagagcactttctaaaatcacttaagactgtaaaaccgtcgttaagttgcaaggacttggctttatatgaaaacttatttaagaaagaaggattttctaacgtggaaggtatttaaaaatcaccttaaactcttgttcagttcacattaattgaaatgtgaacttgcctgtcgtttgcacttcacacttttagaattgtgtttaatattccctgtaagtgaataaataaaacaaaacaaaacaaaaaaaaaaaaaaggg

SEQ ID NO: 49756 - DNA, 534 bp, Homo Sapiens
aacccgtcgagcggcctaacacacacacccctatcgttgtccttcaaatactcagcattaccattggttgaggccaaattcagagctttctcaaatcagatttacaatctccattttcattaacggggaaacatccccgagccactgagtgctgtgctttgtcactgaaggttagatctgaacccagggtgtcaacagctgctctcaactccccacctctgggcactgaggagtatttcccctcattctacctctctaaggctatgcacccctccccacgtcttccagctgggggatggggggagtcataggaaaagcccccatctcccatctgggatagggaccttccatcagccttaaccctgggaaatgcctgctgcccccagtgactcttggtttcgtctcccacatacagaagcagggtggaggggaagggtgggtctcagttagcaggggtccccagggcaagtcagcctcctccctccatgcctctctggtcagtgtgccttagggtggcctctcactcccaccact

SEQ ID NO: 49757 - DNA, 662 bp, Homo Sapiens
ggcacagagtttccacgggggctgcagtggattcactgtgtcagggatgagcctggcttgggggttggtggggctctgaagcgcatttggggttctttgtagcttctaatgtgaggtttgagtccagtgcgcccacagcagcatgcccttctcaccccttgcagtgttgcaggctcaggcccctgggctccttcagcaagcaggctagtcaatgaggcatgaggatccggcacagggcatcccctggggcttcaagggcaatacccccgtgcttagggtttgccctgtgccctctgggtggggtggcctccccgcactcggcagcatggccaggctggccagggcgtgggcaggtggtgtcctgtggcacctccatcctcctgcccagccggctgtgtcacactcatctttttaaggtcaggttggttcctggcaaaaatgtacctccaggggcctccaagcataggatttggaagacaggaacggcacaggcgtccaggaaagcagctgcactcagacaatgccttctccattacttgaagcttctttctgttcagccattaaagaaacttgacaaaataggaacaggagatatttctcaattgtaaacctttgtgcagggacagttggcttccagaggctttcagctttcagttatttga

SEQ ID NO: 49758 - DNA, 454 bp, Homo Sapiens
  misc_feature (13)..(13): n is a, c, g, or t
  misc_feature (248)..(248): n is a, c, g, or t
  misc_feature (284)..(284): n is a, c, g, or t
  misc_feature (442)..(442): n is a, c, g, or t
  misc_feature (444)..(444): n is a, c, g, or t
  misc_feature (447)..(447): n is a, c, g, or t
ctgggcatcagcnactggcctgtggtgatgcaaagctgctttgctctgtatctggctggactgatctgtctcacaagaagccatgaggccatagggagaagctccctctccccttcatcttctgctccaaaggtggtagcaagaggagtacccagttaggggttggagcccccatataacatcttcctgtcagaagactgatggatctttttcattccaaccatctccctttcccccgatgaatgcantaaaactctgtgacaccagcaaccattgctctttanaaatgggttttctgatcatatggctgatgtgttatgggcagtatggatgtcttcatttgttgcttctgtttttcatcttttttgttttattaataaaaatttatgtatttgctcctgttactataataatacagggaataaattattcaatccaaaantnaanaaaaaaa

SEQ ID NO: 49759 - DNA, 620 bp, Homo Sapiens
ttttttttttttttttttaaagatttcagtttattccattaaaaaaaaaaaaacacaaaacacctactggaattacacttaacaatggcgccctctagtgggccactgcaaggaaataatcaccaataattgcttttagataagcaattttgtgttagttccacttaataggtaatcaccattcagcagatactggatgaacagcatgggctggcaggctgggagacaccaagtgaggagggtaaataagctgacatatggccctggggaaaaccaaacccagctactcaggaggctgaggcaggaagattggctgagcccaagtctatagtgagccatggtcatgccagtgtactgcagcctggattacagagaccttgtctcttaaaaaaacaaaaccaaacttgactcagactcccactctttgccattcccttctctccagagatatacagcctggataacctcaaaaacatgacaggtcgatccatctaaagctgcaacacagcctatagaatattcaattgtctgcaaactcgccaaaactagtaatacaacttgggataggaaaaacaaaaaaagaggccaggagctgtggctcacacacataatccacccac

SEQ ID NO: 49760 - DNA, 750 bp, Homo Sapiens
acaagtggccaggtggctctgggccctcctgccccgtgcctaggtcaggtgtcctggaataccccgtagctctggcaccaccacactggcctctgatggcaagacttggcccctccacctgtccctaacggacggcaggtcaggaaagccaggactcaggggagaagcaaacccccaggattgaaggctagggttctagggcctttgggtggggagggcccgggccggacagcctcagctccgtcccctgccccacaagattcacctgggcctccagtcccacgctggccccaactgctgcagctctcggcttccgcccaacagcctctggaggtgaggcgggagcatgccctcagcgaggctgggcggcgggtcctgctgtgccatctccctgtgcgcctgagcagatcaatccaccagtgcaaaacagggctaacggcacctgcaggacagcagcacgctccatccctcatgctcagctgcctctgcggccacggacttctgcccttcatctgctctctcttactctcctgagcctagcccgtccgtaagctccctcccctgcctggttcccagggcaggctgactcagttgactgcttggtccaagcctggccctggcacttgtcagggtcagcctaaggagatgggactcaagaggccagagagcaccaagtgagctcatgtttcaccagaggtggataaaaccaagttctgggctgggccagtggctcacatctgtaattccagg

SEQ ID NO: 49761 - DNA, 503 bp, Homo Sapiens
ggtttaatgatgtggtgagaggaagaattctctcaggaaactttttcttattaaaagaaaactatgaaaattattttgtcaaagcacagaaagtgagacgcctcattgctaatgactttgtaaatgcttttaactctggagtagatgtcttgctaactcccaccaccttgagtgaggcagtaccatacttggagttcatcaaagaggacaacagaacccgaagtgcccaggatgatatttttacacaagctgtaaatatggcaggattgccagcagtgagtatccctgttgcactctcaaaccaagggttgccaataggactgcagtttattggacgtgcgttttgtgaccagcagcttcttacagtagccaaatggtttgaaaaacaagtacagtttcctgttattcaacttcaagaactcatggatgattgttcagcagtccttgaaaatgaaaagttagcctctgtctctctaaaacagtaaacatatcttacaaattaa

SEQ ID NO: 49762 - DNA, 920 bp, Homo Sapiens
  misc_feature (12)..(12): n is a, c, g, or t
  misc_feature (710)..(710): n is a, c, g, or t
ttcccttgcccnatttgtaaatggcaaagtggacctgccctacccggcgtcctcccgcctgcaggagctgctggctgtgctgctgcggatggctgagcagctggcctggttacgagttctgagacttgacaaacggtctgtggtgaagcacatcggtgaccttctccagcaccgccagtcactggtccgctctgcctttcgggatgggacagcagaagtggagacccgagagaaggagccaccggggtggggacaggggcaaggagaaggggaggtgggaaataattccttaggtttaccccaggggaagcggccggccagtcctgcccttctcttgccaccctgcatgttgaagtccccgaagcggatctgccctgtaccccctgtctccactgtcactggagatgagaacatttctgatagtgaaatagaacagtatttgcgtacccctcaggaagttagggactttcagagagcccaggctgctagacaggctgccacgagtgtccctaaccctccctgatggatatccactgggagcacttcatcctgttctgacagcttgataacattcctgttataaccaaggatggaagtgtacaccagtccgtaggtattgcttttcttgtttgaaggaaccaagaggggctctgccattagttggaccctgggtcctggagtaaagtcaggagtgcagggatgactatagngtaggagagattcccatcccttggtgtgggagagcaagttgcctatgtccatgttctgtgagatggctttctcatagatggatgggaaaatgtcaggctctttgctgctgggttgaattggcacactgctgcggttcctctgcagcctgaggggccttcctctgcttggggagggttggcattcccagagtttcaaccttagaggagcgc

SEQ ID NO: 49763 - DNA, 868 bp, Homo Sapiens
  misc_feature (562)..(566): n is a, c, g, or t
  misc_feature (568)..(584): n is a, c, g, or t
  misc_feature (586)..(597): n is a, c, g, or t
  misc_feature (599)..(634): n is a, c, g, or t
taacattcctgttataaccaaggatggaagtgtacaccagtccgtaggtattgcttttcttgtttgaaggaaccaagaggggctctgccattagttggaccctgggtcctggagtaaagtcaggagtgcagggatgactataggtaggagagattcccatcccttggtgtgggagagcaagttgcctatgtccatgttctgtgagatggctttcctcatagatggatgggaaaatgtcaggctctttgctgctggtttgaattggacacactgctgcggctcctcctgcaggcctgagggggcttccctctgcttgtggagtggttggcattcccagcagtatcaaccctcagaggagcgggaactggggaattctggccctacgtgcattcacaggcaatgatgggtttgtgtgtatggtgtcatgagatcctctacctcataacaaaaggacagtgggtagactaaggcagtagctcaaagggctttgcaaaattttaatatattaaaacaagaggcatctgctagaaaacattctattgtataaaacccgagttcttannnnnannnnnnnnnnnnnnnnnannnnnnnnnnnngnnnnnnnnnnnnnnnnnnnnnnnnnnnnnnnnnnnnaaagggggggcgcctcaaagtttccctccagggggccaaggtttcgcgtaacccgctttcctggaaaaagggggcccttaaggggggcctattaataacttaggcctgggcctcctttttacaacctccgggctggggaaaaacggccaaccttggggaacctttgggaaaggaaaccttaccttctgggggggggggcccttaattgggacaaacctacccttaccaaaagtt

SEQ ID NO: 49764 - DNA, 647 bp, Homo Sapiens
  misc_feature (626)..(642): n is a, c, g, or t
ttcacgggacttccagctccagctacctttgtgtgtcacctcacacaccacaagggggctggggcatctggtccctggggcctgggccgccccgccgggttccataggccgatgctctgaaagaagagacgtggggctcgagagatttaaagattttatttttacaaatcacagctgatagacagcgaagccttccccatagagaccgtgctccaactcgggcctggggcacttgctcgctgctcccaggaagggggtggcgtgacaggcaggaacctgcgaagtccagagtccagggtggagcgcgccagcctcagccagagcagccacgacagccacagtgtgtgcactcgatgatgcggccctgcaacggaggaggacagtgagacgatgccactgcgccacgctcgcccctgcacactcacatatgtggcaaccctcccacgaaggacctgccaccatgccatatagggacacacctcagaaacccttccttgacagctctggacagggaaaatttggctccctcatgaaggtagaaccagctgctgttgacaccgaggttacatctgtatgtctatttataatatgttctgcaaatccaacacacgtttgccaatcaaaannnnnnnnnnnnnnnnnaaaag

SEQ ID NO: 49765 - DNA, 670 bp, Homo Sapiens
gttcaaaagcctaaaacggaaaattgacatcaataggttcttaagagaaatacataagaattagaggccaggaaaatatgctcaatctcacttacaattaaagaaatgcaaaccacattatcatgtgtcaccaactagacagacaaagatgaaaaagtcggctaacagtgttggcaacggcacggggaaataaggtctccacaccccactggttagagcagaaggggcacagcctcttcaggagaactggcaatagctatggaagcttaaagcaaagcctttgagccagctgctccatttctagaaattgatcgcaacaaacacacaggtgtaggtagaaggatgttcattccaagaaaatttaggatagagtgcaaatggagaactgggtaaataaatcatgttcatccattcaatgaatactgtgtagttgctaaaaaaaaaaaaaaaaaaaaaggggggggggtggtaaatgttcatacgaaataaaatctaaactacattccctcaaaacccaaaccaccaaacactttttacaacccctttccctttccttttccttttttaacaaaaccctctaacaacatacatctccacttccatacaccccatctctttttcttaccccccttttttccccccccacatttacccaacctcaccctcccca

SEQ ID NO: 49766 - DNA, 588 bp, Homo Sapiens
agtgtttaatcctttatgaatcatttgaagtatttttatatgtatatctatttaaaactaatatattattaaagcttaattgccatgccgtttatcttctctgaaagaacttcaaatcttacctgccaacatattcaccataatttttttattttttaatacctttcatacaataacttttttaaaacaacctcagattgaaaaagcaacctaaattactttcgctctctaatcagcatttcaatgtatttatttttaaattttctcaaaaagtaactaaaaaattgtgtcggaccctacttttgagaaatctacgtttcccaagttttatgggaactggctattccttgtcccggcacaccttctcattccttcctttcagagcctaaaacctcatttgataagcactcctagtctctggcctgtggatccagtgctattctgtcaccaacctaagaatcccaattgcaccttctgtttctgacagtcacaggtgacagctgtgattctataatacagactggtgtcttagaggtaggaataatacatgattatgaagcatcaccctgctaatacataataatgtct

SEQ ID NO: 49767 - DNA, 597 bp, Homo Sapiens
atttagtagagacggggtttcatcatgttgaactcctgacctcaagtgatctgcccacctcagcctcccaaagtgctgggattacaggtgtgagccaccatgcctggccgtggtttgctcttaatgtttttaaggatggttgtgaatccccctggccccataataaattgtaattttatactgcttactataatttttttaacactgtaacaactttgagaccacctctgaatcgtcgcattataactgttgtagaatcttaaatgttaccaagatgattccaatgaggggttggaattaaatgcattaagtagtgaattcatgtgtttgtttccaacttgattttccaactctaataaaggtttctgtccatcttattacatttgtgtagtaaatggtacttcccagcctctcttttgccccattctggaatactccccagagtttgggggtgttcatgttttatacatgtaagtctgttggcatgaaggaccattttctacataatatgacatggatacttgacccaaaaaaaaatgtttagtgctaatgagcagaaaatgaatggttccataataaattgatatctgattaaaa

SEQ ID NO: 49768 - DNA, 455 bp, Homo Sapiens
gggaaacagatcagcgactctagtctgaagtggctgcctggttcgggggctgccttcagcaagattcaggcaggagagacggaaatagccaccttccaggcgtgagtcctggagataaaaatggattttaacctaggactgccgggagctggccctccgcggctgctcagactagggctgtgtgtgctggctctcgcctgtttccggtgtctaactggcttgtttctctttatggcttggcttcattccgacctggggtggggccacatccaacccactgcccactggctgtccgtctggcctgccccgcggttccaaccacagtggtgaagcagcgcttgcagatgtacaactcgcagcaccggtcagcaatcagctgcatccggacggtgtggaggaccgaggggttgggggccttctaccggagctaaccacgcagctgaccatgaacatcc

SEQ ID NO: 49769 - DNA, 975 bp, Homo Sapiens
  misc_feature (563)..(563): n is a, c, g, or t
  misc_feature (600)..(601): n is a, c, g, or t
  misc_feature (604)..(609): n is a, c, g, or t
  misc_feature (611)..(611): n is a, c, g, or t
  misc_feature (613)..(802): n is a, c, g, or t
  misc_feature (806)..(806): n is a, c, g, or t
  misc_feature (812)..(816): n is a, c, g, or t
  misc_feature (819)..(820): n is a, c, g, or t
  misc_feature (824)..(825): n is a, c, g, or t
  misc_feature (830)..(832): n is a, c, g, or t
  misc_feature (842)..(843): n is a, c, g, or t
  misc_feature (848)..(848): n is a, c, g, or t
  misc_feature (851)..(854): n is a, c, g, or t
  misc_feature (870)..(877): n is a, c, g, or t
  misc_feature (884)..(886): n is a, c, g, or t
  misc_feature (903)..(905): n is a, c, g, or t
  misc_feature (915)..(920): n is a, c, g, or t
  misc_feature (937)..(937): n is a, c, g, or t
  misc_feature (939)..(939): n is a, c, g, or t
tggaccggtccggattcccgggaatcgtcgaccacgcgtccgggccataccaccctgaacatgcctgagcttgtcataatatgttgagtacccaaaagatttgtttatattgttaatcttagggaaaaaaaattaaaatccagtagatcagaacatcaggctttcagatacaaattgatttactggtttttattttgctgattataatatttggtatatttaaggtaatctagttaactagatgctatttcatagattatattgaatgatttaaaactttattttcaaggatagtttattttaaatggcatattgaaaacatcattattaagatccagtaggtaggacatttattggattaaaatgaagcatttatctatgtctttaggtgtcattgttccctttctgaattagctgtacatataagccttcctttggttttaagtactgatttttttttaaaaaaaagagggactgtttaccattcttccactgtgctgttataaagttgtatttgaaaggtaatgttgtttttattaatcttttgtcttaaaataatttanagtgctttgaattttaaaacattaaacaaatccttanntannnnnnanannnnnnnnnnnnnnnnnnnnnnnnnnnnnnnnnnnnnnnnnnnnnnnnnnnnnnnnnnnnnnnnnnnnnnnnnnnnnnnnnnnnnnnnnnnnnnnnnnnnnnnnnnnnnnnnnnnnnnnnnnnnnnnnnnnnnnnnnnnnnnnnnnnnnnnnnnnnnnnnnnnnnnnnnnnnnnnnnnnnnnnnnnnnnnaaanaaaaannnnnaannaagnnaaaannnaaaaaaaaannaaaanaannnnaaaaaaaaaaaaaaannnnnnnnaaaaaannnaaaaaaaaaaaaaaaannngggggaaggnnnnnnaaaaaaaaaaaaaaaananaaggaaggaagaaaaaaagagggggggggggggaaa

SEQ ID NO: 49770 - DNA, 1392 bp, Homo Sapiens
  misc_feature (946)..(946): n is a, c, g, or t
  misc_feature (1129)..(1129): n is a, c, g, or t
gccctgaagaagccagagccctgggcttggttggcacctcggagttgcagctgtgacactcataggttactcccaggagtgtgctgagcagaaggcaagctcttgctggatgaaacccctccaggtggggttggggagacttgatattcacatccaacagtttgaaaagggagagctcaattcccagcgtcaccccatggcttgtgttgcctgctacgcattgacttggatctccaggagtcccctgcacataccttctccatcgtgtcagctgtgtttctcttgattccgtgacacccggtttattagctcaaaagtgtgacaccttttctgggcaaggaaccgcccccttaaagatcacaatcacttctgtcaccgttattacgccaacatgacgcaatctgattatcctcacaaactgcatctccccacctcccttccctccagatgcacacccccgcctcgcacacacctaaaaccccccgattatataccccgccgccgcactctcctaccgtacttactgtcccaaaccacttatcaccatgtacacccatactcaccctactacacaaatcaccccacactctatccgccctccataatccacatcacacacccctcatgaatctactcctccaagatccccactaataactaacatccacttcattccaaatccgccctcttcctcaactatgatacacaacaccacacctatgcacccatcactcacaacgacaaacaaccaacaacccatctcgcgcaaccaaactctcaccactccacacacacactacacccaacatcatatcaacatttccacacgaatattacccaaaccattcttttcacctatatcccactaactaccacactcatctcactctcacaccatcatctaccgcccttttcactctcaatcagtagctatttctcatattcngcctcaccacacttaacctctcataatacaccacataacatctactaccacaccctctcacaactgagaaactctacaccctatacactatactattcctccacacacggcacccacaaaatctcctcagcacatgatatagtcccatataaaagcacacacaccaaccacttacgcatcccnctcacaaagctggtcatctccgagctcaaccgcatagacgacatcactccaaacatacacccgatcgctgcacctccgcttgaccacattaaactcacactcaccggacacaccccccgccacgacttgagagacagacagccgcatccatctatcacccatgacatcagtcgcgggacacacacacacacctgactctatgcacactctatctccctggaataccttaacccctcaccctccaacctgataccaccccctcc

SEQ ID NO: 49771 - DNA, 623 bp, Homo Sapiens
gcggccgctccagcctgcggacagaccaagacttcatcccccccaaaaaaaaaagattggaggtgatttacagtgaaagacacaaataaaatacaactgttcaatggaaatagaaaataaacaccataaaagagagaagagaggtaatttgttagcatcaagagtcaagttgctatatggtcaaaggttaaatttatctctaaaaaatggcaggattcaaagttgtacatacatgtgattacttctgttttttacacccacatacagtacaaaagattattaaaaatattcccaaaaggcaggtgcaatgatgcacacttatacccccagccactcaggaggctgatgcaagaggatcgcttgagcccaggagttgaagtccagcctaagcaacatagtgaaaccccatctccaaaaatataataataattctctcaaaatactaaacagaggtggttttattgataagattttggctgtttggttttccactattctctattggctaaaatttgtttaatgagcatgaaatgtttttattttattttgcttatttttatgattgcaaaaaatgatatgagtttctccctgccaaggcaaaaaatatatatatacctcgtgcc

SEQ ID NO: 49772 - DNA, 651 bp, Homo Sapiens
ttctgtgtccctgaaactaaaggaaagactctggaacaaatcacagcccattttgaggggcgatgacagccactcactaggggatggagcaagcctgtgactccaagctgggcccaagcccagagcccctgcctgccccaggggagccagaatccagccccttggagccttggtctgcagggtccctccttcctgtcatgctccctccagcccatgacccggggctaggaggctcactgcctcctgttccagctcctgctgctgctctgaggactcaggaacaccttcgagctttgcagacctgcggtcagccctccatgcgcaagactaaagcagcggaagaggaggtgggcctctaggatctttgtcttctggctggaggtgcttttggaggttgggtgctgggcattcggtcgctcctctcacgcggatgccttatcgggaaggaaatttgtttgccaaataaagactgacacagaataaaaaaactttaaataaaaaactcgaggaggggcccggttcccaattcgtcctatagtgagtcgtattacatttcactggccgtcgttttacaacgtcgtgacctggaaaaaccctgacgttacccaatttaacgtctttgcagaaattccccctttcgccagcttggcg

SEQ ID NO: 49773 - DNA, 489 bp, Homo Sapiens
caaacctgcctgttctgtctgaatactcacaaattatttagtatacctgaatcttggtttctttttataactgagtaataatggttacatctcaggtagtttgaggattgactaaaaaaatgcgagaatgttgtatgtgactgaataacaatttttactctgcgaagccaaagtaaatataatattatcagtaactttatccccagtgtcagtatttataaaatgtttattaaggctagaaaaaatgaatacaatatcctgaaggtgaaatatattctcttcaattagcataaatatgatttacataagttagctatacagctattgagatagtactttctagtaaacttaaactactttttaaacatacattttgtgatgatttaacaaaaatatagagaatgatttgctttattgtaattgtatataagtgactggaaaagcacaaagaaataaagtgggttcgatctgtttaaaaaaaaaaaaaaa

SEQ ID NO: 49774 - DNA, 424 bp, Homo Sapiens
cacatatatacacacacacatacatatacatgtgtatatatataccatcccatatatatgtgggatatatatatatatatatatatggatatggttatatatatgggatggtttggttggtcccagcaaagtatatgaaaattaaagttctgtgataatgacaaaggaattgctgttactgtactgcaaatatgctgtgggttctcggtgttcaaactcttctaaggaaggacacacagtagctctctgcttgctgatagatggtttcccagtgtgagatttgttattttgatcagagtattcaaatcagaatttaaatctagtgtttctattttagtttagcttcctgatttatataaatgaaatctcatttataaagtataataaagatgactgtaagacaaaaaaaaaaaaaaaaaaaaag

SEQ ID NO: 49775 - DNA, 886 bp, Homo Sapiens
gcttgaactgagtgggaatatggtccagtcctatattctacagtttttaaaatcaggagcagagggagatgacactggagcaccccacagcccacaggaaagagaccagatggtcagaatggcccttaaacacatgggcagcatccaggcaccaactggagacacagccagaagggccatcatgggctttttagaagagatcctggccgtttgttttgactcatctggatcacaaggggcactcccaggttaacaaatcagtgaagatcccaccatactttctagatgtcgaaggcggcagtaggaagacctgagcttgagcataagatctgtgggatttcatcttaggggcagaaacaatccgttcactatttatttagaatgacttagcagccatttaaattttcacagagggctcaaccacctttggagtgactccatagcactggccatggtcagggttgttggaacatctgacctgtgcatccaggagccgaggagtcaggttgtaatacaggccaagcagacgggctttgagggcatttagtctcagaacaaaaacaacctgtaggaaggatttcggaattagaattaggggtatggtatctgtaagtttggtctaaattaaactaaacgaaacaaataagtgtggtcccactataccgcaatcacacaacgtactctccgacggatcaaatttcggcggtgccggaaacaacaggctcacgtgcaacgggccacacgcgccaaaacagcgatcccggaacccagactaccagtggcccacacggggcacaaacgtgccaggcaccccaaatatcggcgacgcccgcacacacctccagacaccccaggtcccacctggaataagcacagccgcagaaca

SEQ ID NO: 49776 - DNA, 666 bp, Homo Sapiens
cggaagtggagtttgtgtcaggtggtctgggcggctcagggctccgggagcgagattgaagaggaagaggcagcccggggtcggcggcggcgccagcgggaattaaatcgcagaaagtaccaggcactaggtcggcgctgccgggagatcgagcaggtgaacgagcgggtcctgaacaggctccatcaggtgcagaggataactcggaggctgcagcaggaacggaggttcctcatgagagtgctggactcctacggggatgactaccgggccagccagttcaccattgtgctggaggatgagggcagccagggcacggatgcccccaccccaggcaatgcggagaatgagcctccagagaaagagacactgtccccgcccagaaggactcctgcacccccagaacccggcagcccagcccccggtgaggggcccagtgggcggaagaggcggcgagtgccacgggatggacgccgagcaggaaatgcgctgactccagagctggccccggtgcagattaaggttgaggaagactttggctttgaagcagatgaggccctggattccagttgggtttctcggggtccagacaaactgctgccctacccgaccctggccagcccagcctctgactgacgcatgctcaataaactgaccccacactca

SEQ ID NO: 49777 - DNA, 799 bp, Homo Sapiens
atttcttaaatgttataggatgtagctttaaaattatatttgtactatgtacacagtgtaaacaaggacaaaagaattctttcctatattatgtctgaggtctctatgatttatttaaagttggctttttatatttaaaatgtcatttctttacttaggatttgatgttctaatcattaatacacttaagttttccagagaactaaatagtaatagtttcatagaagagaactatttattcacttaaatatcatttctcaagtgagtgagttcccctctacttttagccttccacccaaactggaagcctctaggtgctatcaattatttatatccatcgtttacatccatgaaattggctgaataattactcctctgcctggcgtagacatgtgctttgggaaaaaaacgagtttataatcctataatgaagaatactggcacaggcaatgctcactcgaaaacttcaagtaatttctagttggtttggaatgcttgataaagttcctttacagctttattttcctgattgtttgtggtttagatcaaagttcaaattaatttttaacttagctaatgaactcatcaccaggacagtggaggggtaggccgaggtttaaatggtccacgtttcaaaaatgtaatggtatcatattaagaaggttactgctaaaaaaaaaaaaaaaaaatgtggggctggcctgaaattttaacaaattttgggcggccggtagacagcagctagaacgggagggggtttccaaaacggggccgcaaacagggggtgttaagcgcaatg

SEQ ID NO: 49778 - DNA, 675 bp, Homo Sapiens
gagttgcagtcctcttcaagctgttatcataagtacagtagtcagctacttggatatcaagactaagtgctgatatgaagacttgcctttgtgtttagttatgaaacacgcaagcataaagcaggactcaagcacaaggctgactgttctactttgaataacagcttccttgcagtctcctccacatgggtggtactgtgtttagaagggattaccaaaggctggagcgatttaagctatgcactagccttgccctcttaggttgcattctctttaggccactggttctcaaacattagggtgcactgtaaccattacagagcttgtgaaaagtgcagaaacctgagcctcaccttatgagattctgattcagccagggggaggacaggaatctgtatttttcatagcaacctcaagtaatctttattctgagggtctcgggattgcaggttgaaaaacacaaccttaatcagcagtaaattcttctctactcggccaggcgcaagtggctcatgcctgtaatcccagcactttgggaggccgaggtgggtggatcacaaggtcaggagttcgagaccaagcctgaccaacatggtgaaacgccatctctactaaaaatacaaaaattagacgggcgtggtggtgctcacctggtatccagctacccaggaggcg

SEQ ID NO: 49779 - DNA, 587 bp, Homo Sapiens
gtttagtgtttctgctttacagtgctgaattccatattttagaagctatgaaagtccttttatgaaaaagttactgattgcttctcagttattaggaaaacagttgtttcacaattattatgtagatatgatgcccaaatatcatttttagtatatcttgtcgatctttaagttgttactattgtgttattcatgtctttaaatcagataccaaatattttttaggaaagaaaaatgttattactgtcattaggttgtcttttaatactttaagttattttgacgaaaagtaatagagaaaatttacttagcattttagattctagagacatggaaatgaaaattattttatgtctagagtaggtcctgaagtttggctttacattaagtttagcactgtatcagaatgaagaaactaatattttacataaaaactaatactttcaattttttatataggtaatatccccattttgtaaatgttagacttttatcatacctgtaagttaaaatacttgttatcaataacttgtcatattgtgacaaattgatcacttgtgtacgaaaaataaatctccttaaaaact

SEQ ID NO: 49780 - DNA, 582 bp, Homo Sapiens
gagttgtcctgcgccggtgttcccacgtgcggcctgaacctgagcgcataatgttatgaggagatgggagcactagtgattcgcggtatcaggaatttcaacctagagaaccgagcggaacgggaaatcagcaagatgaagccctctgtcgctcccagacacccctctaccaacagcctcctgcgagagcagattagtctctatccagaagttaaaggagagattgctcgtaaagatgaaaagctgctgtcgtttctaaaagatgtgtatgttgattccaaagatcctgtgtcttccttgcaggtaaaagctgctgaaacatgtcaagagccgaaggaattcagattgccgaaagaccatcattttgatatgataaatattaagagcattcccaaaggcaaaatttccattgtagaagcattgacacttctcaataatcataagcttttcccagaaacctggactgctgagaaaataatgcgagaataccagctagaacagaaagatgtgaattctcttcttaaatattttgtacttttgaagtcgaaatcttccctctggagacaagaaagcaatacgatc

SEQ ID NO: 49781 - DNA, 1023 bp, Homo Sapiens
atttttaaaagcttcttttaaactgctcagtaaaacattgccatacattaactctccatttctgcattaacttcatttgctggaaagaaattattttgttaatgaaccaaacccagccattaagttatgtgaattcaccttctctagacacattgaggtatggcagagaagacacatattccctggcctagagtgggctgacaatattgctgcctcccctaaattgactcaatcttgagaaccacatactgcagtgacagttgatcatggatcagaaatattcctttttctcctagaggaaatccctcatggcattatcattccctaaggacaatgagatgtccctccgctcaaatcctaaagccccctgatgaaagatttggctctgatttgctgccaacttattggtaagtgctgaatgagttactgtgctttggcatagcttctacatcacagcaagtgacttctcagaggggaaaagccaagctccagacaaggagtgctgttagcccaaggggaagagctaatagatacataggccgtaagcacagggctgtacacagatcctttattggcatctgcatgagaggcctagaaatcggatgttagaagctaggaatcatggctctgagcgccttgcatacaggagatactcactgatactaaatcaaggcatgtaaacaatactgggtaaatcatacctaccagaataaagagtaacattcagagcttttcttttatctgttattttaaatgttactccatatttcaaaagtctgcacgtatgaaattgggtcttattttctggtttttagagcctaagaaagatactcattcttaattcctatttatcatctgaaaaaccaaatgaatttttgaaataaaatgttttacaagcatttctggactggtcctgccctgatctctgtggttgggcaaaagaagggtacaatttgagcagttcctctggagttagactcgggctcaagatctctctttttaaagggaaaggcccctttctca

SEQ ID NO: 49782 - DNA, 542 bp, Homo Sapiens
gggtgaatatagcagaaggttccaagaactctggtgtctgacctagaagaggcacagttctctctactggaaagaaaacgatgtagccgattgcacaagggtgccaagggaagacccaggatggcccatcaaaggaacctgggggaggatgcaggaggctgaagggatgcacctggcatttctctcactgtgctcttaccgcatcagcaacccccaacttttgggcctactctgccccccatgcgtgaataccctgcttggatgctgtgcttttccggtttgtctctaagcccctttctccagggcatgttggtttccctggcctctcagtgtcctaactggagcccagagtgccttgttctgagccaggagacggctgagcactggccctccacacctaagcgtcctttacattaacttattggtcttgtataacacctggtgccattgccaagtggctgtgtcctcagctacagagctggaattgtgtggggtttagtgctaaatacttcaataaagtctgttttttgtgaaaaaaaaaa

SEQ ID NO: 49783 - DNA, 482 bp, Homo Sapiens
aattgggaacgaggctacgcagcaaggctcaaagtttcaaactggtttggaactcaaccaggtcctccaaaggaaaccaaggcaggcacaggatgggggcaggctggcttggcaggcagctgtgcggatccacccagagtgccttgggaggcagtggggttggctgtggctgctgtgagctgcagccaggcctctcccgcgtccccagggtctggaaggagggcctctgcacattttataagccacagactgcgaaggcctggagccccaccttccacccataacaaagaaagggatagtttcagaactgcttttatttggataactgactgaaggagtctcatttgtaaccaagatggaattcacagtatgttgttacattcacacttaaaaaatatatctctatgtacaggaatttgcaaagagatgtaaacatacattaatttccaaggacatttctccccttctccctggaggaaaaa

SEQ ID NO: 49784 - DNA, 602 bp, Homo Sapiens
ggagggagggtgtgggtgggtctcccaggagaggaatactgagtgggagatcggctgtctggagtgttctgatgcaagtctctctctcctgagcctcctcttgatgcaagctctaaagggagaagtcaggccctgcctctccaggtatagacggccctgctaggccccagttcttcctccttccccctttcccaggaaaggccagcccagtccatggccttcttgggcctctgggcacagagccaatgttcgtcattgcagctctcagcaaactgggtcatagctttccccacagctcagcctggggcctgggcagggctcccagcctgcaccgcctcccactgccagtggggcatgattctctcaggcttctgccccgaggccttcgtcatcctcagggtctggacttggtcagtggcctttcaccagtggagctgccttcccagggagaaggagccgtgcgccagggcagggcccgtgccttagacttctcccgacccccagagcgctggtacacaggtctaggcaccacacagtgctttggaaattctcagtgaatgatgtttaataaagcaaaaaatgtccaaaacaacaacaaaaag

SEQ ID NO: 49785 - DNA, 658 bp, Homo Sapiens
gatgactctaagaaatgctgaagtatcggcattacatgtgtttatttacatgtcctagtatgataatgttgattcaatctgaacaaaagataatataaaaataacccttcagagtttggacatttcaagttggtaataataaaaaataatatttaagaagatatatatatatatatatttagttttttccacttcattttacatgccactatattgactttaattgatatacagtattaagtttttaggtgccattatttttaaaaaattctatatttccaatgaacgatgttagattttacacagaacatattctctgcatgatttcagaaaagaaaatctaaaaaggtaatacgggtatttcaaataaaatcctttctggtatgaaaggctccattgattttattaagccttcctttaccttgtagtacaaggtgctttaatgggatagaactaagcatatcaatatctataactgcattttgtgctagacaattactgttcttttctctaaaatgtatatgtcaatttacaaggccagggatagaaaacactccataattgctttccttgattttgctgaggatttggtatgattttagtaagcaaactgttttttggtttttcctttaatgtttttaatttttttttcctcttc

SEQ ID NO: 49786 - DNA, 696 bp, Homo Sapiens
  misc_feature (34)..(34): n is a, c, g, or t
ccaccctcctgccctctcagagccccactaaccngacctcacccatcagccctacacatccccattccaaagccccccaaatcccaagggaagatggccccagtcccaagttggccctgtggctgccctcaccagctcccacagcagccccaacagccctgggggaggctggtcttgccgagcacagccagagggatgaccggtggctgctggtggcactcctggtgccaacgtgtgtctttttggtggtcctgcttgcactgggcatcgtgtactgcacccgctgtggcccccatgcacccaacaagcgcatcactgactgctatcgctgggtcatccatgctgggagcaagagcccaacagaacccatgccccccaggggcagcctcacaggggtgcagacctgcagaaccagcgtgtgatggggtgcagacccccctcatggagtatggggcgctggacacatggccggggctgcaccagggacccatgggggctgcccagctggacagatggcttcctgctccccaggcccagccagggtcctctctcaaccactagacttggctctcaggaactctgcttcctggcccagcgctcgtgaccaaggatacaccaaagcccttaagacctcagggggcgggtgctggggtcttctccaataaatggggtgtcaaccttaaaaaaaaaaaaaaa

SEQ ID NO: 49787 - DNA, 731 bp, Homo Sapiens
gggcaaacaaaaattaaagaatgtgaaaaactcacctcagaaaaccaaagagaccccagaggggacagtcatgtctggccgcagaaaaactgtggacccagactgcacctccaaccaacagctagcactctttggaaataatgaatttatggtctgaaccggcagatgtgtgtccctccgtggctacagagtggtaaacaaatctcacctttggggctgcgtttcatcacctcgtccacaatagtcaatcctaattgtggtcctgcctcttttctaagcatatggctaagactgtatgtgctgaattcctgggcctcctgcagaagcagaaagcctgctggggatggtgccagctgtgccttggctgttgtatttgaattgagatttttactatacaaagccacctagggcctggggatttgggtcagttgtagttgcctctcccccaccctcttttcccttcccaaaggtgggtgttgaactaggggggatattgctgtcctgagggaccctctcatttctgacatttgaagaaaacgtataaatctttcttaaccgtgaaagcaaaagcctttgggtttattttgggatagttaggagctagggtagaatataatttttttccaaaaacttacttacaaacaaaaagcctaatccctctattttaagatttctgaaaaaacactccatgttatattctggggaaagcaaaacaaaaaaaaaaaaaaaat

SEQ ID NO: 49788 - DNA, 852 bp, Homo Sapiens
gtggtccagcaggaaatccgaattgcccatatgctcttgggcctcaggaagaggttgaacaaaaacaaattcttttaattcaacgggtgctttacataatgaaaaaaccacttgtggcacacgatgggcatctaacatcatcatcttctaatgtgttggagattttcatttcaaatatattttttaaattactctattttccaaaacacgttaatgcatttttctcgaaaataccttactgtaaaaataactgtcgcgtacacatgtgtgaagtagctagaacatactgaattttttttggtactgttggactctattcagtgtcatgtcctatatctgatcaagttatcaaggagataattctagaatgaaaaagaaaatcctcttgttggaaacaaaagacgttttatatgtgcagtatgacaaagaggagtttcagaaacaactttgaatccttgtcagcctggagaccagcaccagaggaatctacaaggcaaactcccatatatttgcttcccccaaattgctgcccctacagactcaaagctctttttctttgtatgtagtttctctaaaaatttactgttctttgtcgatgctatataagccagggagttctaagacgccagctctttgagatttgctcattcccctgtaatttcccacatatatattacatatacccgctaataacattatgtcggtaatctcttgtcaatctgtcttagttatagggggcccagccaaggaacctaaagtgggtagaaggcacaacctcattttttctttcgctacaaattgaacattgatattaaactcaaggtttcttgacatttagaaagaaacttgatc

SEQ ID NO: 49789 - DNA, 522 bp, Homo Sapiens
  misc_feature (1)..(1): n is a, c, g, or t
  misc_feature (14)..(14): n is a, c, g, or t
  misc_feature (21)..(21): n is a, c, g, or t
  misc_feature (49)..(49): n is a, c, g, or t
nttggccctcgcgncccaganttcggcacgagtaatttgctaagactcnaaaaactcactgaaagctattgtactcacagttacagtgtattatgggctaaagatacacattaaaatctcacaaaagaagagatgcatagggaagagtctagaagagtcccaaatgtgaagtgtccattttcctataaaatcaggacatgttacccttccagtatggatatgaaatatcaacatgtgtcccactgttcagagttttattggggctccattacctagtcatgattgattgattgattgattgcccaggtggttgaactcagtctccaggttgaccgatactgtatgacgcagatgccctaccccagatcacatggttagtctttctggcatggccagcgttcacccggtgactctcagttatggtcgctaagctactagataaaaggattaggcccttattcaaactggttgaatgcttgtcaactgtcaccagagtccatccacagaataaatagaaatata

SEQ ID NO: 49790 - DNA, 656 bp, Homo Sapiens
ggattgaaaactggcactccatcctgaggaatggtctggttgttgcttctaatacacgattgcagctccatggtgcaatgtatggaagtggaatctatcttagtccaatgtcaagcatatcatttggttactcagggatgaacaagaaacagaaggtgtcagccaaggacgagccagcttcaagcagtaaaagcagcaatacatcacagtcacagaaaaaaggacagcaatcccaattcctgcaaagccgtaacttaaaatgcatagccttatgtgaagtgatcacctcatctgacctgcacaaacatggagagatatgggttgtccccaatactgaccatgtctgcacacgattctttttcgtctatgaagacggccaagtgggagatgcaaatattaatacacaagaaggaggcattcacaaagagatcctccgagtaattggtaatcaaactgctactggttaaaggaccaccatttaattaacatgattcgaaagccttcctcgggttcaaagctggattttgaacttgaagaagattataaaattattttattgttattaataaacaaaattaaacccttttgaatactggtttttttttcctagtatttcctaagtatctcattaaatacctaaaatggtataagaatac

SEQ ID NO: 49791 - DNA, 685 bp, Homo Sapiens
  misc_feature (664)..(664): n is a, c, g, or t
aaaacattattttgactactaagtggggacagaaagatccatcctgagttgtggaaacattggtccatgccgtgagcctgtctgcctgtggacacgtgagcttcccgggctcagctgggctttatcacacatcccgtgaacactcattgaagtcagcctgtttgcgccatgtgggcatcagccactgctgtcttgggaggacacttatcctgttctcttatttccccttcatcctatttttaacttaaactgctcagatgtttgaaacttctgtcctctttggatgagatcagtgtccacaagtggccgacatggaacatgctgagcagtggctcctctgaatgttcactttattagtcatgtatattttaaatgctaacatttgatgaatgtaagtttccacattgttgctgtttctgcatttaaacataattgggaacaactgacattctctagtcgactgccagggccttagactccacatgtccatttttgttcaggtatagctttttatagcaagggctgcatctagcttcttttattagaagtgtgtgtgctaaattccttattaatgtgtaatcagtttacattgttttgtatagtgaaggtgtattttcagtgctacccgctagctgattttaactttaggaataaaatagttttnaaaaaaaaaaaaaaaaatggc

SEQ ID NO: 49792 - DNA, 703 bp, Homo Sapiens
  misc_feature (398)..(398): n is a, c, g, or t
ctggattgagcaccagactgtatacccttctcttctcttatcttctctctctctctctctctctctctcaccctcacctttatgccttatatagagaatctctgtgtaaatcctggctcataatcagtctcctttttatcagttttggtgtggagaaagaggccagtataaataggctttcaagagtctagggtcagaaaagcaatagtcactaagctaggtgacctgaaagctttaattttcatgacctggatatgtggtctattgtatatctttttctgaaatggtttgtattcatttaggttagatcaatcagcagatattgggtccggtataccaggtattattttggggtaagctaacaagtacaactcatgtttgcagccttcgaagatgtnacaatctcgttggaaacataagacatacatcacattatacacaaaagtgtatgatatgtacaactgagtggtacagatatgacatggaagatctgggggaggaagttcaaggaaggcaccacamcagaaatgggacctaaattaaggcttaaagaatgagcatggccacactgtcagtragtgttctttaggtggtaggactatggttgatatttttcttcttcctatctycctgcctttttcagattttcaatattaaacttgttattcttacattggaaaaaaataaattgtttttaaaaaga

SEQ ID NO: 49793 - DNA, 742 bp, Homo Sapiens
caaaagaaggaggagctgctgaatgccatggtggcaaaactggggaaccgggaggacccactcccccaggactcctttgaaggcgtggacgaggacgagtgggactagcctgcgcccccgtcacctccacctcacctgtgctgccacttcctagtgcacacctcacggctcatcctcaagctggaagatacctctctggccccggcacatgtcacccctgcactcctgccttcccgtgggcacttccacatcctctgggcctctggcagttcccaggactgttttcacctctgctgtctctggggtcagctgctgctcatcagctgcccgctagcatgtggccaggggtgcagggtggcggggggtcagcagcatgtccctgggcaggccctgggcaccctgtctcccttggtctcactgctgacctgggctggtcccagcctggattggcctcatccaggatctttggtcaccccacgctgccccatcttgcctgctgttccagttctggtcaagggccttgggggctggccccccagcaggccttctagagcagcaccagtctcagggccctgggaccagctgccctacttcccaggtttgtagccaggagaagggggcatcacagagctgatggtccaatacaggggggtgtgagccccgcagggacttggccgaacctgcttggactgttttcagcaattacacgttgtttaagctggccacaagagaagagacaaag

SEQ ID NO: 49794 - DNA, 814 bp, Homo Sapiens
  misc_feature (45)..(45): n is a, c, g, or t
  misc_feature (806)..(806): n is a, c, g, or t
ccatgttacgcctaccttggccacacatcccctacccctggtggnggtggttgtgccaacaggggctgccggtaaccttgcagcactccccggtgctgcctcgcccctgcctctgcagccaagttcccggaagctgtcctggctgctggcctgacccctgagactcccgcggagatcgtagccctggagcacaaggagacacgctgcaccctgatgcggagaggtgacaactggatgctgatgcttcgggacaccattgaggaccttagccgacagtggaggagtcatgccctcaacacctcccagtagcctggctggaggtggctttctttaggcttcagatcccaggaagatgcaccttctgagctgccttgtgcaccctccccattaagcgtaggttaggaggtttccgggaggctgctcagctggatctggagccagctggctttgctccgttccctggctagtctgtgcctggtcaccagggaggctgagtgaggggctgtgaacagttgccggaagcaccccctccctccccggcccgtgcagcagtgtctgagctgtagtgaaagtttcagggcctgcaaaagaagaggcttgggcacaggactgaccatggctccaggggtttaggacccccagacctgtgaaggtgggagcagctcaccaccttcacgcaggctttgtatgttctctgagccttagttgattttggcccccaaaccaaatccaaaggttctggcccaccttgtcagaggcttccaccctgctcacatgtttgggaatccctgggataaaaagcttgntcagtgtg

SEQ ID NO: 49795 - DNA, 762 bp, Homo Sapiens
ggctatccttcactttttttttttcatttctggattttcctgggatttctgacaacacaaaagtagaaagtgcttggtatttctgtcttatacataggaaaacatttaaaataaatagtttttaattgtaggctcaacatctgttaccccatagctttttcgtatattgtttctttccctttgaatttctttttactgtcatctattattttaacaggagttaaaataactcctgttaaactttctgacaatatcataagaattcatattaaaggtgttattctttctggttgtgagattctagcacaaaggcctaaaatcatcaaattagatttccatttgtaaacaaattctaatgggcaaaatatcttgagagcagtttttatatggattatccataaaatgacctttacatatccctgcagagttggccttttgcccgtggtgtgctagtagctttggctgatgctaagctttcctggtatgcgccctattttttaaagaagtaattgcttttgaattaagttatagcattactaattcatgttaatgactaggaaaccctctgtaaatttacaagatttttcaaattggtggggagtgaataaataccattttaaaagagtccagaaatcagttttggcaaagggaacttttcctaaattccaatttatgaatgaattatagcccataatttattttgaaaaacctaactttatgggtataccaggggaaaaaaaactgtaattttaaaaaaaagaa

SEQ ID NO: 49796 - DNA, 805 bp, Homo Sapiens
ggaaatgatactcttctctactatttattttgcatctgagtgtggcagaggcaaagctatgtgcataccatagctttttctccccctgaaaacacaactaaactacattgttttcctggcctctcatgcatttaggttggggtcatatacttccctccaagaaaaacaacagttggtatgcctcctccacacttcccacaactgtggaccgccagtgatccagatagcatagctattaatacaagatgggtgaaagctgctcaaccgcatcagacagcatgagtggtaagatttattgtgtcaaacgactgcattagtcgtgttgtattaatggcagcagtagcctagcatctagccctaactaattcaataacataaagttgagcattactttgtacagtttaaacacgcgtattctatgttatgcgtttacacgtggcatttccacgttttgctatcagagaatccccccatcccttatgtaccaatgctatattaactaaaatcggacaacgaaggcctggctacaccagcacaaacaaccaacacaacaacacaccaaaaaacaacagagggcgggcagcgcccgaacgcagattcccccccacaagggggcgccacaggttcacgcacggctacaacaacgaaacagttgaccacaaacagaaggaccccacaaaacgacgacgcgtcaaaccaatacacgcaaaaacaccggcacggacgaataaacagacggtcgacgacatgtgaaaactgcgcaccagggaaacctatgaagcagcacaaaacacaggtggcaaga

SEQ ID NO: 49797 - DNA, 1056 bp, Homo Sapiens
  misc_feature (667)..(667): n is a, c, g, or t
cccgggatctgtgctcaagctgtcgggcagctggtgcaaaaggaacaatgggatcgggctctggatgctggcctggccctcggcccctccagtcccctgcttcgaagtgaaatcttcaaactgctgctggccgagtttgcccagcaccgccggcttgatgctcacctccccctcctttgccgcctgtgcccaccagaactggctccagctgagctcctgcttctactgaggacatacctcccagatgaggtggggcccccaaccccattccctgagcctggagcagagccccctctcactgtgggcttgctcaaagccctgctggagcagactggggctcaaggatggctgtcgggcccagttctaagcccatatgaggacatcctatgggaccccagcactccacccccgactccacctcgggacctatgactacccttcaggcatcagaacactcagggcctggaggcttgcttgggactggaggcttgcttggacagttcctctgtgtcactgacacaggaaatcatttctaggacacagtgatcagggaagggtgcctgggacttggagggtcccatgtatggacctgtgtatgcaatactgttctgtcatctggagctatttttaagatttgtgtgttaaatatatacatagtttaatatcncccccactcgaaacgaacacctccgagaggccgggcctacccacgccatccctcaaggagacaagccctcccgcaaaccgcgtttacttgtcactctgggggctcctaacgcgcccaaggtcaggggactcaccgatatcccccgtcacgttaagaaccactctggcctcgagaaacaaaacatacggcggaccctcgtccactgtgggaatgacctactataaggagagagcaatattttttgaagctgacacgacctatgaaatgatgccacggatataaccccgtgcaaaatagggacgaacatgcgaaccacaccacacagcagccaactcagagtccatgtagatcacgtaacgaaattagcacgcgggcttgcaaataattaa

SEQ ID NO: 49798 - DNA, 953 bp, Homo Sapiens
taaatttcttatttgctaggagaacaaagctgtcacggtgcataatagttggacagagatggctaaaaaagaggcaaattcagatttggaaacagggtggcctcttcattatttattgccaagatctgaaaatcttcaacatcttataagacaacaatgaagtagcccctgaacagcatggagttgctgtgagtttgttcattgcagacctttgtgttgggtcctgggaatctgagctttgttccctgtgcatggtggataattgaaaccaagaggacatgggatagaccttgtgacagaccaattctgtgacccctgtcttctgggtcacattattcattgttgatttaaatacaggactaccaaacagtacaaatctatcatgagtctggtagaaaagtaaaagtaaaagctgcacacgttacatactgtttattgttctaatgtacaactaactatttgcatataatgtgatttaatttattgctgttttgtgtagaaaaggagaactaatgactgtggatataacccatgttttgtataatatattttatttcttgtgcgaactggtcatttaaaatatctacttcatttgatgtttggatataaatgtgtatgtgtccttgtaaatgtttctatcaagcaagaatgccacgtacctcgagtataacaatgtggttctccattaaaaaatacctccccacgggaaagcgatccaagcggccacgggaggaggaaccgggagcggagagcgggcggaccccggcacgacacgcgagtggagaacactgggcacgccatatatacaaatatagtcgggggggggcgcgcgcccaaaagaaaacaccctcccgggggggcgcccaaatatttatcagtgagcccccgtatttttttttggtaacaaaaggggcggcccccataacagggcggaggctcatataaaaaaaaaa

SEQ ID NO: 49799 - DNA, 629 bp, Homo Sapiens
gcctagagcggatccgccaggctgagaccctggagcaagtgcgcagcatcatggatggggcgccactcacggacgtcagggacatcaaggacacctgaggggtcaggatatccccacccccaccctgggaaagacgcctttccccactcctgaaccatgaggcctcgctctggggtcttggatggcttttccaccgtccctgagactggggttgaggggactgacgggggccaccaccgccccgccctccagcgcctcctcccagggtggctgggcctcctgttctcagggatcacacctgggtgaggggcccaagcccctcccggaaccaaaggtgcaggctcaggcctgcggctttctggctgctgtgctgcctcctgggctccagccctcccctgcccccagcccgtcccctgcccagggcacagcggagccatgggggctgggagtccccatcagaggcagtgaggtgggccccggccctgggacaggcagctgccttctggtctgcatgacactaagacgcttgtccacagcggcgacccaggcctccaagcttgcacagaggcaaggccagacttttccgtcgtttattttcaataaataagcagctcagcgcaaaaaaaaaa

SEQ ID NO: 49800 - DNA, 1101 bp, Homo Sapiens
tggtaccggtccggaattcccgggattgccattggactatggagtgcaccaaagagaatgcccttctccttattgtaaccctgtctggatcctatcctcctacctccaaagcttcccacggcctttctagcctggctatgtcctaataatatcccactgggagaaaggagttttgcaaagtgcaaggacctaaaacatctcatcagtatccagtggtaaaaaggcctcctggctgtctgaggctaggtgggttgaaagccaaggagtcactgagaccaaggctttctctactgattccgcagctcagaccctttcttcagctctgaaagagaaacacgtatcccacctgacatgtccttctgagcccggtaagagcaaaagaatggcagaaaagtttagcccctgaaagccatggagattctcataacttgagacctaatctctgtaaagctaaaataaagaaatagaacaaggctgaggatacgacagtacactgtcagcagggactgtaaacacagacagggtcaaagtgttttctctgaacacattgagttggaatcactgtttagaacacacacacttactttttctggtctctaccactgctgatattttctctaggaaatatacttttacaagtaacaaaaataaaaactcttataaatttctatttttatctgagttacagaaatgattactaaggaagattactcagtaatttgtttaaaaagtaataaaattcaacaaacatttgctgaatagctactatatgtcaagtgctgtgcaaggtattacactctgtaattgaatattattcctcaaaaaattgcacatagtagaacgctatctgggaagctatttttttcagttttgatatttctagcttatctacttccaaactaatttttatttttgctgagactaatcttattcattttctctaatatggsaaccattataaccttaatttattattaacatacctaagagkacattgttacctctatataccaaagmcmttttaaaagtgcmttaacaaatgtatcactagcctyctttttcmacaagaagggctgrgarwgsagaawatttgtrmaaaaa

SEQ ID NO: 49801 - DNA, 502 bp, Homo Sapiens
gtcttttagaacacagaccattttcaggaaagcagttagctaagtgtttaattcatgaatattgtatactgcatcccctaccacaatttacacaatcctgtggatagtcctacctcaccctggtcaacctacatgatccttaagctaatggcgaatcacgatgaccttgtagacatgcacacaactatacctttgtccaacagatcataatatatctgctatccaactggttttacctgcctaatcctactgatttgggcactgcttgtatagtctctcaagttcacaggaaatgttgattttctaaggtcctcatttttacagagtatacaggcaaagtgacaggggaaaaggaattagtctaagagtaaggggatgattattatattgaggctaaaaccacaaagtggctcaggctttaaaaaaaaaacactgtggataatgacaaaaagcataagtaaaaatatttgagaaaaataaagtacaagttttgaacaacaaa

SEQ ID NO: 49802 - DNA, 693 bp, Homo Sapiens
  misc_feature (566)..(567): n is a, c, g, or t
  misc_feature (664)..(664): n is a, c, g, or t
cccacaggaactgcgcttcgcttccgagtcctgtgcacagcacctgccaaatacacggtgtttgacgcagagggatatgtgaagccccagtcttgcattgacattgtgattcgccatgtggcacccattcccagccactatgatgtccaggaccgcttccgcattgagctgtctgaggaaggagctgagggccgagtggtgggacgcaaggacattacctccattctgagagccccagcgtacccccttgagcttcagggacagccagatccagcgcctcgcccagggcctcctgctgggacaccaccacccacggccagacacttccaggagcacccccgccagcaactggccaccagctccttcctcctcttcttgctgacggggattgtgtctgtggccttcctgctgctcccactcccggacgaactcggcagccagctgcctcaagtcctgcacgtctccctgggacaaaagttggtggccgcctacgtcttgggcctcctcaccatggtgttcctccggacctgagctccgtgctcaacccccagcccaccccaccctcnnctgggcagggtcttgaggcagccactgtgatgctcataccttaccttgcctcctaccctcttctctttcctgcctactccccactcctccctgacanaaaacacccagggatttgtactcattttc

SEQ ID NO: 49803 - DNA, 565 bp, Homo Sapiens
cccgtctctcatggtcacagcgctagtcattcatttttgagaagttgcttcttttacatcagaaaaccagtcaatcatatggagacttcttttgtgatgaaaaagggctttagaagttaaatacatgcatgcacatgaaaacatgcacaaccacagcctcaatcttgtatttagtttggggaaagagaagagaatttcctgtggattattttttcctcaagtgcacctctctggttaacccaaactctgcaagaaagcactgtgactaaaacatacataacgcctgcataaatattccatggtttcagttaaatttcagtttttagcctttacacatgaggtcaaaggagtgacgaaaatacaaagcaaggaaaaaatgaaatatctggtttttgctgaatgcttaatttattttttactgtgccactccaatatttatcaaatccaaatagcatgaatgcttctctgtagtaatactaattttgtgccttttgtctgctttcttaagaccagttgttcacactttgtagatattagacaaatatatttcgattgaatacaaaaa

SEQ ID NO: 49804 - DNA, 783 bp, Homo Sapiens
tctagcgaggtgacagcgtagaaccagagaggcttgggccgccgagctggacccggaccggttttgggtactgtactgggggcagggcagagaggtgggcggcagttggggtgcggtgattgtagtaggctagggcgcgttcgggtccccattgcagcccccggatgagcccgcagtattttccttatatgatcgtcccattgcgggcggcgccgcttgcccggagcctgagaggattatgaaaacgtggcgagcgaaatggggccaggggacctggagcaggggcgtgaggagagtaggcagcgggtgaggctggacgggagggaggtctagggaggcctctgccgcgggcactgtgagtcctggccgatgatgacgagaccactgcgcaatctgagttctgggaaccaggtgatggagtatgttctgagaacagactgaggccgggcaagcaggaggcggccgcggcaggggagaggcggagagcccctcgataccagggctcggagggccgggctgcctagcgagggcttcttttgagtgcgtaggggtggtgggtggcattgacggtttctctgagtcgtcagcgaatgccccccctagaatcctgcttttcaaacacttttggtgacacctcttgccaatgttgggggtgtttttttaaatcccaaaattttgtatttatggaaaaaccttacaaaactttacaagcaaaaaattgggggaaaagacattgtgtaccaggtgggggaaaaccatttatcctgtaacccccaagtattt

SEQ ID NO: 49805 - DNA, 874 bp, Homo Sapiens
cgtcttcagattggagattttgtttctgtaagcagtcctgagggcaattttaaaatatccaagttccaagaattagaagatctctttttgttggcagctggaacaggcttcacaccaatggttaaaatactgaattatgctttgactgatatacccagtctcaggaaagtgaagctgatgttcttcaataaaacagaagatgatataatttggagaagccaattggagaaattagcatttaaagataaaagactggatgttgaatttgttctctcagcacctatttctgaatggaatggcaaacagggacatatttcaccagctcttctttctgaatttttgaaaagaaatttggacaaatccaaagttctcgtctgcatttgtggaccagtgccatttacagaacaaggagtaaggttgctgcatgatctcaacttttccaaaaatgagatccatagttttacagcataatgaagagctgtcattgtcctttattcaactagtttatctaaatttgtgattgcttagggttttttaagagaacatttttgtacataacaaaaggttaactagaatccagccttcagtttcttaaatgaaatcaaatgttccttcagtacaggtaacttcttggctttcttttgtaccacaacttattttactactgatatttgacctggaaagttaatcatggcaacaaatacatacaggattctttgttatgaatcacaaatttccttgccatttaaattatatcactgttctacaataagcacttgtgttttatgacatgataaagtaaatgatcacttcgatcatgttttctatgctgtaaaatgtcttattagccatacagatttaattttaccttgca

SEQ ID NO: 49806 - DNA, 497 bp, Homo Sapiens
ataattgaactggcaaatcatccttattttgttggtgtccagttccatcctgagttttcttctaggccgatgaagccttcccctccgtatctggggctgttacttgcagcaactgggaacctgaatgcctacttgcaacagggttgcaaactgtcttccagtgatagatacagtgatgccagtgatgacagcttttcagagccaaggatagctgagttggaaataagctgaaatgaatacatgactgggaataatggggactgcctgtgaggcctctgaaataattgaaggcaagatgaaggaactatctgaagaaatcactacactcttagagaatccctctgttctccagcaaacatgggatgtaaagcctcacagggaatctgataatacatacttctgtcaaccagaaccagaggggtagttttcttttccctccagaggcagcctttggtacttaaaatatctgtagctgattaaatttttcccaacaacct

SEQ ID NO: 49807 - DNA, 458 bp, Homo Sapiens
ctggtgagatgcacctgtagtcccagctacttgggagaccgagccaggaggatctcttgagcccaggagtttgaggttacagtgaggaccactgcactccccctgggtggcagagggataccatgtctaaaaactacaatcaaaaaaagccttttttttaaaagttactttggttttaaggaataagaagccttgaaacactcagccctggactgaatcctccaggcaccagagctgtgctggtctggacccttccaccccacttgaaacctgttggccctgttgcaaccctctcttgctttccctgagaaccctaaggtgaccccaggggctgctgatggagacagtcacctccttgccctgctccctgcagcctctcactttggctgctttgctatcataaggaaggaaacataaaagctactttttagcattacaaagttaaaaaaaaaaaaaaa

SEQ ID NO: 49808 - DNA, 611 bp, Homo Sapiens
  misc_feature (409)..(409): n is a, c, g, or t
gaagcaggcgaagcagatggtcggaggccagcaactacctgcacttgccgccaagagtgggcaatcttttaggtctctcgggaaggccccagcctccctccccactgaagaaaagaagttggtaaccacagagcaaagtccctgggccctgggaaaagcctcatcacgggcagggctctggcccatagtggctggacagacactggcacagtcttgctggtctgctgggagcacacagacattggcacagacttgctggtctcttggaagagggcaagaccccaaaccagagcaaaatacacttccagctcttaaccaggctccttccagtcacaagtgtgcagaatcagaacagaagtagtaccaatcaatgtcacatgaacaaacaagctgcccccagggtaccatntggggaggggaaatcttttctttctttcccccttaaaaaaaaacacatctgccccgaacactttcccactgttattctttcctcatatcccaacactcagaactcttgtgacattagccagtgggggcttatggttgtgtgaaccatgtatgaaaatccagtgggccccaaaccaaggagacagacagacttgggtctcttt

SEQ ID NO: 49809 - DNA, 529 bp, Homo Sapiens
atcatcttaaagtatgatttgatataatcttattgaaattaccttatcatgtcttagagcccgtctttatgtttaaaactaatttcttaaaataaagccttcagtaaatgttcattaccaacttgataaatgctactcataagagctggtttggggctatagcatatgcttttttttttttaattattacctgatttaaaaatctctgtaaaaacgtgtagtgtttcataaaatctgtaactcgcattttaatgatcagctattataagcttttaatagcatgaaaattgttaggctatataacattgccacttcaactctaaggaatatttttgagatatccctttggaagaccttgcttggaagagcctggacactaacaattctacaccaaattgtctcttcaaatacgtatggactggataactctgagaaacacatctagtataactgaataagcagagcatcaaattaaacagacagaaaccgaaagctctatataaatgctcagagttctttatgtatttct

SEQ ID NO: 49810 - DNA, 976 bp, Homo Sapiens
cccgggatgtgcagatatactagaaaatacagctgtctttgttccagtgaatatgtataaggggtgacatgccttggtggaaagcagctcagattgtgtggactcctcaatccctgctctaccaagagctctccagttccaaaactgtacactcagtggctatgttctgtgtgcctgctcccaatacagccattatgttgttcatccagatttgagaatttaagcttttcactcctctttgggtagtattatttaagtaagaacttctaggaaaatagtatgagtttggttatttttccctcggcagcaggaattttctgaatatttagcacattcagattgctccaagaacagcattgagcaatgctgtacatgtgctttctcctaaggctgtctcccctgtctcctgggttctggaaagactcattgtccttcagggaagggagcatttttcctcactgccattgctgagccttttctcctgttgtatactatttagcccagcatgaagccatcgccgactgtaaggagtgatggatagaagtgtttacttggtttgtgaggccttgtctctaaagggtaacagtctgacaaggaaaacatttcaaagagccctgaccaggcctggcttggtaactcactcctgtaatcccagtactttgggaggccgaggctggagaatcatttgagcccaggggttcgagaccagcctgggcaacacggtgaaaccccactctatttaaaaaaaaaaaaaaaaaaaaaargggggggssskgggssggggggggggggggtcattgggagaatttgaaaagttcaaacttttkamctcttcctactttaattttttaaawttaraatggaaggkgggaattatgcaatttggggraratgtamaaaaamcgcytcmcgactttctgggtttasgtaaaaaraatrtattdggggccccagaattgccaggaattrtttcttt

SEQ ID NO: 49811 - DNA, 886 bp, Homo Sapiens
agccctctgctgtaaggaggaaaactgaggcctgggagcaggaacctgtaggcagcgcttgaggaagggtcccagcaccatggaggacccgaaccctgaagagaacatgaagcagcaggattcacccaaggagagaagtccccagagcccaggaggcaacatctgccacctgggggccccgaagtgcacccgctgcctcatcaccttcgcagattccaagttccaggagcgtcacatgaagcgggagcacccagcggacttcgtggcccagaagctgcagggggtcctcttcatctgcttcacctgcgcccgctccttcccctcctccaaagccctaatcacccaccagcgcagccacggtccagccgccaagcccaccctgccggttgcaaccactactgcccagcccaccttcccttgtcctgactgtggcaagacctttgggcaggctgtttctctgaggcggcaccgccagatgcatgaggtccgtgcccctcctggcaccttcgcctgcacagagtgcggtcaggactttgctcaggaagcagggctgcatcaacactacattcggcatgcccggggggagctctgagtgcagcttaagcctctccacggtgacgggtggctctgtggctggtaggactcacccatgatatggggtgcaggaactctgggggccctgaaggatttgcttccctcccctgggaaggcagagggctctttataaagaggacccagaagattcttatttagagctttcgtctttggagcccacagggggccttcgtgagacagtggaaatcaaaaaaataaagaaaatcttttggttaaaaaaaaaaaaagggggaaagggagggggggaaaaaaaaaagggttttggggcccc

SEQ ID NO: 49812 - DNA, 886 bp, Homo Sapiens
  misc_feature (46)..(46): n is a, c, g, or t
cccagtagattcttatttagagcttcagtctttggagcacacaggngccttcgtgagacagtgaaatcagataataatgagatcttttgttaaaaaaaaaaaatgggaagggagtgcgggagagaaatggtttgtgtctcccttattcccagttaaatacctagctgcagattgtgccatcacccttcattcttcccagatggatgccatgggctatgggagcaaattgccctggacctttgcctgaatgggggcaggaaaggtgaggtgttgctggcctgtaatgccaccaggtgagttccagatgtggagcaacttgggcttttggggatggggcagcaaagttgggagctggaccccaattgagtgggggtagcaattggagtccttgtgtctcttttccaccccctgccatcctcacttagaggggccatggcactagatggcactagtcccccgataatttatgtctcgttgaaataattttgtatatcattctagtcctgaaatatttttttcatatgtgtaggtgaaatggtatgaataagctaacaggaatagtatctaaaaacagaaaacatccatattaaaatgtctaaacagggagctctggcttttgagtgggaatttccagagaacataagggtgtgggcaggtgggggaactcaggccagagttggcctcgcttttgggggaaactggttgggaatcaaacagagataccttctggtttcgggttttatttggagcaccactggggagattggccattaagaatcctatttagaggcttttttgaaaggcccaaccctaggctgaccttgtcagcagggggcaggccaagaattacaaacaggttggagggagccatgggtggtcccctcaa

SEQ ID NO: 49813 - DNA, 508 bp, Homo Sapiens
tgcacccctcccttcctggagggatggccagggaaggagaaaacagagaactgacacctttgaaaccacagaatgtgttacatgcagactcgctcaagggcataagttattgtgaacgtttttgccaatcactgctcaacagccctgctagattttgtatgatgctgaattattatgcagactaattccacccagttgagacacaccatgcttgttcacttgtatttattgaaactgtggattcttgcccgtgctgtcccttgtatttactttaagcactgatcacttatcattcattcggtatggttttccctgtcccttgtacacattctggtatgaatttgtaaaaataacctgctacaaattggttgaatgtttctgtctgtggtgcgaaccagcattaacggatggggcacgtgcccaactgaggaacaggagaagaaatcaccaatttgggctctcagagctaagacacacttattgattctgttgcacattttgcactggt

SEQ ID NO: 49814 - DNA, 576 bp, Homo Sapiens
cgggcaggacatggtcctaggaagcctgaaccttggcttggcatgccttctcagacagcacggcctgggctccaactcttcaccacaccctgtattctacaacttctttggtgttttgctcctcctgtggttggaaacttctgtacaacactttaaacttttctcttgcttcctcttctcttctcccttatcgtatgatagaaagacattcttccccaggaggaatgtttaaaatggaggcaacattttggccaacattggaaagcactagagggcaatgggattaaaccaacctgcttggtctctattagtcagtaatgaagacgacagcctggccaaccaagggaaaggaaattagtatctttagtttcagtcattccttgtaggatatggtttagctgtgcccccacctaaaatatcatcttgaattgtaatccctataatccccacatcaagggagagatcacgtggaggttaattggatcttcggggcggttcccccatgctggttttgggatagttctcacgagatccgatgatttattaagtttgaaaggtccttccgtgtccaatctc

SEQ ID NO: 49815 - DNA, 484 bp, Homo Sapiens
tttttttttgctttacaatttaatctttcacatgagggggagatgagctgttctttcccactaaaaattgctgctgtagaagttggaggtggagctgtgactggctgagctgctgtggccgggctgggcagtgtgcccaacagctcagtgctttcctgacactccagtgtcttggggtggttgaggagcgagttctctcttcctcccagaccaagttcctccctcgggtttgccttgagacgtgttgcgtttttgggccccgtggcctctccctgttaggctgccacaggcgctgcttctggaaggtgaacagctcctggctgctgcgtagaggttctcgttggggtcacaaagtgtgcccggctgctatgaaaaacgttgggaatcttggtttcagttttttattctatgctaggttgtacagacttatttatatcatcgttttgagggactaatggaggcttattgtaacatataatattag

SEQ ID NO: 49816 - DNA, 580 bp, Homo Sapiens
aatgagttagataaacttggcttgtctagagacccatgacatcttaacctaaagggaaatcttattgcgttatcataaaattgatgatatcttagggtcagaattgccctttttttttattttgaatgggaagttctcactaaaacaatcctgagatttcttaatttcatggttctttaaatattataaacacagagtcaacatagaatgaaattgtatttgttaaaatacacacattggaggacaagagcagatgactacttttcgaagtaatgctgctccttcctaaaagtctgttttcaatcctggtaatattaggggcactgcggcacctaagaagccttaaatgagagctaatccaatctagagagcgatggtgtcagcacttcggtctgcatatctgtgtgtccgtatctgcgtttgtgtgcgtgtacgtgtgcccctgtgtgtgggcccagttttcaggcatgtagaataagcatggagtcatattgaggaggactcacttcttgaagatatgcttgttgctttacaacatatgtaagctattctttagcataaatgcattcattctttaata

SEQ ID NO: 49817 - DNA, 761 bp, Homo Sapiens
taatagcaataagattgatgtgtgagtagcttgatttaaaatcaatgcaaaaagcacaactaataaatgaatgtttccatgtacctcactttatttcagttaacaagatactttgacttgaagtgtttttagtgtatccctatgaaaatcattttggtacatctaagttttcacttataaactgttatttcaaagcaaacatactagtgatatatatatgatttatggatgttgacgccaatgttcagttgggtacgtggtgtattgcaaggggagaggcttttataacaatagatttgaacatttttaaaaaatggactgtgtaacttaaatacacaattattggtttaggatggttattagggcccattagaaacaggagaagtattttacccattcttaaagctctaaaaaacatctcatggactgaaaggtagatagacagatggaccacaatgggaaataggatgtccatttgtacttcttgtgtacttttttgttgaataaactgttttttggaattaatggttaattggtgatatcatgttctagaaatacctggcaacatgacagtctaatcagtagtctattaaaaattgtattcataatgtgtataatttccgtggtaagggtaactcctgatcgttctgtagaaaagatgaccaattaagaaaagtttatcttttaacaaacacacaacacgcgccgaaacacggcagcaaaaaaaaaacaattttggcggggcgcccaaaaattaaacg

SEQ ID NO: 49818 - DNA, 641 bp, Homo Sapiens
ccctgcggtgctgcactttcctctggtcagcgactccttccgggagtactcggcccctggggtccggcggacacccgaggaggcggcagctggggaggtgaacctgtcttcatcggactctccctaccactacacgaaggtgacctacagccaggaggacgtggacaagctgctgcacctgacacattacaatgtctgcaacaaccaggagcagctgctggaggctctgcgccaggcagtgcagcggaggcggcagcgcaggccccactgatggccggggcccctgccacccctaactctcattcattccctggctgctgagttgcaggtgggaactgtcatcacgcagtgcttcagagcctcgggctcaggtggcactgtcccaggtccaggctgagggctgggagctcccttgcgcctcagcagtttgcagtggggtaaggaggccaagcccatttgtgtaatcacccaaaaccccccggcctgtgcctgttttcccttctgcgctaccttgagtagttggagcacttgatacatcacagactcatacaaatgtgaaaaaaaaaaaacaaaatcaatacacaactagataaataatcaatataataaagaataaagatagacaataagagagggggggg

SEQ ID NO: 49819 - DNA, 706 bp, Homo Sapiens
ctcgtggtgaaaggatctcaccctgggaagatgtggtgccccctccagggctctggaggatggatgcctcccccaggggctctccaagctgggcatttgggcctggtggatgccaacctggataacctgtggcccaacattgactgtccacccagccttgctgttaggcaccatgactccaagatgaagatgtggtccctgcccttgagtgacagcccagggacttaatgtggccatcgggcatcaagcacaaggccatgcaggtgatgatacgtcggaatagaggcaccagccctggtaactgcatcttctccccttgccaccccatggccccggctgaaagcttcggccctcctctgctgtcactcaatgatggggagccctaccccagaagtgtatcccacgagggcatcagggacgcagtgagtgttgctcaagggagtcaggaagagacggcaacgtaaaggatgtggctccatgtccatggcgccccctggtcaacataaggagcgtgggatccgatggaaaggtggagctcagggaaaatgggggtccttgcctctcgtgtaccccctcaaggctgaccccttagatggcccaggaatggcaggtgctacaaaaatggtacccacgtgggcatggaaatggggcagattatgggaccactggactcagaggggagggaatggctcatcagcacccgctc

SEQ ID NO: 49820 - DNA, 521 bp, Homo Sapiens
agcacaggtgaggaaggcagggaagccctgagcacaggtacgggcccccctcagcccctgcctccatctgcctgagacgcctatttttttttttttttttaaaccatgattttaatacgcaagctgtttctaaggcgctgccactggggagggtggctgttgccgcctgcccgggcatcctgctctggcaagcacagcctgagccattcctgcaggggtcccagggtgcagagacctccccacccccggttctgggctgggaccctggctccagggccatgtccagggctctggtgtttgcctgggttggtgcaggttgatgtgctggctgcaggcaggtgtgaccatctctcgtgcctgccacctctttgcccccaggcttttttgctgtgagggagccaccagggggtgatttaaataggtttatttcttcatttacaagaggaatatatttggcttctctcttaagactctgagattcacaatcagcagctctaaaaaataaaggagcagtttggctt

SEQ ID NO: 49821 - DNA, 819 bp, Homo Sapiens
  misc_feature (627)..(627): n is a, c, g, or t
ggttcagtgtatttgtatgaacctacaggatcatctaaatggactgactgaaactcgctaaggttaaatctgcatcaaaatctaaccattttgagcctctgaagggagtgccattggctttatttacttctctcctctgctagttctgatttggaaacagttaaaagccaatttttagctccagtggaaccatagccacataaaactttaatggacaaccatatagaattaacttattttgtccaagtacagttggcattttccagaataattttaccaccctgctagatgtcatctctggattgcacatggatgatgaaggaactcagcattgaaagttgggggattagtaaccttgttacaacggtttctttttcattttagcctattttaatggctattggtaagatactgtatgtttttagtatctcatccagtgcttagaagaaagaatggtttataattcccagtacatgtttatattgactgtgttcttatttttaaatcctttaaataaaaaatccttataagtttatgtaaagcaaaaaaaaaacaacacacacaaaacacctttttgggccccttggcgacccctaaaacagcttctgaaacccattccgtgtggcnccgggccccatctggtatcacgtcacccgtgcgcacaagcgggcacccaaagaaaacccgggccaggacaaagggcgggattctcccacagatataaaaaggcgcggggaaccggatgtgttggaaaaaaccgaaaggactcgaagcacaaaacggagtctacacgggccccagagaaccgataaataccgg

SEQ ID NO: 49822 - DNA, 580 bp, Homo Sapiens
catggagaacagagtgcagagcttttaccagcaggagctggaaatggtcgagtctttgctgtcccttgccaatcagcctgtgattcacagtgcctgctccgaccaagtgaattttaagaaggacaccacttccaaggcaattcatagtatatttaagaatgctatacaactgctgcaggaaaaaggacttgttttccagaaagatgatggttttgataacctatactatgtaaccagagaagacaaagacctgcacagaaagatccaccggatcattcagcaggactgccagaaaccaaatcacatggagaagggctgtcacttcctgcacatcttggcctgtgctcgcctgagcatccgcccgggcctgagcgaggctgtgctgcagcaagttctggagctcctggaggaccagagtgacattgtcagcacaatggagcactactacacagcgttctgagcagagacacgcagaccagctgaggaggacaaagataaggtggcattcacccccaggctctgactttcagcatcatgcaggggcttatctgtctggaggcagttacctcataataaacta

SEQ ID NO: 49823 - DNA, 593 bp, Homo Sapiens
  misc_feature (14)..(14): n is a, c, g, or t
ccccctggccaggnacacgcccctggtggaagccaccacctgctgcacgagagcgacacggacaaggatgggcggctgagcaaagcggaaatcctgggtaattggaacatgtttgtgggcagtcaggccaccaactatggcgaggacctgacccggcaccacgatgagctgtgagcaccgcgcacctgccacagcctcagaggcccgcacaatgaccggaggaggggccgctgtggtctggccccctccctgtccaggccccgcaggaggcagatgcagtcccaggcatcctcctgcccctgggctctcagggaccccctgggtcggcttctgtccctgtcacacccccaaccccagggaggggctgtcatagtcccagaggataagcaatacctatttctgactgagtctcccagcccagacccagggacccttggccccaagctcagctctaagaaccgccccaacccctccagctccaaatctgagcctccaccacatagactgaaactcccctggccccagccctctcctgcctggcctggcctgggacacctcctctctgccaggaggcaataaaagccagcgccggg

SEQ ID NO: 49824 - DNA, 692 bp, Homo Sapiens
  misc_feature (569)..(569): n is a, c, g, or t
tgtcgagttcccaaaaagctccgcaggggctgtagggaggttgaagcatatgaagaaaacaccagccttgaacagatacgtagcaggaaaagcgaggatcttacaagcctgctgaaaggctcctggggacatccaggggtcctgagaccacagtttgagaaagctgatttaaccatttttggattggtgggctgttaggttgtttaaaattttacactgttacaacccttgcaacagtgaaagttctttgtgatgttttctggtgtatgcgtgctagtgttttttctgtaagtagaattgctaggtcatagagttttgcttttttttaagtttgttaaacacattacttttgatgcctgtataatttgcttttgtgcactaatgttggtgtttagattgtttcaactaatgatttggtgaaatatctttgcatgtttttagttgttttgaattattttctttttgagggggctggggggagtccagtaaaaaccagacaactgccagatacattttaagagagctttaacacatggattcttttctaaaatttctaaaaagataattgntagatcaaatattaggaatctttctcaggctattggtacatattgtcacattgttttcatgggagatagtaccagtttgtttcctgtcagcagtgtctgacatgctttaaaaaaaaaaaaaaa

SEQ ID NO: 49825 - DNA, 821 bp, Homo Sapiens
gaacaagttaccagaaaaagtagcaaaacatgttacgttggttcgagagagtggctccttaacttatgaagaatttctgggagagtagctgagcttaatgatgtaacggctaaagtggcttctggccaggaaaaacatcttctctttgaggtacaacctgggtctgattcctctgcttttggaaagtggttgtacgggtggtctgtaccaagattaacaaaagcagtggcattgtggaggcatcacggatcatgaatttataccagtttattcaactttataaagatatcacaagtcaagcagcaggagtattggcacagagctccacctctgaagaacctgatgaaaactcatcctctgtaacatcttgtcaggctagtctttggatgggaagggtgaagcagctgaccgatgaggaggagtgttgtatctgtatggatgggcgggctgacctcatcctgccttgtgctcacagctttgtcagaagtgtattgataaatggagtgatcgacacaggaattgccctatttgtcgcctacagatgactggagcaaatgaatcttgggtggtatcagatgcacccactgaagatgatatggctaactatattcttaacatggctgatgaggcaggccagccccacaggccatgaccttgaagtgaaagtcttctgtgctattgtgggtcaaatatttggtcatgggggaagaagtagggttgtggcactggcccagacacggaaaattcattttcccaatctttattagctattctgatcactttgtccccttttaaaataactcccggttccaaaaaaaaaa

SEQ ID NO: 49826 - DNA, 701 bp, Homo Sapiens
cattagaccagccacagtgcctgattggtatagccttatgtgctttcctacaaaatggaattggaggccgggcgcagtggctcacgcctgtaatcccagcactttgggaggccaaggtgggtggatcacctgaggtcaggagctcgagaccagcctggccaacatggtgaaaccccatctctactaaaaatacaaaaattagccaggtgtgatggtgcatgcctgtaatcccagctcctcagtaggctgagacaggagcatcacttgaacgtgggaggcagaggttgcagtgagccgagattgcaccaccgcactccagcctgggtgacagagcgagacttatctcataaataaatagatagatactccagcctgggtgacagagcgagacttatagatagatagatagatagatggatagatagatagatagatagatagatagataaacggaattggagccatttgctttaagtgaatggcagtcccttgtcttattcagaatataaaattcagtctgaatggcactcttacagattttacttcaatttttgtgtacggtattttttatttgactaaatcaatatatgtacagcctaagttaatacatgttatttatatatgccaaaaaaaaaaaagacacaaaaaaaaaaaaaacattgcgggcccccaggggccgagaaaagatttacaaacaaagg

SEQ ID NO: 49827 - DNA, 614 bp, Homo Sapiens
  misc_feature (585)..(607): n is a, c, g, or t
ggcagaatgaaattttgatgttaaatgacatgtatacaaattcttccttaagtgaaagttatgctgcatcgaattgtaactgaaagtatagatccaacaaatagagactgggttctagagagttctggtctatagaaacccaaaactaaaatctctcataactcaagtatggaatactttttttaaagaaattcttatcatgggtgttgtaataatgaagacgaatttgactttatgcagtgttctgcagcatgcctcccccacatctcatagcaccaggttgtgtctgacctgacataccctgcagctctcagctggctgcagtaacattttgtgggagaaagaggagctggagttacagaaatgattgtctcttggttctcagtttttagcccttgagaggacatacttttccagcctcatgggtatggcactcttaattaaaatttcagtgactgtttactggatgaggcagatttttcacatttttgcaaattaaatatattttatatatattaagtttaattttttcagtttttttaatgtaaaagcaagtgaaattttaataaacttctgtaattaccnnnnnnnnnnnnnnnnnnnnnnnaacatgt

SEQ ID NO: 49828 - DNA, 542 bp, Homo Sapiens
gccagcctgccctccagcttttagagccgaagatctttttttctgagccccaaagccgtcatgatagtatgcccccagatcccatcagctaagaccctgtctctcccaggaacccgtcgtgtgaggttggggcttttctgccagtaaagccattctgatcacctcacccttgacaggggccaagccaatcacattagccataaatgaccaatgtcctcagccactcttttctcgggggtgcattcgtgggtcctattcatctctcgtcagttaatgtctctagtccttcctgtaaaggtgaaaataagcattgcgcatgtgcgcaacacacacacacgcacacacacacacacacacacacacacaaatcccagtgtctttttatgcatgtggtgagatgaaattgtgatctttgtgtgacctccagctgctgtcttgtcttgtaaaatatgtccaaatgtttaagaatttctaagcaaatggtcccttaatgaagtctgcagagttcaataaaaggtatggaaaaaaagaaaaaaaaaaaa

SEQ ID NO: 49829 - DNA, 580 bp, Homo Sapiens
caggctggactcggcccgagcagtgtggagcgaatacagccccgctttctctcactgcggtccacacgcgcagccctgcagggaatggagggaggtcactgagcaagtcctttgctctgtgtaaaaatgacgtgaaaggctgatcctgaaagtcattaggtgtcctttccatgaagttgtgccttcctcagaggcaagggggtggagagaaaaaggagcactttcaggcagaagccaagcagaacctgccacagctctgtcgtctggactcgccaggcccaggccacggccctccgggagcacagccgtccctccccgaacacagccgtccctccccacctgccccgccccgccccacccagagctgctgtcctcctctctctgccccgctcagctgttgctcgctcattccttaggtctcgggtgcactctctgccccctggtatgggaagaacttggcctcttttatccaccgcttcatctctgctggccagaacgggctggcatctcatagagcctctgtagaagcctccatgcaggggatgagtgatactcaatgtgaattaaaaaaaaaaaaaaa

SEQ ID NO: 49830 - DNA, 638 bp, Homo Sapiens
cgatctgaggtatcctaaaaatgcattttgtttcacttatgggctaaagtaccagcttagtcaggtaagagccctgacccacttcagatggtaacaccacttctcactgccttcagatggaatcacagatttcagtcacggcgcataacaaattgatcagtgagtggctaggcatctgcagataaattgtttcagccatagaagctccattagcacatatgcttccttttccccccttcctttaaaatcatctggaaagaaactattttgtgcccttggggactcctgtctgtctgttacagtttaccaagatggagctgggttaggaaagaagtgagggcccattttgtggttcaagtgcactagacagctgctggggtaggaagcacaggcaatgtctgcaatcagctgtgggagagcggtgactgagaacagtctgaggcctggctccacttggaagtatctggggtgcgatgaaatcacaattatcttgaagcctaaagagggaactacaagactgttaactaagatcaatgtgggcacctaaaagggtatgttaaaatcaccatttctcaggtcaaaatactgtgaataagtcttcaataaaatcactaatggttaaaaaaaaaaaaaaaaaa

SEQ ID NO: 49831 - DNA, 682 bp, Homo Sapiens
cccattactgaagtggaatcacaggtgttctcagaaaaacttgctactgacacctctacatttgaagctacctctgagggtaccttagaactgcagcagagaaatcccaaagcggagagactgaggtggtcccctgcccaggaggaaagtttcaggcagatggttgtcatccataaggaaattcccacagggaagaaagaccatgaatgtagtgaatgtggtaaaaccttcatttataactcacatcttgttgtccaccagagagttcattctggagagaaaccctataagtgtagtgactgtgggaaaactttcaaacagagctcaaacctcggtcagcatcagagaattcatacaggagagaaacccttcgaatgtaatgaatgtgggaaggccttcagatggggtgctcatcttgttcagcatcagaggattcactcaggagagaagccctatgagtgtaatgagtgtgggaaggcctttagtcaaagctcatatctaagtcagcatcggagaattcacagtggagagaaaccttttatatgtaaagaatgtgggaaagcttatggatggtgctcagagctcattagacatcggagagttcatgccagaaaagagccttcccattgaattgaaggggagaacgtctccagacagaattctacatcggtctaatctactt

SEQ ID NO: 49832 - DNA, 681 bp, Homo Sapiens
attcggcacgaggctcgacccaccacccattgtgatgaggtcctgcggctgatcctgacccacatggagccagagcaccgccttcttttacgcaggacctacgcaagaaacctgccggctttcgtgaacaggttggggatcctaactgtccggcacttaaagaggctggagagagtcatcattggttatctggaggtttatgatggacctgaggaggaagctagactgaagatattggaaaccctaaaacttctcatgcaacatacttggcccagagtttcctgcagacttgtggtcttactgaaggccctcttgaaactgatttgtgatgtagcaagggatccaaaccttacacctgagtctgttaagagcgccctgctacaggaggccacagactgcctgattctcctggaccgctgttctcaaggacgggtaaagggtctcctggccaaaattccccaaagctgtgaagacagaaaagtggtgaactatatcagaaaagtgcagcaggtttctgaaggcgcaccctacaatggaacttaagacttgtattactttcccaagaggaaaggattttcttcccatcccaatttgtatgaatggagttatttaagaaaaaaagatatttttacacgaaactttgtaagtgaaagctgctttttccttccttctttcctttta

SEQ ID NO: 49833 - DNA, 912 bp, Homo Sapiens
tacctcaagggaagtacaagttttgccaacagagcgaacaaaggtcagttcttacccagtggctctcatccccggacagttccaggaatattataagaggtactcaccagatgagctgcggtatctgccattaaacacagccctgtatgagccccctctggatcctgagctccctgctctagacagtgatggtgattcagatgatggcgaagatggtcgaggtgatgagaaacggaaaaataaaggcacttcggacagctcctctggcaatgtatctgaaggggaaagccctcctgacagccaggaggactctttccagggaagacagaaatcaaaagacaaagctgccactccaagaaaagatggtcccaaacgttctgtactgtccaagtcagttcctgggtacaagccaaaggtcattccaaatgctatatgtggaatttgtctgaagggtaaggagtccaacaagaaaggaaaggctgaatcacttatacactgctcccaatgtgagaatagtggccatccttcttgcctggatatgacaatggagcttgtttctatgattaagacctacccatggcagtgtatggaatgtaaaacatgcattatatgtggacaaccccaccatgaagaagaaatgatgttctgtgatatgtgtgacagagggtttatcatactttttgtgtgggccttggtgctattccatcaggtcgctggatttgtgactgttgtcagcgggccccccccacacccaggaaaagtgggcagaagggggaaaaacagcaaagagggataaaatagtttttgactctaatactgtatatgcaattaagtggaaatatttgggggccttttacacattaattttcatggccattaaaagatttttttttgcaaaaaaaaaaaaaaagg

SEQ ID NO: 49834 - DNA, 812 bp, Homo Sapiens
cacgcgtccgcgtatacttgtggaccgaatcttggagccgcaggatgtcgtcccgttcggagtcttcctctacacgttgggctgcgtctgtgccgcttgcctctactacctgtcccctctgaaactggcgcacttggctcttatctactttggaggcctgtctggctcctttctctacacaggaggaattggattcaagtacgtggctctgggagacctcatcatcctcatcacttttggcccgctggctgtgatgttcgcctacgccatccaggtggggtccctggccatcttcccactggtctatgccatccccctcgccctcagcaccgaggccattctccattccaacaacaccagggacatggagtccgaccgggaggctggtatcgtcacgctggccatcctcatcggccccacgttctcctacattctctacaacacactgctcttcctgccctacctggtcttcagcatcctggccacacactgcaccatcagcctggcactccccctgcttaccattcccatggccttctcccttgagagacagtttcgaagccaggccttcaacaaactgccccagaggactgccaagctcaacctcctgctgggacttttctatgtctttggcatcattctggcaccagcaggcagtctgcccaaaatttaaggggacaagtagctccccccacgacatgtctccctttcttagaatatattaaagtcagagtctctgaggaaggaatgtgatttggcagtcagggtactaagcatgggtgggaactcctgccttataaaaattgtttttg

SEQ ID NO: 49835 - DNA, 654 bp, Homo Sapiens
aggactttgattttaagccaaatccatctccatccctttactgtcaatcttctgtcccagtagtttagcctttgtggcttaggttatgatgcgcctccttctgtgcgaccaatgagacgacttcagcatctttttaaaataatctaagcatcattgaagcagtaacacaaaaaaaaggttcagtattttctttttagtataacttacatcctttcaaataagtctttgccctcatgaagaatccctagaggaagataaggaaaataagtattttccagttttgcttgacagtttctaaacaaacaaaaataaactcaatgaaaggaaagatgtttctttttagctgagatgacagattgcttctctgtattaaatagtctagaagttaaggggatggtcacatttaccatgtattgtgttattagcagttaaattttatgaatatgtttgtaaaattgttgttttatatttcatgtcaaattgaaaagtttatttcttcactattgtacctgtggaaatacaagccattttacaggaaaaaatcttcaaaaactattaaatggatatcagcctgtttgtgagccattgtcttcagattctgtgggtgtcactgagttcattaggacatttagtagggtgatacgagtagaactg

SEQ ID NO: 49836 - DNA, 611 bp, Homo Sapiens
tttttcagtgctgtaagaaaggacggaggctgttatctatggcagatctatccaataaaggagagaaaggaccgcatacgcctggttctcatcatatgcaataaagagtttgaccctctgcctccaagaaatggggctgactttgccatcatggagatgaagaagctgcttgaggatctgggttacagtgtggatgtagaagagaatctgacagccaggataacgtgtccaggagagacagcacaaggggctccatcttcatcacacaactcatcgcatgcttccagagatattcctggcgctgccacctagaggaagtattttggaaggttcagcaagcatttgaaagtccggaggcaacagtccaaatgcccaccatagaacgagtgtccatgacaagatatttctacctctttcctggcaactgaaaatggttaagcattgagagttgttggtggtgtatgaaataaatgaaagtgtgatattggaggaaaccacaagcagcccagccctcctttatcaacttcaagaaacacctttactagtacagattgaatgcttaacattttgtatttcaataaaggtgaagacaaatgaaaaaaaaaaaaaaa

SEQ ID NO: 49837 - DNA, 718 bp, Homo Sapiens
ccacgcgtcgcccacgtgtccggtctggaagcatgaggggagggggagagaggtcaggccaggcccgtgggtaggtccctggctcccagctggagataggaggcccaggtggcaggtagcaggaggcccagatcacccatcctcccctggggtcaggagaggccgagccccaggccactgtcactctttgtgggaggggacggggagtgaggttgggcagtgtggtggatgggcacccaggaagggttgaccagggaaggaggcagctaggctgtagatggaagatggtcctgggattcgaacaccgctgggatctggccagggtgctccctgggattcacagtcccttcccctctttgtgcccaagtgtttccctctctccctcaccaaaacaaaagggccatctctgccctgcacttgtgcagaaagtcagggatacggcaagcatgaatgcaatggtgtagagttgtgtgaaacccctagcatagagacagacagcgaagagatggtgtgaaaagcttgcagaaccagacagagaaccccacagactttccactccaagcacaggaggaggtagctagcgtgtgagggttggcactaggcccacggctgctgcttgggccaaaaacatacagaggtgcatggctggcagtcttgaaattgtcactcgcttactggatccaagcgtctcgaggataactaaagatcatgaaaaacc

SEQ ID NO: 49838 - DNA, 633 bp, Homo Sapiens
cggacatcaaagggagagagggtgtatcgggtcctgttccagccggcatcgccgggtggcttccaggcctcagagctgtgtggcagggccccctgctggggctggacatcactgcagtccagtgcaaagccgcccccagagcccaggtgtccccccaacctaaccagacctggtgccttgacgcccccaccccagctgggacggtacagagaagggtcttggtttcctctcctactcccttccttaggctcctgaactcgtttgctcctaaatcttgttaattctttttctctggattttggtttcttttggctttcccttgccttcccctttctctgtctccaacactctttccccatgtctttctggctgtctctatgttcctcttctcttatcctcaactttctgtccattcgggcctcctccccacctcccacgccccagcccctccctccttggtctccttttcgatatgccaaaccaattttgggtcgagtgcatttaacgagaacaaaacaaaaggctcataacaacaagaacgtttcagaaaaaaacaaaaagttttaaaaaaattgttgagtcaaaaagtcaaacaataaagaaattaagatttcttggaaaaaaaaaaaaaaa

SEQ ID NO: 49839 - DNA, 412 bp, Homo Sapiens
  misc_feature (362)..(363): n is a, c, g, or t
tctgaacccttggggacgagggcctgggccgcggtgaggccaccagaggcaggagtggccctgggggtcccgggcactgtcgcgcttgctgcaggcggcccagccgtgtatttatttttcacctatctccttcctgtcaaggcaggccgggctccagggctccccttgcgtggggcatgtaggtgggggaggcgtctgcaggtcacctggggggcccagccctctcccagccttgcctggctgagctgtgttccaggggagccctggacaagccctcataggcagggagggggtttccgaggccaggcatccgccgccccgtgtcgcatcctggaataaaatgtggctctggcatggttccnnaaaaaaaaaaaaaaaaaaaaaaaaaaaaaaaaaaaaaaaaaaaaaaaaa

SEQ ID NO: 49840 - DNA, 652 bp, Homo Sapiens
cccacagctcctggccctggtggaagaggtgctgccccgccatggcagtggccaccatggggcctggcacatctctctgagcaagcccagcgagaaggagcagcaccttctcatgacactggtgggcgagcagggggtggtgcccactcaagatgtcctttccatgctgggtgacatccgcaggagcctggaggagattggcatccagaactattccacaaccagcagctgccaggcgcgggccagccaggtgcgcagcgactacggcacgctcttcgtggtgctggtggtcattggggccatctgcatcatcatcattgcgcttggcctgctctacaactgctggcagcgccggctgcccaagctcaagcacgtgtcgcacggcgaggagctgcgcttcgtggagaacggctgccacgacaaccccacgctggacgtggccagcgacagccagtcggagatgcaggagaagcaccccagcctgaacggcggcggggccctcaacggcccggggagctggggggcgctcatggggggcaagcgggaccccgaggactcggacgtgttcgaggaggacacgcacctgtgagcgcagccgaggcgcaggccgagtgggccgccaggaccaagcgaggtggaccccaaaacggac

SEQ ID NO: 49841 - DNA, 608 bp, Homo Sapiens
tttcccttaatataacactgatgtatttgtaaggggcatttttaaagttgtactttaaaaaataataattcttacattcgtttgaaggttttttgtttgtttgtttgtttgcagtgagctgagattgcgccactgcactgcagcctgggggacagtgagactccatctcaaaaaaaaagaatagaataactcttgtttaggtgttacagaatccaggccagacaaatctaaactttaatctcatacccagttcctagatgagtcccttctccagctcaggctcggcctaagcctcagggttccttacttggtgggcaccacctgctcccttccccgcctttgttcctctttttcctctgctggctcctccggggttgggtgtgttcagaggcagagacaggctcaaggtctttggcttttaggttctgttgatgggtgagttccagatatagctttcttttgtaggatatttcatttatttatctattaaaaatatttatttagaacacaccattcatgtgccagaccctgttccaggcactggggagagggtgataaaatgagatcaacaaaaatacctgcccacattaagctcctgttctagggaa

SEQ ID NO: 49842 - DNA, 530 bp, Homo Sapiens
gcacgagcttcaagtcagagaagacaggacggggacagttgagggaaggctggagagatagtcatcagcctatcatgtgctcctacaagctggtgactgtgaagtttgaggtctgggggcttcagaccagagtggaacaatttgtacacaaggtggtccgagacattctgctgattggacatagacaggcttttgcatgggttgatgagtggtatgacatgacaatggatgaagtccgagaatttgaacgagccactcaggaagccaccaacaagaaaatcggcattttcccacctgcaatttctatctccagcatccccctgctgccttcttccgtccgcagtgcgccttctagtgctccatccacccctctctccacagacgcacccgaatttctgtccgttcccaaagatcggccccggaaaaagtctgccccagaaactctcacacttccagaccctgagaaaaaagccaccctgaatttacccggcatgcactcttcagataagccatgtcggcccaaatctgag

SEQ ID NO: 49843 - DNA, 679 bp, Homo Sapiens
  misc_feature (655)..(655): n is a, c, g, or t
taaaatctacgtaagtatacaaactagttgagggatacactgtttgcttttataaaataactttgattacatgaatataataaattatgtgcatataaatgtgtgtctatatgctttcctttaaatatgtttgaaaagatgtttgaaacttgattatactatttataattggcacagtactttgaattatgccagtactacattgtaaaacagagttgtattttttgatatttaacaatgcttaacactttaaatgccacttctgaggaatggacctggtgtaacacacttgaatatgtgtgatgccaaactttttaaaatacaatataaattatgcttatttattattttctttagtttaatcttggtcatgttttggtgtgtatttttaattttttttcttaaattaacactttggcatgaacattactgcaggtttttgatgaatataatgaatgtatggaattcaattgaatttgcatggtcttcggaattttttctgtgtgtataaatttagctgctattaacagaagagagaactttctgtgagtagccatgtgtgttgatcagatacagtttttctgagatcttcaattaatctcactttaaaaatgaccaaaacatgtctttcttgaattaactttgaataaaaggnttgtatattaaaaaaaaaaaaaaa

SEQ ID NO: 49844 - DNA, 543 bp, Homo Sapiens
ggcacgagggacaccatggctcagacatgggatcaggacccacctttgagatcccactgttagcaagaaaaggctgtccaaggcaggcagtgtggtagttgtctgattttgtttaccacacgccaggtcccagggaagtcttgcacagactcttagcagacaagcagggaaaagagagggtcctggtgggtggaaggattgggaaggggattctgggcctggaagcctgctccttcccctctcagccgtctcaggactactgttggattgcaaacagcatctctgacccagtcttcggactcattctgtaaatggaggagctgaggtcagaggggggctgtgaactactcaagaccacatgcttgcagtcctacaggcttcccgacccacaggccagctacggattttgcacttttgctccaggccacttgtgtgtgtatgtgtgtgtgtaccactgccatctgaacaaactatgcaataccacctgctcccttccaggagcgttttaataaaagattttttttaataacagaaaaaaaaaaa

SEQ ID NO: 49845 - DNA, 724 bp, Homo Sapiens
  misc_feature (640)..(640): n is a, c, g, or t
cctgagccgctgcccctcttcggctacaccgtctatggggtgctgcgagtgagcatgcaggccctgtccggacccactctcctggggctcaaccgccagcatctcatcctcatggaccccagctcccagagcctgtactgccgcattgccctgaagagcctgcagcggctccacctgctaagccctctggaggagaaggggccccctggcctggaagtcaactatggctcagctgacaacccccagaccatctggtttgagctgccacaggcccaggagctgctatacaccactgtcttcctgatagacagcagtgcctcttgcactgagtggcccagcatcaactgagaggagtgcaggccggggagagaagaggatgaggcctcccccggcccaagtctcacccacatggtctgccttggatgctatcagatcactgttctagaacctgcctcagcacagcccagccggcccacatgcaggccatgaggcaggggctgctatcacgtcaccagcaggcaaagaaaacagccagaccctctccaggacggcctggggccaaagcgggctgcaggaactcggctggggcacctgaggttgcccagtctgagggagatgcccacccgaccccaggctccgnccaggccccacattagcacaagcccaggcatgggagaaacagctgctgaggaaataaaactccctggagaaaaaaaaaaaaaaa

SEQ ID NO: 49846 - DNA, 538 bp, Homo Sapiens
ttgaatttaggtgacactatagaagagctatgacgtcgcatgcacgcgtacgtaagcttggatcctctagagcggccgtactactactaaattcgcggccgcgtcgacaaaaacttttcccacacttggtgcctaggccctgttcctaataaccccttctagggccgtttatccaacatttagatgccttcttttccctccctaatttgtagccagtccaacctttcattccttggaggatttagttttgggataaaattttggtccttgggcacagagacattcactattaatgaagtaacccttgggcatgactccaatcccagaattgctcactgagcgctatgccaccgaagcgttgacctgaacatattagtgcaatccagtccagattggacctttgatcctatgtggaagggctgttttttaagaaaaaatttttggtaaacagtattgtgtaaaattgctttttgtataccaatatatgcatgttttgtgcatgagtagtacttgtgttgatactcctgtggatgttaaa

SEQ ID NO: 49847 - DNA, 677 bp, Homo Sapiens
caagaagcagtaagagtgtaaagaggatgctgccctgggcaggccagtccagcctggccactagcagaataccaagcagtccagtggattaccctcgtggctaagcaagtgtctgcaggagcagagatggctggaaggggcctctgcacacggaagatggcttgttcagcccattcacctcctgaggatgtgggcagtctcctccaagaacacatggagctgcttcctgatcccaagcaggtcattgccactggaaggacatggccccggtgatccatgcttcatgcccacccagaaacacacccctcagtgtgtgcctcagtttactttggagatcagttgtcgtttttagtgctcctttaggcttactaaaacagttttggaaacaaagctattttgaagtattcaagcagaggaattccctaacactgacccccttgtctttttttaatattcaggctgttttatatgcctaaatttttttcttaagatctaaacgaaaaatagtttcttgtttaaattcacataaggcaatgagatatggaaagatgacaagatacgtataaacattggtttgcattttattaaattattctaatgcaaatcttgtataaagaacccatgatgttttgtaactttctaattaaaatgttcaaaatgagaaaaaaaaaaaaaaa

SEQ ID NO: 49848 - DNA, 672 bp, Homo Sapiens
  misc_feature (484)..(484): n is a, c, g, or t
caaggaagcaggtggatcccccagaaggaaccgcagctcgcgaggcacctctcctcgtccccacccacccccacatttgcacaccttccacagggtcaggatggagtagctgccttgcgaggtggtgagactcctgtctctggaggtctgcaagcactggtagtgatattgcagcagacaaggtctgggttgggcgtctgcaggaggagaccttgtgggacatctgaggacatccgcagattcttgtcagcctgtgaactaggccctgcctctgtcacctcattggtccatgaaggagcagccaggggtggtggaaggagcactgggctaggggtcaggggtcagagattctgtcctgctcctgggatgcactggctactcccttagtctactcccttcccctctctggtcctcagcttcctccatcatggaggagatgggatcatggattttctgggcataagtggctgttctgggagttcantttccccaacacaggaaagcaagcaaactttaaaaaaccttccccttgaaattccccaaacaaaacatccacacatataaaccatacacacaaacatcaacaaaacacaacatatcatacattcacatcaacataacatatcaagatccacatcacacccatctcacagacaattaaacacatcacta

SEQ ID NO: 49849 - DNA, 499 bp, Homo Sapiens
tttccccagagttgtccatactgttttacattcctaccagcaatgtccgaataatctggtttcttcatacccttgctagccattggatgttgtcatttttttattttagccatttttatatgtgtgtagtaatacctcattgtggttttaatttgtatttatctaatggctgttgatggtgaacatttttttcatgtgcttatttgtaggagaggctttttaaaaattataaatttcaagcctttttttctgattatgaaaaaatactgtatatatcataaaaatgtacgcaaggaaaaaataaagattgctatgattctgttaccttcaggtaatcactgttaaatttggtgcattttatcctaacctgtaaagttatgttatttttaaaaacaaaattgagattataatgtttatattacttgtaaattttttccatcttaatatgttagccttttcagtgccattaaatttggccatatgtaactgaagcttaaaa

SEQ ID NO: 49850 - DNA, 735 bp, Homo Sapiens
cacagttggtgtcctgtcactttgttttaaaataagctagaaccaggatgcttccttattggaaaggctttgccagtccttaaggtacaatgagtgatgctgcaacttgcaaatgtaccagcatttaaaatttcttttcctgggaatcaaggtaactcacacgactacttgcagtacaaattttttgcttctctttcgacatgaaatgtacttggtgggttttccttccttttattaaactaaaactgtgtggaaaaggttgatttttcttaatagattctggattccactcacagggagatgggattcctttcttgtccaaacaaagggagttgctctaaagcgagcatcagttaaaatgtaggggaaaatgtattctgtatgtagtgtagataatactttgtgaatggacaacagttacatagtgtcttggtagcaccagccagtgtttcccagcccagagtttactgacttgtaattctctatccaggacatcaggagtgagggatggaaaaggggataaaaggcctggagccacactctatatggctgaggaaggagctagggaaagagatagacacaatggggtgaaaacaattttgccgcccctgcctggaaactgctggtggggaaatgatggtgaagggtgtttgcttgaactcatgagacggtccaaatctcataaactagccttctcaaaatcccagcaatataaaagcactgtttttcttcagt

SEQ ID NO: 49851 - DNA, 657 bp, Homo Sapiens
cccacgcgtccgcccacgcgtccgctttccaagggtgtatgaaatagacatcacagatgcgagtgttgttcgctgcctgtggcatccaaagctgaaccagatcatggttggaactggaaatggattggctaaagtctattacgaccccaacaagagtcagaggggagcaaaattatgtgtggttaaaacccagcggaaggcaaaacaagctgagactctaactcaggactacatcatcacccctcatgccttgcctatgttccgtgagccccgccaacggagtacaaggaaacagctggagaaggacagactggatcccctgaagtcgcataaacctgaacctcctgtagcaggcccaggtcgtggtggccgagttggaacccacgggggcactctctcttcctatattgtgaagaacattgctttggacaagaccgatgacagtaatcctcgggaagccattttgcgtcatgccaaagcagcagaagacagcccatattgggtttctccagcatattccaagactcagcccaaaaccatgtttgcccaagttgaaatctgatgatgaggaagcaaagaatgagccagaatggaaaaaacgtaaaatttgaagaatctcatttgagagctgtttgcatgagtgggaggggtatggga

SEQ ID NO: 49852 - DNA, 558 bp, Homo Sapiens
gaaggtgtttgctccatgacagcattgcccggcatccagctccagaagatcccgactggattaagaggttactgcaaagcccctgccctttctgtgattctcctgtcttctaaataatcagtgacgggaagatggaagggcatgatgaactctgccataaaaaacttcctccagcctgaagagaaggatgcactggaggaagccggaccctcacgagtggagagaagtccttggtgattgtaaagagggcccctggagctcatttctgaatcgcactctccatttccagagactaaaggatgtcctttgaaatggctggactcagagagttggagtcgttttgagatgagcattagccccagctttgtaaccaatgaggaacacttacttatttttaagtatcttgacagaagcaatttgaacacagtgtcccgtcatttctagaaacagaatggtctcttctagagagcttggataaggaccttgctgggttgagttaggttttaatccttgctttggtttggaactgccttcgggctccaaaacttaaattgcttg

SEQ ID NO: 49853 - DNA, 675 bp, Homo Sapiens
tgtggattctcagctttatagatatgtgaagatgggctgactaaccttttaggagcaagattatatttgctccaaaagtgtgacaccctatgttatacaatagatgttgaaattaaattagatgaagaaggattgtatgccatccacagctaatgaagatatccataaaaggatagcactgtgtattgatggtccaaaaaggtttgctccaatagcaaacacttactggggaaagaagctattaaacaaagacacctacagttactcggttatcaagttgttcagatcccctatcatgagattgggatgctaaaatcaagacgtgaattggtggaatatttacaaagaaaactgttttctcaaaacactgttcatggttgcaagaatgaatactgacttcagaactcaaacaacggaagaacttgcatttttatggaactcagtattaaaagaaaaatataatgtgaattagccacttgcagaatatgttctagactggtgatctgaaagcatctgtagttttccttatactatgtatacatttatgtggtaaaatttaaaaattacttttaatttaatactagtgtcatagatacttttggtacatcaacaatgatcatgtgctgtaaaggaatccatgatcaatgttattttacgtaaacaacaacaaaaggg

SEQ ID NO: 49854 - DNA, 685 bp, Homo Sapiens
gagcgctctctgtgtgccagagagccagagacccaagacagggcccgggctctggacctgggtgcccccctgccaggcgaggctgactccgcgtgagatggttggttaaggcggggtttttctggggcgtgaggcctgtgagatcctgacccaagctcaggcacacccaaggcacctgcctctctgagtcttgggtctcagttcctaatatcccgctccttgctgagaccatctcctggggcagggtccttttcttcccaggtcctcagcgctgcctctgctggtgccttctcccccactactactggagcgtgcccttgctggggacgtggctgtgccctcagttgcccccagggctgggtgcccaccatgccccttcctctttctcctcctacctctgccctgtgagcccatccataaggctctcagatgggacattgtaggaaaggctttggccatggtctgggggcagagaacaaggggggagacacaagtagacctcaggtagaacgacactgggcggagccaccccagggcctgctcccagggagtgctcgaggcgcatcaggcccgttttttaccagtttatatcacggtcttcatttttaaaagtaacgctaactttgtacggacgatgtctcatggattaaataatattctttatggcaaaaaaaaaaaaaaaaaa

SEQ ID NO: 49855 - DNA, 448 bp, Homo Sapiens
tgagtggatctactgacataagatggcctgtagcaatgaggctgtgcattcctaaaggacaaaagcaaagaagctatttaggaatttacaggccaaagtcttcatttattgcccagtccatttaaagacccatgcaagagcctggtttgtcatccctgccctagcccaatctgaggctaagattggtaaactgtaagcccacacttaaccttgtcaataggttcttgaaaacttgtacttcaagagaaatgatgtataacaaaaccatactttttctcatcagttgttacaaggaaaggatgttgaacaaaaggcagttatttgaggactggctatacactgtttcacgtaaaagttggagttttcattgttctattaacaatgttaaatgaagacttactgtattttgaaaaccatcattaccttctccataccatttggctcccaa

SEQ ID NO: 49856 - DNA, 583 bp, Homo Sapiens
  misc_feature (565)..(565): n is a, c, g, or t
gtacgtattagctgccatcagcctctacttggatatcatcaatctattcctgcacctgttacggtttctggaagcagttaataaaaagtaattaaaagtatctcagctcaactgaagaacaacaaaaaaaatttaacgagaaaaaaggattaaagtaattggaagcagtatatagaaactgtttcattaagtaataaagtttgaaacaatgattaaatactgttacaatctttatttgtatcatatgtaattttgagagctttaaaatcttactattctttatgatacctcatttctaaatccttgatttaggatctcagttaagagctatcaaaattctattaaaaatgcttttctggctgggcacagtggctcacgcctgtaatcccaccactttgggagaccgaggcaggtggatcacgaggtcaagaggttgagaccatcctggccaacatggtgaaaccccgtctctactaaaaatacaaaaattagctggatgtggtggcacacacctgtagtcccagctagtcaagaggctgaggccagagaatcgcttgaacctggngaggtggaggttgcattg

SEQ ID NO: 49857 - DNA, 1115 bp, Homo Sapiens
  misc_feature (730)..(730): n is a, c, g, or t
  misc_feature (815)..(822): n is a, c, g, or t
  misc_feature (824)..(829): n is a, c, g, or t
  misc_feature (831)..(856): n is a, c, g, or t
  misc_feature (858)..(867): n is a, c, g, or t
  misc_feature (870)..(878): n is a, c, g, or t
  misc_feature (881)..(887): n is a, c, g, or t
  misc_feature (889)..(889): n is a, c, g, or t
  misc_feature (891)..(891): n is a, c, g, or t
  misc_feature (895)..(895): n is a, c, g, or t
  misc_feature (902)..(902): n is a, c, g, or t
  misc_feature (909)..(909): n is a, c, g, or t
  misc_feature (920)..(920): n is a, c, g, or t
ttggatattaaagaatgtaacattgttatccgttatggtctcgtcaccaatgaaatagccatggtccaggcccgtggtcgagccagagctgatgagagcacctacgtcctggttgctcacagtggttcaggagttatcgaacgtgagacagttaatgatttccgagagaagatgatgtataaagctatacattgtgttcaaaatatgaaaccagaggagtatgctcataagattttggaattacagatgcaaagtataatggaaaagaaaatgaaaaccaagagaaatattgccaagcattacaagaataacccatcactaataactttcctttgcaaaaactgcagtgtgctagcctgttctggggaagatatccatgtaattgagaaaatgcatcacgtcaatatgaccccagaattcaaggaactttacattgtaagagaaaacaaaacactgcaaaagaagtgtgccgactatcaaataaatggtgaaatcatctgcaaatgtggccaggcttggggaacaatgatggtgcacaaaggcttagatttgccttgtctcaaaataaggaattttgtagtggttttcaaaaataattcaacaaagaaacaatacaaaaagtgggtagaattacctatcacatttcccaatcttgactattcagaatgctgtttatttagtgatgaggattagcacttgattgaagattcttttaaaatactatcagttnaacatttaatatgattatgattaatgtattcattatgctacagaactgacataagaatcaataaaatgattgttttactctgaannnnnnnnannnnnnannnnnnnnnnnnnnnnnnnnnnnnnncnnnnnnnnnnccnnnnnnnnnccnnnnnnncncncccnccccccnccccccnccccccccccncgggggggccccgctcaaaaaatcccctggggggcccccatttatcccgcccccccttttttttataaaaggggggcccccatggggggccttttttaaccttgggcctggcccccctttttaaaccgcccgggttgggaaaacctcctcctgggggtcttttgggagggacccctattttctggggggaggaaa

SEQ ID NO: 49858 - DNA, 850 bp, Homo Sapiens
agggaatccagctcctgaatacacatggtttaaggatggcatccgtttgctagaaaatcccagacttggctcccaaagcaccaacagctcatacacaatgaatacaaaaactggaactctgcaatttaatactgtttccaaactggacactggagaatattcctgtgaagcccgcaattctgttggatatcgcaggtgtcctgggaaacgaatgcaagtagatgatctcaacataagtggcatcatagcagccgtagtagttgtggccttagtgatttccgtttgtggccttggtgtatgctatgctcagaggaaaggctacttttcaaaagaaacctccttccagaagagtaattcttcatctaaagccacgacaatgagtgaaaatgatttcaagcacacaaaatcctttataatttaaagactccactttagagatacaccaaagccaccgttgttacacaagttattaaactattataaaactctgctttgtccgacatttgcaaagaggtacacgaggaaatggaattggtatttcattttaattttcatgactactaactcacctgaacttgctattttaaacaaatagttctgtcgacacctaaaatataatctggcttcttgtgtctggactaagttaaaagaattaaaatactttgtaatgtcctgggctttgggaaatgttaaccacgtcctaacttctagagaacgttactaaaatataacatactgattgtgaagtcaatccacaggtcatgaaaatataaatcagactctgcacgagagtctgatttagggggtccaacaaatactctgacagatgcaaaaggaacctctggtctca

SEQ ID NO: 49859 - DNA, 936 bp, Homo Sapiens
  misc_feature (726)..(726): n is a, c, g, or t
  misc_feature (838)..(838): n is a, c, g, or t
  misc_feature (880)..(880): n is a, c, g, or t
  misc_feature (894)..(894): n is a, c, g, or t
  misc_feature (896)..(897): n is a, c, g, or t
  misc_feature (910)..(910): n is a, c, g, or t
gcgatggcgcggagcgtgcgcgtgctggtggacatggacggcgtcctggccgacttcgaggccggcctcctgcggggcttccgccgccgcttccctgaggagccgcacgtgccgctggagcaacgccgcggcttcctggcccgcgagcagtaccgcgccctgcggcccgacctggcggataaagtggccagtgtgtacgaagccccgggctttttcctggacctggagcccatcccgggagccttggacgctgtgcgggagatgaacgacctaccggacacgcaggtcttcatctgcaccagccccctgctgaagtaccaccactgtgtgggtgagaagtaccgctgggtggagcagcacctggggccccagttcgtagaacgaattatcctgacaagggacaagacggtggtcttgggggacctgctcattgatgacaaggacacagttcgaggccaggaggagaccccaagctgggagcacatcttgttcacctgctgccacaatcggcacctggtcctgcccccgacaaggagacggctgctctcctggagtgacaactggagggagatcttagatagcaagcgcggagctgcgcagcgggaatgagcggggatgccgcgggcagcagctggagctaaaggaagggcaggcccacaggggccaccgcagagccgagtcggggcggcatcgtgctggtgcctctggccccgtggagtggagcangcagataccgttaagcgctgtgctaccgggcccccaggccagccacccggtacctcccgagaagctgtcccctggaccctggctggcatggaaataccgtgggaaaaaccantcgggaccctttaaataaaagaactttggcgtttctaatccnaaaaagaaaagagnanncggggaagaaganccgggcaaaaaaaacttccagggctc

SEQ ID NO: 49860 - DNA, 896 bp, Homo Sapiens
ggccctcagcacacggttgctgctgttgatcttctggttcctggagttggggaactctttggaggaggcctcagagaagaacgataccatttcttagaggagcgcttagccaggtatctggaccttcgtcgatttggatctgtgccacatggaggttttgggatgggatttgaacgctacctgcagtgcatcttgggtgttgacaatatcaaagatgttatccctttcccaaggtttcctcattcatgccttttatagctggaagattggttaaggaaaagcaccccccatggcagagacactgcacatgattgtgcatacagcagaatgcatgtttggattttagaaatgcagatttcaatatgtaattgttgtgccataagatatcatagaaaaaatataagtggttgtgattttcttagaaagttgagggtatttcacgtaaggatgagctcccgcaagaagaggtacttatagcaaggggactctcaaatccattacctcaattaagaaatgaagaaattgaattagtctcaaagtttcttttaaactctaaaacagaatgagataatgtattttacgttgtctataatcattaaatcactccctgtgtaattggtgagaaccatctagtagctcgaacataaaataatgttgcatcttttctcccttgccatatactttgtgataaatccttaatctcaattttcaggtaccttcattaaaacattgcaggaaaacaaacatacaaacacaaaagaatgaaaaaagccaacaaaacaacaagaacaaaaaacaaacacggacggggcgggggcagcacacaaaagaaccccgtcgggggggggaccacagaaagatgcagccacagaattatgaaaaacaaggggcgcaaa

SEQ ID NO: 49861 - DNA, 620 bp, Homo Sapiens
cacgaggcggacggtgcttttcggtgcaaggaaacttacagaaacatgaacgcatccacctgggcttgaaggagttcgtctgtcagtattgcaacaaggcattcaccttgaatgagaccctcaaaatccatgaaagaatccatactggagaaaagcgttaccactgtcagttctgctttcagagatttttgtatctctccaccaaaaggaatcacgagcagaggcatattcgggagcataatgggaagggctatgcctgcttccagtgccccaaaatttgcaaaacagctgctgcccttggaatgcaccaaaagaaacacttattcaaaagcccaagtcagcaggagaaaataggtgacgtgtgccacgaaaactcaaatcccttggagaatcaacatttcattggttcagaagacaatgaccaaaaggataacatacaaaccggtgtggaaaatgttgtcctttgagtggcaagaattagaaaaatcttcaaaaatatagttggtggtttttttagttatgatttaagtttagtttcattttgtccatgtgacagtcatgaaggagtgaaattaaaaaaaaaaaaaaactcatttgtgaaaattccagaaaaaggatcc

SEQ ID NO: 49862 - DNA, 488 bp, Homo Sapiens
cacgaggggtttttttcctttaaagagaatagtgttcacaaaatttgagctgctctttggcttttgctataagggaaacagagtggcctggctgatttgaataaatgtttctttcctctccaccatctcacattttgcttttaagtgaacactttttccccattgagcatcttgaacatactttttttccaaataaattactcatccttaaagtttactccactttgacaaaagatacgcccttctccctgcacataaagcaggttgtagaacgtggcattcttgggcaagtaggtagactttacccagtctctttccttttttgctgatgtgtgctctctctctctctttctctctctctctctctctctctctctctctgtctgtctcgcttgctcgctctcgctgtttctctctctttgaggcatttgtttggaaaaaatcgttgagatgcccaagaacctgggataattctttactttttttga

SEQ ID NO: 49863 - DNA, 644 bp, Homo Sapiens
ggcatgagtttaacccagtctaggctttgagtgtggctgatagcgaaggatagcaatgtggaaaatttgcttagtcccacctgtatttggggagtgggatgtacatgggcgtttgataccaccattgataggcaagcgactggttggatcaaaagccagtatttagggatctgcagcgagagggccctcaggaagactcttgtaaccatgtgcaatatgtttttattctgactcgcagcttgtgctcagcatgttctttggtttagtttggggttgggggacacattgttcacccagcagaactgggaggtgcaaaggaccgtggaagcaatttttgttttgtttgaggaatacctgtcttggattccttagccccttgccagtcctggagactgtggcaggggccgccaggaaggcagctgtctgctgctgagtcagatcggaaggtggtgaatctttccagagcagctgaaaatctcagcatggagacagtaagaaaagagacggggtgtggataagactctgccaccgtgtcacactagcataggaggctgcacgttcatttgttgttgtttttttttcctttgccaacctccgttctatttatgtgcaagcagtttggcataggaaaaaaaaaaacgcgg

SEQ ID NO: 49864 - DNA, 780 bp, Homo Sapiens
aaattgtgaactttgtccagaagattgtggacaacggttacggctatgtctccaatgggtctgtctactttgatacagcgaagtttgcttctagcgagaagcactcctatgggaagctggtgcctgaggccgttggagatcagaaagcccttcaagaaggggaaggtgacctgagcatctctgcagaccgcctgagtgagaagcgctctcccaacgactttgccttatggaaggcctctaagcccggagaaccgtcctggccgtgcccttggggaaagggtcgtccgggctggcatatcgagtgctcggccatggcaggcaccctcctaggggcttcgatggacattcacggaggtgggttcgacctccggttcccccaccatgacaatgagctggcacagtcggaggcctactttgaaaacgactgctgggtcaggtacttcctgcacacaggccacctgaccattgcaggctgcaaaatgtcaaagtcactaaaaaacttcatcaccattaaagatgccttgaaaaagcactcagcacggcagttgcggctggccttcctcatgcactcgtggaaggacaccctggactactccagcaacaccatggagtcagcgcttcaatatgagaagttcttgaatgagtttttcttaaatgtgaaagatatccttcgcgctcctgttgacatcactggtcagtttgagaagtggggagaagaagaagcagaactgaataagaacttttatgacaagaagacagcaattcacaaagccctctgtg

SEQ ID NO: 49865 - DNA, 244 bp, Homo Sapiens
atccttactcaaaaaaactccgcttttactcttgaatctctgatttcatgaatgctcccccatccatcccgaggcgaggaatcttgcactgtctttggaaggacaggaaaggatgggagaggggctggaagcattggctagtagatgatcgaggctttctataccaccaccaaggtgtgtaattttctcatcatcctggttgtgtcaggctgtccctagagatcaccctgacctcagtgtttaa

SEQ ID NO: 49866 - DNA, 1131 bp, Homo Sapiens
ggcagggccgggcagtgaagagcctgcatttcctctacgcccaggttccggaaggtggtgagacaggccagcgtgcatgacagtggagaggagggcgaggcctgagccctcacacatgcccacgctcccctgacactgaagaggatccacaactccttggagaaacaccctcacgtctgttgccgcacacattcctctcagctccgccccatacccgtcactacagcctcacctcccacccctgtcactacggcctcacctcccacccctgtcactacagcctcacctcctacagccttaagtcccaggcccatgtctgcctgtccaagggctcaagactttctaactgggatgtggtagagggactgaaggtacctttgggggcaacagcaccctagtttcattctcaactctagccctgcacactcacctgtggcacggaatgaaaacagagcttcccatgcaaaaagggtcacgcctcccacccccgccccctccctgcacctcctgtcctctcccagttcattcctggaaccagccaggccaggcaaccagtggcccccaaaggcaggcaggatcctcaggccccagccgcgggaggctggaagggctggcagatcgcttccctcatccacctccaccggtcaggtctttgctgctgtccccagactcctgtgacaccacgccagatcacagggcacaggccagagatagtcttccttttgtcctttctgggcctctggctagtcacgtttcatagccttacagtatctggctttgtacctgggaaataaacccatttcactaacaaaaacaaaaaaaaactccggggacactaatgacgggggcgaaacaacgggtagcaatgcgcagtgccctagatggttcgtgacccacagtttttggggaccacggggcgaacctcgcggggccccaaaagggaggcgagaaattccgaaccggtggaacacacgtagaactagaatagcagagagcaagaagccaactcacaagcacgaacacaatacagcagaagcagcagacacagacaaagcacaagagaacacacatcccgagcaacagaaagaacagaatcaagccaacacacacaacaacagagcaagacgcggg

SEQ ID NO: 49867 - DNA, 629 bp, Homo Sapiens
  misc_feature (594)..(594): n is a, c, g, or t
  misc_feature (605)..(605): n is a, c, g, or t
  misc_feature (607)..(607): n is a, c, g, or t
  misc_feature (610)..(614): n is a, c, g, or t
  misc_feature (617)..(623): n is a, c, g, or t
tctagatcgcgatctagaactagtcactattgcttccaccaaaggttcttcctcagacatggaaaagcgactcagagcagagatgcaaaaggcagaagacaaagcagtagagcataaggagattttggatcagctggagtcactcaaattagaaaatcgtcatctttctgaaatggtgatgaaattggaattgggtttacatgagtgttccttgcctgtatctccccttggttcaatagctaccagatttttggaagaggaggaactgaggtctcatcacattctagagcgcttggatgcccatattgaagaactaaaaagagagagtgaaaagacagtgagacaattcacagccttaaagtagcctcttaaaaaaatcacaatcttggaaataaaaataaacaccaaagagttactgtcatctgaagtagcagctctttaaaaacatgaagagataaaattataaaaatgatacatctaaagcagtggtgaagaaagctgaaaaactgatacttttgataggcattttctctgcactggtttgtttaaaggacttcttccagcaataagttgaaagaataaaccactttgctngaaaaaaaaananaannnnnaannnnnnnaaaaag

SEQ ID NO: 49868 - DNA, 972 bp, Homo Sapiens
gatgcggcgcccgtaagcggacgctgttaggggtggcggggggttggcggcggttcgagaggctctgggccggcagtctaagctctcgcagcctggctcttgcagccgcaccctcaagcaacggatccccatggcgcttgttgggcgcgttgtgcctgcagcggccacctgtagtctccaagccgttgaccccattgcaggaagagatggcgtctctactgcagcagattgagatagagagaagcctgtattcagaccacgagcttcgtgctctggatgaaaaccagcgactggcaaagaagaaagctgaccttcatgatgaagaagatgaacaggatatattgctggcgcaagatttggaagatatgtgggagcagaaatttctacagttcaaacttggagctcgcataacagaagctgatgaaaagaatgaccgaacatccctgaacaggaagctagacaggaaccttgtcctgttagtcagagagaagtttggagaccaggatgtttggatactgccccaggcagagtggcagcctggggagacccttcgaggaacagctgaacgaaccctggccacactctcagaaaacaacatggaagccaagttcctaggaaatgcaccctgtgggcactacacattcaagttcccccaggcaatgcggacagagagtaacctcggagccaaggtgttcttcttcaaagcactgctattaactggagacttttcccaggctgggaataagggccatcatgtgtgggtcactaaggatgagctgggtgactatttgaaaccaaaatacctggcccaagttaggaggtttgtttcagacctctgatgggccgagctgcctgtggacggtgctcagacaagtctgggattagagcctcaaggacattgtgtgattgcctcacatttgcaggtaatatcaagcagcaaactaaattctgagagataaacgagtytattac

SEQ ID NO: 49869 - DNA, 729 bp, Homo Sapiens
  misc_feature (11)..(11): n is a, c, g, or t
ccaatgccacnggtggagatgacagccccaggtctggggtacagagaccacttaggatggcacagggtggctggccccggatgctgagagcttggtttcatttgaattttcttccccaacctgagtgctttgacaacaatggaaatagagaagtggctgctttcttttggtgaccctccaggggtggaatcggagtgtgtctgcccgcccttgtgacagacacacggaaggcttctgacgcttgtggccagactgcaattgcacttatgtgttatgctactaatatttgaaacagacctgccattccatttgttaatttaaaaaaaaaaaaatcctaaagggaaaaaaccgaccaggtgtggatctgcatgccacgctgccgtctgtgttacagtggtgttgctatttccaaggaagtgctgctttctttttctttttttaattttgtgaattttcaagtgctgttttgttggaagacagtgcaacgaactgagactaatggacagtgtcatcactcagcttactgggctgaggcgtctgtggagaggtggcaccggggctgcagagggcggctggggttccgtcgtgtcgggtgtcacttcaccttctgtttggccgctcgatgaggtctcgtgttgagatattgtgtgccacaacccccacagtcttcacctccgtgtgtgatgaaacttcccgtggacagcaataaaatgacgtcctctgttaaaa

SEQ ID NO: 49870 - DNA, 772 bp, Homo Sapiens
  misc_feature (632)..(632): n is a, c, g, or t
gttccatatgcttctgttggcggaaccttgtattgttgcttagtgaagatcaccacaggcgccttacagattgtaaagagagcaacatccctttcaattccaaggacagtcacacagatgaacctggaattaaaaagtgcttgaatcctgaagaaaaaactggtgcattcaagacagcgtcaacttcattcgaagccagtaaccacaaattcttagacagaatgtcaccatttggctccttggtaccagtggaatgctacaaagttagccttggaaagacagatgcgttcatatgtaaatataagaagtcgcactcttctggactgtagcaggcttgctgccatcagccgggttcaggcccttgtaagttagctgtacagcagaagtttgctgtctctaggattcatatagcacccacagagctccaagtaaccaaattcccccaaagacaggaggtgtggctgatgggtacacatgcttggtaagagtttctgctttatattctaaagtacttaatgtttttgagaaaaaagttatcgaatattttttagacttaagttttatcttctgtcagaatgtgaaaagttctgcccagtttctgagcaaaaacttcaatttcaaaataaaggttntcaggcgttctcttaagtgtatcacaatcaacaccagacgggatattttaactatccgattttccggaaatgtaaaacctgtatgtgtaacttcttttggatataaaactggattcttgagccctgtaaaaaaaaaaaaa

SEQ ID NO: 49871 - DNA, 582 bp, Homo Sapiens
cttttcagatgttaccaataagcaatgaacccatctcgaaggaggagtttgtaatacacaccatatttcctcctaatggaatgaatctgtacaaaaacaatcacagtgaaagcagtagtaaccgaagctacagagacagtggtattccagactcagatcactcacactcatgatgctgaaggactcacagcagacttgtgttttgggttttttaaacctaagggaggtgatggtaggaaccctgttctactgcaaaacactggaaaaagagactgaaaaaaagcaatgtactgtacatttgccatataatttatatttaagaactttttattaaaagtttcaaatttcaggttactgctgcgattgatgtagtggagatgcctgaacacaattctatattttagtattttttagtaatttgtactgtattttccttgcaaatattggagttataaaccatttactttgtgttctactgagtaagatgacttgttgactgtgaaagtgaattttcttgctgtgtcgaacaatcaggactgcattcatatgagatccttgtagtataagcacaggccatttttc

SEQ ID NO: 49872 - DNA, 575 bp, Homo Sapiens
cacgagggcaatcattggtggtttggcattcgcagagacttctgtcagtttctgcttgaaattttcccatttttaagagaatatgggaacatttcatatgatctccatcacgaagatagtgaagatgctgaagaaacatcagttccagaagctccgaaaattgctccaatatttggaaagaaggccagagtagttataacccagagccctgggaaatacgttcccccccctcccaagttaaatattgatatgccagattaaactcctaggagaggacccaggcacacacagactccacttggccttcgcctcttgttcattcatcccaaacctggaaatggaaacaggcttcaaacactcgtctcacgccgtgtttgagatcaccgcctcatcagtatgcatcatagatggaggtggtttcagtatgtgggtgtgtgtggtgtgtacctgggtaagagacttgctttccaggttcgcactttcaggtgtagctgggggcagtaagtcgaattgttttagtaggtcctcaaaaggaataccacacagctgtttgtttaaatgctactgtacctatc

SEQ ID NO: 49873 - DNA, 635 bp, Homo Sapiens
accaaacgaagtctggggattttcattgacctccagaagaaagagaaggaggcgcatgcctggctgcaagcagggaagatctattacatcttgcggcagagcgagctggtggacctctacatccaggtggcacagaacgtggccctgtacacaggcgaccccaacctggggctggagctgtttgaggcggctggagacatcttcttcgacggggcctgggagcgggagaaagctgtgtccttctaccgggaccgggccctgcccctggcagtgactacgggcaaccgcaaggcggagctgcggctgtgcaacaagctggtggcactgctggccacgctggaggagccccaggagggcttggagtttgcccacatggccctagcactcagcatcactctgggggaccggctgaacgagcgcgtggcctaccaccggctggccgccctgcaacaccgactgggccatggcgagctggcagagcacttctacctcaaggccctgtcgctctgcaactcgccgctggagtttgacgaggagaccctctactacgtgaaggtgtacctggtgctcggtgacatcatcttctacgacctgaaggacccgtttgatgcagccgggtactaccagctggcgct

SEQ ID NO: 49874 - DNA, 547 bp, Homo Sapiens
agcacatgagctctctaacagggtgggggctacccccagacctgctcctacactgatattgaagaacctggagaggatccttcagttctggccattccagggaccctccagaaacacagtgtttcaagagaccctaaaaaacctgcctgtcccaggaccctatggtaatgaacaccaaacatctaaacaatcatatgctaacatgccactcctggaaactccactctgaagctgccgctttggacaccaacactcccttctcccagggtcatgcagggatctgctccctcctgcttcccttaccagtcgtgcaccgctgactcccaggaagtctttcctgaagtctgaccacctttcttcttgcttcagttggggcagactctgatcccttctgccctggcagaatggcaggggtaatctgagccttcttcactcctttaccctagctgaccccttcacctctccccctcccttttcctttgttttgggattcagaaaactgcttgtcagagactgtttattttttattaaaaatataaggcttaaa

SEQ ID NO: 49875 - DNA, 676 bp, Homo Sapiens
tataaccaccatcattccttgtcctcttcggtggaagatattctttcctgtttcccagaagagagaaataaaagtcctaaataactaagaatgatcagcgggagcgtgggcatgattactgcagtgttgttctttattaaagacagggagtcgtggctgtctctacataatactaacatttcagtgaaaaaagtacaattggttatttggtacgtgtagatttaacacccagacggctgacttgtaaccctccccactagccttctgagcatttaaacccagccgtcattctctccccactccacgctccccactcctctgccacgttatgttacggcacaaaattaatttctgcccctgtgattgggccacggttgccaaggtaacagtggagctggagctaacttccttctttcatcctttccaatttttctattccagaagacagtcagaataatgcattctgtactacatcctgccttttgaaacctaaatgagttttcgtgatgaaatgttgccttctctgattcattcacaaaactgtggtggttctgaccacctgtgacgaggggggtcataatacttccagtgatccttttaatttagcaaaatattgtcggtggagggaagtagatagatgtattagtgtatttcaagtatatgattaagatactaa

SEQ ID NO: 49876 - DNA, 611 bp, Homo Sapiens
  misc_feature (542)..(542): n is a, c, g, or t
gcggtctcaccgaggtcagaggagctgagtaatgaaggggactcccagcagagcccaggccagcagagcccgcttccggtggagcccgagcagggccccgctcctctgatggtgcagctgagcctcttgagggcagagactgatcggctgcgcgaaatcctggcggggaaggaacgggagtaccaggccctggtgcagcgggctctacagcggctgaatgaggaagcccggacctatgtcctggccccagagcctccaactgctctttcaacggaccagggcctggtgcagtggctacaggaactgaatgtggattcaggcaccatccaaatgctgttgaaccatagcttcaccctccacactctgctcacctatgccactcgagatgacctcatctacacccgcatcaggggagggatggtatgccgcatctggagggccatcttggcacagcgagcaggatccacaccagtcacctctggaccctgagagctgaatgagggcatcataggccagacaggcccaaggatggatgaatggangagacaaaggcagcttctgacacaccagccccaggacctggggcgactggaggaagccaggcgagtggg

SEQ ID NO: 49877 - DNA, 766 bp, Homo Sapiens
ctaggttctttagagcacggcttcggccccatcactaccgacatccgggagggacagactttctactatgcggaagactaccaccagcagtacctgagcaagaaccccaatggctactgcggccttgggggcaccggcgtgtcctgcccagtgggtattaaaaaataattgctccccacatggtgggcctttgaggttccagtaaaaatgctttcaacaaattgggcaatgcttgtgtgattcacaatcgtggcatttaaagtgcacaaagtacaaaggaatttatacagattgggtttaccgaagtataatctataggaggcgcgatggcaagttgataaaatgtgacttatctcctaataagttatggtgggagtggagctgtgcggtttcctgtgtcttctggggtctgagtgaagatagcagggatgctgtgttcacccttcttggtagaagctaaggtgtgagctgggaggttgctggacaggatgggggaccccagaagtcctttatctgtgctctctgcccgccagtgccttacaatttgcaaacgtgtatagcctcagtgactcattcgctgaaatccttcgctttaccaaatctagacatacataagggactttctctcccttttcagccctctctgtgcagagaaaagatgtgagtccgcttgatgaattctaatgctttgcttagagctatgagaaatgtttgttttaataaaaacctggccttgttggcctcagcggtggagctctgcggccgc

SEQ ID NO: 49878 - DNA, 940 bp, Homo Sapiens
atctcgttcatagacagctactttgaaatcctcttcctgttccaggccctgctcacagtggtgtcccaggtgctgtgtttcctggccatcgagtggtacctgcccctgcttgtgtctgcgctggtgctgggctggctgaacctgctttactatacacgtggcttccagcacacaggcatctacagtgtcatgatccagaaggtcatcctgcgggacctgctgcgcttccttctgatctacttagtcttccttttcggcttcgctgtagccctggtgagcctgagccaggaggcttggcgccccgaagctcctacaggccccaatgccacagagtcagtgcagcccatggagggacaggaggacgagggcaacggggcccagtacaggggtatcctggaagcctccttggagctcttcaaattcaccatcggcatgggcgagctggccttccaggagcagctgcacttccgcggcatggtgctgctgctgctgctggcctacgtgctgctcacctacatcctgctgctcaacatgctcatcgccctcatgagcgagaccgtcaacagtgtcgccactgacagctggagcatctggaagctgcagaaagccatctctgtcctggagatggagaatggctattggtggtgcaggaagaagcagcgggcaggtgtgatgctgaccgttggcactaagccagatggcagccccgatgagcgctggtgcttcagggtggaggaagtgaactgggcttcatgggagcagacgctgcctacgctgtgtgaggcacccgtcaggggcaggtgtcccctcgaactctcgagaaccctgtcctggcttcccctccccaggaggatgaagatggtgcctcctgagaaaactatgtgccccgtccagttcctccagtccaacggatggccccacatgccaccaggaggccaaa

SEQ ID NO: 49879 - DNA, 923 bp, Homo Sapiens
  misc_feature (576)..(576): n is a, c, g, or t
cactgaggttgaggaaacgtcccatgcagtcaactgttgctacttaaatgcagctgtttctgcattttttgatcgctgcagaacatctgaggtagtagaaatccaagcactgagaacagatggagagcacatgaaaaaggaagaattaaatgtgtgcaaccacatggaggtgggccaaacaggtagccagaacttgaccacaggaacagacaaaccggaggcagcaagtccctttggccctgatctggtccctgtagcacagaggtccgaagaaccgccttcagaaagaggaggcatatttggaagtgatgggaaagactttgtggacaaggatggagaacactttggaaaattgcattgtgccaagagacaacaaataatgagcaacagtgaaaatgcaattgaggaacagattgcctcaaatactactacgactcctcaaacattcatttctacggatgacttgctggactgcttggtgaatccacaagtaaccaggatagtggcacaacttttgatacaaggaagaagtttatgattcaagtggaagatgacttttaaaataatattttttanatatatatttttaagtagtatgactaaaataaagatgaaccagcaaaaggtcagtttgcacatttgtaaatgtatttatccttaccgaattacatgtcagtctgttgccaccttctttcatgcacattcctctttggccaaactggctgctctttgtttgtaagcttttgttcctctctcatcccatacttttagcctgtgtcaaatgtaagtcccaagtatttccagcaggaagtaatggtcttcctcagcctcaaccagggaaccaccgggctgcttacttttgcaaataaaattttcataggtggggagaaaccccctatgaatgttaaggaatggtgggcaat

SEQ ID NO: 49880 - DNA, 728 bp, Homo Sapiens
  misc_feature (556)..(557): n is a, c, g, or t
  misc_feature (566)..(566): n is a, c, g, or t
  misc_feature (569)..(569): n is a, c, g, or t
  misc_feature (584)..(584): n is a, c, g, or t
tgtaaagtaggaagttactggccaggagcggcggctcatgcctgtaatcccaggactttggtaggccaagacaagcagatcacttgaggtcaggagttaacatcagcctggccaacatgatgaaaccttgtctttactaaaaatacaaaaattagctgggcatggtggcaggcgcctgtaatcccagctactcaggaggctgaggcaggagaattgcttgaacccgggaggtggaggttgcagtgaaccaagatcgcggcgctgcactctagcctgggtgacagagccagactccgtcccaaaaaaacaaacaaacaaaacaaaacaaaaaaaaacagaagttacaaatgaatactcacggatatgtatagttttatgtttgttttcttagaaacaaatgtgtttctttgggtgggtaatattgtgttttactatgtttaccttttataaaacataacctgtttatttatattctttggctttgtttattaaaaagcatgattttgctgtgcatgtaccattttgctattaaaatttatttttaatatttgtaaannaaaaaaaanaanaaaaaaaaaaaaaanccttgtcggccgcctcggcccagtcgactctagactcgagcaagcttatgcatgcggccgcaattcgagctcacttggccatttcgccctatagtgagtcgtattacaattcactggccgtcgtttacaacgtcgtgactggga

SEQ ID NO: 49881 - DNA, 584 bp, Homo Sapiens
tcttaattagaagtgtgttttcagtggaagaaacatttttcaataaataaagtaaggcattgtcatcaatgaagtaattaaaactgggacctgatctatgatacgcttttttctttcattacaccctagctgaaggacatccagttccccagctgtagttatgtatctgccttcaagtctctgacaaatgtgctgtgttagtagagtttgatttgtatcatatgataatcttgcacttgactgagttgggacaaggcttcacataaaaaattatttcttcacttttaacacaagttagaaattatatcccatttagttaaatgcgtgatttatattcagaacaacctactatgtagcgtttattttactgaatgtggagatttaaacactgaggtttctgttcaaactgtgagttctgttctttgtgagaaattttacatatattggaagtgaaaatatgttctgagtaaacaaatattgctatgggagttatctttttagatttagaataactgttccaatgataattattacttttatatttcaaagtccactaagattcgtgaagagcaatagaacccttt

SEQ ID NO: 49882 - DNA, 1132 bp, Homo Sapiens
ggggggaagggagtgcattagaatatgaacagttgtacaaaaagcaggctggtaccggtccggaattcccgggatatcgtttctatatgaagacatttgttttatgttaggtagcttacattttctcctctgcgtgtgtgtgtgtatgtgtgtaaaatcagaaatttagcatactatggaaagaaggcatggagcacttgggtttagaggaacctaaaacatcatagcttcattgttccagatgtaacaggtttgaaagagctcatcgccaagttcttgatccacttgcattccaggggagttttcttttgagtagtatgtttcttgtttgcatgttcctgttctttgtggaaactatgcatggtagcatttttgcttgctgtgttttccatacttaagaaaaagaggtttcagttggctgatagaatatcttttatgtaggacaaaacttttctgtgaagagtgttgagggggtgaagataggtaagaggtaagcacaatttttaatttaggctctgaaaaagtgtattgttctaaacgtatttggtatgcctatataggtctttaaaaatgggtatgtatgctgtttaatgtgcactgaacattttacattaatattgtactgttttacattaatactgcatgcttttctatgtgaatcgcataaagaatgtcataagcactgtgttccttgaaaaaaaaaaaacacaatacgaaacaaccaccaaggagcaccacccagcccacaaccacgcacaaccagcagcacctaccacacacaacacgcacgcgaacgccgccaaccaccaccgccccgacccggcggccaccacaaccgacccgcgaacaccactgcatcactaaccagcatgagcaagcacgcaacccaagaacaccgtgcaacgagcccagcgaacacgacagaaaacatcagaagagccagcgaacaacaaacaagcgcggctaccacgacaaccgagaaacaggccgccgacacaaagccaacctagcgggcgcagccagccagcagcgacacacctcatccgtcagcgcctgagcacccacgacaaaacacgacgctagccctcatacagaccacctaccgtagccagtagagaaaaaggaggggata

SEQ ID NO: 49883 - DNA, 742 bp, Homo Sapiens
  misc_feature (715)..(715): n is a, c, g, or t
tgtctgatgtttttactcaagaggggagtggtaaaattaaatactctattgttcaattctctaaaatcccagaacacaatcagaaatagctcaggcagacactaataattaagaacgctcttcctcttcataactgctttgcaagtttcctgtgaaaacatcagtttcctgtaccaaagtcaaaatgaacgttacatcactctaacctgaacagctcacaatgtagctgtaaatataaaaaatgagagtgttctacccagttttcaataaaccttccaggctgcaataaccagcaaggttttcagttaaagccctatctgcactttttatttattagctgaaatgtaagcaggcatattcactcacttttctttgcctttcctgagagttttattaaaacttctcccttggttacctgttatcttttgcacttctaacatgtagccaataaatctatttgatagccatcaaaggaataaaaagctggccatacaaattacatttcaaaacaaaccctaataaatccacatttccgcatggctcattcacctggaataatgccttttattgaatatgttcttatagggcaaaacactttcataagtagagttttttatgttttttgtcatatcggtaacatgcagctttttcctctcatagcattttctatagcgaatgtaatatgcctcttatcttcatgaaaaataaatattgncttttgaaaaaaaaaaaaaaaaaaaag

SEQ ID NO: 49884 - DNA, 580 bp, Homo Sapiens
tggacacgactcagccggccatcgtggtgaaggactggtactcggaccgcagcgacgctggttgcctctacgagctcaccgttaagctactgtccgagcacgagaacgtgctggctgagttcagcagcgggcaggtggcagtgccccaagacagtgacggcgggggctggatggagatctcccacaccttcaccgactacgggccgggcgtccgcttcgtccgcttcgagcacggggggcaggactccgtctactggaagggctggttcggggcccgggtgaccaacagcagcgtgtgggtagaaccctgagcgaccctgcctccactctcccccagctgcctggaggggcaaaggtcgagggtagataggccttaacttagtccatagcgtcctcaccttccccaagccacacatcctcctcccatcccttgctccgatcccagcccctgagcagggagagagaagttttgttggcataggtttgcttaggtagccggcttctagaatgtaaatccgtgaaggcgtgagcttggactggacccacttgttgattccctgcacctagcacagtgctttga

SEQ ID NO: 49885 - DNA, 829 bp, Homo Sapiens
ggagatgatttttgaggtttgcactcatgcaatttgagaacaccgttgacaagaaggctgagtttacataaatgatctagattgaaactcagctacctttcttcctcatgtggtgtaattacagccctatctggagacagcgaatacagcaaacagattttattacctagttcgctcaaacactacatgaagttattttagttaaagccctcccccaaaagttataaaaccattttatcagggcccaacatgtggcatgcaatgaagagaaaatgtaaagctacagaggttaatgtattgtattataaaatattttaagtgtactcaaaatatcataattgtacagtttatgccaccataatttgaggcctatagatttagcttaagagaacactgttctgtttgaaatgctttctgtcactgaaattggcttaattagtaaccatggataagatgctttagatcagactaggttttaatcattaacttccacaaagaagtcatactttgcgttaggtgtgctggttggatgtgcaggaacttcagcaagcagtaggttttactaagcagatggtcgggcactgcagggcaccaggcaggatcctagggcgcctcttattctgcgttagcatctggtttgctgtatgaccttgcacaagtcacttccttctgagccctcattttctcatctgtacaatgagaattcaaaagttgaccttgaaagtcaagtggtgaaaaaaaaaaaagagatttaaccaagataatttatggaaaaaaaaaaaaaaaaaaggggcggcccgcttctaagaagtattcccctccgaagggg

SEQ ID NO: 49886 - DNA, 678 bp, Homo Sapiens
  misc_feature (67)..(67): n is a, c, g, or t
gcacgaggggacaagggacacatcactcttctgtctgtggccctgctggagtcctttgtgccccccnggagtccacacgccttccctgcaagacgagaatggggctgggaagaaagaggcaacaccacggctggcaggagccccgctgcactgctctgcagacccattggcctgaccctgagaagcagagccagcaaagcccgggacctgcccctctttctttcccttcacaccaccccagcctcaggatgtcaagccacctccggaacgtgtctacactccacagctaccccgcagcaatacgcactcttgggacctcgctgatctaggatggggaggcaggccaccgcccctcccaagactcctcaagaaagagccccgcggttgctccggaaactcgaggcactgcagctatgggcactgcctcagcctaaagacacaggggcgcctcccaatcaccgcgctggcggatgctcaccccgtcataagcagaaactagtgatcctggaaatgagatgggccttactctgtcgactaaatgaatagctattttcttgtcattttttaaagtgcaactcttgcttcatgctgcttaagttaccagatgaatgctgagaaataagtatcacagacattttaataccatttcattgctgttttacgagtgttcattactta

SEQ ID NO: 49887 - DNA, 864 bp, Homo Sapiens
tctgatgcagtagaaacctgtgtatttgatttgaacgatgaatccaaatggaaacccatgagtgaggaagcaattaaatctgtgtgtgctcctggagctacaacatcccttcctccctttccacctctgtgtgcatccacaattgacgcgtcagtaacaagtaatgaaattgaaatgcagctgaggctcctggtgtcagaacacaggaaggatcttggcctcactactgtttgggaagaccagctctcctaccttttatcaccagctttggcttcttatgaatttgagcgtacaacaagtatatcagcaggcaatgaagaatttcaagatgccataagaagggctgtacctgatggtcacacatttaaagggttcccaatacattttgtgtatagaaatgcaagacgtgcatttgccacatgtcttcgatctcctttctgtgaagaaataatctgttgccgtggagaccaagtgcgactggcagttcgtgtccgagtatttacttaccctgaatctgcatgtgctgtttggatcatgtttgcttgtaaatatcgctcggtattatagggccaatatttatataagatttatacctgtgtttaattggaattttacacattgtacattacttagctatttagaggtttgttattttaaaatcacaatctggcttgaatggcatacttcaattttgtatatacttgactggtaatgtttaaaaaaaatcatgcatttcctttaaaaattaaaggctgaaaaacttgtataaatctccctggaatttagtataaattaagtgaatattctattttaataaatgctactttgtttacaggttaaaaaaaaaaaaaaaaaaaaggggcg

SEQ ID NO: 49888 - DNA, 751 bp, Homo Sapiens
  misc_feature (712)..(712): n is a, c, g, or t
ggaggtaactaaattatgctagttatgtggaaaaaattgcaaagatgctttgacagatataatccctttggtgctccatctgatcaaagttgaaaagttgatgttttttaagagacaagctttatcattgtctctgatttcagtagaataatggtttattgttagacaatgatgtttctgcttggataaatcaaagataaattacagttacatggttagatgcatcttttgtcatctatattgtagtttctacataactgtaaacctgacagataagaatagtttcggtttgatttttgtttaaaacagatgagtacttcttaatgttctagacaaatgagtaaaatgtatttctggtagaaattagttgggcaaagatactatgaatgaaaaagtattttaaacgtaaaatgttctttgtgaatatgtaagtatagtataaagatttctttcatcccatttatccccttcctttaaataaactagtttacaattggtagatctgtctatatataaatatatattaaagaacaaagatatatatctaaaaatcacctaaatctgctttattagactacagttcacttattgcatagaaactggacttggctttacattcttaatgtacttttacttttcctcaagatatgaacttactctctttgagctgaatttttcttttactacttaaatcatttatggatatcctggnaaattatgaccaaattttttgttagattgcatacagtaa

SEQ ID NO: 49889 - DNA, 799 bp, Homo Sapiens
ttttgattggtaagttataagccagacatagattttagctctttaataaaaacttcaggggcacgtatgtcccagtacaagtgtactgactatcaagttttaactcagatgcaagctttggctctttcataaaaagtttttatgcatatgtgtctccatacaagtggctcattaaaataagaactttgtaaactgacttaaaatcagatattttttcaagagttagggaaagttgaagtgttttactgttttgtctcttgagccctttctctggggaaaaaatacatatccatctatctatctatatataaactgtgtatacattcttactgtttgaacaactattgcctttaattaaatgtttcatttttctccagagtccccaaagccacatggcattattatagtcatttttgagatgcctgtagagaatgaaagtattgactccgttagagggaaaatgggtttctctgggtgaattccaacgaagcatacctaggggtaacagtgaacctacctgggtttgttttgttttggtaaggatttatgtagtgtctggctgtaagcaagaatgagtggattataaacttgaagatttctctgttaaagtcacaaaaatgatcgacaaacaatatttttgtgatgtttatttaaacgttgtattttataacatacttcaaggaagagtatcgaagtaagttgctttataaattaagactaaattcgtatggatgcagaattcaattaataaaatttgagcctgttacgtaaattgaatattaataaaattgaaaatttc

SEQ ID NO: 49890 - DNA, 744 bp, Homo Sapiens
cagctggtacggtccggattcccgggatctccgcagcctccaccgctgcctcttctgcccgttcgccactggagccccagagctcatggccttgcaccttcaagtgcaccacagccgccgggctaggggccgccggccaccccaggctgacgcgtccccgccctatgcccgagtaccatcaggagagacccctcccagtccttcgcaggaaggggaggagggctccgggctgtccagacccggagaggcagggctgggggggcaagaacggtagtgggccctcaggggcgattagcttagtgagcttaccccgccggagcgggggagcgctagaggtagttgggtagagaagccagcagggggcagcgtgggacccatatcccagccccaggcggaccagaggtggaaggcgcggcgggcgtaggagggtgggctggcggtacccacccagcccaagggagtcacagtgccttagaagtggcagaggtgagggtcaaagaacggggtccctgggctggcagagaaggtttgtgtccctgttgaggagccactctgccagtctttgctggtccataggcgtgagagtttatttttgtacaaggggtgaggctggggggcactgtacccttctagccccatcaggggccctgtagacgtcgctatttttggtacgattcctgtcatccctattgcagagtcgtgtccccaaataacaggtgtcttgaggcacaggaaaaaaaaaat

SEQ ID NO: 49891 - DNA, 753 bp, Homo Sapiens
  misc_feature (631)..(631): n is a, c, g, or t
caggttttgtcctggtcatcgggcccgtgactttctacagaattggcccatacaccaacctgtcctggtcctgctacctgaacattggcgcctgccttctggccacgctggcggcagccatgctcatctggaacattctccacaagagggaggactgcatggccccccgggtgattgtcatcagccgctccctgacagcgcgctttcgccgtgggctggacaatgactacgtggagtcaccatgctgagtcgcccttctcagcgctccatcaacgcacacctgctatcgtggaacagcctagaaaccaagggactccaccaccaagtcacttcccctgctcgtgcagaggcacgggatgagtctgggtgacctctgcgccatgcgtgcgagacacgtgtgcgtttactgttatgtcggtcatatgtctgtacgtgtcgtgggccaacctcgttctgcctccagctttcctggttagcgcaacgcggctccacgaccacacgcacttcagggtggaagctggaagctgagacacaggttaggtggcgcgaggctgccctgcgctccgctttgctttgggattaatttattctgcatctgctgagaggggcaccccagccatatcttacactntggtaaagcagaaaaccaggaaaattttcttataatatccacaatattccttgagtgagtcagaatctatagccggttagtgatgggttcagacagaatcgtggtcgtgtctgttttgctcg

SEQ ID NO: 49892 - DNA, 620 bp, Homo Sapiens
  misc_feature (590)..(601): n is a, c, g, or t
  misc_feature (603)..(614): n is a, c, g, or t
gggggaacatcaggctttaatagcagtagttcttcttacatgtctagccaaaaggattattcatattatttagataatagattaaaagatgaacgaataagtcaaggacctaaagaacctcaaggattccactttacaaattcaaaccctgctgtgtctgcttttcattcatttccaaacttgcagagtgagcaacttttctccagaaaccacactacagatagccataagcaaacagtagcaacagactctcatgaaggacttacagaaaatagagagccagattctgttgatgagaaaattactttcccttctgacattgatcctcaagttttctatgaactaccagaagcagtacaaaaggaactgctggcagagtggaagagaacaggatcagatttccacattggacataaataagcatattcagcaaaaaggtctgaaaagcaagggaataccattattttcggattagcggtttattaagctcttctatattaaacactaatagatattcaataacggagtaaactgttccagataaagcaagaatagttgcaagaagtaaattctggcacaaagcataaaannnnnnnnnnnnannnnnnnnnnnnacatgt

SEQ ID NO: 49893 - DNA, 792 bp, Homo Sapiens
ttgggattctaaagtggaagctttcaacagagcattccatgttgtcctgttaaaacctttggttttcacctaaaccctttctgcttagttgtatctctgtgaaaaacttgtatacacaagcgtccatgtctcacacaaatatgatgtgattattcttaagtgttaaatcattaacacttaaatgacttcattgggaatattgagcagagggactgtgcttctatgcactgggcaaggcagtatttgcttaggaaactaatttagtcatcagagatactttcctaaaaaggaaaaataaaaaacaaaatggtgccactttgggttgaagctactttgttaggcttgaattcatttatatgtcttttgattcttaaaaaaacaaaaaacattccattagaagcaccagtttttttgctcagactttgtggatcagactctacactcaacacactctaatctacttaaaggtatacaaaatatgctgatcttttttaaattatgatttcctgaatttttttcttaagtcgtctcaactgatttactcacttagcttcccttccctcatcagcatagtataatagaatgtatgttacatttttatgaatggcaggtgttcatttataatctgtattgacttaaaaagtttcttcctcatgatgctaataagttttgcgtataccatgcgaggatagcacatttgacagcttttggcatctccatgtatgagcacagtatctatgactgtgctacgtatatataggctaatacactggcaattccgtggagaacata

SEQ ID NO: 49894 - DNA, 760 bp, Homo Sapiens
ctcaagcggcatggaggccgacgtcgccaaggtcaaaaagcaaaacgcacctggagagcctggtggccggcccctgcagcacagtctgcagccgacaccctgctttggccgtgggaaaacattaaaatggagaaaaacccaaaaaggtgtacagcgggacagcaagacttcccagaaagtttaaaatctctctgggtcttcgagtggaacctggaagccccgggtggcagtggattgatgtccagttcttgtcagaggagccttgtgaaaaataactgcgcctttgcctgaataccacgtccccaagaatcagaggggccacagcccttctcctccatgggaggccctggagcctgatagaaatcagtggtgtggggcactgtagagactagccagctcccgacggaaggggtctgtgtcttgtattgatcccatcagtgcccggcactcccttcacccaggtgctgacgtgccggggttgagctggcaccccgggatgtgatgtaagaacgccctgcgcgtcagcctggaacgggcttgattgctgcccttaactgtgttctgaagtttcacagcttggcttcagcctatcagcgcatacattggcatgaattttgtgaattagggtgttaaaaactggaattgaatttgtacaaaaagagaatatatttatcactaattattttcttaatgtaggaatgtaccgttaaaaaggaccaaaagtttttggtctgggtcaaaaaataaaaaaaaaaaaaaa

SEQ ID NO: 49895 - DNA, 603 bp, Homo Sapiens
gaagaaggaagggggaacccataggtgtggcgtggagccaagatgtactattcaactatgtgtttctgtttataaaaaacacataccatggaaccatggtgctttgttcttagtttttgccgttagatcccttcaaactggaagttccttacaatatctttctcaggaaatatttgggaaatggggtaagagatggcaagtgtgagacgggctgtgtcagaggttgctacgtcatggatacagtgcagttccaagtgccataagtgtatgtacatatagttaataatgacactgttcatcaccattctaaaatactgttcttccaaccctatcttcaatgaccagtccagaaggggttaagctggattcatttgctctggcatgtgcattcccagcagggtgaagaaaggtttaaattaaagaatttattttctctctcccccttcctctttctcccagtctttgcataaggagaatgttagacatttcagaaattactgtttctgttttaaattgagtattgattttatattgacttgtattgaagttctttctgaagaattaccaaataaatggccgatcttcgtacaacaaaaaaaaaaa

SEQ ID NO: 49896 - DNA, 484 bp, Homo Sapiens
taaattgtcgtaaaatactcataaaacatactgtcttcaccatttttaagtgcacagttcagtaacgttaactgttaatacattcataatgctgtgtggccgtcaccgccgtccatctccataggcttctcagcttgtaaaatggaaactgtacccattaaacagtaattcccactcctcccagcccccgcagccaccattctgctttctgtctctctggttttgactattctcagtatctcatataagtggaatcatacagtgacttgtctttttgtgactggcttatttcacttagcataatgtcctcaaggttcatccatgttgtgtcaagtgacaggatttccttcctggatatacatataatggaatgttccgttacatgtgcgtaccacactctgttcctccatcagtgaacacttggcttgcttcctcttgactattgagagtagtgctaatacagacacgggggtgcaaatatctc

SEQ ID NO: 49897 - DNA, 699 bp, Homo Sapiens
ctaggagaaacggaaagaagatttctgtaaacatatatagaagaccttgtgaaggaagccacagaaatcaacatgaaaaatgaggctttgcagaagctttggccacagatgttcattgagcttgttagggatgcagtcatagaaattcgcaataaaaattcctatatgaagctctgcctacagcagataacagaccaaaaataaaaatggcctttagttacagttgattttggcagttttattttttgaaggttgaaaatatgcaggttatacatgttaaaacaacaacaacactatcctataaactagaaagactagtataaaagcattattgcccactgttctcatagctaaaagttaagaaggaaagaaggaaagcaggagaaaggaaggattaattgcctgtatgtgaggaccaaacaacctttgggaactaaacagttttcagagatggcgtggcactgcatccttggttcttgctttgattggtgccctgctatagcccaaagcacgtagtatttgctgatgattcagcatgagctgcatctacctacttttagctgataattttcagttatttccctttttattttatgtcatgattccaaagccaaaaatatgttctttttatgagtgaagaataaccttacttaacaattagtcaaataaagtatggttggctccttaaaaaaaaaaaaa

SEQ ID NO: 49898 - DNA, 595 bp, Homo Sapiens
ttgaatttaggtgacactatagaagagctatgacgtcgcatgcacgcgtacgtaagcttggatcctctagagcggccgcctactactactaaattcgcggccgcgtcgacgttgggaaacagaatgggccagggaggttgagtgactgaagaccaagggttggtgcagcctcctcgccgcgctgcgggggctgggccgcacaggcttctgcccttctcggtgtccaggctccttgggtgatgctggagttgtcatggccgcagttcagtgtgagattttttaccaggtattgcgcttaagggacatgattttccattttcttcgcccggacaacttgaatgaaatgggcactgttgattccacttctgtcgaggagcttcggggctcagagaggtgatgacgtgcccaaggtgacgcaactcgtgaacagccgtgcctgccttgggcgcagcctccggcgccagagctgggctcttcaacacggcatttagcgcagaaagtcgtggtttaggcagtatgggccgctgtgacaaaacacctaagactgggtagtttataaagaacagacattcaggccaggcaccgtgactcacgc

SEQ ID NO: 49899 - DNA, 606 bp, Homo Sapiens
  misc_feature (581)..(581): n is a, c, g, or t
gcagatattccagtcatattaacagaacactcctgagacagttgaagaagaaatagcacaaatcaggggtactcccttcacagctgatggttaacattccaccttctttctagcccttcaaagatgctgccagtgttcgccctagagttattacaaagccagtgccaaaacccagccatgggctctttgcaacctcccagctgcgctcattccagctgacagcgagatgcaagcaaatgctcagctctccttaccctgaaggggtctccctggaatggaagtcccctggcatggacgagtcctcaggcccaagactcaagtgtgcacagacccctgtgttctgtgggtgaacaactgcccactaaccagactggaaaacccagaaagatgggccttccatgaatgcttcattccagagggaccagagggcctccctgtgcaagggatcaagcatgtctggcctgggttttcaaaaaaagagggatcctcatgacctggtggtctatggcctgggtcaagatgagggtctttcagtgttcctgtttacaacatgtcaaagccattggttcaagggccgtaanaaatacttgcgtattcaaaaaaaaa

SEQ ID NO: 49900 - DNA, 583 bp, Homo Sapiens
atgttataaaaatgtataggcagtatacacagcactactcaagaagccaaagaaacacttgtgcagtgctaagtgtcacatgtctgcttccaccagaggctaggaatagtgatcctgctataatgtgagaacccaaatcatgtttataaaataggacgctgggagcagttgcaggccacagtgaagtgtgttgcttctgtcactttatattcttatatttcctttccctcagacagtaaactgttgatactcgtacttgtaaaaaattgtaaggcaatttttagtattgttgtcaaagaaaagcttggattacattaacatttgtattcagtcttttaggtgatacaccagagggggctgggaattgtctctttgttcctataagtagatcttaatgtaaaatagtaaatgtccattgaaaagcaagtaatacagcctgtgctaattgggagcacttgaacaattttgttccattctgagtaacttttgagcaagtaattctaagctttgtcttgtatccttgtgtgaaattgcataatttttaccctatttgatttcttaaataaagatgtttgctcaagaa

SEQ ID NO: 49901 - DNA, 654 bp, Homo Sapiens
gtccgaatttcgggatatcgcgaccacgcgtccttcacttggatccttctgttcttccttacacctaaataatacaagagattaatgaatagtggttagaagtagttgagggagagattgggggaatggggagatgatgatgatggtcaaagggtgcaaaatctcacacaagactgaggcaggagaatagggtacagagatagggatctaaggatgacttggacacactccctggcactgaagagtctgaacactggcctgtgattggtccattccaggaccttcatttgcataaggtatcaaaccacatcagcctctgattggccatgggccagacctgcactctggccaatgattggttcattccaggacattcatttgcataaggagtcaaaccacaccagtcttggattggctgtgagccaattcacctcagtctctaattggctgtgagtcagtctttcatttacatagggtgtaaccatcaagaaacctctacagggtacttaagccccagaagattttgctaccagggctcttgagccacttgctctagcccactcccaccctgtggaatgtactttcacttttgctgcttcactgccttgtgctccaataaatccactccttcaccacccaaaaaaaaaaaaaaag

SEQ ID NO: 49902 - DNA, 603 bp, Homo Sapiens
ggcctgttctatttttctagttaagggaactgaagctcagagaggtgtcaccagcaggtgttcattcccatgccagccttgccccccggcttttcccaggcaggctcctgcgtgcccactggctccagcctggtcctctgtctcttggctgcttcactcctgctctttgtcccgactctggccctgcttacaggggccactacctgctggtgcctccataacaagcgtctggcgttgagacccctggcatggcaggggctttggggtctggtttccacaaggcttagccatggcagaacctcgttttattttaactctttgcccctacaaacaaacagcagtacttgccagaaccattcttgggattcaggagctcgggcgactgccttggcctctggccgcacccaggagggtggggttggatctgtgtagttgccaggcccacacctgccagcagggggctgactggatccatgctttactgtgtttaatgggggtaacaggggtccctacagccctcccagctaaacatttggaacaaaacaccagcccttttgtagtggatgcagaataaaattgttaatccaatcacaaaaaaaaaaa

SEQ ID NO: 49903 - DNA, 759 bp, Homo Sapiens
  misc_feature (26)..(26): n is a, c, g, or t
tgttttttcctcactgtaagtggggntagtggtacggcctacctcaagggttgtaatgagcactaaatgtgaagtgcttggcacagtgcctggcacatggtgagccacagctactgtgagtttctgtttatcccccttttttttttttaagcccattgtttattctttgagaatttgttgtaacttcttcaggataacacctgagtccacaggctgagcagctgtggcccagacagaactgctccggcttggctgttccagcaggtggggcgctggcctcggtgagggcacagcagcaaggttcacggatatccgtgtgtcttgtctgtggccaccaggcacaggtttggcttccggtcagtgtcccgacactgtgcgggaggtgacaacagagcaaagcagcgcaggggtcagggaggtggagacactgctgaaatcacactaccccaccctcagctgaagccccacgttccacaaacttggggtcatagattgtccagtcactggctccctccctgtcagcacagcacagaggaaggggctaactgaatcttttaccacttctggcctggctccagaactttgttctagattccttaaaagtcggtagctgatgtcaaactcaattgagcagtagctttgatcccttggtctgggggtcgaaggaagatggcgctgttatcagcggggaaatgtactatttaagatcagctttgttgtaaaccatttgttctagaataaaactcaattggaaacgtg

SEQ ID NO: 49904 - DNA, 796 bp, Homo Sapiens
  misc_feature (779)..(779): n is a, c, g, or t
  misc_feature (784)..(784): n is a, c, g, or t
  misc_feature (793)..(793): n is a, c, g, or t
ggatgttacctctgcttgtccacagcagccagtcaccctggccagtcccacttcctggataattctctaccctcaccccacagagccatctctctccagaccaaaagctggaaggagagttgctttgagagcttgtttttacaactgcatgtttattatgatactttctctccaaaggaaacttttaaatcaatgggaacaattagcaacagaaagagcacagtccctgcttttgactgggttcctattttaagcacaaatgagagctctggagccagaatgccagggttctaacttcagcattcacttactagctgtatgatcttggccaagtcacttcacctccctgagccccaattcccaagtttgtgaaatggcaacaatacctatgtgtcactggattattggttaaaacagaatgagattccttgtgtgaaaatagctattatacctgacacactcatcgtatgggctctgcaaagggatattccccaacctgtccttcccgacaggaagcatagggcactgcagatggggaagcatgtcaccttggcagtgactcggtggcttcccaagcaggagtgtcaggggaaccatgagagagagtctaggagccaaacacatcaccaccctgagcagatacaggagtggggagggggctgtaactcagtgagtggcttccaggggccccaggccctgctggatgtgggccaagccctacagcttccctaggcagtaagtaaaaacattctccctagcattaaaatggttttccatancccangaattttcnaaa

SEQ ID NO: 49905 - DNA, 659 bp, Homo Sapiens
agaaacagtgctttctgaaacaacaaagccaaacttccattggtcaggtaattcaggagggtggggaggaccggctaatactgtgaattcttgtgtcatcgtttggggttttacttgataccactagctataagcctaatctcataatgtatttcttttttgaaactgatttgtatagcattttgttttcagaagagccattctttattaagttttcatagaaaataatgttaaggtagatttagtttgaatgttttttcatatgaaaaagaggcttttattcttttccatagtttagacatcactggcgtcttctgagttttatgagacaggaaactaagtttactatctgtaaatgtaaacatatgtccattaagaaacatgtagtttttttttagaatgtaataacccagtggcttactgtttttcttaatctcttttaaaaaaactttagaagaatcttttaggaactaatatctcttgttctgaagaaacatttatctgacgttcagcagttcctacagttttacttcagtttatttttcttctgtaaaatgcaagaaaatttaatattttgactaacatgtcttttctgtctgtatcatttaaaggcaataaacttggtacgtatttcatatctatttaaaaaaacaaaaaag

SEQ ID NO: 49906 - DNA, 751 bp, Homo Sapiens
agcggattcgcctggagcactatactgtgacatcgaattggctggcattaggaactgtcttcctgtttgggctcttgtcattttctcgctctgtggcactgttcagaggatatcacgggccccttgatttgtatccagaattttaccgaattgctacagacccaaccatccacactgtcccagaaggcagacctgtgaatgtctgtgtgggaaaagagtggtatcgatttcccagcagcttccttcttcctgacaattggcagcttcagttcattccatcagagttcagaggtcagttaccaaaaccttttgcagaaggacctctggccacccggattgttcctactgacatgaatgaccagaatctagaagagccatccagatatattgatatcagtaaatgccattatttagtggatttggacaccatgagagaaacaccccgggagccaaaatattcatccaataaagaaggatcagcttggcctatagaccattccttgatgcttctagatcttcaaagctgctgcgggcattctatgtccccttcctgtcagatcagtatacagtgtacgtaaactacaccatcctcaaaccccggaaagcaaagcaaatcaggaagaaaagtggaggttagcaacacacctgctggcccaaaggacaaccatcttgttaactattgattccagtgacctgactccctgcaagtcatcgcctgtaacattgtcatacaggtcttctgacatgaata

SEQ ID NO: 49907 - DNA, 676 bp, Homo Sapiens
  misc_feature (21)..(21): n is a, c, g, or t
ttttttttttttttgttgtanaacttttattctttattattggtaacacgccctaactatcctgtgtgagaatgggaatttaaagtcccatcttgtaaattgtatatgttgtcatgcagggtttgggccaagaaagcatgcagaaaaaaatgccatgtgattgtaattatcctggattcagaataatactgtgatggggagccagatccgcagtggtggagagttctaatgttgactgtttgcaggccaaaagatgattgctttataattttaacaaatcattgtcttttagtaacatccttgtttagtgtcttctcaagctttctttactgaggaattcagcttgtgacacagatacatcccactagcttgtgaggtggaactagtaataaagaccttgaatttggattgaaaagtttcctatctttacattgttgaggaagtccttttttttttttttttttttttaattgctcaagaaatgattctctcacaggcttgggaaatcctgttagcatgcagaataatgtggtaactttgtcaatttcccattttatttttttaaataaatatatgatctaaaagccaactttttctcagttttactcagtggaaagataaactaagttttaatgttatttttttaaatttaagcaaaatcctcgtgccgaattct

SEQ ID NO: 49908 - DNA, 900 bp, Homo Sapiens
  misc_feature (638)..(638): n is a, c, g, or t
agctggtgtgacaaaagcagagtacgtcatgccctgccttaccccccaggctccaaaactagtggaagagaaggtcgcctccgaaacatctcctttgcctctgaaaattgatggtgctgaggaagaccccaagtctgggtcaccagatctctcggaggaccagtatttgttaaaaagggcatgcaggacatcttctctgcctcctaccctttctcatctccgctccatctccagctggcccccagatcctgtggcgacggttccccatggcagccacctgctgacctatcaggactctctatagaggaagtgtccaagtcactacggttcattggtttgtccgaagatgtcatatcattctttgttactgaaaagattgatgggaacctgcttgttcagctaacggaagaaatcctctcagaggatttcaaattgagcaaattgcaggtgaagaagataatgcaattcattaatggctggaggcccaaaatatagccaaataacccccggccagcatggaacaaaactgatcaatgcgtgtgctagaaggggtgggctggacacaatttcctgtttttgcactaaaaaccttctctgtaaatagggataagagaaactcttactatgcagattacgtnttggaatggtgaacaggctaatttgtacatcaataaaaatgctgtacagaacattggaggtgtgcctgtacgtcatcaaaaaatcagcagtgtaaagaaaaaaggtgtgcgagaatctttctaccagtagtttgtgagagttgttttttttcaaatagcagtgaagatataatttaaaaaaaaatcgggtttttgggggggaaggttagggctgttggttcgccttttaaagggaggggcaaggggtataaggatagaaaag

SEQ ID NO: 49909 - DNA, 729 bp, Homo Sapiens
agatattgaagtttatttgaaaatttaattcgtccttttttcattgtaatatttcatggtttactatttccttttagtattcatgaaaatcgtattttctggttgaataagggtgctctagttttatgtagatgatttcagaatgtgaaggctggtttgcctgtcagtcatggaaattcactggtaaaattgttgcatatttctctctcccagtcttaaaagcccacaggcaagaattaatgctttcttaactaagttactttgagtattaacaagtagcttatactgaggtgtgcttcaagggagcattatagggcagaaaacaaattaaaatgaaatgttgttgttatagccatgcattgaccattaaatgcattttaatatctcggcaaaatgagatttgaaactcattagtttaactcttaaaacatagtgttgttaaacagtattttttgggggcgggtggatagctttttgttctatcttgtacagaaaacagtaatggaatcactcatgttcagaaccttgtaaatatgtctgtaatattaatgcttccctttattaacacaaatatacattcaaaaagggagattttatttagacacacattttcttttcaccctaatctatttagattcatacttattgagacgggaaaaactcgctgtaaaataatgccaacctagataatgctataataaattattttgtacacagttaaaaaaaaaa

SEQ ID NO: 49910 - DNA, 1120 bp, Homo Sapiens
aggcacctgtgatcccagctacttagaggctgaggcagaagaattagctttaaccttggaggcggaggttgcattgagctgagatcatgctagtgcgctccagcctgggcaacagagcgagacttcatctcagaaaataaaaaataggggccaggcacagtggctcatacctgtaatgccagcactttgggaggccaaggcgggcagatcacgaggtcaggagtttcagaccaatatggtgaaaccccatctctactaaaattacaaaaaaaattatccaggcgtggtggtgcacgcctgtaatcccagctactcaggaggctaaggcaggagaatcacttgaacccaggaggcagaggtaggggtgagctgagatcgcgccaccgcactccagcctgggcaacagagcgagactccatctcaaacaaaaacaagaacaaaaacaaacatacagttggcacagaacaagggagcaagtctaacaaagggttccacaatgtacatgcagcacttgcatagtctaaccaacaccaacaagggcctcacaccacacttcccatgccacacatcacagagaacgcgaggacccccacggacagcaacagcacagacacgcacagacaaggcggaaacacgacacacaaccagaaaaactaccgaaacccagtggaaaacaagacaacaacacaccgcgcccacagccagacaaacagagaagaagagaaaacacagaggaagcaataaccaaacagaacacaaacaaaatcgggacaacacaccaaacaacacaacgcaagccataacaacaacaccgagccccgggaaaaaggcagccacagcggctaaccaccagcaggaacccgggaacggcgaccaaaacacctcgcgaaaacaaagcgaaagagaaacccacacgggaggcgggaagggaagcacacaggggacgacagaaagaagagagaggaaaagcaaaaggcgaaagcaaaatgaaagacgaccaacagacaaacagggagatccaaggcgcaaaagatgagggaacagaagacggaacaccaaaaaacaaaagaacacagaaggcaacgatcgacgtctgcaccagaacgacggaaagcagaag

SEQ ID NO: 49911 - DNA, 589 bp, Homo Sapiens
ggaagaaacacggttaataacatataaatatgtatgcattgagacatgctacctaggacttaagctgatgaagcttggctcctagtgattggtggcctattatgataaataggacaaatcatttatgtgtgagtttctttgtaataaaatgtatcaatatgttatagatgaggtagaaagttatatttatattcaatatttacttcttaaggctagcggaatatccttcctggttctttaatgggtagtctatagtatattatactacaataacattgtatcataagataaagtagtaaaccagtctacattttcccatttctgtctcatcaaaaactgaagttagctgggtgtggtggctcatgcctgtaatcccagcactttgggggccaaggagggtggatcacttgagatcaggagttcaagaccagcctggccaacatggtgaaaccttgtctctactaaaaatacaaaaattagccaggcgtggtggtgcacacctgtagtctcagctactcgggaggctgagacaggagatttgcttgaacccgggaggcggaggttgcagtgagcccaagattgtgccact

SEQ ID NO: 49912 - DNA, 984 bp, Homo Sapiens
  misc_feature (960)..(960): n is a, c, g, or t
acattatgtaaaaataaagggaataatcactgagaataaagcagttgagtatttataacaataatattttatggggcgcttataatgtttataatattgtaaaccactgtgtactctattcatttaatgctaaatgacttgaccattcttgtgggataagagatcattaaaaaaatgctagggccgggcaccatggctcacgcctgtaatcccaggactttaggaggccaaggcaggtggatgacttgagctcaggagtttgagaccagcctgggcaacatgatgaaaactccgtctctaccaaaaatcaaaaaaattagccaggtgtgatgttgtgtgcctgtagtcccagctacttgtgaggctgaggtgggaggatggtttgggccccggaggtagaggttgcagtgagctgagattgtgccactgtattccatcctgggcaacagagccagaccctgcctcaaaaaaaaaaaaaaaaaaaaaaaaaaggcctggcacagtggctcacgcctgtaatcccagcactttgggaggctgaggcgggcaaaacacttgaggtcagacgtttgagaccagcctggccaacatggtgaaaccccgtctctaccaaaaataaaaataaaaattatccaggcgtggtggcatgtgcctatagccccagctactcaggaagctaaagcacgagaattatgtgcatcctggaggtgaaggttgcagtgagccaagatcacaccactccactccagtctggacaacagagtgagacccctgtgtcaaaaaaaaaaaaaagaaagaaagaaagaaaaaatgctttatgggcccagtgcagtggcctcacaccctataatccctagccacctttgggaagcctaagggcaaggagggattgccttggaaggccaagaaagttccaaaaccaaggccctggggccaacaatttgccaagaacccccaaancttccttaacaaaaaaaccgaaaa

SEQ ID NO: 49913 - DNA, 550 bp, Homo Sapiens
gcagagagagccagcccctaccctcagagtatctggacctcagagaccatgttgtgccaggggtggtcccacctaaagatgctagcccctctccaggtgggcataaggagtaacagatggcaaaaccacaaactattttgatggactgtgctgcagtatcaccagaagacattagggggcagtaggcccccacacaaaaccttcaggcttgaattttaaaggggaggactttctgccaacttttcttgtatgccttgggaaagccagttgccctgaacccagcagacaccatggaatgtcctttgcacgcattaaatggtacagaactgaagcctcggaagcaatttggaactcgatcttctcttccttaaatgaaaagttattgaccaaatggactttttaaaagacacaggacccttaactttgccccaaagtgaggggctccacaccaaccccaggcggaggaacactcagacagattaaggatactgttgacctgtcactgtttattatttcagcactaaaactgaggagcctcaaaaaaaaaaaa

SEQ ID NO: 49914 - DNA, 563 bp, Homo Sapiens
  misc_feature (511)..(511): n is a, c, g, or t
  misc_feature (521)..(521): n is a, c, g, or t
  misc_feature (528)..(528): n is a, c, g, or t
gcagttagccaagatcgccctgctgcactccagcctgggcaacagagggagactctgtctccaaaaacaaaaacaaaaactgttagtgaaggttccctgggacttttgatattttaaaaattgttcttatgactagtagataaattcattgccataatgaggctagctcccagataaacagtgtattttcttctttttttttttttttttggtgagtggtccagagctttaagctacttttccagtagtttgccactttctccgaggtagtttggctgctctttcagtaatgctaattgtgtgtcaaattttgtctacaacagtaggcaacagatgaagataagttggttgaatgtctccagcactatgcatccctattttctatttattgtgtacactcactttcagtaatgtgtttcaaactggtattttttaaaaaacaaatcaatgtaaggactgaagttgaagtagcaatgtaataaagttaatttgtttaaaaaaaaaaaaaaanaaaaaaaaanaaaaaanaaaattcactggccgtcggtttacaacgccgtgac

SEQ ID NO: 49915 - DNA, 881 bp, Homo Sapiens
tggatttctttatttggtcaatttatatttcttatatcagtattctacgcgacttgaaacaggagcttttgatgggaggccagcagactatttattcatgctcctctttaactggatttgcatcgtgattactggcttagcaatggatatgcagttgctgatgattcctctgatcatgtcagtactttatgtctgggcccagctgaacagagacatgattgtatcattttggtttggaacacgatttaaggcctgctatttaccctgggttatccttggattcaactatatcatcggaggctcggtaatcaatgagcttattggaaatctggttggacatctttattttttcctaatgttcagatacccaatggacttgggaggaagaaattttctatccacacctcagtttttgtaccgctggctgcccagtaggagaggaggagtatcaggatttggtgtgccccctgctagcatgaggcgagctgctgatcagaatggcggaggcgggagacacaactggggccagggctttcgacttggagaccagtgaaggggcggcctcgggcagccgctcctctcaagccacatttcctcccagtgctgggtgcgcttaacaactgcgttctggctaacactgttggacctgacccacactgaatgtagtctttcagtacgagacaaagtttcttaaatcccgaagaaaaatataagtgttccacaagtttcacgattctcattcaagtccttactgctgtgaagaacaaataccaactgtgcaaattgcaaaactgactacattttttgggtgtcttctcttctcccctttccgtctgaataatgggtttttagcggggtccttagtctgcctggcattgaac

SEQ ID NO: 49916 - DNA, 652 bp, Homo Sapiens
  misc_feature (634)..(634): n is a, c, g, or t
  misc_feature (650)..(650): n is a, c, g, or t
tggacatttttatttatctgtgcaaaaagttttccaggtggttgagagcaccaggcctggcaagaaggtctggttaggagaaacaagctctgcatatggaggcggagcgcccttgctatccgacacctttgcagctggctttatgtggctggataaattgggcctgtcagcccgaatgggaatagaagtggtgatgaggcaagtattctttggagcaggaaactaccatttagtggatgaaaacttcgatcctttacctgattattggctatctcttctgttcaagaaattggtgggcaccaaggtgttaatggcaagcgtgcaaggttcaaagagaaggaagcttcgagtataccttcattgcacaaacactgacaatccaaggtataaagaaggagatttaactctgtatgccataaacctccataacgtcaccaagtacttgcggttaccctatcctttttctaacaagcaagtggataaataccttctaagacctttgggacctcatggattactttccaaatctgtccaactcaatggtctaactctaaagatggtggatgatcaaacccttgccacctttaatggaaaaaccctctccggccaggaagttcactgggcttgccagctntctcatatagtttttntg

SEQ ID NO: 49917 - DNA, 571 bp, Homo Sapiens
  misc_feature (5)..(5): n is a, c, g, or t
  misc_feature (15)..(15): n is a, c, g, or t
  misc_feature (28)..(28): n is a, c, g, or t
  misc_feature (42)..(42): n is a, c, g, or t
acgangcccaagtanttcggcacgaggnatttcttacaaagnctgctgaaggtaagattatcaaaattataaagcatttttcacactcaagtgaaacaaggttgacaaactcacttcgcaggtcacatgcctatacatcacttattatatttgggtctgaaacttctcacatgtttgggaggttttatgtgtcctcattgggaaaatgggtgtaattcagcataaaacctcatatgattgtcctgcctcatggagctgttgtatagatcccagatccatcccatgatttgttcctgtctgaggcatagaggcaggcaagccgtggattttgcacatggtgactttcccactgtgccatgatacagtctgcatcttatagcagtgcctttgtctcagggcctctgctggcagtctagaccttttgggcagaaaggagcttcaaatggctgtgataaggaatattaaaaattgtgtttctactttaattgtattggctgttcatgtatgtaggagttaaaataggccaaactggagaaataaacgcattctgtccaccaaaaaaaaaaaaaaa

SEQ ID NO: 49918 - DNA, 1011 bp, Homo Sapiens
  misc_feature (793)..(795): n is a, c, g, or t
  misc_feature (801)..(801): n is a, c, g, or t
  misc_feature (803)..(805): n is a, c, g, or t
  misc_feature (809)..(809): n is a, c, g, or t
  misc_feature (812)..(812): n is a, c, g, or t
  misc_feature (814)..(814): n is a, c, g, or t
  misc_feature (818)..(820): n is a, c, g, or t
gagagcaggctgccatcgcctgggggtggagcaggtgtttacagtcgagagttcagcagcttctcacaaactgttgagaaaagtctctctcctcctgggcgagccgttcttcactaccagcctgctgccgtggcacaacctctacttctggtacgtgcggaccgctgtggaccagcacctggggccaggtgccatggtgatgccccaggcagcctcgctgcacgctgtggttgtggagttcagggacctgtggcggatccggagcccctgtggtgactgcgaaggcttcgacgtgcacatcatggacgacatgattaagcgtgccctggacttcagggagagcagggaagctgagccccacccgctgtgggagtacccatgccgcagcctctccgagccctggcagatcctgacctttgacttccagcagccggtgcccctgcagcccctgtgtgccgagggcactgtggagctcagaaggcccgggcagagccacgcagcggtgctatggatggagtaccacctgaccccggagtgcacgctcagcactggcctcctggagcctgcagaccccgaggggggctgctgctggaacccccactgcaagcaggccgtctacttcttcagccctgccccagatcccagagcactgctgggtggccccacggactgtcagctatgcagtggagttttcacccccgacacaggcgacatcatcatggagttcaggcatgcagataccccagactgaccactcttgaggcataaagtggcctgaaggctgggggttccnnncacccnannncccnccnancgcnnncccctcgaggcatctatgttcggggtgccggaaaaaagaaggtaattgaaaatgggcaccatgggcccatagcctggttttccttgaccccaacctttcctttggtaccaaaggggggtaaaatcctggcccggggccctccccttataaaggggaaggcccctaattttatatttttcccaataaaagcc

SEQ ID NO: 49919 - DNA, 681 bp, Homo Sapiens
ctgattggatttgtcctgtatccccccagtggaggtcctgcatgggatctgatggatcatgaaaatattttgtttctcaccatatgcttttgttggcattatgcagtaaccattgtcatcgttggaatgaattatgctttcattacctggttggttaaatctagacttaagaggctctgctcctcagaagttggacttctgaaaaatgctgaacgagaacaagaatcagaagaagaaatgtgactttgatgagcttccagtttttctagataaaccttttcttttttacattgttcttggttttgtttctcgatcttttgtttggagaacagctggctaaggatgactctaagtgtactgtttgcatttccaatttggttaaagtatttgaatttaaatattttctttttagctttgaaaatattttgggtgatactttcattttgcacatcatgcacatcatggtattcaggggctagagtgatttttttccagattatctaaagttggatgcccacactatgaaagaaatatttgttttatttgccttatagatatgctcaaggttactgggcttgctactatttgtaactccttgaccatggaattatacttgtttatcttgttgctgcaatgagaaataagtgaatgtatgtattttggtgcagaaaaaaaaaaaaa

SEQ ID NO: 49920 - DNA, 591 bp, Homo Sapiens
  misc_feature (515)..(515): n is a, c, g, or t
  misc_feature (524)..(524): n is a, c, g, or t
ggtgactgtcagtggaggggtctctgcagccaactgagactatcttgctgtgccctgagccttcctagggtttagaagaacagcattcaaaattccccgtcctgtcagtgtttgccttcgcacctcctcccctaaagcagcgcggggggcaaataagaccccacccctccctgcagcttcacagggacgcttccttccctccccgcaaccaccccaggctcccctgggaggctgcagttgtggtacacgtccccggtgctgggttggccgtgactcgggggcggggcgatcgggtctcagcccctgccttccccagtctctgggtcacccgaattttcccacccctgcttctccccgaggaggttgagctcttgagcaagttgggacttgggccggggcctggaagaatgattggctgggaggccgcgggagggaggccaggaggcccggaccagttgggaggagtgagcaggccccgggggagggggatgagcgcagtttgctcgctttcctcncctgccggncccctccgcccccacacacactcgggacgtcttcattgaagattcacttacgaaggaatgtttcact

SEQ ID NO: 49921 - DNA, 620 bp, Homo Sapiens
attcctgaaccgcagcacctgccccaccccaggcccctgctctgctcccagccgcccttccctccatcccacgacagctaggaattacgtggggcaggacacgcagccatcgccatgttcatagaagccaggcaggcaggtcccacagtcagtatctctgcgggaacagagtagccgtgtgtggcggtgcagggccccgcagtctaggcatggttggcagtagaagggtgaactgctgacacactggctgacctggcactccacaaaccagcctggcttacagccacagcgggtgtcggccactgctgaacagttctccagcgccacctgggaggcctgctcatcacaggcctggcagcgggcacattcagaattatggtggttctcccaggccaagaaggtgtcttggggacacacaaggcaggtggagttgccgcagggctccgtgcaaggggccttcaggtagtgccccgctgggcagcctctgcaacaaaacagaccaatcttcttgtggaagtcaccggcacagtcacacctggggctacgagtgccgccctgggcccgggcccccagcagcaccaggaggagcgccgccgccaccgccgcgcagccccgcggcc

SEQ ID NO: 49922 - DNA, 734 bp, Homo Sapiens
  misc_feature (664)..(664): n is a, c, g, or t
  misc_feature (701)..(730): n is a, c, g, or t
ctgtagctcctggcctcagagcccctgctgaccctggcacccagggacctgcctgggggcagagagctgtcttcctcctccgaggctctgggctgcacccacaggtacctccacacttgggagttaccatcatcacagtcagccctgggggtggggggtggtgggcagggatgggacgcaccacacagaactgtgattgtggatcaggaggggaatgtcaggattcgcaaaatggacttttcatttgtcaagtattgggacttgtgatttttaattatccagcatatagaatgagagggagggcagccttctgccacctgtgtcgcctccactggcagtcacgccaccagagccaccctggctccctctcctccctgagcacctgctgctgcgattttaaagggaactgtactactcgcagtgataggtttgcagagtgtgtgcttggctgtggcagcctagcttggagaagctgctgttggtgcaagggagatggtctcaagtcagagggaagcagagacgcgcgtctcaagcctgcccttcctagacggccacctgcaggaccccacactcactgcactggcagcgtgtactggcgtatttgtaacaggcttctcggtgctcctcacccgtgtgctgttttccaacaccacctttttgcctncaggtctctgtaaatggaataaactgtaatttactannnnnnnnnnnnnnnnnnnnnnnnnnnnnnaaag

SEQ ID NO: 49923 - DNA, 567 bp, Homo Sapiens
tttttttttttttttttaaggagaaaaaaaaaatgagtaaaaggagctccacactttgacttaatttcatacaaagctctgatgacaggccatgactgtagagtggtcagaactgtgtggttggtttgagggagcgaattcggggaaggcacttggtgatataactttgttttgtttacagagtacctgctcgggccaggtaaatgctattggatgtaatccagtagtgtgtaatataaattcaaaccatatccacacacaacaactaattgtatgaaacttttatatcctaatttaaaagctgtgaaattagttttcacgcatcaaaccggattgtttatatgtttaaacattttatgctcttatttaaagaagactttgagctatttttttctgtaccctgtaaaatattgaaaactaacataatatgttgaggttgcttggaaatgtacataaaactaaaattttctgaatcgtgtgtttatgtttgaaatctgtgttttaactttgtaagtaaattctctgcctttgtatttatattttacaaaaattttcttaacctcgtgc

SEQ ID NO: 49924 - DNA, 562 bp, Homo Sapiens
gctttcttttgatctggaaaggaaaccgtcgaagatcgtcccattagaacctcctcggctacagcgattccagtgtggagagctccctttcctgactcacgtgaaccccaggctccgattgtcctgcctttctatccgagagtcagagtactccagctctctggggatccttgcttcctcctgttaactgaactgcaaggatggcctgagagtccttccttgctgaaaacctgaaggcctaggtcctggctcctctccctacttgttctgtgattgaaccaaggactccagattcacaaactgctactccactataatttcccttctttggtgttctggtgccagcctgccttggcaaaattgtggcaacaggaaatcatggccctattaatatgtcctctgattgggacaaggcacctgcattcacaggcggccctgagtacctgggttctgactttgtcacaggagctgagggaacaaaagacttgctcgctgtggggtgatggtgacaggcctattgacctgcaatgaagccctctggtggcaaaaaaaaaaaaaaagg

SEQ ID NO: 49925 - DNA, 475 bp, Homo Sapiens
tagtgttctacaaccagatgcatcaccttctaaaactggtacattaacctcaataccagttacaattccagaaaacacctcacagtctcaagtaataggcactgagggtggaaaaaatgcaagcacttcagcaaccagccggtcttattccagtattattttgccggtggttattgctttgattgtaataacactttcagtatttgttctggtgggtttgtaccgaatgtgctggaaggcagatccgggcacaccagaaaatggaaatgatcaacctcagtctgataaagagagcgtgaagcttcttaccgttaagacaatttctcatgagtctggtgagcactctgcacaaggaaaaaccaagaactgacagcttgaggaattctctccacacctaggcaataattacgcttaatcttcagcttctatgcaccaagcgtggaaaaggagaaagtcctgcagaatcaatcccgac

SEQ ID NO: 49926 - DNA, 684 bp, Homo Sapiens
gtgaagttaggaaatccttgaaagaaaatcatgaatgaacaaaggtaatatgtctagcactgcactgaaaaaggacttctgcatttctgacatagaacactggaatcccagtgaggaattctaagtgaacattccttatagaaacctttcacatgaatgactataaactgaagctttaaatgagctgtgaagtgtgttaaaatgtgttttgatacagtaatatataaatatatctatatatatgaggaacttgtgtttttttaaatggtggccaggtagaggaactagaaaagagattttgttgcctgttttctgaccatctgtgttattgtcactgagaaactaaaatagtaaatttactaaaactacactgcaccatgttagtaataaacagatctgccttaaagaaaagaaaatttttagaaagaaatgttgttgctcagtgttgttaatatagctcaagaattgagtttatatttgcagtatgctataaatgatacccccctaccacacccacacacacagtttttgtctaatgaaaatgttgctgtgattatttataattggtagtatttcttccagaagaagctaaaataagactggcacttaccctgaagtgcattaatcttgtcggccgcctcggcccagtcgactctagactcgagcaagcttatgcatgcggcc

SEQ ID NO: 49927 - DNA, 757 bp, Homo Sapiens
  misc_feature (735)..(735): n is a, c, g, or t
ctgctaccgagatgctcagccagcccaaccaccccagcggcgaagtcaaggctgaaaataacattgagatggtgggcgagtcccaggcggccaaggtcattgtctctgtcgaagatgctgtgcctaccatattctgtggcaagatcaaaggcctctcaggggtgtccaccaaaaacttctccttcaaaagagaagactccgtgcttcagggctatgacatcaacagccaaggggaagagtccatgggaaatgcagagccccttaggaaacccatcaaaaaccggagcataaagttaaagaaagtgaactcccaggaaatacacatgctcccaatcaaaaaacaacggctggccaccttttttccaagaaagtaaataacggctttttaaaatttgtatgattataatatggggaaaggtgcattggttttataaaaaggcatttaaaacaaattatctttgttaattattttggggagtagttgggaaatggaaaggtgaattggctctagaggccctgtatgctagtatcattttcttttttaatttttgacttttcacaaatgagtaaataagagcaacctatttttcaagcagattgcacattttttgcagctttaatggaatattgggtgaattagaggggtaaaaaaagctattttcattgccacaaagtgctttgatgatgtaatacctaataaagggtaggatgaatatttcacaataaatggtttgnttgcactaaaaaaaaaaaaaaa

SEQ ID NO: 49928 - DNA, 546 bp, Homo Sapiens
gcacgagccagtactggaacgaggagctgcagatgatgagggacctacccaacaagaaccaacctgagcagctgcttcaagaaaaagccatgttcaaggtgcctgaatcccctggtaagtgagtgacagcctcacagcctcaggcccacctggctcctgctggaaggttttcttgtgctcgggagagaagtgagggaagccggcagtcccagccctgtcaggtgccctgaaggccggtcaggtttgccctgcaaggccttctagcattctgcttcctgggagaccatcccccacctttctccggcctctgagactttgagtccttgggaggagaaggccctccttgctatctgggctgagtggccagggccatccagcttcccaccctccactgactgccatggggccctcccctgagcacatggtgcccaactgtagcccttctagggcaggggctcattggcagcacttgcagcttgctggcacttaaaagtcattagtgcggttactgagagaaatgaggaaaaaataattgttaaaaaaaaa

SEQ ID NO: 49929 - DNA, 848 bp, Homo Sapiens
tgcactgctcgagacataagttctgctgtagttagcgcttagtgacacgcgggcctttggtgggtgagcgggactgtgtgttagttttttcgcgtatgttcgcacatatgtttatgtttggagtatgtttgtttgcttctccgtggatgaaatagaaactcctcattgtgtgaccaggaatggttaaatcatctttacaaaatgtgtgctttaactgtttacaagtaaaacctaaagttgcaggaaacattttttatttcgtaaagaggtaccaactgtcgctgatgttatatgtcagaactgaagagtaaatctacttgtttaaatgacttgacagttgtagtgctccatttaataacagtaataagtaataaagtgtttttatttgttaaccagtttaagtggatcctgtggtaacttaaactgttgttctcatcccttatatggggcatttttctttaacaaagaatggtttcagtgaaaaatctagcagagaattaatgtcagaacctttttaaataatagtctgattgatacagtttgtacttatttcatcaagcttttctaagcttaaatattgcatagcttcgagctgtatggactatattatgaaagaatatgtaaagagaacatacagtaatgcacagtccttaatttgtgtataatggaaagttatttacaatataacactgtaaataagaaagcaaagtttatgggaaaattcaatattatctttgtttttgtttaaatatatttttaagataaaggcacaaaaataaaagaagcgtattactgggtatagtatgtgactyctcttctcagactaataaattatcttttgaatcctt

SEQ ID NO: 49930 - DNA, 581 bp, Homo Sapiens
cctccttccctgccgcctgcttcagctgggttgctggggggtgggcgtggatttagggagggggctgtgatgtaaaacgtctcccctgccaaaggaggggcaaagtgctgtgtcagttcctgtttcttcccatttcctggcacactctgcccctctgtccgggggacacgcgcatgtgtttgccagggatggggccaccgggttgatgccaacgctccgggtgcctgtcttgtctgtgtggcttctcagatggtggagggtgctgggagctggcagggtccttccagacagtctcagcctctccccgccgcccccaacaggctgtcaaacaaaaccggagagggggtgggggagccagcctcccagcgtgctgtgcccgcaggcacccgtgtgacatccgcacgtccagctccgtgacctgtgtgtgtgtgtgtgcacaagtgagtgagagatttcgaacgcccacccctcgactttgaaatctgagcaaaacaagaaactggggtcttcctctcccccgaacctctccccagctagtcttccctctgttcttcctgcctccagccgcccgcgccagattt

SEQ ID NO: 49931 - DNA, 1015 bp, Homo Sapiens
  misc_feature (602)..(602): n is a, c, g, or t
cgcggcactggtcctggtggtcctcctcatcgccgggggtctcttcatgttcacctacaagtccaaaaarttcaacgtggagggcttcgccttggtgctgggggcctcgttcatcggtggcattcgctggaccctcacccagatgctcctgcagaaggctgaactcggcctccagaatcccatcgacaccatgttccacctgcagccactcatgttcctggggctcttccctctctttgctgtatttgaaggtctccatttgtccacatctgagaaaatcttccgtttccaggacacagggctgctcctgcgggtacttgggagcctcttccttggcgggattctcgcctttggtttgggcttctctgagttcctcctggtctccagaacctccagcctcactctctccattgccggcatttttaaggaagtctgcactttgctgttggcagctcatctgctgggcgatcagatcagcctcctgaactggctgggcttcgcctctgcctctcgggaatatccctccacgttgccctcaaagccctgcattccagaggtgatggtggccccaaggccttgaaggggctgggctccagcccgancctggagctgctgctccggagcagccagcgggaggaaggtgacaatgaggaggaggagtactttgtggcccaggggcagcagtgaccagccagggcaaatggcttagaagcaggccactccccagcctgctgccagcactcactgtgctcaagccgccagggctcatcatggtagctgggagctgtggacgggagttaccaggtggtggggscaagccagggactcatgacttttgcccctccctttcagagcstggtcacacaaggggsgagcaccaggccagcctggggactggscagagctsggsccaagctgcgygggaatcgcrcaggagaagggagtgggyggkttcttccaccactyccaggrctykaaavcgaraatawttckaaggcaaacagcttytaaaggg

SEQ ID NO: 49932 - DNA, 603 bp, Homo Sapiens
  misc_feature (595)..(595): n is a, c, g, or t
ggaggggatttgcacagggaggtaagctggtgtcatgctgagcatgcagatgcatttgctccctggatgcatagcaggtgattctgccagcatgcaccagtgcagccttaccagttgtttacatccagcatctgttctgattgtcagcatctgtcccatgctgcttgtcacatatctggagtttcactctgtgtagatgagctgtcattcaggacactaggagaaaaatctgagtgggtcattgtgcccatatccacagaaaatgcagaagttgaacagcttgcttgacaaccctcaaacatctttgagcacctggtacagatgtttatgagaatactctaagatctcaacccttgatcccaaaggcacacaatcacagagcattccttttgactgtaaactgtttaccttgcttttgagagccaaacattgtacccaacctggaaaaagtaactaccccaattaaagtgcctcatgtgtccccagagcatggcttaacttcagggacaatcacccagggaactaataactaaccagttgttcaacagcgggttaagctcagcagttttcacagtagagcagaagtccccagganacaaaggg

SEQ ID NO: 49933 - DNA, 496 bp, Homo Sapiens
  misc_feature (478)..(478): n is a, c, g, or t
attaagaccagtcactacagataaaaaagctttggaagctattacaacagcatcagaaaatattggaaagatggttgcttctctgcaaagtgatataattgaaagccaagcatgccaagacatgcaaaatgaacaaaaagtatatgcaaaaatacaggccacgcacaagcaaagagagctggctaataaatcatgggaagatttcttggctagaacatcaaacgctaaaacgttaaagaaagcaaaaaggcttcaagaaaaagctatagaagcctccagataccataaacgaccacaaaatgcaatatttcaccaaacacatattaaaggccttaacacaatggtgccctctggtggagtagtaacagtggaaagcactcctgcccgattagtaggaggacctctggttgatacggatattgctcttaaaaaactgcccattcgaggaggagccttgcagagggtgaaagcagttaanattgtggatgcaccaaaa

SEQ ID NO: 49934 - DNA, 494 bp, Homo Sapiens
ggaaactgaggctcaggagagaggcgctccaggccgatgcagccaacaaaccggcgccctcttcacacgtagctcctcaggccattccccatgagtcccccacacccaccccatcctcggtctttgcaaagaagggcccgagcttagtttccccaggactggcctaggaaggagcaccggccacagctgctccccgtgccactcagggtggacccagcatctcaggagcacctcagggtgtcggttaagagacaggcctccacccctgcaccagagcctgctcttagctcccggtgcccccagaccccgcagctctgtgcccggcaagaagcagctagacacacgccagggcgccaagcacggccagctccgcggacccatggacaagcccagccccgcctcagggaaaacagggcctttccctacaggacacgccccagagctgtggcagattgcaggagccatcgtgtggggagaatttaataaaagccctt

SEQ ID NO: 49935 - DNA, 780 bp, Homo Sapiens
gggtttcaccatgttggccaggctggtctggaactcctaacctcaggttatccacccaccttggcctcccaaagtgctgggattataggcatgaaccaccgtgcctggccaaagatgtaatttaaaatagttagaagggacttggcatgggccagctccgtgcatggcattttcacccccagagcttcctaatcctgttttcacacaggaagtttctaggtctttctagaacagctagaaatagtagctgactcccgcccaaggcccaaccttcaaaccctgagctcttcaggctgcatcctctggtgagctatagaggagaacgtggctcctaaactctagccatcctgtgggaggaaatagacttctttgggctgtggcttgcagaacaaactacactttttttccctctattgtttaaattttatttaataatttgtgtgtttttctgtctttattttctgtatttcacgtgttccttcactccctagaaactgcactttctttgaaaccataggtaatgaatcttactaggagaggcatggggatagagacagttctgggagtgtgacctgtaagcctcctgtagggcagtgccaggccttgattgcccacgttctctccgttccttcttccttcatacatttgatcacacagcctacacccagccccgagtgtgcatcacggtaaaagagctgagggctctcttcagggagcagcccatttaggtctcttttggtggtggtagggagaatacacatctttcttggaaaaaaaaaa

SEQ ID NO: 49936 - DNA, 622 bp, Homo Sapiens
aggcacagacaccaaggacagagacgctggctaggccgccctccccactgttaccaacatgaagctgctcgcagcaactgtgctactcctcaccatctgcagccttgaaggagctttggttcggagacaggcaaaggagccatgtgtggagagcctggtttctcagtacttccagaccgtgactgactatggcaaggacctgatggagaaggtcaagagcccagagcttcaggccgaggccaagtcttactttgaaaagtcaaaggagcagctgacacccctgatcaagaaggctggaacggaactggttaacttcttgagctatttcgtggaacttggaacacagcctgccacccagtgaagtgtccagaccattgtcttccaaccccagctggcctctagaacacccactggccagtcctagagctcctgtccctacccactctttgctacaataaatgctgaatgaatccaaaaaaaaaaaaaaataaaaaaaaaaaaaaaatattaaaaattaaaatatataaaaaaaaaaacatgcggccgcaattcgggctcacttggccatattgccctaatgggagtcgttttccaattaattggcccgcgtttaacaacgcgg

SEQ ID NO: 49937 - DNA, 636 bp, Homo Sapiens
cagatggagaacaacaatttggatgaactaaataaaagcaagatcattgttaaaaagaaacccaaacaattaaatccatttcatttaaaagtgggtcatgaagttttaagacaaaggaaaaattggtggaaggatggtcgttttcagtctgaatgggttggtccttgtgtcatagactatattacagaaagtggatgtgctgtcctgagagacaacactggggttagactgaaaagacctatcaaaatgtcccaccttaagccctacataagagaatccagtgaacaagaaagtctttatctcttgcaaggttcagtagtggcagatcatgactacattggattgcctgaaattccgattggagcatatcaagcaaatattctggtggaagatgcaactattggtatagtcgataatgaatcactgacatcaagcaaggatcgtgaactattagaatatagaaatacgaaaatctctccattgatagacgatcatagttctcttgaaaagcagactttcagtctgttggactcttcaaaccaggttcttgaatacttaagttagtaaataccaaaatttatttaaattgtttgtttagaatataaattcttaatgatatcttattcattaaaaacg

SEQ ID NO: 49938 - DNA, 601 bp, Homo Sapiens
ctttctgaaaatcagcttgattctcccagcgtgtcatcagtgctcccttgttttatgggctggattccacaggatgcatgtggtccatattctccggatgagtgcatctctttgcctgtttacacaagtgctgaaagggatcgtgtggttaccaatattgatgttccatgtgggggcaaccaagaccagtggattcagtgtggagcagctctattcctaaaaaatcagtagaatctaatgacaacaaaagccatcttcacaaaagggaacattgattctttaagctttaaatcaaacatgtggtcagtctacatttgaaatgttagttcaaaatattaacatatagttatgttgttgatgtcactgaaattttaatgtgtaaaagcagcactgtgcatcttttaaagtaataaattaatggagttattgttaaaacagagtattcttttgacaacattaaatatttctgtgagaaagttcacttttccagtggctcaaaaatttgttttaggtcagagattttaagtggtatattaaccaataataaatattttggctgtcatttgtgtcataattatttaataaaagagcattcataaaa

SEQ ID NO: 49939 - DNA, 676 bp, Homo Sapiens
  misc_feature (576)..(576): n is a, c, g, or t
atatctgctctggatattacgcattggctttttgttgcctagtgctacaaaccttcctgtgggactcagtgtcttcaggcaatgattgtgtatcctgttacagatggttgtgatacaagaagaaccactcttctttgaaaataaactcttggaagcttttgccagctatctggggggtaggaggaatattagcaactgtattggttgtctacagatacagaattgcctgttgtgagggaactgattgttttgttgggaaaagaaatttaccaggagaaagagttttgtgctgtattgtgagagatctcgcctctcagttaaatgagccctgggttaaagtcagtgtgaagggcagctgtgtgcgggcacgagccagagtgtctgcctcagactagatttgacttgagttctttatgacccaggactctggataatgtgaatttgctttcctatttaactagaagatacatgtactatagatcattgtctcattttagtgattgttccttaaactagtgaaactagtggatttctcttcttcctctttattttttgcatgttaaatgtgaaccttantgtatttgtattttgtagaaaataatgaaaaattttaatggagaatgatttaaaaacatttacaatacattatttttgcatctgtaaaaaaaaaaaaaaa

SEQ ID NO: 49940 - DNA, 772 bp, Homo Sapiens
ggaagcatgatctggcaggggccgccctgtaggctggggatgggctgctgtgtgaatgttgacgttcgtttcatggagaaaggggaggtgaaagattgaagagcaggttcctgtcaatgttctgagttcgagctggaggtgtagatgaatagtctacatggtctgtgagtgtgtgagatgaacccttccatcctttgacacctggttgtatgtgtaggctaagaaggaaggaccctcctgtcagtgtgcaaagctgtaatctcatggactagaggagagggggccaaggggatggacaggagaagtcatgcagaatctaagcaggaatgcagatagaacacatctaggctcttttccccaggagagtgatgatggagcatatagatctggctcaaattcagcctccatcacttaccagtcaggaaccctggcgatatcactttaactttctgaacctcagagtcttcacctataagacggggaaaaataataccaccctttcaagatgttgagataaataagtgatataaaacatgtaaagcttagttctggccacaggtgtagctactcaataaatgatagtactacgaaaaaaaaaacaaaacaaaaaattgggtgggcgcccggccccgaaaagatttaacccacgcgtgggggcggcgcccagggtggaacaggtccacgggtccaggggcacccggcgcagggggtgtccccaaaaagcccggggcggcgttgaaaccagggcggggagggcataaaggcccgcaag

SEQ ID NO: 49941 - DNA, 622 bp, Homo Sapiens
ggcagcctttgaggaaaccgtaccttggggatcgccaggcaggattagtggcaggaattgagagaacagagccccacagagctcctcggggaccgtcccccagtcacaagagtatctcaaggaagtagtcttctcccacatcccccaaagataactaccagagggtcagttctctgagcccttctcagtgtagaaaagacaagtgtcaaagcttccccactcaccctgagtttgccttctatgacaatacgtcgtttggcctcactgaggctgagcagaggatgctggacctcccaggatattttgggtcaaatgaagaggatgaaaccacaagtacacttagcgtggagaagctggtgatctagactgagaatcagcctgagcttaacacagctggggtctgctactcgcgttttgtagacttttgtgtaactatttgtaccgtaggacagaatgtgaggaggaagtaacacacacagaggaggatgtgtgtgtgtgcatgtgtttgaattcacaaggaagaaattatttatcttgagctttttcctttgttattcagtttttattggtttattactaataatgataataaaatgtaaacaagagcaaaaaaaaaaaaaaa

SEQ ID NO: 49942 - DNA, 1047 bp, Homo Sapiens
aggtgaagawgccagamgtggagcwctttgtwaatttgggagamtggcctttggaaaaaaagaaatccaattcaaacatccatccgatcttttamtggwgtggctccamagattccaaggatatcgtgatgcctacgtacgawttgactgawtctgttctggaaaccatgggccgggtaagtmtggatawgatgtmcgtgcaagcaaacacgggtcctccctgggaaagcaaaaattccactgccgtctggagagggcgagaaagccgcaaagagagactcgagctggttaaactcagtagaaaacacccagaactcatagacgctgctttcaccaactttttcttctttaaacacgatgaaaacctgtatggtcccattgtgaaacatatttcattttttgatttcttcaagcataagtatcaaataaatatcgatggcactgtagcagcttatcgcctgccatatttgctagttggtgacagtgttgtgctgaagcaggattccatctactatgaacatttttacaatgagctgcagccctggaaacactacattccagttaagagcaacctgagcgatctgctagaaaaacttaaatgggcgaaagatcacgatgaagaggccaaaaagatagcaaaagcaggacaagaatttgcaagaaataatctcatgggcgatgacatattctgttattatttcaaacttttccaggaatatgccaatttacaagtgagtgagccccaaatccgagagggcatgaaaagggtagaaccacagactgaggacgacctcttcccttgtacttgccataggaaaaagaccaaagatgaactctgatatgcaaaataacttctattagaataatggtgctctgaagactcttcttaactaaaaagaagaatttttttaagtwttattccatggacmatataaaatctgtgtgattgtttgcagtatgaagaamatttctacttatgcagttttctcatgamtgtactttaaagwacattttagaatttataataaacmcctttwttttaaggga

SEQ ID NO: 49943 - DNA, 805 bp, Homo Sapiens
ttgaagctgtgacagcccctggttcagaggcctttagcaaagtcgccaaaagctggatgaacttgaaaagtatttcaccttcttataagactcttccatcagtatcagaaacgtttccaacgttaagatcgatgattgaggtgctaaacacagactcttctccacgttgtcttaagaaactctagttctgctgctgtatttatacaagtaaagggccggacctcttgcttcttaagttattttttaaaacatggaattataaagaaattaggtcctctattacttttgataccaatttttataggaattgaatacttgaaatcattttctttacttttctgaaccataatgaaaatcatgaaagaggctttcggggggaaaaagctacttgacttggagggaaagcgtatgtattagccggcagcctgttggttcccacttataaagtcatataactccttccttacagtaaaaaaaattttcctcaacaactaaaatataatactgaagatgaacaaaaacaaaaccaaataggagtgtttgtattcctttagagatctggatatttttcaaagacttgctttttacgcacattgtgatagagcatcttttgttgactcacgtaacctccatgtgtgggtcctttgttttattagaaccatggaagaaggttcctgggccatcagtatgtgttgcagagctcacagccaggaacacttattttgaaacatgcagacagtacttgccagagtcccaatgctgaaaatatgacatgttttttttccttgtgaaaaaataacaggtg

SEQ ID NO: 49944 - DNA, 807 bp, Homo Sapiens
accatggtggtggttggcttctgttcttattcttgagtttgataccacgcagacctgggtggggagagcttcctgcacagctctcagcggcctgtggccttggaactgcctgcgtaagtaacggaggggctgctggtcctgttcaggcccgtgctggggacgccgcttagacaatgttgcccagagtcctgtttaccctcccagggttcattcttcccaagaactcaaattcctttctcatggagcctagtgaaaccaaatgaacgggacctgctggcctcaggaggcaggcagagtttaaaataaaactttctcatgatttcttgaacatctttccctgtttgtatatacactttgtgtttatttttcagtagctgcagtatattttttttcaatattcagtataatgcagtgtatttcatcatatgctgtatggagagtgggcagacttctgtggagggcccgatagtaaccatttgaagctttctggacctgtggtcttagtcccagcgattctgcagagcggcatcggcagcatgtcaaccatttgcatggctgggctccagggaaactactgacaacgacaggtggtgggccatagtttcctgaccccgtgtgctatgccagaatttctttttcctcttccctatgagtggcctaaatatgttaattccttttcacctttcaaaaggacagcccttgaacattaaaaacttcgcagaccctaaaaaaaaaaaaaaaactccgggacctatggcggggggggaaaaggggtttgaatgggcatgttcatagttgttcctgcca

SEQ ID NO: 49945 - DNA, 671 bp, Homo Sapiens
gtccgctgctgtccctggcttttatcacttacgtggagcatgtcctccggaagcgcctggctcggatcctcagtgcctgtgtcttgtcaaagcggtgcccgccagactgttcgcaccagcatcgcttgggcctgggggtgcgagccttaaacttgctctttggagctctggccatcttccacctggcctacctgggctccctgtttgatgtcgatgtggatgacaccacagaggagcagggctacggcatggcatacactgtccacaagtggtcagagctcagctgggccagtcactgggtcacttttggatgctggatcttctaccgtctcataggctgaggcacatctgtggaccctcataaccctcttaagacccctctcagggtgccactgatgggggatgagggaaggccctctctctactccttgaccccctccatccttgacccccaacacctcaacacacacacacacacacacacacaaaatcacaccattttcatgcctgtcaatccccaccccaccacaaggcaggaagggggtggtgcctgctggggcctagagggggatgcttggggaaacagagaaggggagatccagggcctccccgccttccttcttcctttttatatacaatttgttattgtcaaataaaaagtaggaaatatt

SEQ ID NO: 49946 - DNA, 721 bp, Homo Sapiens
  misc_feature (699)..(699): n is a, c, g, or t
ttgttgtccccagtgtcctacaaactaatgtatttgtgcacaagacatcatctatgaatgatgaagttttctcaccttcaaagtcttataaacatgttgactcttgttcctgctgagttacttgttcgaagcttacagcttgttttccaggcatcgaataactgttgagattgttctactgttgtcgtatattcttctatattgaattctggttaatttggagtaactaattctgtggctgttgtgagtcttcagcaccctcccatgtaccttatatccctctctgaaacagaacagctccaatagcaacaagctagttgttctgccagatgtttctatgtggattctgtaatgttcctccatacagttaaaacatcctaacttgtttttcaagctcactcaggcctacgccaaacgtttctgttttttttaaccatgaggtttaatttatttttgtgataggagggatatttacatattttagtggaccacattttaagttggatggtgtgctctaaaatactgaaaaacaatagcccatatacctatgtatttgtttttgatgggttgtttactctgaaataaaatgtatggttttcttaaaaggaagttttaaagtacctattttgtgtcatcctgtattgaaaagaatgtcaagcttgttaaaatgacatgtaacaaaaatgtattttgatttgnatttcagaaactaaaaaaataa

SEQ ID NO: 49947 - DNA, 743 bp, Homo Sapiens
ggtgaaacggttcaacgccctctagatcgcctgttctcctctattgtcaccgttgctgaacaaaagtatcagtctaccttgtgggacaagtccaagaaactggcggagcaggctgcagccatcgtctgtctgcggagccagggcctccctgagggtcggctgggtgaggagagcccttccttgcacaagcgaaagagggaggctcctgaccaagaccctgggggccccagagctcaggagctagcacaacctggggatctgtgcaagaagccctttgtggccttgggaagtggtgaagaaagccccctggaaggctggtgactactcttcctgccttagtcacccctccatgggcctggtgctaaggtggctgtggatgccacagcatgaaccagatgccgttgaacagtttgctggtcttgcctggcagaagttagatgtcctggcaggggccatcagcctagagcatggacccggggccgcccagggggggatcctggcccctttggtggatctgagggacagggtcaagttctctttgaaaacaggagcttttcaggtggtaactcccccaactgacattggtactgtgccaataaagacaccccctaacctcacccagggttggctgctttcacccttgggcatcttcataacaaaaaacaaggagggggaagccccggggggggaagtgcgccagggacaagcttccttgtgggccgcccttggccccccaaaaaacc

SEQ ID NO: 49948 - DNA, 631 bp, Homo Sapiens
tgaaatataactgtgcattgttaactctttcatttctgtagtaaaaggttaatactagaaaggatatgcaattaatactttgattttctcctgaccccaagagcttgtaaggatatgtcatgtatttactggtttttcttgtatctggtgcatagccagagttccacagtaacaaataatttgacaatttttatttctaatgtttatttctgttttatttttaatttttatttctaatttatttcatttacaaatgttcatattttaaaaacttgtcaatgtaaataatatgatgcatcttatcatggacaaggacagtgttttctacctttatcagttctctgtaatacccaaaacagtgctgtatttactccaagtattcagaagtgcttgttgaataaaacagtgttatctttaattcattcctttaaatacatgtttccagtttacttattcaacagattcttacttgggattgactgaagaaaaaaaactttaattatagttgaataagtgttgactaatgtattttaaaaactataatatcaaaattttttatattaaatgtaattctgattttttaaacatttatgctatatgatgcattattttgtttctgtgaatatggaga

SEQ ID NO: 49949 - DNA, 738 bp, Homo Sapiens
  misc_feature (672)..(672): n is a, c, g, or t
gaatttatctgcctaatcagacttattattgagacgcaatgggacgcatttttctgttgagctatgcagtcgtcaaaacagcgatagacagcataggaggtttgaagcagaaatgaaatgtgttattcagagccaatgttgtacatagagcattttcactattgctgaatgggaatgattaaaaacaaggtatttttcgggccaggcggtggctcacgcttgtaatcgcagcactttgggaggctgaggcaggaggatcacttgagcccaggagttcaagactagcctaggcaacatagtgagaccctgtctctactaaaaataaatttaaaaaaaattagctgagtgtggtggtgcatgcatgtagttccagctactcaggaggctgaggctagaggatccttgagcccaggaggttgaggctgcagtgaggtgtgattgcgccactgcattccagcttgggcgacagagcgagacccagtctcaaaaaaaaaaaaaagtatttttcctcttaccgttacagtatcctgattatattactgacacagtcaaaatgattaactggtacaacctgtatctgcgggagtgtcctggtaatcatattggtacaaacagctttacaaaatattttatttttaaaaccttgtttgtgacattaatatggccaaagtnggatcaaacatttctcagggtggctcgaaattcacctacatagcaaaacacacaaaaacaaggggg

SEQ ID NO: 49950 - DNA, 722 bp, Homo Sapiens
agcgggtaactagtttgtaaatcagctgggatttcttcctttttatttcattcttttaaaaaatttattttaaggtagtacatgtagttggaagaactactataaaaacaatatatgtgggaaaacttccagccctctgttaattgtgtgtctcaaatttgttctggaaaagaaagggggaaagtctatgaacgacttttcaacctggcaattccatatacaatgttaaacttgattcttatgacatattcctatgaaaataataaatactggcacttttccttgcagaaagcactcagacctgaatcagagaaaatcatatgccaaagccaactgccagtgttagacctctttttccataaagagtaaatggaatgctaacactagtgggcttattgagaaaatttaaaggttgctgtagtgtttagaacttaggctggaaaaccatattttagtgcatcattttactacatgatcttccaattagatagcttgtaatctgttccttacagcacttgctgttgttacatgtgaagattttataaattttaggaaagtgtctatgatatatagtgaaaagtgtgggaaaagaatatagaaataaatattcacttctaaaaccattatgataaaatatttgtgtatggattagaatagaaagggatctatggatgtatctattcaatttctcagtttatgttgggccttcctttttgcgaatg

SEQ ID NO: 49951 - DNA, 675 bp, Homo Sapiens
gcccatgtttctgtgaagtaattattaaaccaacttaatgattcttatgtaaggtacactttttattttaatacattggtagtctctatgacttgtagcaatgttttacaaatgtttaaaatgctaaacttaattttccaagcttttcttgacaattagatacctatcctgtagttactgaaaatctgggtagtaaatctacccaattaaaatggcactttataaaagggaatagagaagagatgggactatttctatatttaaatgctgctggctattcctttgtatataaatgaaaaataccattcattaaaattaagtactcgtttaagtatggttcttaattacatttcattcatttatattagagtaaatggcttcataactactttaaaatttaacccacaagcatattaaatctgtttgttataagattggaaacaatttttgagagggactaatttaaacaagtcctcctttagtcttttgggtcgcgtagttgctgaaacctaagtacctgcagcctacaggataaggaagttcacagcctgcggggtgaatgaacccatgtgtgaactgcacagagcaattcatagaaaatgcatagaaatttgtaacactttggtcacatctgtctctagatggtcattgaatttgtttaaagatggatgaaag

SEQ ID NO: 49952 - DNA, 799 bp, Homo Sapiens
ccaagatatctgcaaatgaaatagaaatgcttttgatgaggctgccacgcatgttcaaacaggaattcacgggtgtgggagccacgctggaaaaaagatggaagttgtgtgcctttgaaggaattaaaactacctaactgcgaagagcaaagcatctctggaaatgaaaccatgtgaacctggccagggcggtgcgacggggaagcaggaggtgtggggttggtccagcacacaacctttgtggagccatcgaagcctgcctttagttatatctgtggcgttctcttgtaagtggaaatgtaattgtgtaccagtttcttaaaataaacaaagcttcatactgtgacagatctgtttcctatgaaaaccaaacaatgattccacagtcataatgatggcaaaatcttaaaatgtgctacatttgagaatagctcaccaagcaaaatatttaaagttaatgatggtgtagcaatgatcgtagctaggctacagagttgtatatgtaatgtatagctgaaatcattaaatgacattttcctgaaagtctttctgttttagtaaaaaagaagaaaaaaaaaaaaaggaacgacagacaaaacacacagaaaaaaagaaccaagttcacagaggagggaaaagcaataccaaagaaaaccaccggacataggaggcaaaacaaggaacacggaaacaggcgaacacaaaaggcaaaggccggacacacggacacaaggagcaaagaaagaaacggccgcaacacaagaagagacccaaacacaaagtgccaaaccgaaaaaat

SEQ ID NO: 49953 - DNA, 800 bp, Homo Sapiens
  misc_feature (784)..(784): n is a, c, g, or t
gggaatctaaattatttagtccagcacataaaaaaccgaaaacagcccaatactcatcaccagagcttaaaagctgcaaccctggatattctaacagtgaacttcaaattaatatgacagatggccctcgtaccttaaatcctgacagccctcgctgcagtaaacacaaccgcctctgcattctccgagttgtgaggaaggatggggaaaacaagggcaggcagttttatgcctgtcctctacctagagaagcacaatgtggattttttgaatgggcagatttgtccttcccattctgcaaccatggcaagcgttccaccatgaaaacagtattgaagattggacctaacaatggaaagaatttttttgtgtgtcctcttgggaaggaaaaacaatgcaattttttccagtgggcagaaaatgggccaggaataaaaattattcctggatgctaatatccgtagattctctggcatttagtctcttcaaactgtgtataatgtttggtcctcctctgtttcatagaaaagtcatagaatatctatgatacattgaaaagttactgcaatatttgagaactgttctttttttttcttgtgtgtgccatctttccattgttggctacgtcttttcttttgccttgatgaacgttctatgtatttcatcggatatacagcatattccatttaggatgtgtatttaatgcatttagtaatgacgataaagtggtttttaggatgctttttagttctctggtaactgggggagaagcattggttttttnttttaagaaagggatt

SEQ ID NO: 49954 - DNA, 639 bp, Homo Sapiens
tctcgaacacctgacctcgtggtccacccgcctcggcctcccaaagcactgggattacaggcgtgagccacccggcctggcctagaatgacttttaaaagatcaaattaaatcaggtcactcctttgcttacaacgcagtgcgtttagaggtacaccccatgtctccacagggcatacagcatccgatttaatctggatccattccggcgccttcctctcccagtcacccagagggccccaaccccggcggccctttcttcctcaaatgtcctcggctctataccgtgcctgggtcttttctctttctctctgcctggaagattccttctttccccttttgtcttgcccactcctgtttacccttcaagtttcaagttcatgtcactgtctcagagaggttttcctgtgctcgccctgtttctctcaggaagccttgctcttttccatcatgcctctaatcacagcttataatcggatatttatttctgtgtctacagtcttgccctgccagactgtatgccccatgtgggcaggcgctcatgattgtttctgattgtttcacgcatgctgctaacccagagcctgggcccaaagctagttagtactcaataaacaatgcattgaaaaaaaaaaaaaaa

SEQ ID NO: 49955 - DNA, 748 bp, Homo Sapiens
ccaccccaagtacgacatctcagacatgacttctattgccaggctggtcaagtggcagggtcatgagggagacatcgataagggtgctccttatgctccctgctctggaatccaccagcgggctatctgcgtttatgggtctggggacttgaattggatgcttcaaaaccatcacctgttggccaacaagtttgacccaaaggtagatgataatgctcttcagtgcttagaagaatacctacgttataaggccatctatgggactgaactttgagacacactatgagagcgttgctacctgtggggcaagagcatgtacaaacatgctcagaacttgctgggacagtgtgggtgggagaccagggctttgcaattcgtggcatcctttaggataagagggctgctattagattgtgggtaagtagatcttttgccttgcaaattgctgcctgggtgaatgctgcttgttctctcacccctaaccctagtagttcctccactaactttctcactaagtgagaatgagaactgctgtgatagggagagtgaaggagggatatgtggtagagcacttgatttcagttgaatgcctgctggtagcttttccattctgtggagctgccgttcctaataattccaggtttggtagcgtggaggagaactttgatggaaagagaaccttcccttctgtactgttaacttaaaaataaatagctcctgattcaaagtaaaaaaaaaaaaaaaaaaa

SEQ ID NO: 49956 - DNA, 485 bp, Homo Sapiens
cacgaggaaatcctacagcataaagcacattgctgagccagagtcaaaagaactcttcttgtaaatcactttttaaattttctctcactgatgccctttggaaattattggaaatttctggactatcctctttggaaagagaaccatgaaaacaatgcctcaccagcagaagaacagaatatcaggatgccttaaatttatagtagtagactgtaaaagattcattttggggtgatatctgtatatataacttgtttttttaaaagatgccgtttaaaagcatgattgggaaaatgtatgttttttaagagtagattgattcaccctacccacaggacattcaccaagccactgataccattttatatttcatcaattgcatgagtatttgctaatgttgattgaacctccctttccccataatgtgggcagatttggctcagctccttcatgagatcaggtcagtgggattgtttctgtcaaga

SEQ ID NO: 49957 - DNA, 951 bp, Homo Sapiens
  misc_feature (904)..(904): n is a, c, g, or t
cggacggaggttctgtctcaaaatgaataaataaaaataaataaataaataaaaataaaattggaaagcaatcacatagcttacagaatccgtggaaaggctggaggctctgaaaatggagaaaaacaacagaagccaagtgacctaagacacagcctaatcactctaccgtagcttcctgccgagagtgctgccgttctaccacagctggattctatttgctgcacactgacagaatgaaacctaaactagctcctcctaaactgtgtttgaagaaccagtttttaaaattaccaaccccttgcagattgatatttctgtaaagtgtgataaaaatgaattactagaaaaatgaaatggggggaaaaggcatgtaaaatacaagcccaaatttttattattcaacttgacagacttcacattacacctttcagtaaattcaatcaaaagataaataataggccagacaaggtggctcgtgcctataatcccagcactctgggaaaccaaggcagttggatcgcttgagcccaggagtttgagaccagcctgggcaacatggtgaaaccctgtttctaaaaaatttaaaaattacccctggtggtgcgtgcctgtagtcccagctactcaggatgctgaagttggggggatcactggaacccaggaggccggggttgcagtgagccaagattgcaccactgaagtccaccctgggtaacagagcgagaccctgtatccaataataataataatgatagaggaaaaaatttaaaattaccttaccagaaactatataccttgcttcttaaaaaaataaatgtcaggcctgggcagggtggcctcccgccctataatcccaaacaccttgggaagccttaaggcccggtccatcccttgaagttcnggagttcaagacccagcctgaaccaacatggtggaaaccctggtctt

SEQ ID NO: 49958 - DNA, 1249 bp, Homo Sapiens
  misc_feature (700)..(700): n is a, c, g, or t
  misc_feature (766)..(766): n is a, c, g, or t
  misc_feature (768)..(768): n is a, c, g, or t
  misc_feature (1249)..(1249): n is a, c, g, or t
atttgcacatccaaatgaatattgtatagacaattttcccaggaatgtgcaaaatgcttgaaagttcaaacttcttttttgaaatgatcttcagatccagtggcccattcttttatctttatcctgtgaaggtgtttttcaggttttgaaacaatccaaaaatcatttaggaccaagtctaaggaaacattttagtggccaagttggattccgattgtaaaggaatgatactaattttctagcatggctctgaaggtgattttaggtagaagagttttgaggctgggcgcaatggctcacgcctgtaatcctagcattttgggtgactgaggcgggtggattgcttgagcccagaagttgaagacccagcctgagaaataaggtgaaaccctgtctacaaaaaatacaaaaagttagctgggtgtggtggcgtgtgcctgtagtgctaactactcaaaaggctgacgcgcgaggattgtttgaccccagcaggtcgaggactgccgctgagttctaatatgcccccacatgtaagtccaagcccctgccccgtacaaaagttgtacactacccgcccctcccccccacaaaatctcctccccattttgctcaacccaccatctcggcacccaaacatcaaagaatattcttttgcatgaccacttattaatgttttgtccctgtcaccactcattggccnagcacccatacaccacgtcacattgggaagataaaatatttactaatttacaataatacccaccananaaaccgcgcacccccccccctataacactttgtccgcccccaaaaccgcacccccgccaagaaaatatttattagtccgcccccgtcttccccactctgctatcccactccccaccctacccaattcttccccaactcaatgcgccctgcccgcgcccatccccgcatccggatcccgcggcccgcgtccttaccacccgcgagcaccgacagcctagaatacgaccctagatcgtttgcacaagcgatcctctagaacccgctcaccaccataagacacacccatgacacacaaccctaccatcatgcgctcatcgctccgcaccatttcactcatcaatacgacatactcgttgtcttatcaatacactcgctaatattgagcttcgaggcagtgccgagaatggccggacgggcgacgtggggtctctccgtagcgctatcttctccccacaatagacctcccaccactacaaatacn

SEQ ID NO: 49959 - DNA, 875 bp, Homo Sapiens
  misc_feature (699)..(699): n is a, c, g, or t
  misc_feature (774)..(774): n is a, c, g, or t
tgaagccggagaacccaaccgcctcatgcaggtgtggtgcgaccagagacacgaccccgggggctggaccgtcatccagagacgcctggatggctctgttaacttcttcaggaactgggagacgtacaagcaagggtttgggaacattgatggcgaatactggctgggcctggagaacatttactggctgacgaaccaaggcaactacaaactcctggtgaccatggaggactggtccggccgcaaagtctttgcagaatacgccagtttccgcctggaacctgagagcgagtattataagctgcggctggggcgctaccatggcaatgcgggtgactcctttacatggcacaacggcaagcagttcaccaccctggacagagatcatgatgtctacacaggaaactgtgcccactaccagaagggaggctggtggtataacgcctgtgcccactccaacctcaacggggtctggtaccgcgggggccattaccggagccgctaccaggacggagtctactgggctgagttccgaggaggctcttactcactcaagaaagtggtgatgatgatccgaccgaaccccaacaccttccactaagccagctccccctcctgacctctcgtggccattgccaggagcccaccctggtcacgctggccacagcacaaagaacaactcctcaccagttcatcctngagctgggaggaccgggatgctggattctgttttcccgagtcactgcagcggatgatggaactgaatcgatacgngggtttttctgtcccctcctacttttcttcacaccagaacagccccctcatgtctccaaggacagggacaggactaccgacaacttctttctttaaaataa

SEQ ID NO: 49960 - DNA, 621 bp, Homo Sapiens
gcgaatctagaactaaaagactctaaaactaattggtatattatcagccagagatgcggatggcagtcgagccaaatcgcatggctttcagatcaggtattctgcacattcattccaaggtcatagatttttaaaaggacctggatttgaagagatggcaaatgatgagccatcagaaaacttaatttggaaaacatgtatgtagccagtgtggatattgtggcctctctcaagacacattgacactgtagacttcattcagtccagtgtgagtattttggagtaggttggatgtagattttgtttttatcgttgatttgtaccgacagaaatagacatttcatcatgtaaaattcctgttattctggaaaaacctatgttttgatcttcttgttttctgacttggaagtatcctttcaaaaaaactcttaagatatctaggtctaaaaagcacttcatgagatgctaaagctgacccactggttgaaaatgttgaccctatcctgttatttaaatgtgaacatttattgtacattcagtgagttatagtgttaatagtcttgtgctatgcagcaggtgtaaaaattaataaatatattttttaataaacaaaaaaaaaaa

SEQ ID NO: 49961 - DNA, 436 bp, Homo Sapiens
tgatatcactggcccccccagcatcttaactgggcaccagctaagccactgtgctgcctaaatggacaaccacttctcagttctggaattcttcaaacacctagggttaggagggtcttcgctttggcagttagagttttctcaattcttttatgacacaggttgcaccggactcactcaactatggagatcagatgtcctcaggaaaaaaaaagaaaaaaaaaaaaaatacacacttaaggctgttcccgtggctcctctctcttcctgacacattccaaaaaggaatttatggatgctgggaaggacaaagggtgaggagtttctaggacatttaagaacgcccatgttagcaactctatgcttgacaggccatgcacaataaaactctttggcctgtaagcgagaagaaaaatttggtgtaggctgcctcatg

SEQ ID NO: 49962 - DNA, 702 bp, Homo Sapiens
  misc_feature (624)..(624): n is a, c, g, or t
ttttttttttttttttttgcaaggtagaatgagaatttttactttttgacatggatgctttttctctgcagcagtacccaagttacagagaagaaaagcgtcgctgtgagtaccttcaccagaaattgtcccacattaaaggtctcatcctggagtttgaggaaaagaacaggggcagctgaagttatcaagggaatttttgagcctctgcttagtgaaacacaaaggaacaaagcagctataaactaaatagaatgcaactatctgcttttcttatgctgaccactggagtccatggtggcaagtagagagctgctctaggttcttgaggtttggttttcattattaatttttagggtatgggcactgtgcaaagactccatagctgtgcctaggagtctaggaaaagtgacagaggcttggcttttttacctttagttcagccaagtcattttcaagtcctgagaaatgacatcatcttcaggataaaataatgaggacattagacaaaccaaactaagtgaattttagcctggtagcctctctaaggaaacagtaataataacttctgataagagttaaaagaacttgtagcatacctggatataatgggaaagggcctgngtgttacccatgtactgaaaatgaacttttaccaacatggctaaaaaattaaaactgactgcttctgtgtcctttgta

SEQ ID NO: 49963 - DNA, 550 bp, Homo Sapiens
aagagttcggcgaggaactccagaatacaaggtcctggaagacaagataatccaggaatataaaaagttcaggaagcagtacccaagttacagagaagaaaagcgtcgctgtgagtaccttcaccagaaattgtcccacattaaaggtctcatcctggagtttgaggaaaagaacaggggcagctgaagttatcaagggaatttttgagcctctgcttagtgaaacacaaaggaacaaagcagctataaactaaatagaatgcaactatctgcttttcttatgctgaccactggagtccatggtggcaagtagagagctgctctaggttcttgaggtttggttttcattattaatttttagggtatgggcactgtgcaaagactccatagctgtgcctaggagtctaggaaaagtgacagaggcttggcttttttacctttagttcagccaagtcattttcaagtcctgagaaatgacatcatcttcaggataaaataatgaggacattagacaaaccaaactaagtgaattttagcctggtagcctctc

SEQ ID NO: 49964 - DNA, 626 bp, Homo Sapiens
atgcagtgcctgcttccgtatcagtccaaggagccctcgtgtttgccacctttacctttgaacctccccctgcctccctgcctgtgtccgcttttgcagctcaatgcagccatgacaaggaaagaaaagacaaaggaaggccagagagccgcgcagttctctgcaggtgcagatgcaggcagtggaggtggcctgagcaggcagaaggacaccaagcgccctatgttgcttgtcattcatgacgtggtcttggagcttctgactagttcagactgccacgccaaccccagaaaataccccacatgccagaaaagtgaagtcctaggtgtttccatctatgtttcaatctgtccatctaccaggcctcgcgataaaaacaaaacaaaaaaacgctgccaggttttagaagcagttctggtctcaaaaccatcaggatcctgccaccagggttcttttgaaatagtaccacatgtaaaagggaatttggctttcacttcatctaatcactgcccaactttcttgtacaaagttggcattataagaaagcattgcttatcaatttgttgcaacgaacaggtcactatcagtcaaaataaaatcattatttgccatccagctgatatccc

SEQ ID NO: 49965 - DNA, 623 bp, Homo Sapiens
cgcgtccgctggctactggggtttggcccccgagtggccgtccctgtgggagatgcaccccattcttgggccccccctcattccctttccgaaaaaggaaaacttgcgtttgagccgttgagctaattctgcaattttctaccaaacagagcgctggtggccccggagcagggctgtgacattggctggtggagcccccttcctgtgttctccctttgttccagcgccgcgatggtgagatcactgttccaagcagggggacggctcgcgataggacaaagagagcaggacctccagactctggggagccctgcagaccttgacaatttgcctgactcattcctgacctcttgtcattttggcctgaaggctacaaattcagggtcagctgtatgcactaagtcaaataatgaatttcttcctccctctcgcaaccgaccaaaattttgacaacgatgatgttcaccagaaggaaaaaaaaaaatcagttttatgcactttattttgttttgattttcattttttattaagaaaaaattttattttacagaatttaccttctctgtatatatgtgcataaagtgtggtgtaaatatactaaaacaaacttatatttcaataaa

SEQ ID NO: 49966 - DNA, 637 bp, Homo Sapiens
cagcagcgcgtgcgcgacggcgaggagggcgcgcgcctctggacggagggcgagaagcggcagctgctgagcgccggcaaggtgcagggctacgacgggtactacgtactctcggtggagcagtaccccgagctggccgacagcgccaacaacatccagttcctgcggcagagcgagatcggcaggaggtaacgcccgggccgcgcccgccgagccgctcacgccctgcccacattgtcctgtggcacaacccgagtgggactctccaacgcccaagagccttcctcccgggggaatgagactgctgttacgacccacacccacaccgcgaaaacaaggaccgcttttttccgaatgaccttaaaggtgatcggctttaacgaatatgtttacatatgcatagcgctgcactcagtcggactgaacgtagccagaggaaaaaaaaaatcatcaaggacaaaggcctcgacctgttgcgctgggccgtctgttccttctaggcactgtatttaactaactttaaaaaagaaaaaaaaatgtatacagtgtttccaaatagtaccgaattgtcgacctttgcttacaagaagtagtctgtctgcataggatgtgatagctatctctgttcattttacaa

SEQ ID NO: 49967 - DNA, 632 bp, Homo Sapiens
ggacggggagagcgtgggtcactgcccctcctgccagcggctcttcatggtcctgctcctcaagggcgtacctttcaccctcaccacggtggacacgcgcaggtccccggacgtgctgaaggacttcgcccccggctcgcagctgcccatcctgctctatgacagcgacgccaagacagacacgctgcagatcgaggactttctggaggagacgctggggccgcccgacttccccagcctggcgcctcgttacagggagtccaacaccgccggcaacgacgttttccacaagttctccgcgttcatcaagaacccggtgcccgcgcaggacgaagccctgtaccagcagctgctgcgcgccctcgccaggctggacagctacctgcgcgcgcccctggagcacgagctggcgggggagccgcagctgcgcgagtcccgccgccgcttcctggacggcgacaggctcacgctggccgactgcagcctcctgcccaagctgcacatcgtcgacacggtgtgcgcgcacttccgccaggcgccccatcccccgcggagctgcgcggcgtacgccgctacctggacagcgcgatgcaggagaaagagttcaaatacacgtgtccgcacagcgccga

SEQ ID NO: 49968 - DNA, 651 bp, Homo Sapiens
  misc_feature (561)..(561): n is a, c, g, or t
gcagacactgcagccacgttaaatttgcagatcgctggacttcaaacaagtgtgaagaggctgtgtggcgagattgtggaactgaagcagcacctggagcactacgacaagatccaggagctcacgcagatgctgcaggagagccacagctccctggtcagcaccaatgaacacctgctgcaggagctgagccaggtgcgggcgcagcacagagccgaggtggagcagatgcactggagctaccaggagctcaagaagaccatggccctgtttccacacagcagcgccagccatggaggctgccaggcctgctgactcctgccgagaagctgggccaccccttaagcttcctggtaaagttacattgtctgcacctttgtacttctttactgagtgtactggctggcaagagttctctcttctgttggtaattatttaggatttttggaatgtattcaggacctgtagcttggttttctaaagcacctcgtaaaatgatatgattactccaagcccctctgcatgttttcagacagaacacattgacatattttgagacanactgactattaatcttgtatccagtatcctgagatgaagtaaatgcagtgttctactgcctgatgtgaaagagagctatgtatgataatt

SEQ ID NO: 49969 - DNA, 578 bp, Homo Sapiens
cggcgcctcaggagagcgccgagcagggcgcgaaccaggggcagcgcggccaggagcctctcgctgaccagctgcactcggggatttcgggacgtcccgcggccggcaccgcggccgccagcgccaacggcgcggcgatcaagaagctgtccgggcctctgatctccgatttcttcgccaagcgcaagagatcagcgcctgagaagtcgtcgggcgatgtccccgcgccgtgtccctctccaagcgccgcccctggcgtgggctcggtggagcagaccccgcgcaagaggctgcggtgagccaatttagagcccaaagagccccgagggaacctgccggggcagcggacgttggaagggcgctgggcctcggctgggaccgttcatgtagcagcaaccggcggcggctgccgcagagcagcgttcggttttgtttttaaattttgaaaactgtgcaatgtattaataacgtctttttatatctaaatgtattctgcacgagaaggtacactggtcccaaggtgtaaagctttaagagtcatttatataaaatgtttaatctctgctgaaactcagtgc

SEQ ID NO: 49970 - DNA, 606 bp, Homo Sapiens
  misc_feature (555)..(555): n is a, c, g, or t
tctaggcaactatcaaaaagaagcagaagttcaagtggacaaatttatgtgaaaattcatttaacatataagctgaactctattatggggaatggatacaaaagcagagctcccatcttgactttcaattcctcatcagaagtactggcttctttagagagtagtaagcatggctgcctatgcttggagtcataagtgttatttggactataccctgagataagcttatagatcaagtttggctcccttgaaaagcatttctctcatgtgcgccctcagggcttccagcaggattgagtcaccctgacgatgaccggggagaagccgtgtgctcttcattattttcagctggaggacagagctcagtgcctgactgcctagggtctcatggactgtaggcagcctgccagtgaaggtcactggactctagcctacaacatgctgagctacagcccagaagccagacatgcctgtcttagctgacctgtttttggtccacttttgcccttccatgactaataaggaagatatgtgtgtatttcatacacacacaangacctggattaaaaatccaaaaagtgattctcttctatgatttatttcaaa

SEQ ID NO: 49971 - DNA, 687 bp, Homo Sapiens
caaatacaaaatgctccaaaatctaaaactttttgagcaacagtatgacactcacaggaaatgcccattggagtattttggatttttggatttgaaatgctgaactgatataatgcaaatattccaaattctgaaaaattcctaaatcagaaacccttcttttttttttccaaaatcggaaacacttctggtcagcatttcagataaggggtactcagcatgtactggtagttgttgatccctctctcctccccgcctcctgtttaaggcagtatctactgattctttttctttggaagatgggaattttgccatcctcctcctcccacctccttgtgcacatttgccctccctccatctttccattaaagttctctcattgggagtcaatgtgccatagtgttcagagccaggctgtctgccttcacctcccagctctagcacttagttgctctgtggcattggacaagttatttaacttttttgtgcctacatttgcacatttgggaatcctccttggcatctaatctgtagggttgttgtgaaattgaattcaaacacataaaaattgcttagaatggtgtatgtcgtatggaaagcatttgttatttcttagcaaatgacaaaattaaattttaaaaggttattttttaatctcccactatggttttgaactttatataaatg

SEQ ID NO: 49972 - DNA, 601 bp, Homo Sapiens
cgtaaggtgcagagatgtgagatgacaacaggaacatacaagatactgtgaatctagatgttctgacctaaagatgtagtctacatagccccagcttggggtccaatccatctgtccctggcatgtgccttcatgtagtaggtgctttcctgatccccttgcgagatgctgtgggtgctaacacctcagagctgtcctcttctctagagtggaggttttcaaagtgcatcatcagcattacctgtgaacttgctggaaatacaaatcctcaggccccacctcagacctactgaatcagaatctctgggggttggcacagcattctgatttaccaaaccctccaagtgattttgatgtattctaattttgagaccatctctagaaaagaattgctacctcttgtatggaggtacaaaagactgacctcttacatcaaggaacttcctttcccagagctcctcatggaatcaagctgaagtcagtcttcttctgagagcacattcttactcagttttttttcctctgtcctacgctgcttccctcactccccttctcctaagagcactccatcaataaaccacttgccaaccatcgtcgggta

SEQ ID NO: 49973 - DNA, 533 bp, Homo Sapiens
  misc_feature (8)..(8): n is a, c, g, or t
  misc_feature (18)..(18): n is a, c, g, or t
  misc_feature (31)..(31): n is a, c, g, or t
  misc_feature (495)..(495): n is a, c, g, or t
tgttgggnaaggacctgntggctatccgagnagcaggttttgaaatctcagctatgcagatgttcaatatggatcgggttaatgttgaggaattctatgaagtttataaaggagtagtgaccgaatatcatgacatggtgacagaaatgtattctggcccttgtgtagcaatggagattcaacagaataatgctacaaagacatttcgagaattttgtggacctgctgatcctgaaattgcccggcatttacgccctggaactctcagagcaatctttggtaaaactaagatccagaatgctgttcactgtactgatctgccagaggatggcctattagaggttcaatacttcttcaagatcttggataattagtggtgtggaaagtaaagaagtcacaggttgggacatttagacaagagtgaatcacacacgaggaatgtgttcattcttttattgtccattgttttaacctgactgaatacaagatcaacangaaaaaaaaaaaaaaaaaaaaaaaaaaaaaaaaaaaaa

SEQ ID NO: 49974 - DNA, 1049 bp, Homo Sapiens
  misc_feature (826)..(826): n is a, c, g, or t
tattgaccaacagatcctagaagacagtatgatattttctctggccagttgcataataactgcaaaattgtgtacctgggcaatctgttttttaaccacctctgaagaagttcaaaaaaaattatatgaagagataaaccaagtttttggaaatggtcctgttactccagagaaaattgagcagctcagatattgtcagcatgtgctttgtgaaactgttcgaactgccaaactgactccagtttctgcccagcttcaagatattgaaggaaaaattgaccgatttattattcctagagagaccctcgtcctttatgcccttggtgtggtacttcaggatcctaatacttggccatctccacacaagtttgatccagatcggtttgatgatgaattagtaatgaaaactttttcctcacttggattctcaggcacacaggagtgtccagagttgaggtttgcatatatggtgaccacagtacttcttagtgtattggtgaagagactgcacctactttctgtggagggacaggttattgaaacaaagtatgaactggtaacatcatcaagggaagaagcttggatcactgtctcaaagagatattaaaattttatacatttaaaatcattgttaaattgattgaggaaaacaaccatttaaaaaaaatctatgttgaatccttttataaaccagtatcactttgtaatataaacacctatttgtacttaattttgtaaatttggatttttatatatcatattttcttaattcattgtacacatttgacttactgcacagtatattgatcattttaatgggaaactntagctttctactttttatttttggtttttcactttctatgccactatttttggattctttttcctagggtgagctctaaaatcaatgttcttgaaaaaggaaattattttgcagaagttggggaaatcctggttgtttgaaatgtattaaatagaaacataggctgggccgcggtgggttcacgcctggaatcccttacctttgggaagcctgaggcacgggg

SEQ ID NO: 49975 - DNA, 702 bp, Homo Sapiens
tttttttttttttttaaaaagtaagcctgaatgtagagtaaaaggggaaatgccaagattttggggtttttttgtttcctttttttgtttgtttgtttgtttttttggagaagagcatcctcttttgtgtagtttgacctaaaaatgaaccttggctctgcttgtgatcagaacatgaacttttttttttaaagaagatttgagcatttttctgtaatcacatcaaaatgatgttttctgtgtaaagcgagatacatatttctcataatgcagcattgtgagaagtcagttcggaccactgcaccaacactgtcgtatccttgttaaaatggtgtgtaccttacaaattataatttatgtgccaggttcgttttgtacttaatttgctattattgtgatgtgtataaaatctttaatcttggttcttagtactttgaattggtctacaggtatattcctgggatgaaaggattgccaaacccaaatatagactagattatccaatgggtttgtgtctttgttccattctcaacatttcttctttcaactataagtaatccccaggtgtggggtagcaagtgtgcttccgtcaagataccatattctcctgctccagtataacagcttgcaggcaataaaaatctatttgctcataactacttctgtatttattagacttatatacctcgtgccgaattcttg

SEQ ID NO: 49976 - DNA, 930 bp, Homo Sapiens
  misc_feature (581)..(582): n is a, c, g, or t
  misc_feature (584)..(584): n is a, c, g, or t
  misc_feature (588)..(588): n is a, c, g, or t
  misc_feature (590)..(590): n is a, c, g, or t
  misc_feature (604)..(605): n is a, c, g, or t
  misc_feature (607)..(607): n is a, c, g, or t
  misc_feature (645)..(645): n is a, c, g, or t
  misc_feature (659)..(659): n is a, c, g, or t
  misc_feature (663)..(663): n is a, c, g, or t
  misc_feature (679)..(679): n is a, c, g, or t
  misc_feature (681)..(682): n is a, c, g, or t
ccctgcctccagaacgcgggctggaccccaatggagaacaggtggtgtggcaggcgagcgggtgggcagcccgcatcatccagcacgagatggaccacctgcagggctgcctgtttattgacaaaatggacagcaggacgttcacaaacgtctattggatgaaggtgaatgactaaagctttgctactggggctgaggattccggataccaagacgcaaacactttcactttgagctgggcaaatcttacttggcatcaacttggatggctcgcatatgacaggaaactggattgccaaggcatggcagactgagctggaggaagatgtcagaaatgtttgccctgaaatcagttacggacaaaatgttggctacaacttgaggagaaaaatcacccccaaaggagtggacatttcctaacaattctgtatggaggaaggtggggtaattgcattcgtctgcagtagacacgagttcctcggacctgtataatctcccaaagccaaggtttggtaataatgtagtccccaaatacctgaaagctgtctttaaaaatgcaggtaagcatgtgactggcaaannanaaananaaaaaaaaaaaaannanagacaaaaaaaaaataataaaaaaagaaagaaaaaaanttaaatataccaanaatntattaataaaaaattntnnttttggggggggggggccccctactaaaaaataccccccgggggggggcccaaatttctaacgggtaccaacttttttttttttagaaaaaggggggcccccccttgtggggccggctaaattataaaaatctggggccccctggcccctctttttttttaaaacctccctcgtgggggggaaaaaaaacccccccccccggggggaatttctttggtaaaagaagacaacctctctttttgtggggg

SEQ ID NO: 49977 - DNA, 864 bp, Homo Sapiens
cgggattgacacagataagcacaagtatcccatggttctggtcgtgtgactttcaataaccaacggagttacctgaaagcagtcagcgctgctttgtggagatcaaaaccaccaagttcacaaagaaggttcagatgacccctacctagaagattctctgtgtcatatctgcagttctcagcctggtcctttcttctgtcgagatcaggtctgcttcaaatacttctgccggagctgctggcactggcggcacagcatggagggcctgcgccaccacagccccctgatgcggaaccagaagaaccgagattccagctagaggagctggccttgcccagtggcctgtggcgcccaaagctggcaggtcaggcaagcagcctgcaccaccctgccactggcgaccaggagctggcttcccaaggacaagggaaaattgtagtcacctttgcacttgctgaatctgtcttgtttctgcactaattaatgcacattgagtttgtcaggtttgttttcagggggtgtaccaagggcaaggaccctctggcttaccctccaagcgactctgtagttttcccagattttagttcctcaattttgccaggaattgaaaaaaggcggggaaataaaacaatgatcatgatgcataataaacaaaacaaccttcaggttgctccccaaaagggtcattggcaggcgtatttgcaccgcgggattgcctataaccccccatggggttatcttttttaaaaaaaccggctttaacaattcccctgggacaaaaacggcaggggggaatagttccccgcgtctctcatgggggccatccttgcgttgccctaacaggcccttccctttttttacccc

SEQ ID NO: 49978 - DNA, 563 bp, Homo Sapiens
  misc_feature (89)..(89): n is a, c, g, or t
  misc_feature (94)..(97): n is a, c, g, or t
caccacaacaaccacacacaaccgaccaccaccaccaacccccacgcacaaccaccaacccaagcccacaccacccaaccacccccagnacaannnnaggtagcgaggcctgggtggcgctggcaaaggtttagaaactgttgctaagaaaagtggtccattcctgaataaacatgtaatactccagcagggatatgaagcctctgaattgtagaacctgcatttatttgtgactttgaactaaagacatcccccatgtcccaaaggtggaatacaaccagaggtctcatctctgaactttcttgcgtactgattacatgagtctttggagtcggggatggaggaggttctgcccctgtgaggtgttatacatgaccatcaaagtcctacgtcaagctagctttgcagtggcagtaccgtagccaatgagatttatccgagacgcgattattgctaattggaaattttcccaataccccaccgtgatgacttgaaatataatcagcgctggcaatttttgacagtctctacggagactgaataagaaaaaaaaaaaaaaaaaa

SEQ ID NO: 49979 - DNA, 698 bp, Homo Sapiens
agaaaggagaaagctcctgcggttcgcccagaaacactacacgccttcagagaactttatctggggaccgcctcgaaaagaacagtcggagggaagcaaagcccagaaaatgtcttcccctctcgcctccagtcataacagtcaaacttctatgcacaaaaaagccaaggactccaaaaattcctcctcagctgttcatttaaatagcaaaacagctgaagacaaaaaagtggcaccaaaagagcctgtggaagagacagacaggcccagcccagagcccagcaatgaagctgccaagccaagaaatacagagaaggacagtaatgctgagaacatgaattctcaacctgagaaaacagttactactcccacagaaaaaaaaggagagtgtatctcctgagaataacgaagaaggtggaaatgataaccaagacaatgaaaatcctggaaatacaaattgccatgatgttgtactagtacagtgaattatcagaaaacccagaagccagtttaggctagagaggaaaaaactactgtatcatttatcctaaagaacagagatgaggtcaatttcaaattttagccatctgtttgtgatttctgtcataagcattttgttgtttgtttttttattttggatgacaatgaattgaatatctaataaggagatttaagataagacccaataaatgaatgta

SEQ ID NO: 49980 - DNA, 477 bp, Homo Sapiens
  misc_feature (477)..(477): n is a, c, g, or t
gggtgaagtaacaattcagcaggaacgtcaacaataccaaaaggctttggatatgttattgtcggcaccaaaggatgagaacgagatattcccttcaccaactgaatttttcatgcctatttataaatcaaagcattcagaaggggttataattcaacaggtgaatgatgaaacaaatcttgaaacttcaactttggatgaaaatcatccaagtatttcagacagtttaacagatcgggaaacttctgtgaatgtcattgaaggtgatagtgaccctgaaaaggttgagatttcaaatggattatgtggtcttaacacatcaccctcccaatctgttcagttctccagtgtcaaaggcgacaataatcatgacatggagttatcaactcttaaaatcatggaaatgagcattgaggactgccctttggatgtttaatcttcattaataaatacctcaaatggccagtaactcaaaan

SEQ ID NO: 49981 - DNA, 951 bp, Homo Sapiens
aatggcatggaatatccatcccttaatcactcacttgttttattcctctttagcatttagcatttaaaaaaaatactaataccatagcattaattgtgatgatgaaaacagcactgtgtctacgttgtcagaaaaattgctcctttttaccaccattgactcatttctgtgtgttcaggtctcataaccagtctatagtcagtgtcatcttggggacagtattccttgagtttctgatgttgaattcagttttgctggatacgaaattcttggcccagattttctttgagtatcttgttttattctgttttcttccagcataaagtgatgcatgaaaagcctgatgaatcttgttttcttcccctgacagtcatatgctgtttttccttagatgcccaaaggattttttcctttttctgtcaagtcggccgttttattcgaatgtgtcatgtgttggtattggttgtcctggtccatatttgcaagcgtatggtgtgctctttctatgtgtacttcacatctgttattttaagaagatttgttgaactggagttcagtgttacattttaaatgatcttcacctttattatgcatctatcttcatggggtttcccgatatctcactgtccagtccttcatcgcggaatgtgtggatagggaacaggttgaagattgcagtttagcataaagagttgggaaacagttcagagtcaggtcaactgaatcatgcttgcaccccaggcccaggagcgtcgcccactttacagacggccggcaccttcgagcctctttcaacgcccaaagcagtaccaccatgaaaataacgtcggaccagccccgcacctcaccgtatcccgccatcacgcgcacgtccgactcctcagcacctcgcactatgaaccccttagcaaacactttggctctgctcgaccttccgcacaacagcacaca

SEQ ID NO: 49982 - DNA, 611 bp, Homo Sapiens
ctggagatggagcgcttacactacatccaccacaacgagaccgtgtcccagcagattggggaggtcctgtacaacgcggcaccactgtccatctggtggcagatccctcagtacctgctcattgggatcagtgagatctttgccagcatcccaggcctggagtttgcctactcagaggccccgcgctccatgcagggcgccatcatgggcatcttcttctgcctgtcgggggtgggctcactgttgggctccagcctagtggcactgctgtccttgcccgggggctggctgcactgccccaaggactttgggaacatcaacaattgccggatggacctctacttcttcctgctggctggcattcaggccgtcacggctctcctatttgtctggatcgctggacgctatgagagggcgtcccagggcccagcctcccacagccgtttcagcagggacaggggctgaacaggccctattccagcccccttgcttcactctaccggacagacggcagcagtcccagctctggtttccttctcggtttattctgttagaatgaaatggttcccataaataaggggcatgagcccttcctcaaaaaaaaaaaaaaa

SEQ ID NO: 49983 - DNA, 622 bp, Homo Sapiens
tttaatgtgactttcctgagttaacactgaatagtatttctaaaattttttgtactttattttttaatgtaacttgttctatctatctatatatatatttgatagtttgtggaataatatcccccagtattttccatattaaatgctaattatcttttgatttctttttcataagcagatctggcatttattacagggctgccgcttaagagaactcattataatgaacgtttattatattttgcagttccatgcctgttgtccattgattgacatgagcacccctgttttctctggagaaatacctcccctctctggggtgcttcctgtggtagtgtctttcaggtatccgttccactagctacaggtgagcattttacccattgttggataatggtaatctctttttcagaattttgagtctgtaattcatttgtacatgaaccagaaaatgtgggaactcattcattcttgtcccagaattctgttgagaacatccattcattctggctaattgattacaagaataactgtggatacgatccctttagaacctgcttctctgatctgtgtgtttcctcacttctcaataaaaatgtcttttgctaaaaaaaaaaaaaaa

SEQ ID NO: 49984 - DNA, 830 bp, Homo Sapiens
attgaatatttgtttaagcttagttcagaagcaacgctcctacaggacttgacatttgctagttagaatatccctactcttctaaataatttgaaagtatagagcagtaacacagtaacagtgagcacagccaagcctgacactactaaatgatttggtagtgaagccaggacatctacccttgactattttttatgttatttatttattagtttgtccatttgtaacatgtatagatctgtcctgtgagcatttctgatgaatctatggttcttacagaaatttttcaaaggaatcaatttagagatagagttttcatatacttacattaacttattaatgaaatctgtttgcatcagtgcttactgcgacacattaattagcttgattaatttagattagaatcattaacatcatgaaaaataaaagtactacatttctaacgtattcccattgcaggtgttaggtattttttctgtcaacacctctcttttgaattctacatttgagaaataagcatggaaatattagctgccccgtctgccattcaccagggaaaaatttctatggcaattttgtaccatgaagtaaactggttacaatagtttctgagaagcatactataactctgatcttccattgagaataacaaaaataaatatcaattttacacctcatatgtcttcttagttctgaatgattcagaagaacttgcatgtattttttatcctagaaggtttcacacataatacatcaaagttatttcttccaaatgtaatttcatgtctgctttaaggaacactccatcaactattcataggacacccctc

SEQ ID NO: 49985 - DNA, 566 bp, Homo Sapiens
ttttttttttttttttttaattgcactgggaaacttccccaatctcggccccagttctttctccaaactaaggagtcatggcctttcgcccgctagtccagtatgcacccgtaggcgcttcattttctctcctcttgtcagcttttactgcctcctgaggccttcgtcttgttcacactgagtgtccagtccctccaaatccggctacactctactggcaaggagcacctgggccatgttttagagatcatccgaggactaaccccaaaagtttatgaagagaaagcagaggccgagctgaagagatggacccgggtcacacccaggtaaaggcaggatctaaactgaaactggtgtcagatctggttgccttgcacccctgatatcaggtgaagcaacactgggcaggatagagcagagtgaggtcagagtgtgaagatccagcctgatgcccaaactgacgcctcttcattctcccctgctccatctgtaaacgtcacggttaatccatctactttattgcattatatagagaaataaatgaaatgtcatagctgtcctcgttc

SEQ ID NO: 49986 - DNA, 674 bp, Homo Sapiens
  misc_feature (626)..(668): n is a, c, g, or t
gaaatcttggtatggtgatgatttttactctagtgacagctgtgcaagaaaaattaaatgaaatagtagatcagataaaaactagaagagaagaagaaaagaaacaaaaagaaaaagaagcagaagaagctgaaaagcaattattccatggtactccagttacaattgagaatttcttaaattggaaagccaagtttgatgcagaactcttggaaattaaaaagaaaaggatgaaagaagaagaacaagcaggaaaaaataaattaagtgggaaacaactatttgaaacagatcataatcttgacacatctgatatccagttcttggaggatgctggaaacaacgtggaggtagatgagtctttgttccaagaaatggatgacttggagctggaggatgatgaagatgatccagactataatcctgctgacccagagagtgactcagctgactaatggactgtccccatctgcagagaggcttgactgccacagcatctgtggctatgctcagagggttatgattttcctttctttttttctaagaaaaaattattttcaggagaatattcttctgatagctttcatcattgaacttaataaacttaccttaaaatttcaaatatnnnnnnnnnnnnnnnnnnnnnnnnnnnnnnnnnnnnnnnnnnnaaaaag

SEQ ID NO: 49987 - DNA, 1027 bp, Homo Sapiens
ggatgccgcgggacgccggcagggttgtggcgccagtctccttcctgcgcgcgcgcctgaagtcggcgtgggcgtttgaggaagctgggatacagcatttaatgaaaaatttatgcttaagaagtaaaaatggcaggcttcctagataattttcgttggccagaatgtgaatgtattgactggagtgagagaagaaatgctgtggcatctgttgtcgcaggtatattgttttttacaggctggtggataatgattgatgcagctgtggtgtatcctaagccagaacagttgaaccatgcctttcacacatgtggtgtattttccacattggctttcttcatgataaatgctgtatccaatgctcaggtgagaggtgatagctatgaaagcggctgtttaggaagaacaggtgctcgagtttggcttttcattggtttcatgttgatgtttgggtcacttattgcttccatgtggattctttttggtgcatatgttacccaaaatactgatgtttatccgggactagctgtgttttttcaaaatgcacttatattttttagcactctgatctacaaatttggaagaaccgaagagctatggacctgagatcacttcttaagtcacattttccttttgttatattctgtttgtagataggttttttatctctcagtacacattgccaaatggagtagattgtacattaaatgttttgtttctttacatttttatgttctgagttttgaaatagttttatgaaatttctttatttttcattgcatagactgttaatatgtatataatacaagactatatgaattggataatgagtatcagttttttattcctgagatttagaacttgatctactccctgagccagggttacatcatcttgtcattttagaagtaacactcttgtctctctggctgggcacggtggctcatgcctgtatccarcactttgggaggccgagsgggcgattgcttkaggtcartktttadacagcytgccamatggcgaaccc

SEQ ID NO: 49988 - DNA, 745 bp, Homo Sapiens
ggctgccttggacgaccccctggccgggcttctggacatgctggagagctgccggggccagcggggagagggcccctccctggcggcctggatctcccaccagctgcagtgctggctacaggcacagccatgcccgagcctggcccagcacagcctgaggctgaagcagctgcaggcccgagcggtcaaagtcctcactgagagcccccccagccttgcggcaccactggccagcatcttccagctgcaggatgcagacaggagctgcctgctggcacacgtccaccgcctccaccacgagggcaggttcagagaagcagccacgctgggcacgacgttgaagctgcagtcggagcttggcgttgaaaagatgagcatcccactgctcctccaggacaaggtggccctcgtggagcgctatgtggccggcttcccggacctccagaggaggctgctggtcctcatggattcctggtgccagcccggctttgacatcaaggacgttgccagctgccatgtgactgcagctggagcagctgcctctggagaggagcggctggggctggcaggagcacagccctcttctcccgagtgaaaagagttaactgctcttagaagaaccgaaaataattctccgtggtggtcttctcatgcaggcatggcaaccgtactgtttcttgttcatccattcctttgttctttcatctaataaagtttttggaagcaaaaaaaaaaaaaaaaaaac

SEQ ID NO: 49989 - DNA, 475 bp, Homo Sapiens
aaaattaagaaaccaaataaattggttttgcttccttgccatggattctggaaggacatagttcttctaaaatttcctgttaattggcatgtacatctcatttaaagcaaattaagtaggacaagcaagtcagtaaaatagaagtattaaaaagaatcatcctttaaatcacagatcttattttgagattaaaaaaaatacttctagctttagccaggtgtgcatgttgctgccattttgcatttttgaatcatcttgtgtaattgtcgccatgaaagtgttactcagaattgtcatagattttctcttctttgtgcaaaaacatggaaaattgtcactgactttgttttgaggtttcccccattttgctgccttttgggacacttcgttaaatactggtcttggctgcattctttttttttttcctgtggggttcaaaagaataaacattttcttacagaaaaaaaaaaaaaaa

SEQ ID NO: 49990 - DNA, 1122 bp, Homo Sapiens
  misc_feature (767)..(767): n is a, c, g, or t
ctcaagatggactcgattggttgatatcaacctagtacggtgccatgctttgaagctggactcttttggccagtttattgaattattacccagcctagagtttatttcactggatcagatgtttcgtgaaccacccaagggttgtgctcgagttggtctgagtgcaggcacaggaattggtgtttcatcagctcttgttagcaaccagaactccaacaatgacgataataatgcccagaataacaatgccaacatccacgacaacaatcaccatcatccagatgactcagacgaggagaatgactttcggcaagatctgcagccaggagagcagcagtttgcagctgacgcattaaatgagatggaagacatcgtccaagaagatggagaggtggtggccgagagtggaaataatactccagctcacagccaggcaattattcctgtggatgttgatgaggaacaagcaggacccagtggtcttcagcgtgtagtaaaaccaacctcaattactgttcatgattcagagagtgatgatgaagaagatagtctagaactccaagaagtctggattcctaagaacggtactcggcgttactctgaacgtgaagaaaaaactggagagtcagtgcagtccagagaattgtcagtaagtggaaaaggcaagactccacttcgaaagaggtacaactcccatcagatgggccagtcgaagcagtttcccctcgaggaaagcagctggtgagaaaagctgtcaggtcacccantgagcagatcaaagccgatatgaaagcagctagggatattcctgaaaagaaaaaaaccaaggatgtttattcccagcttgcagcagcaccaccggccgaacagtggggaaaatccagcttcacacaaaactgctttctcaagccccgaacttggtaagggacggggaacagcgggcgggttttttccgaacttaccctctaaaaaagggaatttgttcccaagccgtggtgctttgccccccccgggggggccaaaaggactcttggagcccctggtgggggggtacattccaaacaaattcttgttcttccccccaaaattcgtggtctacacaggtcccccaggaaattccca

SEQ ID NO: 49991 - DNA, 765 bp, Homo Sapiens
  misc_feature (759)..(759): n is a, c, g, or t
aatatttcctggaagctcatttttttggcatgagtctaattaaattattgaaagccccctgtttgtataatctttaacttatcaaatctaatttcagatttctggaggagaaactaacttgaataagcaggactattttaaaagttgttttgacgctagagtaaaattccatgtcacattttctacccaatcatctggatttcaagattccttttaagatctcaatgaagcaatttggatttaaagagtggtattcacaaggggtgaactttcacagtcagggcagttgcctcagtgcccacataggcagaggaggatgtgggaaagggcttttctcagctagtttttgtgtgctcatttcttctgggagcattaaaagtggtgatctgttacagtcactattcaactgggcacgtgttgtgattggtcagtcactgagccagggatacagtccggacttgcttagtacctaagcctaatgctggtggggtttcaagacatggttcagcatcatcttttaacaaggcccagaggcccagagcccgcatcaagtcattttgatgtaaatagtgaactttgttagagccctcacttctatcaatcagctgtcctgtccctgccagcacctggagcaccaactaccactccctggaaagaacccttccctgcagttttttaaggacaaaactgcccactcctcattaagtttgctgcctggatacacttttccacaaaggaaaactggcatatcctgccttncgagta

SEQ ID NO: 49992 - DNA, 478 bp, Homo Sapiens
tgaagtgttgggattacaggcgtgcagctgcgcccggccaattttaacttttcataatagatttgtatatatttatggtagtaaatgataaaatagactagtgtctacatatattatatgaattcatgacacacctttttcttagtttttcagtatttctaagctacatggtgcatctgcaagttttttaaattgttgcaaatttccaaaaaaattttcaatatatttatcaaaatatgcatataagcggtcctatgcagttcaacccgtgtttgagaatcaactttatgacttccagtgtcattctccaccatttctgcagtttatcacattttgcttcaggcagatttggtaaatcttcaatgatagttctctaggccattgttttgtaacatgatcaaatgcttaatgggaaatagaatatgtatatgtattctttgtctaccaactaccagagaaacaaatactcctcagtttg

SEQ ID NO: 49993 - DNA, 1000 bp, Homo Sapiens
  misc_feature (24)..(24): n is a, c, g, or t
caacaggaccctggggcagctttnggggaagcagtactctctgacaaggttcaaaacattatttgtggctggagaacgatgtgatgtagagaccctggaatggtccaaaaatgtcttcagagtacctgtcttagaccattggtggcaaactgagactggatctccaattactgcgtcatgtgttggattaggcaattctaaaacacctccaccagggcaagcaggaaaaagcgtcccaggatacaatgttatgattttggatgacaacatgcaaaaactgaaggctcggtgtttaggaaatattgtggtaaagttaccattgccacctggggctttttcaggactctggaagaatcaggaagcattcaagcatttatactttgaaaaatttcctggatattatgataccatggatgctggttacatggatgaagaaggctatttgtatgttatgtctcgagtggatgatgtaataaatgttgcaggtcacagaatttctgcaggcgccattgaagagtcaatcctttcccatggtaccgtggcagactgtgctgttgttggcaaggaagatcccttaaaaggtcatgtccccttagcactctgtgtattgagaaaagatataaatgcaacagaggagcaagttttggaagaaattgtgaaacacgttagacagaacattggccctgtggctgcttttcgaaatgcagtgtttgtcaaacagctacccaaaaacagatctggcaagatcccccgatcagctttatctgccattgtcaatggcaagccatacaaggatacttctacaattgaagaccccagcatttttgggcacgtagaagaaatgctgaagcaagcataaatgagtttggcttatcctattttgaggtgaatttaatttcttaattggaattaaattatttggagttgttttctccgaaattaatattttccgtaagaattaacttgcaaaatggaaaggggaatttgtaaaacttgggcc

SEQ ID NO: 49994 - DNA, 641 bp, Homo Sapiens
ttttgcaatctagctgaaaaagctggtttctgtatccaaagacatgaaaattatgatgaacacatttcaaacttccactccaagttgaaaaaggaaaacccggacatatatgaagaaaaccttcattacccgcttctgcttattttgaccaaacatggatagaagattaagcttctcaaagacgaagaaacgtatcaagtgcatagggaatatttttacaaaaacggaaatctgtaaggggtataatcgcctgcctgcgccctttgcagcatttcacgtgtgggctatggactccacctgtcctcacccacgttattccccagctgccctctccagctccctccccgcctctttttacactctgcttgttgctcgtcctgccctaaacctttgtttgtctttaaatgtgtataagctgcctgtctgtgacttgaatttgactggkgaacaaactaaatatttttccctgtaattgagacagaatttcttttgatgatacccatccctccttcattttttttttttttttggtctttgttctgttttggkggkggtagtttttaatcagtaaacccagcaaatatcatgattctttcctggttagaaaaataaataaagtgtatctttttatctccctccaa

SEQ ID NO: 49995 - DNA, 783 bp, Homo Sapiens
cacgagggccataatgtcatgtaacataatctaataatggacatatcattatggcagtatcagattatgttacatgacaaagttgaaggaatttggcagatgcagttaaggttcctaaacaactcactttgagactgttgaaagggcctgacctaatcaagtgaacccttgcaagaagaattctccttgtaagccttgaagaagtatgtgagagggccacattggctaaaacctaaaggtggcctctaggagatgagacctaccttccagttgtcagcaagcaggaaaaaaaaattgggacctcagttgcaaccacaaggaactgaattctgccaaaaatctgagtcagcttagaagagtactccaagcttcagatgataaccacagcctgggctgacacctggatttcagctttgcatgatcctcagtatgagaatctatctgttctgtgctggacttctaatatatagaactgtgagataatgggtcacattggctggatgtggtggctcatacctgtaaatcccagcactttgggaggccgaggcaggcagatcacctgaggtcaagagttcaagaccggcctggccaacatggtgaaaccccgtctctactaaaaatacaaaaattagacgagcgtggtggtggacacctgtagtcccagctacttgggaggctgaggcaggagactagctggaaccagggaggtagaggttgcagtgagctgagatcgtgcccctgccttccagcttggtgacagatgagactcatcataataaaaaa

SEQ ID NO: 49996 - DNA, 639 bp, Homo Sapiens
  misc_feature (507)..(507): n is a, c, g, or t
gcagttgataagtgatggacttaaccaggatttaaccctcggcagtctgatccccgagctccgagtgctaatcgttcaccctctccctcctcccacccttcaacctcaaagagaccccagtgtgtgtggctccccctacgcgtcaggaacatcgggccattcaagcagcctttaggttatagagatgatttacagtcacatggaaggagagttttgcttaaaactggtagaagaaataggtaaagtaagtgggaaatgaggtaagcttgctagctacacaaatcatcttcacaactcgaagctcaaataccctcagtgttcagctggtgtgtcttcactatttgatgtgcagtaaatattctcgcttctttttcactataagagcaacgtcattttcagtgtccacaagctggattcacgtagatcccccaaatccttaaacatctgtgaccgttggtgtataaacggtcgaagcatttgatcaacttcctcacaaaaaaaaaaaanaaaaaaaaaaaaaaaaaactcgagggggggcccggtacccaaatcgccctatagggagccgtataacaattaactggccgcggttttacaacgtcgggacttgggaccttggggttacccctcggccttggg

SEQ ID NO: 49997 - DNA, 852 bp, Homo Sapiens
gaatgtgtaccttcagatgaaagtactcctccgagtattaaaaaaatcatacatgtgctggagaaggtccagtatcttgaacaagaagtagaagaatttgtaggaaaaaagacagacaaagcatactggcttctggaagaaatgctaaccaaggaacttttggaactggattcagttgaaactgggggccaggactctgtacggcaggccagaaaagaggctgtttgtaagattcaggccatactggaaaaattagaaaaaaaaggattatgaaaggatttagaacaaagtggaagcctgttactaacttgaccaaagaacacttgatttggttaattaccctctttttgaaatgcctgttgatgacaagaagcaatacattccagctttcctttgattttatacttgaaaaactggcaaaggaatggaagaatattttagtcatgagttgttttcagttttcagacgaatgaatgtaataggaaactatggagttaccaatattgccaagtagactcactccttaaaaaatttatggatatctacaagctgcttcttaccagcaggagggaaacacacttcacacaacaggcttatcagaaacctaccagatgaaactggatataatctgagacaaacaggatgtgtttttttaaacatctggatatcttgtcacatttttgtacattgtgacggctttcaacatatacttcatgtgtaattatagcttagacttttagccttcctgggacttctgttttggtttggtaattggcagtttaccaatataagaattattcctccacttccttggggaaccttttggaaagaaaaatgctttaataatacttt

SEQ ID NO: 49998 - DNA, 587 bp, Homo Sapiens
gcgaacccacacgtggaagtctgataccgcttgcagaagggaattgaatagatgtctccctattgctgtttctgataagcacttgtgcagccccatcagcacctcgatttcttcttggtgagtccatgggaacagccccactgcaaacaacccattcctgctctcctctttcctctaaacctcaacctcctcctacctggcagtccacaggcctacagcttctcctcagtgggaaagacatcagcttggaaaaccacttggaaagccaacgttatcctagaaaagctttttaaatgacccagcaggacaagtctccggatggccttggccaacccggtgcttccctcttttcttggttgtagttctcagaataactagagaatgtactgggagtgttgtcctgagataaggaggaactgtcctaaacctggactctgttcccatcacacctagaacaggatgtcctgcaacgctttagcccaatgatccaagttgcccttggggtataaaacttgacagcagagggcgttcagggtccctcagctgcagtgtgaagtgggacacacaggtgagactccatctgccct

SEQ ID NO: 49999 - DNA, 820 bp, Homo Sapiens
  misc_feature (679)..(680): n is a, c, g, or t
  misc_feature (683)..(683): n is a, c, g, or t
  misc_feature (774)..(774): n is a, c, g, or t
gaccatttctttaagcatcaggcagatatgcttctgcacggaatcaaagttgtatcctacggggactgttttgaccactttccaggatatgtgcaagaccttgccactcagatctgcaaacagcaaagcccagatgctgatcgcgtggacagcaccacattattgggtaatgcatgccaggactgtgcaaagaggaagttagaagagaatggaattgaagtttcaaaaaaacgcacacaatcagatactgatgatgctggagggtcttgaaatctttacagtaaaacctgcaacttgaaaactagccttctgtaaccacagtgcccaaacgaagaggaatgtatggagaactccacgtggatctctgattgcgaaaccgtcacatacaccaagagagccacatgggcatgtggccctcaaggctgggtgagagggctcccctgtgtgttgaactatgcaggagggtgatgcggacacatttcaggtggactttgcaaggactgatggatagctacctcagggaccagaatccgtgggaagggatggacctggtgttcccgttcccatctgacaggctctcttttgtcaaggtggtatttttcgtaataaaagggggaagagtaaaagactgttccaagccaacagtagcctgcccaaggaaccccaataacaaaaaaannaanaacaaaaaacattggcgggccggccttcggcccctcgaagaaagctttctctaaaacccatttccgtttggggccggccgggggcccccgnaaaggggaaaagggggaaacagggggcccaaataagctggtttttc

SEQ ID NO: 50000 - DNA, 890 bp, Homo Sapiens
  misc_feature (716)..(716): n is a, c, g, or t
  misc_feature (726)..(726): n is a, c, g, or t
  misc_feature (745)..(858): n is a, c, g, or t
ttacacgtggggaggaatcagcctgagaatgaaaccatcacaggaaagggctgaaagacggtgagtgtgtgctttctaagggcagcatttgggccttggccccagccggccctgaagccagcacaacccccggaacgtctcaatttgtgagccaataaatgcccttgatggtttaggcaagttttcactgggtcttacccgacgtgagcccccactcctccatatggacctgttttggaccaatgaggcatcctcttctgtagtcctcaacacgcggagctccaccactcctgagcagtgtgacctcaggtgcttgctgcagaggcatcgggggtctctggccagaggtgacatctgaagcaatcgggatcctgtttggttttgccacatccgacctgccgcccagctggggcaagacagccacgcgcggcggatgcaccggccctgaactctttctcgagtagtccccagagatttcaggaagagagagaagaggtaaagagaccagaaacaaagtcttctgcaagcaaagaactgcaacaggccccagctgttaggtttgaggggcgtatggggcaggcgactgaactgcagagttggagccagaggtaccattgctgacccctgagcccaggagccttgagaatactgacagtgttaataataactgcaatcatccaacatatgatgctagaataactggacatctttgtgcnaaaatattanacctataccttgcaccttnnnnnnnnnnnnnnnnnnnnnnnnnnnnnnnnnnnnnnnnnnnnnnnnnnnnnnnnnnnnnnnnnnnnnnnnnnnnnnnnnnnnnnnnnnnnnnnnnnnnnnnnnnnnnnnnnngggggggcgcccggtctaaaaaaaaaaccccc

SEQ ID NO: 50001 - DNA, 851 bp, Homo Sapiens
agatattctactatgcattaaatcttgaactttataaaacatgtacaaaaattgtacaagataagttccacctggtaatgtctttccctaatacagggttgcgcttgcattggaccctagggatttgcactaaaattatatcaaggtctcagatgagcttagtgcacaagcactatcactttaaatactattatttgctaccacagcaactatatatttccatagctttggctgggggcgggggacatttttattacaacttgaaattgctttgctggtttcatatttatttgttgtatttaaaaaatacattgtgtaagagtgattttttcaatatattttattcctgggggggatcatgctacactctcaaaagaaaattaagaaatcattcagatcatcccccctttttaagtagtgtgaattgcaaaaccaacatattttttttactgtcagttgcggtttatttattctttaactgtctgttttagtagtttaatgattatgaaaaatgtatctgtgtgtgatttgctatttattaaattttaagtactttgctgaatgtcattttaaagcatgtttgaagtcttgtgtattcgtctgtgttaatgctgtcaggaggaactgactaagatgtttttaaatgttgttttccacaataacaatgatttttttgatggccggagggacttttaaaaaaaacaaaacaccgaaagacaaaaaaaaaaaagggggggggcaaaaaaaaatacgcaaagggaacattaagtaccaaatcttgacaaggtgggccataaggagaaatgaacaaacaatctaaaaaaaatgtaacaacagagaatgtaaggcac

SEQ ID NO: 50002 - DNA, 500 bp, Homo Sapiens
gttaccattctgatgttggagcggccgcgtccttttttttttttttattaggagcaaaagtaaatgaagcccaggaaaacaccttttgggaacaaactcttcctttgatggaaaatgcagaggcccttcctctctgtgccgtgcttgctcctcttacctgcccgggtggtttgggggtgttggtgtttcctccctggagaagatgggggaggctgtcccactcccagctctggcagaatcaagctgttgcagcagtgccttcttcatccttccttacgatcaatcacattctccagaagatcagctcaattgctgtgcaggttaaaactacagaaccacatcccaaaggtacctggtaagaatgtttgaaagatcttccatttctaggaaccccagtcctgcttctccgcaatggcacatgcttccactccatccatactggcatcctcaaataaacagatatgtatacatataaaaaaaaaaaaaaaaaaaaaggacgg

SEQ ID NO: 50003 - DNA, 582 bp, Homo Sapiens
aagtacaacatctccttccacaagcggtacggcaccaagatcatcaaacgccagcggaagaacgccacccaggaggccctgcgcaaaggggacgatgtcaaattcgaggagtttgtggcctatctcatcgacccacacacccagcgggaggagcctttcaacgaacactggcaaaccgtctactcactctgccatccctgccacatccactatgacctcgtgggcaagtacgagacactggaagaggattctaattacgtcctgcagctggcaggagtgggcagctacctgaagttccccacctatgcaaagtctacgagaactactgatgaaatgaccacagaattcttccagaacatcagctcagagcaccaaacgcagctgtacgaagtctacaaactcgattttttaatgttcaattactcagtgccaagctacctgaaattggaataaagggggtggggagagggagagaatcatgcttttttatttaagatttttatttgtcaaaagaatatatggatatggggtattttggaaataatattttttggggatgatgctgcgagcagcatagtgaga

SEQ ID NO: 50004 - DNA, 726 bp, Homo Sapiens
tgttctgaaggaccctgactgcctgtctgactacacgctggagtactcggtggctttgctcatgaacctctgcctccgcagcacagggaagaacatgtgtgccaaggtggcaggcctcgtgctcaaagtcctttcggatcttcttggccatgaaaaccatgagatacagccgtatgtgaatggagctctgtacagcatcctttctgttccatccattcgtgaggaagcaagagcaatgggaatggaagacatcctacgctgcttcatcaaagaaggcaatgctgaaatgatccgccagatagaattcatcatcaagcagctaaattccgaagagctaccagatggtgttcttgaatctgatgatgatgaagatgaagatgatgaagaggaccatgacatcatggaagccgatctggacaaagacgaactgatccagccccagcttggagaactctcaggagagaagcttctgaccacagagtacctggggatcatgaccaacacggggaagacaaggcggaaggggctggctaatgtgcagtggagcggggatgagcccctgcaaaggcccgtcacccccggcggccacagaaacgggtacccagtgtaagtcagggctaaaggaagcgggaattgactttcttaagctttgttttgattacagtgtaagatgtatgtatttttaaaattcaaaataaagcattcattttgaaaaaaaaaaaaaaa

SEQ ID NO: 50005 - DNA, 641 bp, Homo Sapiens
agcacaggatgccctccaaggatgagctggtccagagatacaacaggatgaataccatcccccagacccgatccattcagtcacggttcctgcagagtcggaatctaaactgtatagcactttgtgaagtgattacatctaaggacctccagaagcatgggaacatctgggtgtgccctgtgtccgaccatgtctgcacaagattcttctttgtatatgaggatggtcaggtgggcgatgccaacattaatactcaggaccccaagatacagaaggaaatcatgcgtgtgatcggaactcaggtttacacaaactgagggggccccagccctcgtaccacccctgttaccccaggatccatctgccctcataaaagtgttcaggtacagcagctgaggctgccctgaggaatcaaggggccattaccaaggggcaggacaaaggatatgtaagaggtggccttcatggtagagcttgacccaagaactactccacattcggatggcccagactgactccatcccctgactttccctttgacttcaccctggttgtaaataaaacaataaaatggaaggtgctgtggactggaaaaaaaccgccaccaaaggcgaacaacaaagacaacaaaacaaaggggg

SEQ ID NO: 50006 - DNA, 784 bp, Homo Sapiens
gctccttttgagattatacaggcttcaaaaaagactaaaagaatacagagaagacataatgaatttcgaagtctaattttggttcctaacatgcctccaacagcatctatcaatcctgttagctttcagtcatcagccatggttccaagcatggaactaccatttcctcctcatatgcaggaggaacaacatcaaagggaactctctctacttcgcaaaagactagaagaactggaaacaacacaaagaaaacaactagaggaacttggatcttccggagaatgatgttcttggagaacaggcagatcaaaagaggtgaagttggtgactcagtaaaacttgacattttaacctgtggcatttagatactttttactgtttgccaaaacacttgaatgtgcctcaagaaaaggtacctactacatgctgtattgtatgactgtcaggattttaagattatacaagtgaagcattaaaagagaaattctcagagatatttagaatatttgacaatggtttgagaatgtaaaacaaaaaggaactagttagagtcaagttttaaaatttttactttgttgaatttttctttttggcattttgagggaaaaataactatcattaattctctcttcatctttgagaggctgggccataacagggtccatacacatcttctggtttactatatacaaaaacggtagttgaaaaaaaatgacatttaaaaagtcagccttaagaatgtaaaggtatctaatatacaaaggctaccctttcttaaatcggg

SEQ ID NO: 50007 - DNA, 764 bp, Homo Sapiens
  misc_feature (762)..(762): n is a, c, g, or t
  misc_feature (764)..(764): n is a, c, g, or t
cagatgcgaggcggcggtcaggtgggatgctatggaatatgatgagaagctggcccgtttccggcaggcccacctcaaccccttcaacaagcagtctgggccgagacagcatgagcagggccctggggaggaggtcccggacgtcactcctgaagaggccctgcctgagctgccccctggggagccggaattccgctgccctgaacgcgtgatggatctcggcctgtctgaggaccacttctcccgccctgtgggtctgttcctggcctctgacgtccagcagctgcggcaggcgatcgaggagtgcaagcaggtgattctggagctgcccgagcagtcggagaagcagaaggatgccgtggtgcgactcatccacctccggctgaagctccaggagctgaaggaccccaatgaggatgagccaaacatccgagtgctccttgagcaccgcttttacaaggagaagagcaagagcgtcaagcagacctgtgacaagtgtaacaccatcatctgggggctcattcagacctggtacacctgcacaggtgggccgagacccagacgaggagtgaggaatgagagagaccaaagttcctgcctccgctgggctcacattcagatgtgagctatccagtgtggtggccactagccaaacatggccagtcaaagttaaattaactaaatatgcatttcctcgttgtactgtctacattggacagggctgttctggatgagaaattaaactagtgaattacaaaaaanan

SEQ ID NO: 50008 - DNA, 582 bp, Homo Sapiens
gacaagctctttgctaagtttgggctgcgctttgacatccgccttcccagcctctaccatgtcctgggtcccactgctgcagatgctggaccagagtccgagaagggtgatgaggaagtctgtgagccagctgtgtcccctcctcaggccacacccacctctctccagcaaacacccccttgttctacccctccagctaccaccaactttcctgcacctcctacccgggccaggttgtccaggccagacagtggcatactggcttctagaattcctctccagagctactctcaagttatatccaggggacaggcccctttggctccaacccacacgcctgaactttaaggatcattggactatcttctctgtggccagcgcagctctcttctgtgttcacagaatggccactgataggcacgcctcttttcccacccactggaaggctcacaggcaaggtgagagaggacacagaaggtgccaacactgtcgctacagtaaggacctgaagtgactttgagaaattcaccctcacaaaccttccttcaggagcaggcattggtagtgcagaggcacagattc

SEQ ID NO: 50009 - DNA, 939 bp, Homo Sapiens
  misc_feature (696)..(697): n is a, c, g, or t
  misc_feature (768)..(768): n is a, c, g, or t
  misc_feature (795)..(887): n is a, c, g, or t
  misc_feature (889)..(891): n is a, c, g, or t
  misc_feature (893)..(908): n is a, c, g, or t
  misc_feature (910)..(915): n is a, c, g, or t
  misc_feature (917)..(918): n is a, c, g, or t
  misc_feature (920)..(934): n is a, c, g, or t
  misc_feature (936)..(939): n is a, c, g, or t
acgtggaggacatggaggaaagacttgacgacagcagtgaagcaaagggtcctgaagattatccagaagaaggggtggaggaaagcagtggcgaagcctccaagtatacagaagaggatccttccggagaaacactgtcttcagaaaacaagtccagctggttaatgacgtctaagcctagtgctctagctcaagagacctctcttggtgcccctgagcctttgtctggtgaacagttggttggttctccccaggataaggcggcagaggctacaaatgactatgagactcttgtaaagcgtggaaaagaactaaaagagtgtggaaaaatccaggaggccctaaactgcttagttaaagcgcttgacataaaaagtgcagatcctgaagttatgctcttgactttaagtttgtataagcaacttaataacaattgagaatgtaacctgtttattgtattttaaagtgaaactgaatatgagggaatttttgttcccataattggattctttgggaacatgaagcattcaggcttaaggcaagaaagatctcaaaaagcaacttctgccctgcaacgccccccactccatagtctggtattctgagcactagcttaatatttcttcacttgaatattcttatattttaggcatattctataaatttaactgtgttgtttcttgggaagttttgtannatattctggtcattcttaatttactctgaagtgatcatctttgtatataacagttcagataagaaaattanagttacttttctcaagtgtttccaaannnnnnnnnnnnnnnnnnnnnnnnnnnnnnnnnnnnnnnnnnnnnnnnnnnnnnnnnnnnnnnnnnnnnnnnnnnnnnnnnnnnnnnnnnnnngnnncnnnnnnnnnnnnnnnncnnnnnntnntnnnnnnnnnnnnnnncnnnn

SEQ ID NO: 50010 - DNA, 390 bp, Homo Sapiens
ctcctgtaaactttaaatcatctctaggttactcagaatagctattataataccacacatcacctcatttgtgtggattcaatgaaatacttggtggggggccaattcaagtttagctttttggaactttgtggaatttttgcaccctgaatattttcaacctgtggttggttgaatccatggatgcagagggctgactgtactaacactgctgaaagactgaaccagtacaacaccatttgaagaaaaaagagcaatagattttaagaccagatttctttgtgctatttttagtcagtcctccctccctctgacaggactaaaaccaggccgctgtactgaatgactaattcaccaaattattgagactgtttgggtacttttagttgg

SEQ ID NO: 50011 - DNA, 743 bp, Homo Sapiens
ggattgccatggtacgtttttatatggaaaaaggaacacacagaggtttatataaaagtattcagaagacacttaaatttttccagacatttgccttgcttgagatagttcactgtttaattggaattgtacctacttctgtgattgtgactggggtccaagtgagttcaagaatctttatggtgtggctcattactcacagtataaaaccaatccagaatgaagagagtgtggtgctttttctggtcgcgtggactgtgacagagatcactcgctattccttctacacattcagccttcttgaccacttgccatacttcattaaatgggccagatataatttttttatcatcttatatcctgttggagttgctggtgaacttcttacaatatacgctgccttgccgcatgtgaagaaaacaggaatgttttcaataagacttcctaacaaatacaatgtctcttttgactactattattttcttcttataaccatggcatcatatatacctttgtttccacaactctattttcatatgttacgtcaaagaagaaaggtgcttcatggagaggtgattgtagaaaaagatgattaaatgatctctgcaaaacaagtgctttttccagaataaccaagatttactgagtccaagtttttaataacaagaaataaacaacctttgtgaaaataatcatgggattggtatgggttttcttaaaaaatataaactttggagaacacg

SEQ ID NO: 50012 - DNA, 704 bp, Homo Sapiens
cgcgtccgagcttattaaaatattatctgaacggtttgaagaagaactgaccagcaagtggttatatctttttgaaggcagtggagtcccgtatggcccaatcaacaacatgaagaatgtatttgcagaacctcagaacgctgtctctggcttccaaagcctgctgcattccttggcccatggccccttccttcatcttcaaggatcagcaagggtattacacaatggcctcgttatggagatggagcatccaactgtggggaagatttccgtcccaggcccagctgtgagatacagtaagttcaagatgtcagaggccaggccgccccccctgctcgggcagcacacaacgcacatcctgaaggaggtcctgagatacgatgacagggccatcggggagctgctcagcgctggagtggtggaccaacatgaaactcactgacaaaggaaaagggctcttcctcataacctcgatccgaatacactggcaaaggcaacactttgcttggacccttctccccagttctgataccactaagaagaagatttagagtaactccagatttcttacatggcatctccagaatggctctggtattaatgaatctagtgccttttaaatgtatcccacgttttgttccctaccatcttttttttcagatgatgatttcattatggatttgtgggatttttaaaaataaaga

SEQ ID NO: 50013 - DNA, 641 bp, Homo Sapiens
gaaccacagaggacagattattatcctgaagaaatgtcaccccccttaatgaactcagtgtcccccccgcaagcattgttgcaagagaatcacccttcggtcatcgtgcagcctgggaagagacctttacctgtggaatccccggatactcaaaggaagcggaggatacacagatgtgattatgatggatgcaacaaagtgtacactaaaagctcccacttgaaagcacacagaagaacacacacaggagaaaaaccctacaaatgtacatgggaagggtgcacatggaagtttgctcggtctgatgaactaacaagacatttccgaaaacatactggaatcaaacctttccagtgcccggactgtgaccgcagcttctcccgttctgaccatcttgccctccataggaaacgccacatgctagtctgattgcctctgtgtcctgcctcagcgtgactccccactcacctggctctctctctgtcctgcctcccattatctaacacattttttacatgtacattttaatttgattcagctggtctgaatctctgaatttatatcatccaaaacttccatatggtcagtagtagatgttctctaatcctccctctccttaccacgggtcagacctaaagaat

SEQ ID NO: 50014 - DNA, 880 bp, Homo Sapiens
agccgactggggtctcctggcgaaaccatggcgggggatgtgggcggtcgcagctgcacggactcggaactgctgctgcacccggagctgctgtcccaggagttccttctcctcactctggagcagaagaacatagctgttgaaactgatgtaagagtaaacaaagacagtcttactgacctttatgtccaacatgcaataccattgcctcagagggatttgccgaagaatagatgggggaaaatgatggaaaagaaaagagaacaacatgagattaaaaatgagactaaaaggagtagcactgtagatgggttaaggaaaagacccctcatcgtatttgatggaagttcaacaagtacaagcataaaagtgaaaaagacagagaatggagataatgatcgactgaagcctcccccgcaggcaagctttaccagtaatgcctttagaaaattatcaaattcctcttcgagtgtttcacccctaattttgtcttccaatttgcctgtgaacaataaaacggaacacaataataatgacgctaaacagaaccatgacttaacgcataggaaaagtccttcaggccctgtgaagtcgccaccattgtcccctgttggaactactccagtgaagttaaagagagctgctcctaaagaagaggcagaggccatgaataacctgaagcccccacaagcaaaaaggaagatacaacatgttacttggccctgaagaaaagtttccaaaaatgtaaatatactgtaactgtagtttttcaaatatgttcatatatattgacaatatttacagaaatcctgattattgtggaaattttcttaagaggtttcaaataggtttaaaaaaataaaaggatttatttttcttt

SEQ ID NO: 50015 - DNA, 791 bp, Homo Sapiens
  misc_feature (5)..(5): n is a, c, g, or t
  misc_feature (23)..(23): n is a, c, g, or t
  misc_feature (688)..(688): n is a, c, g, or t
cctcnggggaacaactgcccacnctgaaaatgagtaacataatgtacacttcagcaataagcttcctgctcgaccccaagttgaaaaggaatttggtttctgttgcaagaaagatcattaaagaaggttgttataatgaaactcacgaatctacggacattttgctttcagggtgaagcaagcttgaatttggattgcctgctctctttaaagcgaattcatactatgtcttgcagaaacaaaacttcagatttcagaatttgttattggcaaaatttattctcattatacctgcttcatatgggtatattactattaaaacagaataccatagagtaattgcattatttgaaaattctctcattttacaatgcacttcaccaatgaaacagctaatttccattttgaaaattaaaagaaaacagcacagagaagttaaatgcggtgtagcaaagttatggggtctgcttgagggcactaacctcaacagattattcctcctctccttagaataaccatgaaaatacaaatttacttagcacatttttgctttttaagtagctggttcattttctgaatttctcacattcagagttccagtcattattgttacatcatgtttgcaggaaccttgtcttatttagtgtctatttgcatataaccctgaaacattattatttgaaaactnttctatatctcaaattaatatacattttcataacctacctttgtattaagacttgcaattttatcaatctattatttcttaaaaacaattactagcttagatg

SEQ ID NO: 50016 - DNA, 865 bp, Homo Sapiens
aacaagatacttcctgaagcttaaaagatgtggctgtagatttaaaaggcaaatacttaagcatgacctgcagtttaaaaagggagggaggaggaaccacggactacacagtcaattcagaaatttgaattttcatccatacctccgttattcttactctactcgctcaacaacaggttctgataatgttacttctgccatttctgttgtctttatttccagttccacaaccctgcttaggctatgtcattcgtggaacaaatatttatggacagattcccatgtgcaaggctctgttttaggtattaagagtctgctctcttgcatccttacattcttatgaaaataatttgattcttgtcagatttttaaccagctgtctttcttgtttagatgaaaactactccaatcaacttcttcaatctgttctgccacattttagccagagtaattgaaaaacaaaattcccaaagtgctggaattacaggcatgagccacacaccagcctgaaatctggtatgtattttctaacgactactttaccatgttggcttcatcttctttttttaagactacttttacatgttgcttcattcgtaaggaagaacagaagatattgaacttgatgggttaaaaggtcacttcattatctttggggtctatgacagtcttcgatttgttgtgaatgaaatattttgaagagttacttaatttctagaaaatggtctataaacacttggggaggattgagctggttttaatacaacttggggcccatggacatggaaatcaccgaaaaatgctcaggggaggtaggtacgcagcatgaacagaacaaagatggtatagaaagcaaaaatgcgta

SEQ ID NO: 50017 - DNA, 540 bp, Homo Sapiens
agcccaggagttcggggttacagtgagctgtggtcacaccactgtattccagcctgggtgacagagtgagatcctgtctctaaaaataaaataaatgaagaagagagactatgtggtagtctcaatcaaacatcatgtctcatctacccagctggttaatatggaaatgtgattcctactaagttgtgattcacttgtctttaaaaccaaggaaattatgtactgtttttggtcagaatagataacctcaagctttgtctttctatgtgcttttaaaatcacttattcctttggattctaataagggttattaggattcagtaattatggactttctcttctgaagtgtgaatttgtaaactgattgtttaattgtcagagggacttttggacatagaatactcaaaactatatgtattttgtttaattttcacttcattcaattcacgcattgaaaacaaatttagaaaatccaatttttcttaagcatttaaacgttctaaaattcactaataaaattttctgaaaaaatttaaaaaa

SEQ ID NO: 50018 - DNA, 626 bp, Homo Sapiens
gggccgctgccgctcatggatttgtgccgtcgctcggtgcgcctggccctggggagggagcgcctgggggagatccacacgctgccgctgccggcttccctcaaggcctacctcctctaccagtgacgttcgccatcataccgccagcgcgacagccacctggtgccaactcactgagccgcctgccgctggggccgccgcaccctgcaccttggaccggcatccgtagccatggacagaggtccctggtcttccctcatcctccgtggctgcctccatgggacaaggaccgattccaacacaggctcctctttcccccttcccgacatcagcagaaggcagcatccctgcatgccgtccatatacaacccctctttgaaaaaagacacagagaataaactcctacgaaagccctacattgagctccaatctgctcggggtgggacgggtgcttcccacacctctgggagaaggctgcagccaccttgggggtcccagggtggtgggggtggcaggtggtaccacagctctgagagcagataccaggggtactaagaggtgcttagacaagggctggtgccatggcagataaagctcaggacgtcaaaaactcaccatggacccca

SEQ ID NO: 50019 - DNA, 802 bp, Homo Sapiens
  misc_feature (736)..(736): n is a, c, g, or t
  misc_feature (788)..(789): n is a, c, g, or t
  misc_feature (791)..(792): n is a, c, g, or t
  misc_feature (794)..(794): n is a, c, g, or t
ggtactggtctgatcctcagtgaagtccagcggaacctcaatagctgggatcgggcccgggttcagcgacaccttgagctcctactgcgggatctggaagatagccggggtgccacccttaatccttggcgcaaggcccagctgctgcgagtggagggcgaggtcagggccctcctggagcagctgggaagctctggaagctgagacactggcggcaggcacctagctatgtgaccactggccctaaaccttttccctctgtggcctcctggcttgcactgctccctctagaaagattccttcaggtctggaggcagaggaatggcatagctgagccagttgccctcctagggcatgtttgaccaggactgagtctggaatctccaagttaaagatggtgaatcaatgcttcgggcttggagatggaacatgcctcctctccattcagctagaaggaccaaagcatgtggcatttggatggccagagtgccctgaagcaccactaccaaccttgcctccccctcctctcaaagagcctctgactgtgtcaccaaggggctcacatcttatgtctgccatgcccaggggtgtcgccatccagatgtgttggaagcttcccctcctgccctatgctcacctgtggacaccgaggatgccctcacattgggtgctttctcctcatcctcatgccccctttgccacaatggtatgatggcttggtagcccctcgaagcanatgcacctgaacttgctgctattaaaaagccgtgtgcctttctaccaaaaannannanaaaaaaaa

SEQ ID NO: 50020 - DNA, 786 bp, Homo Sapiens
cgtggcaattcggacgagggggaaacctccatcaagaggtggtgcttcctcatactgacatttaagtctcttcagcatttactctgatctgttctagccatctagttgtctattcatcttttctgacttttttcaagttctttctttggagtcctcctgttcccctcacttttgctcgtacttcagagatccatctcaagtgctgccctctcctggaagtctacctcttgtagtgcagtcacattttactgaaatgtataattctgggaatttcacatgctgagaaatttaaataaaagtttcttgctttatgtgcaaaatttgaaataatccaaacccctctctattagaaaacacataacttcctattgccatagaacatacagctttaaaaagaaacactagctatcttttgtcagttttttgtgacccaccagcattctgaagtacaggatatctgtcagtgccattgcttgaaaacattccccagaagcattcactttagaatggaagttagatgttgtaaactcggcaagaaggccaaatgatgaccatgacacaacttgctacaaaatattaaagctgatgctgggggtgagggggcagaatttaaaagcacacttaaaatagttgaattgtgaaaaagcataaagaaagcgtggtgattaagtgtgggctgaggagccagatggctctagttcaaatcctgaatctaacacctattggatgactttgcccaaataattcaatctcccatgtttcctcatttaaaaaaaaaaaaaaaaa

SEQ ID NO: 50021 - DNA, 698 bp, Homo Sapiens
ttgtgatgttttagagccgctgtaggtctcttcttgcatgtccacagtaatgtatttgtggtttttattttgaacgcttgcttttagagagaaaacaatatagccccctacccttttcccaatcctttgccctcaaatcagtgacccaggggagggggggatttaaagggaaggagtgggcaaaacacataaaatgaatttattatatctaagctctgtagcaggattcatgtcgttctttgacagttctttctctttcctgtatatgcaataacaaggttttaaaaaaataataaagaagtgagactattagacaaagtatttatgtaattatttgataactcttgtaaataggtggaatatgaatgcttggaaaattaaactttaatttattgacattgtacatagctctgtgtaaatagaattgcaactgtcaggttttgtgttcttgttttcctttagttgggtttatttccaggtcacagaattgctgttaacactagaaaacacacttcctgcaccaacaccaataccctttcaaaagagttgtctgcaacatttttgttttcttttttaatgtccaaaagtgggggaaagtgctatttcctattttcaccaaaattggggaaggagtgccactttccagctccacttcaaattccttaaaatataactgagattgctgtggggagggagga

SEQ ID NO: 50022 - DNA, 898 bp, Homo Sapiens
  misc_feature (754)..(754): n is a, c, g, or t
  misc_feature (889)..(889): n is a, c, g, or t
acagttaacatgctttcagtcaagtacagattgtgtccactggaaaggtaaatgattgcttttttatattgcatcaaacttggaacatcaaggcatccaaaacactaagaattctatcatcacaaaaataattcgtctttctaggttatgaagagataattatttgtctggtaagcatttttataaacccactcattttatatttagaaaaatcctaaatgtgtggtgactgctttgtagtgaactttcatatactataaactagttgtgagataacattctggtagctcagttaataaaacaatttcagaattaaagaaattttctatgcaaggtttacttctcagatgaacagtaggactttgtagttttatttccactaagtgaaaaaagaactgtgtttttaaactgtaggagaatttaataaatcagcaagggtattttagctaatagaataaaagtacaacagaagaatttgattagtctatgaaaggttctcttaaaattctatcgaaataatcttcatgcagagatattcagggtttggattagcagtggaataaagagatgggcattgtttcccctataattgtgctgtttttataacttttgtaaatattactttttctggctgtgtttttataacttatccatatgcatgatggaaaaattttaatttgtagccatcttttcccatgtaatagtattgattcatagagaacttaatgttcaaaatttgctttgtggaggcatngtataagataaacatcatacattataaggtaaccacaattacaaaatgggcaaaacattttctctggattcattggtggatttttctacggggagatgtgatcttgccaaaggccacagaccttggccttcaggnccttcctgt

SEQ ID NO: 50023 - DNA, 815 bp, Homo Sapiens
gggatgcatgcagtcaaattgatagtttaattcttcaagtgataatataggaagtttcaccttgcctttgtccaagccccacctattaaaaccctttactcacagtttgaaactgaagcagtaaacttgtttccagacatctttttcagattgtcttaagcccaaagttgcctcacttccactattctcagcagccaaccaggatttggcagctgctccactgttacggttgagggaacagggatcagtcctgttagaagtctgtgagcctcaaactctacctgttctctgcaatcatccaaaatttgaaaaagaagctatatccagtgtttcactgccaaacagattcactactcttactgattcttcactgagctttgctagtataagcagagttccaagtctcccctagggttgtctctacatttctttatcattccagtgggtagggtttagctgggggaaggacatttcataagggttagttggactgagcagtatggacatttgcttttttcattacgtactgttgtttttccttgttaggtgtgctttggtggttttaatattattgtgccagggatggggaaatggggggggttgtgtgggaagagtacttattattgtgttttcttcagtgtaattgttcttggtaattgatacctctctggttttaatttctctcattctttcaaaagtaaaacgttttgaaactttggaggaacaaaagagaaaggaataggagaaaaagagaagaggaagggaaggaagaaaaaaaaaaaagagaaaaaaggaggggggggcgaagaaaaagg

SEQ ID NO: 50024 - DNA, 929 bp, Homo Sapiens
  misc_feature (790)..(790): n is a, c, g, or t
  misc_feature (813)..(813): n is a, c, g, or t
  misc_feature (878)..(881): n is a, c, g, or t
  misc_feature (883)..(884): n is a, c, g, or t
acagggagagcagttgaggcccgggcagggcccccacaccagaccccaacatagcttccccacccaggcaccccctcccggggcagcaggcgtgggagtcagggctgcatgctcctcccctcccacctcacaggcggccttaggcaagtcattttctgtcatcacaaggtcgcctctgcctagtcaggtcctggcgtccagagtaaggatgtgcggcccccaggcccccgcacacctccctcagcaccaagaccgggacccccccacccacgtgtctcattgtggctgcctatggactcccgggccttgtgtgcaggccaggcccttccactgattttttaaagtgaaccattgctggatctcagattctgtggcatctaaggcctagcaggggtgggcacacgggtcacccgaggcccataccaagactctgttcctgccctaggcccagtctcaaaggaagccacaaggcgcgggggccactgaggaaggaaatgttcattttcatttgtccaaaaccaccttaagttttaagtatattaatcttgatgctttttaactattgctttttaacttgctgagatttagaaatactgttataaaaacttttttaatttctgtatttttttctgaattgtatcttcatgggacattaggggttttctatggtaagcacacctatggtttttggaaaaaacattatccaaatatatatccagacgggttcttccctagaaagaaaaacaagtcctttacacctggataaaaatattttggcggaagagagggngttccttttttcccttactgggngcctgaaaagggaaaggatggaattaccgaaggaagaaaaataaaaacttgggagggcttccaannnncnncgcctcccggcgcacgcccatgaccgtacccaccaaatgatgtaa

SEQ ID NO: 50025 - DNA, 888 bp, Homo Sapiens
  misc_feature (369)..(369): n is a, c, g, or t
  misc_feature (371)..(374): n is a, c, g, or t
  misc_feature (377)..(377): n is a, c, g, or t
  misc_feature (395)..(397): n is a, c, g, or t
  misc_feature (401)..(401): n is a, c, g, or t
  misc_feature (407)..(407): n is a, c, g, or t
  misc_feature (411)..(412): n is a, c, g, or t
  misc_feature (415)..(415): n is a, c, g, or t
  misc_feature (422)..(422): n is a, c, g, or t
  misc_feature (436)..(436): n is a, c, g, or t
  misc_feature (451)..(451): n is a, c, g, or t
  misc_feature (454)..(454): n is a, c, g, or t
  misc_feature (460)..(461): n is a, c, g, or t
  misc_feature (473)..(473): n is a, c, g, or t
  misc_feature (477)..(477): n is a, c, g, or t
  misc_feature (481)..(481): n is a, c, g, or t
  misc_feature (483)..(485): n is a, c, g, or t
  misc_feature (487)..(488): n is a, c, g, or t
  misc_feature (494)..(500): n is a, c, g, or t
  misc_feature (502)..(506): n is a, c, g, or t
  misc_feature (510)..(515): n is a, c, g, or t
  misc_feature (535)..(535): n is a, c, g, or t
  misc_feature (545)..(554): n is a, c, g, or t
gggggatatgggcgtctccagtgtgagggagaagtatgagcttgctcacccaccagaggagtggaagtaagatacaaacctgctttggtgtgatgcacacttgatttcttttgctttttaaaaacatgcacaagataacaaatgtatatgtttaattttcacactgcttgtcattacaactctggtataaataaaattcgttagtaattattaacgaatgatctcttctagacctctagtctagcttttgggtattattaattatactttgagccatctgatttccgttttctgtgatggtcttttgctagctaatttctcatcagtgctactttgtttcaacctttgctcccaataaaactcaaatcntnnnnaanaaaaaaaaaaaaaaaaannnaaanaaaaanaaannaanaaaaaanaaaaaaaaaaaaanaaaaaaaaaaaaaanaanaaaaannaaaaaaaaaaanaaanaaanannnannaaaaannnnnnnannnnnaaannnnnnaaggggaaaaaaaaaaaaanaaaaaaaaannnnnnnnnnggggggcccccccccccccccccaaaaaattctctcaaaaaaccttttttggggggcgccgcgcccccccaaaaagaaaaaaaaaagggggaaaatttgtttcctccaaaaaaaaataccgcgcaaaaaaaaagaggggtgggtgtctctccccccacaacaaaaaaaaaaccaccccggcgggtcgaacacccaggttgtttttaaaaaaaaaacaccaaaaggggggggtttgttggagagaggttatttggtggggggaatctcacacagagaggagcgcccgccgggggtttttttctttatatattattataaaccccccgcgcgcccc

SEQ ID NO: 50026 - DNA, 784 bp, Homo Sapiens
gctctcaagggctcttctgctcatctcttccgtgagatttgctcccagaccctctgatctccctccaacaaaccctggctccagccccctttcccaacttgagttgcatcatcttggaaccaggaagcccagctaaagccaagagaccagagagtccctgccactagttttcatcagtctgttcaagcaaagttgatctgctcctggcacgtccagtaaattccagaatcattctcctttctgcccataaagggccttggagaattgctttaagaagagtgaatgttccaatgatgatagatattataagcgatgatggttctgttgctatgaacacagcagtcggtccctgtcattgtccacccaggagtggccttgttaattccaagtggcatgtatcttccctctgagcttcatttcttcaagatgctctgggtggtgggatgggagaccatcctcagccctcctcagaccttatcaattcattgagagattgcaaagctgaaagcacctccggccactcctgggagacagaccctttggtgatgaaataaaccagtgacttcagagcctatggtctcaactgtgcttgaaaaacactgtctctgaaaacaacttgtgattctccctgctccctgtggacaaaagcacataattctgctgttacgggtactttgctcatacgagctttcatgttcagcatgcaatggaatcatgcttgtccatgtgaaataaatatggggtctctcgtgtcttaaaaaaaaatgcaacaaaaaaaaccaac

SEQ ID NO: 50027 - DNA, 579 bp, Homo Sapiens
  misc_feature (53)..(53): n is a, c, g, or t
  misc_feature (548)..(548): n is a, c, g, or t
  misc_feature (578)..(578): n is a, c, g, or t
gcaagaccatgctattgaaaaagttcagaaaacatacaccgtggaccagaggncctaatcctatctatggatgtgttttgtgtgacccatacagtgttgtaaaaaacacttagaaccattattctaaaaaatggggctatttcacattaaagtccagatttctgcttctttttaaacatcagaggctctggctacacagaggcctttgttctttcctggcatcagtctgcaggaccaagcggtggtggctcacttgggaagagccttgtgctctccactttgccacagtaccactgccaccatgctgctcacttatgtcatccacttggcccttgtatgacctgaatttgcaacctctggtatactgttatgttctggagaaaatattcaaagatctgccaaatactgcattagtatactgagtttatacagcatttttgtagggttttaaaattgcattcaaggtcactttccaagcactttctggttttgcctggtttttcctagaagaaaatgaaaagctatcccttaataataacatggcagcnagtaaacagtgtgattgtgaaaaaatatant

SEQ ID NO: 50028 - DNA, 956 bp, Homo Sapiens
cctccagctccgtggctgtgtttgtctaacaaggatttgggtaactactggatacaagccactgtgcttagtatggatagactgccatcagctcacccacatgactcctgttcatggcaagctaatagtctgtctggtggaagaggattgaaaaagcacacaaaaacatcataaattacaaggagtagtaagaaggaaaaaacagggaacgtgagagaataactagcgagtggggagaggagtggatttactttaacagggtagtcagggaaggcctcttgtggtggtgacatactgatttaggcaaagcgtccagcacgtgcctagcgcttagtagttgctcagcaaatggcatctttgggtgatgaatacctcacatttgtatatggcctgtcacagcttttccataaagctttttttttaaggccatcttgacgtcatacttttagaatatttttattttattattattattattcttggacggaaccttgctctttcaccaggctggagtggaggttgcagtgagccgagattgcacaattgcactccagcctggcgacagagcgagactcgctctcaaaaaaaaaaacacaaagaggggggcacactccgcgataagaggaggaaccgtgatctcttatacagaagatctctctccattttaatgtgccacaaataaccgcctcgacctcctggctataattgaagcacaccccaatatttgattaaacaaagccatgggcaatcccatatgaagggggcagggtataggtcgggcaaaataaaatgcgtagccctttttcacaaggaacctcaccctatccccatagtttttagaccccccattatttaaagcgcgcggcgaccgaaatatggcgcacatcccatggagcgcacataaagacctctattacaatagacaagcgacccgctacctccaaaaagaagggttg

SEQ ID NO: 50029 - DNA, 611 bp, Homo Sapiens
cgagtccccccgcccagattccggcccaggtaccgaaggcctttccgccccaggccacgccagcagcctaccacagaaggtggggatggtgagaccaagcccagccaaggtcccgctgatggttcccggcctgagccccagcgcccacgaaaccgcccctacttccagcggagacggcagcaggcccctggcccccagcaggcccctggcccccggcagcccgcagcccctgagacctcagcccctgtcaacagtggggaccccaccaccaccatcctggagtgattccaactcaactcaaaggacacccagagctgccatctggtatctgccagtttttccaaatgacctgtaccctacccagtaccctgctccccctttcccataattcatgacatcaaaacaccagcttttcaccttttccttgagactcaggaggaccaaagcagcagccttttgctttttcttttttcttccctccccttatcaagggttgaaggaagggagccatccttactgttcagagacagcaactccctcccgtaactcaggctgagaaagaaccagccagctcttacctcctcctggttgcttttcttgcccccacccca

SEQ ID NO: 50030 - DNA, 596 bp, Homo Sapiens
ggtggagtactacagccacagaggcctgcccccgagaagcctgggcgtccctgccggagaggccagcccaggctgcacaccgtgaagatgtggagggcgtagggtgggggcagtgaggaatgggtccatacagcctctgtctgcaacatgcttggggtcccttaagctccctccgacctcccagaagcctccagtccccaccaggccccactcccagtcctcctgggatcctgctggcttgggcccggctctggggcccccaaggccgaagggtgacaaaatacaggcccccatgcctggccctgcctgagccaggtgggtggagggagggagatcatgagggacttggagggagctgggagttcatccacgggagaccctgccccgatgagaaggggcagggactgggggctctgctttgcgtctaacctttgtgggggagggccagcaaggcagcccccccacgctcgagaaagcctgggggacccagacacctgtccccacagtcaaagcctggggacccagacatcctgtccccacagtcagcctcctgtccctgctggtgcccccacacccatctaccctgtgctttttgc

SEQ ID NO: 50031 - DNA, 729 bp, Homo Sapiens
tggccctctgaggaaagctgtcctgtctctggacatttggcatggccagactctgaccccactgccctaggctcttaaatactcattgggagggtccgagtccttacctggcctagccccctcatttcacaagaagaagaatgaagtccaggaggagaagggctcattgcaggccacagaaagatttgatggtgcagcgatgagaattcctggttccaggctttgcatctggagcctttaccggttgactgttgccttccacacaaacagcctctgaaaagcactttctccatacataattctggagaagatgagggatcttgccctccaggagccttccttcctcccccaatgaggaaatcagtcactgcactggtgcaaaggcaagcagattggaatttgtgctcttcaccgattttctcagggaaagaccccttccccttgccagcagaggaacctgtagttttttccatttctttcttcagaacccaaagtatgtatcactcctcatgctcacaggggattgacaggagagaaattcaccaggatcttagctcaaaaagacacagcctcagaatggccagatggattgcacgaaacctgacttggattcaccatcttctcctgccacttaaggtgtgctccaacataactccagaaggctccaaggaagcttccaggagcaaggcctggcttgcctgttcgcaactttgcttaattctcttcttg

SEQ ID NO: 50032 - DNA, 944 bp, Homo Sapiens
  misc_feature (825)..(825): n is a, c, g, or t
ggtccggaattcccgggatggtgtccaggacaattaccttccttctggagaaacttcccttaatcaaataagagaacttcaaagaaaatccctccctgtgctttggaagggaagggaggtgggcagcagtgggtcagagatagacctttgttctcttatttctgaggcccttcagtctcctttattcaaagcactcagcatgccaaagcaccctattttagggtatctttttctgagccctaaacactgtgttggggatgtcaactgtgacaggaaaatatcttggggccccagaatcactaaggaaaactcaagcttagggaaacttcttagggcaaacccacctcccactctattcaaagttatctctctgctcactgagatagatacatatctgattgcctcctttggaaaggctaatcagaaactcaaaagaatgcaactgtttgtgtctcacctatctgtgacctggaagctccctccccactgaaccaatgttcttcttacatatattgattaatgtcttatgtctccctaaaatgtataaaaccaaggtatgccccaaccatcttggccacatgtcatcaggacttcctgagtctgtgtcacagtgtgtcctcaaccttggcaaaataaactttctaaattaactgagacctgtctcggattttctgggttcacattttggaaaccatgaatggattctgggtggagatgcccctgacccttgacaaatctatcggtgcttggtaccagcatgagctaactttatggctcaaaacaataggaccatttgctgaggtctgagaggactccctccagaanatccctgatctcttaaaatttggaagagatcggaagtttatttttgctggacaacacctcctttttttgggagttttactgtgctcccaacaagggaaggggaggttttcctggcttct

SEQ ID NO: 50033 - DNA, 299 bp, Homo Sapiens
acccactactggcaactcgtactgaacccatcaacactacttattcttacactgacttccaaaaggcagttaacaaactcctaactgcatcttgtaaagatctaccatttgctctgatatctctgatgttgctaattgagaaagtggtacaaagttagtcattacacagcccactaatgccttctcagtcaaactctcttatgccctggcaagccaatgaggataccctttgacaaaccctgtggataaaatgataatatcaaggtcaggcatggtggctcacacctgtaatcccagca

SEQ ID NO: 50034 - DNA, 1082 bp, Homo Sapiens
ttctgaacttcctgtcctgggccaccattctcctgtctcccctcttcagttttgtcttgggcgtctttgccagcggatcacctctcctgatcctgactttcttggggtttgtgggagcagcttcctttggagttcgcagactgataggagtaactgagatagaaaaaggctccagctacggaaaccaagagtttaagaaaaaggaataattaatggctgtgactgaacacacgcggccctgacggtggtatccagttaactcaaaaccaacacacagagtgcaggaaaagacaattagaaactatttttcttattaactggtgactaatattaacaaaacttgagccaagagtaaagaattcagaaggcctgtcaggtgaagtcttcagcctcccacagcgcagggtcccagcatctccacgcgcgcccgtgggaggtgggtccggccggagaggcctcccgcggacgccgtctctccagaactccgcttccaagagggagcctttggctgctttctctccttaaacttagatcaaattttttggtttttaatcagttatcttgggaacttaacctggcccctcacctcttctgcaccccccgcccccgaaactgtctcgtaatgaatttctgctgtcctcctgggagtggacggccgggtcccgtcccccgggagcatcgctcggctcagcaccttggctcccagtgggggccccgtggagggcgcccgtagtgataagcacaccggcacgaacgtcagggtcatttcctcgagtcggagcccctcactctgccctgtccctggggctggctgagggcgaacgccccacctcactttctagagccctggctgtcctagctcctatctgaccttgggtgtaaatacgtacctctgtttttaaaggggatgggcccctgagactccgggaaatgcaagttctccctgcaccaaagctccttgtccctcctctggcgggcagatcctggccccccccacttggggggtctgggggaaggaaggacccttggggttaacgggggcgccccccttccccgaatttggggccccgggggggccaacc

SEQ ID NO: 50035 - DNA, 1001 bp, Homo Sapiens
  misc_feature (11)..(11): n is a, c, g, or t
tgtgcatggangtaaaagattcaatccttaataatgatggtagctgtgttgcagaaaagaaagcctgtcagagtaacgtgttcagttttacatcataatcagagtgtgtccatctctgttgaaggcagaattaaaaacgccttcaacatttttaaaataatagatgaaaaacatctcaaagtcacttttaaaatttgaattgacgattccacataacaggaaaaggaccaggaacatcttaaatacttcacgatggaagtgatgttttaagtgtaatttcatcaaggagaagtttttccagaaagtcttttgacttcagtaagaagcttatttactctggtaaatagtttctagtaagatgagaaagacttgattttttaaaaaacaattaaaaatttacattgtttaatctaatgttgtgatttcgaaagtactacctttgcccttatagttacgcatgtgtatttatatgtattttcttggttcattcaaacgccaataaaatactttactatccaggaaacccgagacgaaagggaacaaaaacccaaaccaccacgtctacccattttattgggaggtggcttcgggatgtaccccatcgggggacacaccgtggggggccccccccagaaacctcccctaggggggcccaaaatatacgagggacctcgttttttttggaacaaagggggcccacttatgtgacgatcgctttctcggggaaagcggtttggcgcggcaattttttattgcgcggcgcggggggtaaaagtggcaagctcggggaatcctgttgaaaagaccccccacatctttcgaggggcgtatatataaatgctcacaatcttcctctacgagaattatcgagagctctatggcggagctaaaaaacatttttaaatccggcaaatggggctcacaccaaacgtaaatattcgtgaagatcctcccacacctgtgtttaagccgagccattgctcttttgaaaactccacaag

SEQ ID NO: 50036 - DNA, 626 bp, Homo Sapiens
  misc_feature (608)..(608): n is a, c, g, or t
gggcgtggtcacaagcgccggctccctccctgcagatggaagggcgagaacgtgtccacgcacgaggtggagggcgtgttgtcgcaggtggacttcttgcaacaggttaacgtgtatggcgtgtgcgtgccaggttgtgagggtaaggtgggcatggctgctgtgcagctagcccccggccagactttcgacggggagaagttgtaccagcacgttcgcgcttggctccctgcctacgctaccccccatttcatccgcatccaggacgccatggaggtcaccagcacgttcaaactgatgaagacccggttggtgcgtgagggcttcaatgtggggatcgtggttgaccctctgtttgtactggacaaccgggcccagtccttccggcccctgacggcagaaatgtaccaggctgtgtgtgagggaacctggaggctctgatcacctggccaacccactggggtagggatcaaagccagccacccccaccccaacacactcggtgtccctttcatcctgggcctgtgtgaatcccaacctggccataccctcaacctcagtgggctggaaatgacagtgggccctgtacaatggcagaataaactcanatgtgttcacagaaaaaa

SEQ ID NO: 50037 - DNA, 698 bp, Homo Sapiens
  misc_feature (698)..(698): n is a, c, g, or t
ggggttgcacctgacattctctccccagtaaggtgttggcaagctcagcatctgggttccactctcacactgtctggcagctctgtgtctgagaagttctacattgaccaggcccccttgttgcctggagtatgacgtaatcagaaaatagacgtataaatgtgcacatgcgtatgtatttgcttgtgaaattaaagtcacctcttgcctctgctttcctgatcattcgttagagaaatggatcaggcatttttttaaattattattctttctctaaactatttgcattgtgttcaaaaacccattttagaagtttgaacagcaagcttttcctgattttaaaaacacaaagttgctttcaatgaaatattttgtgatttttttaaagtccccaaatgtgtacttagccttctgttattccttattctttaagcagtgttggcttccattgaccatatgaaggccaccaattaaatggttgtgttaatccaacatgtaaaaaactttttggcagggcacagtggctcacgcctgtaatcccaacactttgggaggctgaggcaggaggatcacttgagcccaggagattgacgccgcagtgaactatgattgtgcccctgcactccagcctggatgacagagtgagaccccatctcttaaaaaataaaaaaaaataaaaatttgaaacctgttttccn

SEQ ID NO: 50038 - DNA, 479 bp, Homo Sapiens
  misc_feature (465)..(465): n is a, c, g, or t
acattctatctaaattgtgtgtctgtttttgaaaggtgttgctttcaagtaggtggtttttatttaaagtacttatttttttgaggttaaaatattcagaaactacttttatgcattgtagcagtaatcatttatggaatgcttttgacatgttttaacagggtaaccaaaacttttaggcctgttttttttggttgtccttgttgttatatttttaatggaaatctgttactcaggctggtagcattaaattagctttttaccctcaactcaagtagcaaatatcatggagaacttcagtgtttagcaggctgttaatttcccatctatgaatagcactttatgatgtaggctaaactaagcaaataatgcagcgttatgtggatcattatgcaataaagctgctaaagtcacatttgtggttgatactcaagccttgtacaagcacatatcatgtagacattnttaaatgtgaagct

SEQ ID NO: 50039 - DNA, 566 bp, Homo Sapiens
ttgtcacttgcttttgaaatgtgcatttgtacttaggcagttaacagttagccacaactcctcatctattcttcctagtagcgcaggggtggggcagacttttcttacaaagagccagctagtacacactggaggccctgtggtctctgtagcagctctcgcctttgtagtgcaaaagcagccaaaacaatatgccagccaatggcatggccagccaaccagtgtggctatgttccaataaaactaggaggctagctggatttgacccactggctgtcgttggctgactcctgtgttagaccctccatggtcttatatgcgttatgtgcagttattctcccatctctctcaaaagggaaacgtcagtgacctgaacattgtgctcagagtaccagagttcttgcttaagttgcaggtaactgactaggctgtatgaaccacatagtgggtagactaggtaagaataatgtggcaataaattagtatgacatgtttaatagtaattatgtctatatggcattttggaataaatggcaaattgtttacaagttaaaaaaaaaaaaaaa

SEQ ID NO: 50040 - DNA, 723 bp, Homo Sapiens
gacccacgcgtccgctccgggagaacacgggcggcggcgggctcgggttcgggctagggctggggcgcgggcggcccctggccggggcctctgcgagaggctgggaaccggcggcctcacctcctccgaccgcctcccactccgcagcggaatcggacatgtccaaaccaccgtgttacgaagaggcggtgctgatggcagagccgccgccgccctatagcgaggtgctcacggacacgcgcggcctctaccgcaagatcgtcacgcccttcctgagtcgccgcgacagcgcggagaagcaggagcagccgcctcccagctacaagccgctcttcctggaccggggctacacctcggcgctgcacctgcccagcgcccctcggcccgcgccgccctgcccagccctctgcctgcaggccgaccgtggccgccgggtcttccccagctggaccgactcagagctcagcagccgcgagcccctggagcacggagcttggcgtctgccggtctccatccccttgttcgggaggactacagccgtatagaggggcgcccggcgccccgggccccacggcggactcctgggctgactgcggggctttttaaatggcttccctggactgcggggaggggcgggggagggagggatttcttatcccgtttgttacattttgaggataataaaggtgtgtgatctggttggtacaaaaaacgaaacacaag

SEQ ID NO: 50041 - DNA, 443 bp, Homo Sapiens
  misc_feature (374)..(374): n is a, c, g, or t
  misc_feature (391)..(391): n is a, c, g, or t
  misc_feature (403)..(403): n is a, c, g, or t
  misc_feature (405)..(405): n is a, c, g, or t
  misc_feature (408)..(408): n is a, c, g, or t
  misc_feature (416)..(416): n is a, c, g, or t
  misc_feature (436)..(436): n is a, c, g, or t
  misc_feature (438)..(438): n is a, c, g, or t
  misc_feature (441)..(441): n is a, c, g, or t
tgctccactgccttcctctagtgcagcctggaagacatggcagcgggtagctcctggggctgagccagaagcatcactgcagtgaaagtctctgcttacctgtctggctcagcttgggcaagggctgggccatatgtgctcagggacgtgcttctcttgtaaggcaggaggatagaagaggaccaagaagggagggggctgccctgtggtgcacacaggcctgccatggggcgtgggagcccatcccgctgcctgactggagctggccgctgtggtggactcaggaaccacttttaatactgcaactgctcccttttgcccagtcagggaaagctgactgtaagtcccacctcccactccgtccacccttctantggtttctctgagaggnttctctgcttcngntgngcttgaantggcatgcctcctctgctgnanggntc

SEQ ID NO: 50042 - DNA, 625 bp, Homo Sapiens
cccacgcgttcggtgaaaactagaaagttctgttagttaccttcttatagacatatattatgtagaactccaggagggacattaaatcactttaagtataaactgactacttccacagttgagagaagttgcgacctgtacttgtactatggaaggaaggatatcaacgggtgtatattgatgtttatataagtaactctagaaggagacttgttctagcgtgccccatggtacctagtgtgtgtctgatgccgggtggtgtcaaagatagagggcttcttgaaggaacttgccattccttgctttgaccactgcatgaactgcttctaaattattttattacctaaaaatttaaaatatgccattcattgcacacacccacaaatgcaaatcattcctctctgtagatgctaggatatatataaattattatataaattcttgatttaaatgtcagtgtttctatgattgcaaactattaaattcttttcctattaaagcacagatctaatctaagtattattaagatgatagccctctaggcagatatattgctatcgaaaattcttgcttgttgagtaaaatgtttaaatactatatgtatctcatgtacaaagatgacata

SEQ ID NO: 50043 - DNA, 851 bp, Homo Sapiens
  misc_feature (727)..(727): n is a, c, g, or t
cggagagatcatgctgagaaaagagtgcattttcatatagcaaatggatctcagccactgttggagtgggtaaatgatttttttccccaaaaatgtgagaatgaaggaagattgagtttcattcaagtataaaagtgaaaatttcttctgatgaactgtttatgaaggtagtactttactgggtgactaaaatgtctacattattatagcattacatacgaggatgctctttttaccacagtatgtacctagtgttgcataatctagaacacagtatagagtccatatacaaagaagttacagcccatatttctcacctattaccccagtgaagtgaggcagaaataccttgggcgaggagggagagccttaccttctaatggaattagattccaaagatatttggatcctttgtttcataaagtaaatgcatagttggtaactaaatgttaaaaaggccattttattattgttagccaaaacttctgtttatttcaagttaatatcgcccaactctacatcatctacccattttagctcataatgcttttgattatcgccagataaagtccattctcagagaacaaaaatttttcatcattgagaaaatgtgcataacataatacatacatacacaagtatattcacgtacataaatacacacagatatgttgctaaagtgagattgtaggttatcagtaacaatttaaaggaaacaaccactctnttgaatgtacaattttttttttctgaaatacacttttctaaaaccctcttaactggaggtttcctgttttcttcttgttttaactggtggtttccagtaggcaaaataaaatgacaggcatgct

SEQ ID NO: 50044 - DNA, 607 bp, Homo Sapiens
gtcagaagatgatcttacatcagttgttggaactgacaagttagcagtttccctgttccctgaaggaacagcaataagaactttattctaagctaatactcattgatgtttgaaaaagaggaaaatttggatctttcttttgcttactaaacaccaagaggaaaagtagcaaagttggtgtgctaggattaactcaggtaagggtgatgtgttttaggattgagaacagcagacttgggaatcactgctaattgttacttaaagcatgttacagctgttttgttctcagttttaaccaaagccagtggacatacggtagtaataagtaagtcttgttgtgtttcagcatttaataatagactttggaggtagacccctggtttaaatctaagtctagtttgaggaagtcacttaacctttattgaaaagactctggatttaataagctgtgtaactggcactcgatagttacccaaagttcagtctagatggcacaaaccacctctcagggaataaaccctaagacatcactcaaggaggacttcaattatttaattttgaactgttttgtcctctctggccataaaacttgacagtcatgaaaggt

SEQ ID NO: 50045 - DNA, 750 bp, Homo Sapiens
ggcagctgctcctggggcgggacagctcaggctgaaattactggaggattctaacatggatacaactctggaggcagacacaggtgcctgtcctgaggtctggcccggcaaagagcagcaactgcccgcctgctggaggtgctcgcagacctggatcgtgcccacgaggagttccagcagcaggagcgagggaaggcggccctgggcccccttggcccctaaggaaatgccagagctagcccggaaggaggagcaagagccaggggccctcttcagcgcatcctgccccgggagtctcctgtctccttggacctctttgattctgtggtttggaggctcccagagacgtgcctagtcctgtgtgccttgagtccagaactcagggcatggaagccctttggcaggggccagccttgcactgagtgaaacttgccctctggcttgattcagactggagtggataggataaggaacctgacttatttgactgagactggggtctctacttcaccaaactggcctctatccataccaaggaggccagcctggccctgagctgctggatacagctggacctgaattcctgatgcccatgtgatgttgttgccccagatgggcactagatggctcactccttcctgttttcatgttctgctaatccctataacctcactgattcttcttgtaccctgcccttggcctaggactccaacacaagcttccagaatcaggtaccctcaggaagaacca

SEQ ID NO: 50046 - DNA, 584 bp, Homo Sapiens
aataccagacaaaatagacttaaaaaaatgttactggagataaagagtaaaatgttacaatgataaaagggtcaatacatcaggaagatgtaacaactataaatatatatgcatctaacagtagagcccaaaatacatgaagcaaaaactgaaaggaaaggagaaacagataagtccataaaaagagttggaatattcaatacccctttttcaataatagagcacctagacagaagataaaccaggaaatagaagacttgaacaacattataaggcaaattgacctaaaagacatctatagaactttccacccaacatcagaatacatattcttctcgagtgcatatgaaacatctccaaaataggtcataagttaaagcataaaacaagccttaataaatataagtagactgaaatcatgcaaagcatgccctctgaccacatgggatgaagttagaaaacaatgaaaagttgggaaactcacaaatatgtggaaatcagacacacttgtaagtgactggctgggtgcagtagctcacgcctgaaatctcagcactttggtaggccgaagtgggaggattcct

SEQ ID NO: 50047 - DNA, 1070 bp, Homo Sapiens
tgcagatcctgaagtgctgttatcggaaaccatcagacatttccgtctgtactctcagaaagcaccgaatgacccacagcaagctgatattttaggtgctctaaagcacctaagaaaagaactgcaaagtctgagaaataggaaaaatgtctgagacagcaaaatatgaaaaacctgctcatcgttcagcttccaaaattctgaagtctggaagtttttccttcaagaaaagaaactgcataaaaaatttaaaactaagtcatctcccagatataagtatcatggtccagcagtactgtttaatggggtattcagtgactaaggtctgctatttatgcaaaattctgtttatcccgtgttaccaaattaccatttcagtgagaagcttttgaaaagtcttctgacttccagtctttcaccagatgactgcactggattagattctagaagagaatgaaccattttcatataactaaatattggtcatgaactgtgtaagggccatgcttattgggatcagttttaaagttaaattcttttgatattaataccagaccaaagacattttctgtttcctggaaaaaaaaaatgaatcatgttaggctttaggtgagagtacattttttacaaagtagctatagttgttacatagtcttacacttcaagctaaacaccaaatgggtgatattttgaaaaaagtttgtgttttactgtcttagatcgttcttggaaatcactaaaaaaaaaaaaaagttaatttgatgtttgcttatttcagttgcagaaactggcgagtaaaaaagattttgcatttacttaattaawttttatatttatgttttatttctatttggactcagagwtctagacccaataattwagtaggctcctgctgccaaaatgcaaaggggaaaaaaaggcagggattgggggggatggggaagtggccaataaawttcatttctgttwcmaagmtcttttatacatwttactaaagaraacatagtaagaattgcaaatawtagttctttttttattatgrmagttatttawsrcaaccgktttaatga

SEQ ID NO: 50048 - DNA, 709 bp, Homo Sapiens
gggaaaggttatcaagacacagaacttggcagctctccttcatgcgatgccagacgtccaaaggggcagcaactagcatgggattttgtaagagaaaattggacccatcttctgaaaaaatttgacttgggctcatatgacataaggatgatcatctctggcacaacagctcacttttcttccaaggataagttgcaagaggtgaaactattttttgaatctcttgaggctcaaggatcacatctggatatttttcaaactgttctggaaacgataaccaaaaatataaaatggctggagaagaatcttccgactctgaggacttggctaatggttaatacttaaatggtcaatagaaaaagtaggctgggcgcggtggctcacgcctgtaatcccagcactttgggaggctgagaagggcggatcacgaggtcaggagatggagaccatcctggctaacacggtgagaccccgtctccgctaaaaatacaaaaaattagccgggcatggtggcaggtgcctgtagtcccagctactcggcaggctgcagcaggaaaatggcataaacccgggaggtggagcttgcagtgagccgagattgcaccactgcattccagcctgggtgactgagcgagactctgtctcaaaaaaaaaaacaaaaaaaaaaaatcgggggcctatagcgggggggggaaaaaagggtaaaagg

SEQ ID NO: 50049 - DNA, 742 bp, Homo Sapiens
agaactttttcatcctcccaaactgaaactctacccaataagcaataactccccactgccccttccacccagctcgtggtaactccaacttcctgtctctatgttttgggctactctagacaccgcctataaatagaattacgtgatatttgtctttttgtgcctggcttctttcacttagcataatgtcttccaggttcatccatgtcgtgccatgtgtaattcctttctatggcggaatagtattctaatatgtggatatcccatattttgttcatccattcatttgttgatagacacttgggttgttcctacctcttgactattgtgaataatcttgctaggtacatgggtggacaaatatctgtctgactccccgctttcaactctagaaagctttcttttaaaatcggtctatttaagtttctttaaaaagttaatttaagaaaaatactaaggtaaattgtagaacaggtgatatgtcaatatgaccccaaaaattgtaaagatggaagacgaatgcctgcagtttgggaaaccggatgagaggaaagacctggaagctattgtaaaatctatgctgagggtctggtgactactagaccaagggcatggcagcagagggcagctgaaagacttcaggaaggaaagatataagaattaagaaaggggcctggtgcagtggctcatgcctgtaattccatcaccttgggaggtcaaggcaggatgatggcttgagacc

SEQ ID NO: 50050 - DNA, 1105 bp, Homo Sapiens
ttttctgtaacaacaaaggtgtacaatgagagagtccacacagtgctgtactgcacacaccacagaatgtgtgagattttcctgtttgaatgtatgtctgcattatactcctgcaataatgctgaggacttgttgcaggagggcaaactaggtgaataaattacctgtgaatgaacaatgaagtcgttcctcttaagactgaaacaagcaggccagatgtggtggctcacgcctgtagtcctagcactttgggaggccgaggcggccagatcacaaggttaggagttcaagaccagcctggccagcatggtgaaaccccatctctaccaaaaatacaggaaattatctgggcatggtggtgtgtgcctgtaatcccagctacttgggaggctgaggcaggagaattgcttgaacctgggaggtggaggttgcagtgagctaagatcgcaccactgcactccagcctgggtgacagagcgagactccatttcaaaaaaaaagactgaaacaagcttgtgctaagatggaaagggctgcttctaacagatgtggtttgttgctttagttgttgaagcaaaaatactgagttgttatgtttatgttatcaccccaccactacctccatggttgttcatttaggatgcttctaattcagccactgtgaaccattataaaggttttattgccatgttgaaaatgtttataatatggcaaaaaagggcatcaaatagaagatttactattattcccaccatgtaaaaatatgtgcacatatggatgtatgttgaaagtggatgatggaaaaaaaaaatgcggtttcctttcgggactgcacaacccccctattcacaaacaccaatcacaatcaacgcatcacccactctcaccgtccctatcgttcgctacctgggcggccgctctaaaaatacccctccgaggggccccaggtttacccgcaccccccatttttttggcaactcgggtcccccacataaggaaccttataatataattcagccactgagcgtctcttattaaaacccctctacattgggaaaacttcccaccttctcgcaactatttgcttatacacaccctctctctc

SEQ ID NO: 50051 - DNA, 690 bp, Homo Sapiens
cctttgtactggatgacatggtgcctgaattctttcttttcgccgacacgatggcagccaaactgcagcttcaaacgctcacacttggctgggtttctacctaggttgccaggttatcatcggagccttcttgtgtcctcaaagggccacgaggcctgaaaggaggatcagaatgctttgggattaattgggcagccatcgcagaattgtttgtgggcaaagggctgctttagcacttttcttttagcaaattaatgactctcaggcacagggggttttaagtgaaggtattaataagaggtctggcaggtattcccatgattcacagagttacatttgcatttaattaatcttaaagttgcaagataaacagctgtaattcggacaaacatgacaaacacagtgaagccaactatcccataaaatgaacactgacatacttgttttaatttttttcccagcgtaaaaatagaaaaatcaaaatactcctaacaaaaccagtgattttgatagaaatatttctccaatatacttgcatccacctacaaatataaccttttcaagataaatcgcttatgatttcaatagtcaaactgctgtgtttgttgatgtaaagatgttttgaatggctagatggtaaaataaattcttaataaagtacccactgcaatttttaaaaaaaaaaaaaaa

SEQ ID NO: 50052 - DNA, 541 bp, Homo Sapiens
acttccaggacctgcagtcaatctatcggaaatccagaatattaaaagtgaactaaaatatgtccccaaagctgaacagtagtaggaagaaaaaaggattgatgtgaagaaataaagaggcagaagatggattcaatagctcactaaaattttatatatttgtatgatgattgtgaacctcctgaatgcctgagactctagcagaaatggcctgtttgtacatttatatctcttccttctagttggctgtatttcttactttatcttcatttttggcacctcacagaacaaattagcccataaattcaacacctggagggtgtggttttgaggagggatatgattttatggagaatgatatggcaatgtgcctaacgattttgatgaaaagtttcccaagctacttcctacagtattttggtcaatatttggaatgcgttttagttcttcaccttttaaattatgtcactaaactttgtatgagttcaaataaatatttgactaaatgtaaaatgtgaaaaaaaaaaaaaaaaaaaaggac

SEQ ID NO: 50053 - DNA, 809 bp, Homo Sapiens
  misc_feature (9)..(9): n is a, c, g, or t
  misc_feature (29)..(29): n is a, c, g, or t
  misc_feature (805)..(806): n is a, c, g, or t
ttcgacggnaaccctcgtggggcactggngggagcattggacgccttctgccggtgggccagcagccgctcattgccgtggcactgctgggcaacatcagcagcattgccttcttcaacttcgcaggcatcagcgtcaccaaggaactgagcgccaccacccgcatggtgttggacagcttgcgcaccgttgtcatctgggcactgagcctggcactgggctgggaggccttccatgcactgcagatccttggcttcctcatactccttataggcactgccctctacaatgggctacaccgtccgctgctgggccgcctgtccaggggccggcccctggcagaggagagcgagcaggagagactgctgggtggcacccgcactcccatcaatgatgccagctgaggttccctggaggcttctactgccacccgggtgctccttctccctgagactgaggccacacaggctggtgggccccgaatgccctatccccaaggcctcaccctgtcccctccctgcagaacccccagggcagctgctgccacagaagataacaacacccaagtcctctttttctcactaccacctgcagggtggtgttacccagcccccacaagcctgagtgcagtggcagacctcagctctctggacccctcctacagcactagagctaaatcatgaagttgaattgtaggaatttaccaccgtagtgtatctgaatcataaactagattatcatagttatctagtttatgagtcataagctagatttgattcttcaaagaagaaaagtcagtgagcannttt

SEQ ID NO: 50054 - DNA, 898 bp, Homo Sapiens
  misc_feature (619)..(619): n is a, c, g, or t
  misc_feature (648)..(648): n is a, c, g, or t
  misc_feature (671)..(675): n is a, c, g, or t
  misc_feature (680)..(680): n is a, c, g, or t
  misc_feature (687)..(687): n is a, c, g, or t
  misc_feature (692)..(692): n is a, c, g, or t
  misc_feature (728)..(728): n is a, c, g, or t
  misc_feature (732)..(737): n is a, c, g, or t
tttaaaagatttgccctcattaacaagaataacatttaaaggagattgtttcaaaatatttttgcaaattgagataaggacagaaagattgagaaacattgtatattttgcaaaaacaagatgtttgtagctgtttcagagagagtacggtatatttatggtaattttatccactagcaaatcttgatttagtttgatagtgtgtggaattttattttgaaggataagaccatgggaaaattgtggtaaagactgtttgtacccttcatgaaataattctgaagttgccatcagttttactaatcttctgtgaaatgcatagatatgcgcatgttcaactttttattgtggtcttataattaaatgtaaaattgaaaattcatttgctgtttcaaagtgtgatatctttcacaatagcctttttatagtcagtaattcagaataatcaagttcatatggataaatgcatttttatttcctatttctttagggagtgctacaaatgtttgtcacttaaatttcaagtttctgttttaatagttaactgactatagattgttttctatgccatgtatgtgccacttctgagagtagtaaatgactctttgctacattttanaagcaattgtattagtaagaactttgtanataaatacctaaaacccaaaaannnnnggggnagggggnggggnggggggagaggggagagagaaaaagaaagaaaaaanaaannnnnnggggaggggggcccgttctaaaatttcccccgcggagggcccccaaatttacccggccacccttttttttttggaaaaaagggggcccccctatagggggggtcttttttaataagcctaggggccctggcccctctcttttttaaacagcggggggggag

SEQ ID NO: 50055 - DNA, 647 bp, Homo Sapiens
gcgcgcggggggaggcggcggagggcggaggagactcgcttgcaccccagggccgcgggcacgcagagctgtgttgaaggacatacttttcaggttcctgacagtcactgagctatacgcaataataaagtgcgtgattcgcgtgtggaaaccagtgtcgtgtccttaccagcttccttttctgtccaccttccctctctcttctacctccgtttcgcttttcttcagtgcatgttagcggtttgctggatttcccttctccctcgctgttcaactgctagcatgatttgttacattttccacagctgtttattcttgtttgactttttgtacaaagtcactttaaatctgctgcagaaagaataaagcacctagccctttggatggactcctgcaggcgtgtggctgtccctggcccacttttaattctttggagatggctcttctgtgtaaatcagctgctgggtgcgttcggtcacctcgtaggccagcctagtttgtatcagcagaacagtagtggactcgactcaggtcgtaagccttatatttcacagacaattaaatcttggctgctgttgaacaaaactgtaatatttactttgttctataccgagaagcacttttaaagtaaaaaaaaaaaaaaaaaa

SEQ ID NO: 50056 - DNA, 671 bp, Homo Sapiens
ttttttttttttttagtagaggcgaatttccccatgttggccaggctggtcttgaactcccgacctcaagtgatctgtctacctcggcctcctaaagtgctgagattacaggtgtgagccaccgtgcccggcccattctaagggttttctttgaagacaggtcaaatgctgttagtaagtttcaggagattgttaattcctcagttataccagattttataaaatatttgagaatagatggctaacaagaggttagaaatacttttccttaattttaatccacagtatgttacatgcattctaccactacattttggtgctatttaaggtgtgcaattttctataggtgacttttgcaattcagggaagatttgggcatattaaatgaaagaatatctaattgggggaggtgtgaagggaaagaaattcttttcaaaagctgaccacaaagagtagttaaaagtttttgtcactatcttcacaagtgtgtaaagcacagatttcaacagagtgcttggcatattgtagggtgctcaatggtggtttttattattattactcagattccacagtggcaagaaacatcattctacataatggaaaacatttacatcaaatcgcacttactttaatgcgaacttggagatatttatggtattgtattgtaacca

SEQ ID NO: 50057 - DNA, 557 bp, Homo Sapiens
cccttaaacagaaagtgtgaagaggctgccctcgctgctcataaggacctgggggaagaggaaagtgtcccaaggtctttcctttctgactccaaaaatagtttcctttcttggatctgcaaagaaagcttttcttccgtcgctgcctcagcctcctccctatgcctctggcacctgcgcagcaaggctggctgtgctggagtcaccatcatcttcctctcccccagcctcccaggctggatggcatggactgtttgctgacctctgttctcttagggcatgggaggtgggaggatatcaaattctctagccctttcctcctattctctagcccttctattctcccaaggagagagattcccatttctcctcggccattgtacctagctcttgtccctagctgcatttcagtggaccatggatagagggactgagggttagacggagaagactggcagggaggcacgcaggtactgtgaaaatccttccctttgccctcccccagtgggagagggggtcgggttttcaatgtgagaacagcacaataaacttgatgg

SEQ ID NO: 50058 - DNA, 528 bp, Homo Sapiens
gcacgaggaaaaaccaaactcgtggaacatcagagaagccatactggagagaagccctatgaatgcaatgactgtggcaaagttttcagccaaagcacacacctcatccagcaccagagaatccacacaggagagaagccctacaagtgcagcgagtgtgggaaggccttccacaacagttccagactcatccaccaccagaggctgcaccacggagagaaaccctacagatgcagcgattgcaagaaagccttcagccagagcacgtacttgattcagcaccggaggatccacaccggggagaagccctacaagtgcagcgagtgtgggaaggccttccggcacagttccaacatgtgtcagcatcagcggattcacctccgggaggacttctccatgtaacagtggcgcggtgtccgagggcagagtccagctgagcacttcctgcatgcgcccccggcacctgactctgccctttatgtattatccacacgatgttttcacagagtgaaaggacgtttctcatta

SEQ ID NO: 50059 - DNA, 596 bp, Homo Sapiens
cctaataatatttctgaatatggaagtaatgataccattccaactataaccagacattttattcccagtgggaaaatgtgtacatgagtttcaaatcggtgggggcagaaacacagctcccaccatgctcacacactgcctcacacagcaaatcgggacctgggcctggtagacaggatgagaagatttttgagcctgagatcctccttttctacactttcaacatgtcctgaattgatagaaaaatgggactattttggctctgtatccactcgtttcgtcatttattttttctttttctttcttccccctcttccttcctttcttccttcctttcttccttcattctttcttcctttcaatcttctttttcaacaatattctccataccaacttaaagagatttatgtgcaagtagggaagggaattagggatgctttgttttagagatgcttgcaagccattactaagttaagagttcagattcatggcctgcctcttaattttcctaaataacccctagatcagagtgcctgatttcaagtctggtaatgaacataaggattatccaaaattcatgcaaaaaaaaaaaaaaa

SEQ ID NO: 50060 - DNA, 597 bp, Homo Sapiens
gcacgaggggcgaagtcgctgcttcaggtctggcttgagccactccacagccacctgctctccacagaggtgtgactgccctgtaggaaaaatgcaaagacaagggcaggtctaaaccctgggcccaagcctccaggtggtgagccctttggagctacacagtcctgttatttgtagccttcccatttcctggtagtgtgaccatgggtaagaaaagacaatgaagccttcagcctccattatttgcaaagggagtataacacactgctaccttacaagtttccttggagaagtactggttaattgcaggctttgtctgcctcataaccatcataatggctaatctttactgggaaaacttgctgtaagtcagtcagtgtgctaagtaccgtacacccattatgttacttaattctcataacagtctgaggaaacagattctatagtagtaaaaagctcagttggattcccttgagcaaatcaatttctctaacagtttcctcatagcttgagggtcctgtgcctattttgcggtgtgggggtgggggaagggtgagattaagtcaggaggtaatgctcgggaagtgtcacaaattt

SEQ ID NO: 50061 - DNA, 657 bp, Homo Sapiens
tttcaacctcattccactgtgaactttctggtgttgaatgaggttgaaacgctggctaaaggatttcacacaatcactgcatttctccagtgtgaatccttcgatgtttaaaaagttcacagtggaaaaaatcttgaaggtaacagatggaaatccgttagccacacctccagtctcattcaacactggacagtttacaatgtggacaatgtagtgaatatggaaaaaggtttcagccaaaggcctaaccctattcaacaccagaaagtttacactggagaaaggccttagggtgacaggttatgtactgtctctgaatcaatatgacctcacttaaaacagaaactctgaggatggcctttatgagggagctggcaattgaacatcattcatctaaatatgcacactggaggcaagatgagaattcctgacagattgtccttcctgagaagacagccctctgccttggagctccagagagagggagccctgtattcttggctgtacccgtcgaatggagttttgatctcgctgagtttggagttgggggaggaaaggagtggtcttggttcaaatgtgactcacttttgctgttcttgtgaatgttagatcttctttaataaatatttatttcccataaaaaaaaaaaaaaaaaaa

SEQ ID NO: 50062 - DNA, 895 bp, Homo Sapiens
tccggataccagatcaaaatctagttgctatggacgagctggtagaagttggagatgttgaggatacagggaatctggaaggaactgttcatcggattctgttgggagatgtgcagactattccaatacagattatagacaaccactcagctcttattgaagaaaatccagaaagtaccatttctgtgagccaagttaaacaagaacccaaagaaccagcattgtctatggaagcaaaaaaaactgtggactataagaaattatctgctacataaattattgaagcttttcagaatttacaactctggtgacttctgatgtcttagaaaggaaggtgaatatagtcaaagcgtggcattgagataattggactgaagaccagtttgatgagaagcttttatttaaaactgatatatttgttgccagttccatatttttaccttccttaagagatgttttactcttcttattttgtataatttttatgctctttgattatctaataaggccagtatttcaaaagctgttctgaatttatccacagtaatatagtctgaacacaaatagtttacttaacttatccttggaaatattcaattttggttattacaaaacagaaaagaacaacagcaacaaaaacattgtgtgaatgtatgtttgtatgtgtgtatgtatatcatgaatgtttttttttaagttctgaaaaagaacttgttctctccttaaagttgtgaagaaattgttaattgccagacagggtaagaaaatgtttataatctatctcattaagaaaagatgaaggtattagatttttacatccataaacaccaaagtccaggcaggctaccatcctgtggggaaacctgttgccaggttggcattttttaggcccttc

SEQ ID NO: 50063 - DNA, 451 bp, Homo Sapiens
tgagaagaaaagaagcttgctcaaggtcacatagagctggaatttaaattcagatctattatactcttaaggactgtggaaggagcaaaatctgatccagagactgtggatgctggaggagcgtcaaggctgggaaagtaacatgcactgtgttcgcaatcaacagaaaagatatttttaaacaaaaacaattttccaagtttccaggaagagaaacaaaaggcttttctaaaatgaaagaaactgttcttctcattctgtgacttttatgtcacttggacaacaaaccagtgcttaggaacggttattttcctgtcgacatcgctgcatggatacttcttagaagaacataacagcattagcactcagtcccaggttctgctcaccctccaatggcagtcgtcttcaaaaacaataaagatatctgtgcttggtcaaaaaaaaaaaaaaa

SEQ ID NO: 50064 - DNA, 588 bp, Homo Sapiens
cttagaatatggtagacatcactgaagatttgtttcagtagttcatattttgtaatgatactgaatggttaaacaatccctttctaatctgtctagcatatatgtgacttttgtttatcaagtgtcacacaactgcttcaaggcagctgtgagatactagaaagcaaaaattcttactcctatgtctgtgtcatcccagatgtgtgcctccagatggcagtatactacactatctgtaaaatatatttgcaaagccaggcacagtgttacgcgtctgcctcaggaggctgaggcagaagaatagcttgagcccaggagctttagtctagcctgagcaatataatgagactccgtctcttaaaatatttgcccaaacattgaacctaaatttgaccatgcccctagaaataattcctaatctttagaaaatagggcagagaaacattattttacaccatggagatgagatcagcagaatccagactataagaaactacaggacacatgacctagtttcttctgtaaataacttgcaaggatgaaagatggaggatgaacctatagatttaaagagacttaagagacata

SEQ ID NO: 50065 - DNA, 645 bp, Homo Sapiens
gggggtgaaggtgaatgttcacatccgcactttcaagggacttcggggcgtctgtacaggcttccttgttgcattcgacaagttctggaatatggcacttactgatgtggatgagacctaccgaaaacctgtcctaggcaaagcatatgaacgggattcttcactgactctcactaggctatttgatcggctgaaacttcaagattcctccaagaaggaagcagattctaagtctgcagttgaagattccactctgtctagatactcacagacatccacttggaagttggcttcagtgtggggaagagcagacactggccggggctcacacaagcgttcccgctctgtcccttcttccctgcaggcctctgcaagggaggagtccaggtcagagctgtcagggaggactacacggacagacggctccagtgtgggaggtaccttttccaggctaccaccctttccagaggccagtcccgtaagaaaaagcgaaagcccaaagtggattaccagcaggtattcactcgacacataaatcagatttcattcgaggcgagaatgtcctggctggttcatctttgcacagtgaccagctcagctgaagctttggttctcagaaataaacgcggtagacttgctcgctaa

SEQ ID NO: 50066 - DNA, 941 bp, Homo Sapiens
tcaatgacacagtttaaagacctctatattcacaattatatccagagcataattttccatggccatagtttgagccacagagaaagccaatgaaatagattcctacttttatttaatgccaagagttttcactagccccaaactttttattggcagcagatatcctaggaggggtgtttgggaaatatctagctattttaatagatagatacctttttgcttgatgataagtttttgcttgctcatattttttgtcttgatcctgagaatgcaagtaaggaattaataggaggttcttagtgaccagatgttgtaatgggctatacagtccagcaggcagtatgcacctagaaatttctcccttttttaggctgggcatggtggctcacacctgtaatcccagcactttgagaggccgaggtgagacgggaagatggcttgaactcaggagttcgagactagcctgggcaacgtgatgagactccgtctctaccaaaaaatatataaaaattagccgggcgttgtggcttgtacctgtggtcccatctgcttgggaggctgaggttgcaggatcacttgagcccaggaggtcaaggctgcagtgagccaagattgtgccactgcacaccggcctgggtgacagcatgagaacctgtctcaaaaaaaaaaaaaaaaaaaaasmmmmmmmmmyycyycskkgggggggggkkttttttttttttaaawtatytttttkkytttargaagagggaattttattaaattaaaaarmtttgtaaaaawtawttgtayttggggaaacctaagtdagrgcataykgmaagctaytgyttggatgtwgrggggtaawtktaggtattctgaaahttttwtaraaatgamycawarggkaattkgaarwacccytgaccmaaaaaaaagsttytcaaaattytmatttt

SEQ ID NO: 50067 - DNA, 879 bp, Homo Sapiens
cctgaccttttcatattcagagtggctgagcttgcacacatctccccacagacaggtgcccaccacaagggaatgaatgtggagttgtcaggcaaggttctcctttagctcagaagggagctaggttttgcctgacgggtggctccaaggatcctaagatgggggcagtgaggcactaggtatttgtggcaggtatttcacacgatgtttcgttctacactttttcatgtcatattttccatggaagtccacactcgaagcaagggcagaaggggagacctctgagatacaactggtagtttagcataatgatgagttgtgtatgtttttaatctgtagggaagaaataccaaaatctcataaagctggctactgggatgggactgggaacttggagggaacaggatgaaagtgacagagacttgggcacgagggacactgtaaacagtaggagcactggctacttggaggattattcagttacaaaaggggccctgtggttggcatcggagggccaagcccactcttgcctttactttgtgatgtattacattaggcagcaaaaaaaaaaaaaaaaaaaaaaaattccctgtactgcaaaatggaagcgagacatggcacctcgttccctggaggctgcgcggcactgtctgggtgtgggggacacactacttcctctgagctgcatcattgataaggcattatttggtttgattttgcagttagtgtgatgagaatatgaaattatgccaataagaagccgttggtggatattttataacttttgggggctaccctgcaaaactaagggactcctctaccaaacgggttccagaatcctaggaaaggggccagccctgccaaagcatatttccccag

SEQ ID NO: 50068 - DNA, 679 bp, Homo Sapiens
ttcaaagacaggactcgtgctgcagtgaaatctgttttgttttttgttttttgtttttttaaaaaaggccaagcttgttggctcatgcctatagtcccagcactttgggaggccaaggtgcaaggcgggcagatcatttgaggtcagaaattcgagaccagcgtggtcaacatggtgtaaccccatctctactaaaaattaccaaaaaatgaaccaggcatggtagtgcatgcctctaatcccagctactcaggaggctaaggcaggagaatcacttgaacctggagacagaggttgcagtgagctgagatcacgccactgcattccagcctgtgcgacagaatgagacactgtctcaagaaaaaataaaagtgggaaaatcttccaactgtcctctagagtgtgaatatatgaaaggagtcagagtggggtgaaagtctataaatgtaagacatttgggaaagccttcacacagccttttgagcacacatgagaatgtatactggagagaaaccctataaatattaagaatgtgggaaattcttcatcctagttcttttgttgttgtctgatgatacaaaaatattttcatttatatcacagattgtcaaggttatatttaatcacgacacgaacagtatcctgtaaaccagccccagtcattcaacacttttaccac

SEQ ID NO: 50069 - DNA, 646 bp, Homo Sapiens
  misc_feature (594)..(594): n is a, c, g, or t
  misc_feature (616)..(616): n is a, c, g, or t
  misc_feature (634)..(634): n is a, c, g, or t
ggcagtacacacagctagctcctcatcctacctggtttctgcatatgagaatgcagagggctgagagagggcaaaattgttgtcatttagaaaaggcatttaggaaagaggctgctattagaggggaacacaaagtgaaggtttttttaaaaaagaggacttgcatcagctgcctccagaacaattttaagaaaataacaaagatgtttagaagaaatcttacggagtttgccatgggatgtgtgatatcagcagtcttcagctccttacaaattaccaaaagtggttctaatatgctagtttgtttgattttttcttttatattataaagcaattgcatcgataaaagcttggactccattttagtgtgacactcttcctcatgataccagtgaaatgtattgattgtgtccccagttgttacataatttgaaataaaaatataacttcttgatttattgttttttaagatgtgatatggtactgtggttatgttgttttaaaaaatgattatcttttagagaagtatactgaaaaatgtacaggtgaaatgatatgttactggtattcgcttcaaaatcatctgagtgtggngtaattgagtacatagatgaanacagattggccataattnggtattgctgag

SEQ ID NO: 50070 - DNA, 599 bp, Homo Sapiens
gcggccgctccaacatcagaatggtaactgctcagtccacgcctgagcgctccagagtgttggcgtgggactgagcagctacctttcaactgagaaagatgccagccccaaaaccagcacttctctgggaaagggctccttcttggacaagatctcgcccagtgtcttacgtaattctcggccccgcccggcctccctgggcacggggaaagattttgcaggtatccaggtaggcaagctggctgacctggagcaggagcagagctccaagcgcctgtcctaccaaggacagagccgtgacaagcttcctcgccccccctgtgtcagtgtcaagatctccccaaagggtgtccccaatgaacacagaagggaggccctgaagaagctgggactgttgaaggagtagactctgcgaccagtacagaccctgtcctggctgaacaagaagagacacatgctccacttgggagcctttgccaccacgcaactcagggctcaagatgaatgggagggagagatttgagtccaagcatacatttatattcagtgttgtgccattgagttcccatgtggatcattctgaaggtgatcctcgtgcc

SEQ ID NO: 50071 - DNA, 726 bp, Homo Sapiens
caattacattttcaacgactctgtaaaggcggtttatgaagaatttcggagaggattttatgaaatgtgcgacgaagacattatcaaattattccaccccgaagaactgaaggatgtgattgtggaaatacagattatgattggaaaacatttgaaaagaatgcacgttatgaaccaggatataacagttcacatcccaccatagtgatgttttggaaggctttccacaaattgactctggaagaaaagaaaaaattccttgtatttcttacaggaactgacagactacaaatgaaagatttaaataatatgaaaataacattttgctgtcctgaaagttggaatgaaagagaccctataagagcactgacatgtttcagtgtcctcttcctccctaaatattctacaatggaaacagttgaagaagcgcttcaagaagccatcaacaacaacagaggatttggctgaccagcttgcttgtccaacagccttatttagtgatgttatcgttgttgttgttgtagtgatgtagtttctctacttagtttagttttaggcttttagcagcctgaagccatggtttttcatttctgtctctagtgataagcaggaaagagggatgaagaagagggtttactggccggttagaacccgtgactgtattctctcccttggatacccctatgcctacatcatattccttacctcttttgggacatatttttc

SEQ ID NO: 50072 - DNA, 599 bp, Homo Sapiens
taggtacatatagaatatcaagctatgcatcaacgcgttgggagctctccatattgtcgacctgcaggcggcgtgaattcactagtgattagagactgcgagaaggaggggaggggagcagtgttgatgccaaaatacccacggggtctaccagccatggggtttgcttgcttaggagtagttgtttcagaggtgattacatggcctgggtttgactgtgcttaccaatgagtggttattgagctatgagaaagtggatgggagtgggaggaggagagatgggtgaagacaaaagagtactttatgagcctcgatgttccctggtaaacttttacaaaggccttctctcatgatctaagtcttggactggtggcatcatgtaactgctaaccttacagtaaaaacccaagaatgggtcaaaaaatgtctacccggtttctccaagctgcttctggaatgcaggtctagtcggctgggtgctctccagcagctgttccttgcctgattcaactgtagcctgtaatgggtaaaagccacatttaggaggtggcctgatcatagaacagctcaggaagaatgtccatgagactttcttgata

SEQ ID NO: 50073 - DNA, 527 bp, Homo Sapiens
tcaagggtgaggccgattgttctgcccatgccctaccataccaatttcaataacaatcttgcctgtcattgcactcagaatcttaagatcatgtttcaaatatgttgattcaaacttgcttctaagcctgagtccagggatagcaatggtactgaccagctatggactgggagaacattgagtcctgttttccattggcttcagggcgcatccatgtggatataggaaaagcctctttccacagacttaggaagccccccgaccacgcggacgctcgctgggctgcactcagcaggctgcttgagtgggagctgactccaacatgccctgccctggctgggactaggcatgcttccagcccttcccgtgctctccctgctgtcaacacttgcgtacaaacctgcctagctgttgtaagttttcatcagtagcttaagtactagtagcaaaaacttaaattcattcagaaagttgccacttctgaatgagtagagcaggaaaagtaaactttactgaaacataatttg

SEQ ID NO: 50074 - DNA, 612 bp, Homo Sapiens
ccgctctagaactagtggatcccccggggctgcaggtcagcttctaagtgggctattcatttgtgctctcctcttttttgttttgttttgcactttgtcaatcatttggggaaatagcctggaggtctttcctgaatctgtttgtagacataataaaatttgtgtgctgtgtacacaaaaacataatgtatcttatgaaagcattacccaacctgtttgagttgagaatgcatttgtccacctttgatttgaggctttagtttgctgatttcctaaatgctaccctttgatcatttcctggccaccatcacaatactaaggggctcagatgtgtcttgtgcccacctcttcctgagaagagatggaagtggagctgtgactagtacaagcagcccaagaaactctgaacgggacccaatggaggcaaacttgagcaaataattgggatgataagaaacaaaaataatcccaactgtttgaaagttcgaaagaggggcattcttttctggtacatggtgagagttcaggctccagagactcaaaacggaatggttttccttggcattttgtaaatgctctcacatctgtagcaataaagctgttattttctgc

SEQ ID NO: 50075 - DNA, 467 bp, Homo Sapiens
tttttttttttttttttcaaattttttaataaagcaaatggctgggaaaaaaggtgagaaactgctcgcttggatttaagaactgctgctacttgctgtgtgacctggactagttttttgtttgttagttttatttttatttttgtttttttgctgggctttaccttggttttaattttctgaacttcattctgctcatctgaaaaatgaaatactaatgtcttcatcttagtgtaatagggatgattaggtaaggtcaaatatatggaagcatcttgtaaactgtaaaggtatgtaaaaatgtgagggtttgttttttgtgtgtgtatgtgctcttaatgcccaagatgcagagtagaaattaggcaactgggatgccacacagccaggatgcaacatattggagagaagagccagatatcctaggaggaagtcacaccatcattgccatccatgttgtgatagtc

SEQ ID NO: 50076 - DNA, 484 bp, Homo Sapiens
tttttcttttgttctctctagatcctgttcaagtgtacactgagccagcaggttcaccagaaagctattgagcgtttgctggaacacattatgcagggtgaatttcttctggaatgttgccaaggattttttatgcttctgtggcaggcatttcttgaacattgtcatttagccaagcaaagaagattttcttaaaggatagaaaatgtttaaaaatttttgtttgtttgaagataggttaaatggctatatgatctcaggataagacagagaaaatcacttatttctctaagtgatctgattaggttagtgatgttttgcctttaaacagattcatcattattcctaaagtattgctgtattaatactgtcttctagaaagtatccaccagtgcctacttttcttcgatatcattagctgtttttcgaaactgaatttgctcttcagagatttctcatatgtttgcgtataaggaactactgg

SEQ ID NO: 50077 - DNA, 297 bp, Homo Sapiens
catcatcatcatgatcgctcgacatcgatacgactttttttttttttttttttttagctcatcagttatcgttagtgttagtgtattttatgtgtggcccaagataattcttaattcttccaatgtggcccagggaagccaaaagattggacacccctgtacatgctcatatactttatctttaatctttatagcccttatctgtaagtgttcttgcatttgctttaaaagatctttataaaaacttgtccccaaattgtgagcacttgcaaatcccttctgtcgtcttctcgcagc

SEQ ID NO: 50078 - DNA, 629 bp, Homo Sapiens
tggacgactgcaacaagtggcatagcagattcctggcagctgcccagaaccctgctgatgagcccactccaggggcccccgccccccagtagcttggggctactgacaagccagggtagtgagtagagtcctcaggcacagtgggcacgcaggagcaggggagggctcccacagcaccctgcctccctctctccaaagatctttgtgaggtgagccttgccagcagtggggagtctgcacaaggagaggcggggaagcattctccctgtgacaaccccactgagcagcagatcatgcaactgcttcatgagatgcagaacctccaggagcacccaggcttgggcagcagcccttgcattccttttttgtaccagactgatgagaacaatgaggtgaagatcaccatcatctaaaagccggccactgtcagcaaaacctggggaagtggggctggaggctctgcccctaccatgtccctaccaccccttcccagtcaaccctttaccctcacagtagcaagcataagacccctgtctaatgtggggagacaggtggagatgaggtgaagatcaccataatctaaaaggccactaaataaaaaaataaaaaattttaaaaaaaaaaaaaaa

SEQ ID NO: 50079 - DNA, 236 bp, Homo Sapiens
gcggccgcctactactactatacggctgcgagaagacgacagaagggggaaattaatattttttttgaaaaggagcaaaaagaaagaaaggtcagggatagcaagcagagagagggagcgagccggctgccacacacgccaggtaaacaaaagccaacaaaatttttttttcaatttcttcccctgtgcatcctcttccagtttaaaaaaaaaaaaaagaaaaaaagtcgtatcga

SEQ ID NO: 50080 - DNA, 260 bp, Homo Sapiens
  misc_feature (234)..(234): n is a, c, g, or t
cggctgcgagaagacgacagaagggatttgcaagtgctcacaatttggggacaagtttttataaagatcttttaaagcaaatgcaagaacacttacagataagggctgtaaagattaaagataaagtatatgagcatgtacaggggtgtccaatcttttggcttccctgggccacattggaagaattaagaattatcttgggccacacataaaatacactaacactaacgatanctgatgagctcaaaaaaaaaaaaaaa

SEQ ID NO: 50081 - DNA, 452 bp, Homo Sapiens
cctaaaacctgacaccatttaatggtgcccttggtcaaatctaaatgatcttactttcataattctttgattctagcttgcagagtcaagacgaactctaactcatgggatggacaaactggaagatgtaaaataagtaaggctttctgggccaaaaagcctcttcttacagaaaatcaaattttaaaagaacattgacctcaaaacaataaaactgtcctggttatgcaatagaaatagctatataaatggaatcatatccttaatgaacacctcctgtggctacccaacttttcacacatcttactgattataggccttgctgtgaatgctttcttgctctatctgaagtattcccaccagagttgtttccaactttatttcctatattatgaaaaatgaagtttttttaacattgtaacaaagtatatgaaagataatgtatactgtat

SEQ ID NO: 50082 - DNA, 296 bp, Homo Sapiens
ctactactactaaattcgcggccgcgtcgactttttttttttctatttctttccttttctatctgctcatgctgtttctcatcgtctttctgtgtatcttcatcactgtagttaatcatctactttttaaaagatttgtcattactatcaactagaatacctacaagcactgactgctatcagacatctatctgcctgatgtttgtcatatgctgaaacacaaatctatgcttctaataattttattagatggaaaagttaatggtcttaagtaacgagaatgtcgacgcggccgc

SEQ ID NO: 50083 - DNA, 806 bp, Homo Sapiens
  misc_feature (532)..(532): n is a, c, g, or t
gggaaggtgcctgatgttgaagaagtaaatttatatcggattttcaaccgggtttttaatcgcttactctggagtcgtggccaagggctgtggaactgtttctgtgattcaggatcctcttgggagagtatattcaataaaagcccggaggtggtgactcctttgcagctccagtgttgccagcgcctagtggagctttgtaaacagtgcctgctagtggtttacaaatatgcaactgacaaaagaggatcactttcaggcattggtcctgactggggtaattccaggtatttactaccagggagcacccaattcttcttgagaacaccaacctacaacttgaagtacaattcacctggaatgactcgctccaatgttttgtttacatccagatatggccatctgtgaaacagaagggaagatcgccattggttatacataacagcaattcatttttttcctctgaagttgaacatgcaaagaacatgaccattaagtgctgttttatgtatataagacatatatatgtgtngaaatatatgcacatatgcaccctaataacatatatttattatattaaatgatatatgaaagaagaattagcagaaaatggaatataagacttaaccttttctggaaacggaataaaccatgttaaaaattgtttacacaaattatgtgaaatgtctaaaaatctgcctagggttaataattaaattcccttcctaactagaaaagggtaatttttgcctgccggagtatattaaaacccaatttggttcttggaagaattccaatttaccgga

SEQ ID NO: 50084 - DNA, 647 bp, Homo Sapiens
cttaacatgaaagcctataggtcattcttgctctgggatctacaggcagggtaggcacaggtgcagcctaagaagggaacctgcttcctctcccttccaaagacagtgacagctgactgagggcaaagagcaggcaccactcagaacgtggtgagtacagctcagctcagcactcagtcagtggtaacttgtgcccagccctgtgctaggcgctgacattaacaggagcaaccagggcccaattcctggccttggagctcaaatctttcctttgatttttgctcctgatcatcaaggccccagtggcaaccatgtggtaagtggccaaccaagccctacccagggtcacccaacacactctgccttgagcctctcctcagggtctattccttgcgtggattatgtggccgtagcatgttacagttcaaacatgtctccactaccctgttaagagcagcctgggaacgtacaggccatcaagactatttatttaaatacaaaaaaaggggaaaacacacacacggaaaaaaaattgtaagcactttttttgtaaaaccaatgtctgttttgttacatacctttcatgtcgtgctttgtaaatgtcttatttgtgtaataaagttaatgcaagtaaaaaaaaaaaaaaa

SEQ ID NO: 50085 - DNA, 811 bp, Homo Sapiens
  misc_feature (690)..(690): n is a, c, g, or t
  misc_feature (811)..(811): n is a, c, g, or t
tctagcgaggtgacagcgtagaaccaggggttcctcctctcctactcggctctgcagtcctactcaagcgggtggctctgggatcctgggggcctgggttgggggctagggagacgccatgtgatggacactccagggacacacagcctagcacagcagcttataatgggctctccggggccatttgcaataacagctgcaattccctggatagacgagttgatttcctccctctgcccctcccccagccatgccagctggcctttgtaagtgcaggaaaccgagtagaaaatgtgaccctccaaatggagaagctgcaggctttgccattgtgaaccatggtgaagtgcttggaacatactgttcactcactctaaaggcgctgagactgtgctgttgttctcgtttttatagtcaatggcttgttcatcatccagatgtggctactgacatatctacacttcgcaccggagtgtctggaattgtggctatcctgattataggattttaacttaactgaaatgcctcgccttttaaaaaaagtgtgggggtttttgtttgggttttctttttttaaattgcccaccatgcgaaaaaaatggatcgaaaagaacttcatctaatctccaacccccatgaaaactccaaaaaccccttgaaattcccataatactcgccgctgggtccttncccggggcctggtattcgagggcgctaaaggggccgtgcttctcttgctatggggggggacccccggattaaatagatcttattgtcttaacggtttaaagcggaagagttttctaacctn

SEQ ID NO: 50086 - DNA, 728 bp, Homo Sapiens
gttggttgtgtgtctcctcctggcaactggatttgcctgttcagaggtttgattgcttggattgcccatctgagctctgccgattatatacgcaatttcaagagccctatctaaaggatcctgctgcttatcctaaaattcagatgctggcatatatgttctattctgttccttactttgtgactgcactgtatggcttagtggttcctggatgttcctggatgcctgacatcacattgatacatgctggaggtctggctcaggctcagttttctcacattggtgcatctcttcatgctagaactgcttatgtctacagagtccctgaagaagcaaaaatcctttttttagcattaaacatagcatatggagttcttcctcagctcttggcctatcgttgtatctacaaaccagagttcttcataaaaacaaaggcagaagacaaagtggaataaaaatattacttcatgttcctcctttctaaattactaacttttgttatactggtactgatattttgtcccatttcactctcttctcatacgtgagtacttaagaatatgtacattcttgctctgcactgtatgtgtgagctatatggtattgtgtaaattttttttggaaggacaatggaaattcttgagaaacagtttgtttaaacgaaatatatttcaaactcatttgtgaataaattgatcatccatctcaatatgtttgacatattgata

SEQ ID NO: 50087 - DNA, 675 bp, Homo Sapiens
  misc_feature (551)..(551): n is a, c, g, or t
gggttgccctcaagcctgacctggaaccgttcctcaccttcatcctcaccatgccctgctatctccagctgctgagcagctgaggtgctgcagccccttcccttccagcccacaagtgtgtgcatattgagctcctgctgtggttaagcactgcaacagactctaccagagatgcaaagagaagcgagagaggcaccttgttctccaagaacttactgtccaatcatgctgtggtgcattcctttgaagatcatgaagaatagccaaacttgtctttgagggtgaatttgacactttaaaataatcagaagtcactgagacccaaagctagtgaataattcaagtgactaagctagatacttgaggatgatagagcaacactaaactaaagcaatgagtctgctttttttaatgatttatacaatgactccaaaggcaatcccaaagaaaagatgtaaagaatgttttgagcaatggtagcattattgaaataaatgtttaactatccaaagtgattactttcaaagatgatttttacttaaagatattangtctggccaggcgaagtgactcacaccttgcatcccagcactttgggaggccgaggcgggcggatcacctgaggtcagcagttcaagaccagcctgaccaacatggtgaaacccttgtcttacc

SEQ ID NO: 50088 - DNA, 822 bp, Homo Sapiens
agaggtaatcccctggatctaaataggtcacagactggaaaagattgtcacttacataggcattttgtggatccagtattaaatcagttacagaggccaccccaggagactggagagaggttaaacaaatacaaagaggaacaccgtcgaattcttcaagaaagtattgatgttgctccctttacaactaaaatcaagggacttgagggtgagagagagaattattccagagtggcatcatcatcttccagtcctaaaagccatatcatcaaacaagatatggatgtagaacgctcagtatcagatctttataaaatgaagcactcagtgcctcagagtttaccccaaagtaactatttcactacattgtctaatagtgtggtcaatgaaccaccaagatcatacccatccaaagaagtttcaaatatttacggtgataaacagagtaatgcccttgcagcggcagcagctaatcctcaaactctgacttcatttataacatctctttcaaagcctccacctttgattaaacaccaaccagaaagtgaaggtttagtaggcaagataccagaacatcttccacatcagattgcatctcactcagtaacaaccttcagaaatgattgtaggagtcctacccatttgacagtttcttctacaaatacactccgcagtatgcctgcatcacatagagcaccagtatttcacccacaatccatcacagcctggaaagaaaggaaggcagctatagtagtctttcccctccacttttactccgtgatgcagtaaatgctgtgtaagtcagatccagagcctcactca

SEQ ID NO: 50089 - DNA, 753 bp, Homo Sapiens
  misc_feature (536)..(536): n is a, c, g, or t
ggactgtcctcccttctggtgtactgggtgggaggtggaactagtcggacaaagccctcgcgtcggacccttgccagaactcaattaatggatgcctcgaagttgacgtacatatatattcagaaatgttttgccacctgagacctatgaggaggttatgtctagagaagatatttccacactggtttcccttttcaagagctttatcgggagctgaagcagtcaatgccttgaggcctttctattttgcagtacatccagatttctttggacagcaccccgtagaaagggaaatcaatgaaaattctcttaaaaggttaagtgtctacctagaaaacctccagaaaccaggcttcaagtctttgaaaccaactcagcttacattttatgtaagagaaacagaccagagttcctccgatggccaggaaccttttagtacttccggacttcaaatggaaggaggaagagcttgatctgaagaatgctgaagtatgttgaagacaactcctcacccagtctctccaggaactagtatntgatagtatatgatctcttaccttttattttctcataattgactattgggagatcaggagtcacaaattcctttttcttggcagtttctccatctacctctgacttagagtttattaaaaatagcctattcttcaatatttcaagatagaaagtcaattcatagccctttgtgaaggaacaggtatacctgaagaatgctgtactaatgaatcatag

SEQ ID NO: 50090 - DNA, 899 bp, Homo Sapiens
  misc_feature (19)..(19): n is a, c, g, or t
  misc_feature (40)..(40): n is a, c, g, or t
  misc_feature (43)..(43): n is a, c, g, or t
  misc_feature (798)..(798): n is a, c, g, or t
  misc_feature (864)..(864): n is a, c, g, or t
aagacctggtcaaccgcgnacggccactgcctcttgtggnagnagatcgaccagaggtatttcagcatcatcgacagcaaagtgaagaaggtcatgtccatccccaggggaactcagctctgcgcagggtcatggaggagacctactaccatcacatctaccacacagtggccatcgagggcaacaccctcaccctctcggaaatcaggcacatcctggagacccgctacgccgtgcccgggaagagcctggaggagcagaacgaggtcataggcatgcatgcagccatgaagtacatcaacacgactctggtttcgcgcatcggctccgtcaccatcagcgacgtgctggagatccacaggcgggtgctgggctacgtggaccccgtggaagccggcaggtttcggacaacacaggtcctggtcggacaccacatccctccccatccgcaggatgtggaaaagcagatgcaggagtttgtacagtggctcaactccgaggaagccatgaacctgcacccagtggagtttgcagccttagcccattataaactcgtttacatccaccctttcattgatggcaatgggaggacctcccgtctgctcatgaacctcatcctcatgcaggcgggctacccgcccatcaccatccgcaaggagcagcggtccgactactaccacgtgttggaagctgccaacgagggcgacgtgaggcctttcattcgcttcatcgccaagtgtactgagaccaccctggacaccctgctttttgccacaactgagtactcggtggcactgncagaagcccaacccaccactctgggttcaaggagacgctttctgtgaagccctaaccctagaaatnctcagtgacaaaggctgtcctgaggtaggaaaaaa

SEQ ID NO: 50091 - DNA, 702 bp, Homo Sapiens
  misc_feature (574)..(574): n is a, c, g, or t
  misc_feature (629)..(629): n is a, c, g, or t
  misc_feature (640)..(640): n is a, c, g, or t
  misc_feature (700)..(700): n is a, c, g, or t
tttgcagtgattatatttctgaacaaggttcagaaaacattgtttactaagaatttagtctaataatttcagttaggcgctcatcagttctccagagtggttgagtttgtaataccttgtttaaagaataatggcttgttcacgtgtgtgctatgaaaaatgatgtcccatgttcacataaatttgggaaattctggactaagacttaagtctcgttaatcaaatctctttatagttaggcttctgtacattatgtatctccagtagcaatgttgccatattatttatttcccaaacttagtggacaatggagtcatttctacctagagtaccagtaaacatctcccagtgtgctatagtagaaaatgtctactcctcactgctgacatgttaaacttactcttggtttagagcatgtgtagaaacacctaaggtagctctatgctaaataatgaagagtagcacaagaatgaatgtatttgctgatacgttgctcacattctcaagcaaaaattcaactgcattaaccgatctgagagttttccttaacctggactgtgtttctcaaggcacnttttttccttgttcactggcccaaggactagaactggatttttaaggttgttttnccctaaaaggncctttagtaagccaattttattaattaaatggtgcacatcttattcacccaagggaatanaa

SEQ ID NO: 50092 - DNA, 624 bp, Homo Sapiens
cacctagaggtagttactagattgtctccactttgttgtgagaacatggcccagagtggagcaatttctaaaatatttgttttgatccgaagttgtaatcgcagtattccttgtatggaagtcatcagatatgctgtgcaagtcttgcttaatgtatctaagtatgagaaaactacttcagcagtttatgatgtagaaaattgtatagatatactattggagcttttgcagatataccgagaaaagcctggtaataaagttgcagacaaaggcggaagcatttttacaaaaacttgttgtttgttggctattttactgaagacaacaaatagagcctctgatgtacgaagtaggtccaaagttgttgaccgtatttacagtctctacaaacttacagctcataaacataaaatgaatactgaaagaatactttacaagcaaaagaagaattcttctataagcattccttttatcccagaaacacctgtaaggaccagaatagtttcaagacttaagccagattgggttttgagaagagataacatggaagaaatcacaaatcccctgcaagctattcaaatggtgatggatacgcttggcattccttattagtaaatgtaaaca

SEQ ID NO: 50093 - DNA, 807 bp, Homo Sapiens
  misc_feature (666)..(666): n is a, c, g, or t
  misc_feature (675)..(675): n is a, c, g, or t
  misc_feature (687)..(689): n is a, c, g, or t
gggaccaaggccacttcttgcaaaccacatacacagcacaaagaatgtcagacagaatgccctgttcgtgcagtttgctgaggtgttcccgctgaaggtatttggctaccagccagatcccctgaactaccaaatagctgtgggctttctggaactgctggctgggttgctgctggtcatgggcccaccgatgctgcaagagatcagtaacttgttcttgattctgctcatgatgggggctatcttcaccttggcagctctgaaagagtcactaagcacctgtatcccagccattgtctgcctggggttcctgctgctgctgaatgtcggccagctcttagcccagactaagaaggtggtcagacccactaggaagaagactctaagtacattcaaggaatcctggaagtagagcatctctgtctctttatgccatgcagctgtcgcagcaggaacatggtagaacacagagtctatcatcttgttaccagtataatatccagggtcagccagtgttgaaagagacattttgtctacctggcactgctttctctttttagctttactactcttttgtgaggagtacatgtttatgcatattaacctttcctcctgtcatatggaaaatacaaaataggcagaaaaagaattttaagtccacccaanaaaaaaagngaaaaaaagaannnaaaaaacattgttcgggccgccctcgggcccctccaaaaaaccttttcctaaaaccaattcccttttggcgcggcgccggggccccaatatagggtaaaggggaaacagatgggccca

SEQ ID NO: 50094 - DNA, 958 bp, Homo Sapiens
gaaaggaggatggagtgcggtgccgtcatcatgaatggatgtatttatgtcactggaggatactcctactcaaagggaacgtatcttcagagcattgagaaatatgatccagatcttaataagtgggaaatagtgggtaatcttcccagtgccatgcggtctcatgggtgtgtttgtgtgtataatgtctaattgaatctgcagaaatgaccaagcaatcactttttggagtatagttttataaaaaaaagaatgcagggtttgaagttccttacctgataattgtgtctggcacatgataggggatcagtaaattgtaattcctaaccctactgtactcccaaacatggtgattcatggtcaagaaaaatcttatgtatatgtatgtatatacacatatatatgtgttcatatgtatgcgttcatacatacgcgcgtatgtatacatatatgtgtatacatacgtgtgtatgtatacatatatgtgtatacatacgtgtgtatgtactacatatatgtgtataccatatatatgtgtgtatatatataccacatatatacgtatctatgtgtatatatatacaaggtggactctagtgggattaaacctataactctgagtgtcagcggaatggactttgacaacgtggcgcacgcggggacaccacctgacagagaccacggagtaggaagaacaccagagggaaaaagcaacacgcgacggcaaggcgtagacgaataacgagaggagagaacgcgaaggagaaggaacgggccgagaggaaaccagccgagacgggaggcaggacaagagagaacgaacgaaatgaagcgtcaagaccgaacgacgacaaccgagcgagcagagtgagcagcaaccacacaagcaaaaggagcgagtaagcgcagagacagaggacacacggaagaacaagcaccgaccaagccacttctccat

SEQ ID NO: 50095 - DNA, 596 bp, Homo Sapiens
atcgaatcgtatcggccattatggccgggatacgaccctcatacaggacattggactaatgttacaccaatggccaccaagcgttctggtgcaggagtagccctgctgaatgaccatatttatgtggtggggggatttgatggtacagcccacctttcttccgttgaagcatacaacattcgcactgattcctggacaactgtcaccagtatgaccactccacgatgctatgtaggggccacagtgcttcgggggagactctatgcaattgcaggatatgatggtaattccctgctaagtagcattgaatgttatgaccctatcatcgacagctgggaagtcgtgacatccatgggaacccagcgctgtgatgctggtgtttgtgttctccgcgagaagtgaccattgttggagcaccatccagagctagtgaccagtccagtggacagttagtgggagaatcaaaaatcctttccagaatgtctgtttctcactacctgcaccgggtgattacaggcaccagtgcagtgatgattgtacttatttgacacatactccccgtcgtcctggttcttgttcctgagaagggtgggtaa

SEQ ID NO: 50096 - DNA, 981 bp, Homo Sapiens
  misc_feature (894)..(894): n is a, c, g, or t
  misc_feature (929)..(929): n is a, c, g, or t
acaggacatttttcatttgtgaatttaatgctatactgtcaaggtacttgcttgtgtctgaactctagtgcacttatgattttgtagaccatgtgaaatttaataagatacgtttttttttcctttctttgtgtgtagtgcagcaacagtttggtctgcatttgttagaagtttaactcctaacaacccaaagacctatttaacaattggtgcataaatgaaagtagtactgtatacttgaaactgtttaagtacaagttgaacaaaaattatgaaaaggtatatttgcttctcgggaaagcaaagaagctgctttaaaaaataaaaaggggactaaaaatttgttttgtataaagaggttagccctgcgcacgtaggactgaattcagtgatatccctatacactgccatttagtggataggttattgtacttccattcatactctgggcacttgtgttgtattgttctgttacatactttttttaacctgttttgttttatcatatatgcattaaaagtattatctttatcaacatttgctgctactgtgttaacatttttgttttgcttgccatgaatttcaacttccaccacccagtgaattgatttataaattgctatgctttgctgtttttctgttgctgtggaacttaaagaatgtgaaagctgtcaaagggtattttacgaatcacttttgtgtttgatatagtaaaaacaatgtgattcattcccaagtaacagaaggttatttgtaagaaagttaaaggcttgtgaacaaagaaagctaagctgttgtacatatttgtagttggctgtgcatgggtacaatttattaatatgaagaaatgcaaaaatggattgctttttgataatttctcttcccgagatgaancaagtagcatggtaatggcaactggtttggacagntttaactcaaggtcatgccttcaaacctgggttttaatgaatccaaattcaa

SEQ ID NO: 50097 - DNA, 557 bp, Homo Sapiens
ggattgtcccttctttgtcatttgaaatgaaatgatggccacgcgtcggactggtctgtctgagggagatggtgacaagctcaaggcctgcgaggtctcaaaaaataaagatggaaaagaacaaagtgaaactgtatcactgtctgaagatgaaacattctcctggccaggtcccaaaacagttacgttgaaaagaacatctcaaggctttggttttacattaagacattttattgtttatcccccagagtctgcaattcaattttcatataaggatgaagaaaatggaaacagaggaggaaaacaaagaaaccgcttggaaccaatggataccatatttgttaagcaagttaaagaaggaggacctgcttttgaagctggattatgtacaggtgaccgaattataaaagtcaatggagaaagtgttattggcaaaacctattcccaagtaattgctttaattcaaaacagtgatacaacattggaacttagtgttatgccaaaagatgaagacattctccaagtggcatattctcaagatgcctacctgaaaggca

SEQ ID NO: 50098 - DNA, 513 bp, Homo Sapiens
agcgacattggcaatgggttgatcagacaccatacaatgaaagttccacattctggcatccacgtgagcccagtgatcccaatgagcgctgcgttgtgttaattttcgtaaatcacccaaaagatggggctggaatgatgttaattgtcttggtcctcaaaggtcagtttgtgagatgatgaagatccacttatgaactgaacattctccatgaacaggtggttggattggtatctgtcattgtagggatagataataagctcttcttattcatgtgtaagggaggtccatagaatttaggtggtctgtcaactattctacttatgagagaattggtctgtacattgactgattcactttttcataaagtgagcatttattgagcattttttcatgtgccagagcctgtactggaggcccccattgtgcacacatggagagaacatgagtctctcttaatttttatctggttgctaaagaattatttaccaataaaattatatgatgtggtgt

SEQ ID NO: 50099 - DNA, 477 bp, Homo Sapiens
tcccatgatgacgatcagtcagtacatctggagagacaggaggacctggaggactgctgtcagctgctcagccacatcctggaggtgctgtacaggaaggacgtggggccaacccagaggcacgtccagattatcatggagaaacttctccggaccgtgaaccgaaccgtcatttccatgggacgggattctgaactcattgtaagtgcttggtgacatatgttgggatatttaactggggctgacagcatccttctccaactgctgtttgaacatagcttattatactgcaatgtagtgagcagttgagatacagcttggtatataaaatgtcctcattttccaaatgaatgtcaaagttgaagggtaagcaaaccaactttaaagatggaaacatttggctcttgttttctcattacttacttatagcaaaagacatgtattttctgctgagtcgtcattcttctggcagtttct

SEQ ID NO: 50100 - DNA, 777 bp, Homo Sapiens
  misc_feature (525)..(525): n is a, c, g, or t
tgtttggcggccgcagcgctgaatggggtggaccgacgttccctgcagcgttcagcaaggctggctctagaagtgctggagagggccaagaggagggcggtggactggcatgccctggagcgtcccaaaggctgcatgggggtccttgcccgggaggcgccccacctagagaaacagccggcagccggcccgcagcgcgttctcccgggagagagagaagagagacccccaacccttagtgcttccttcagaacaatggctgaattcatggactatacttcaagtcagtgtgggaaatattattcatctgtgccagaggaaggaggggcaacccatgtctatcgttatcacagaggcgagtcgaagctgcacatgtgcttggacatagggaatggtcagagaaaagacagaaaaaagacatcccttggtcctggaggcagctatcaaatatcagagcatgctccagaggcatcccagcctgctgagaacatctctaaggacctctacatagaagtatatccaggnacctattctgtcactgtgggctcaaatgacttaaccaagaagactcatgtggtagcagttgattctggacaaagcgtggacctggtcttccctgtgtgatgttgaccatcactgccatcacatcacctttccccaagtagtaagaataaagccactgtatgattctcaacacacctaccccccacacacccccactcctgcccacgcccccaccctctcggcgcgtcacacaccccggcggcgcgcactgcc

SEQ ID NO: 50101 - DNA, 833 bp, Homo Sapiens
ccgtcgaccccgcgtccgcaaatgaccaacagataattagtaaagaaaggcaaagagatatagaggagagatctagaagttgcaacattcgtttgataggaattccagaaaaggagagttatgagaatagggcagaggacataattaaagaaataattgatgaaaactttgcagaactaaagaaaggttcaagtcttgagattgtcagtgcttgtcgagtacctagtaaaattgatgaaaagagactgactcctagacacatcttggtgaaattttggaattctagtgataaagagaaaataataagggcttctagagagagaagagaaattacctaccaaggaacaagaatcaggttgacagcagacttatcactggacacactggatgctagaagtaaatggagcaatgtcttcaaagttctgctggaaaaaggctttaatcctagaatcctatatccagccaaaatggcatttgattttaggggtaaaacaaaggtatttcttagtattgaagaatttagagattatgttttgcatatgcccaccttgagagaattactggggaataatataccttagcacgccagggtgactacaaacaatatgctttcctcccccagcatgcatccaaaaatcaacaagtaaaacgaaaatacacttctacccagaaggatggacagctaatagcgtacttggggatgaggagcaaggaatattacagatattacctagatgttaataaagggtatgtttaaaaaaaataggctggtctcaatgtagtgagttatttcagttgatcacagtcagttacagatagaattccttgtttta

SEQ ID NO: 50102 - DNA, 1065 bp, Homo Sapiens
  misc_feature (929)..(929): n is a, c, g, or t
  misc_feature (947)..(947): n is a, c, g, or t
  misc_feature (953)..(953): n is a, c, g, or t
  misc_feature (977)..(977): n is a, c, g, or t
attgcttgttccccggaggttgaagctacagtgagccttgattgtgtcactgcactccagcctgggcaacaggtaagactctgtctcaaaaaaaaacaaaaaagaagaagaaaagtacttctacagccatgtcctattccttgatcatccaaagcacctgcagagtccagtgaaatgatatattctggctgggcacagtggctcacacctgtaatcctagcactttgggaggccaaggcaggtggatcacctgaggtcagaagtttgaaaccagcctggactacatggtgaaactccatctctactaaaagtacaaaaattagctgggcatgatggcacgcacctgcagtcccagctacttgggaggctgaggcaggagaatcactcgaacccaggaggcagaggttgcagtgagccaagacagcaccattgcaccccagcctgagcaacaagagcgaaactccatctcaggaaaaaaaaaaaaaaaaagtatattctaacagacagatcagaggtctaagagatcctcccttgctattattacctgaagtctgtagaactgtttacagatatctccttgacaggtgtcctttatcttactttatctgtacagtaatcctgtgagaaagacaggacagaaaccactgtgcctattttacagatacgaaaactgagacacaggtaaaggggcttgtctgtagtcccatagctagcagatggctggagccaagactgaggctcgttcttcaatgctgagccagggctccttccgctgcaccacaagaacgctagaccactcgccacccagccttctcattcccctcttctcccattctaatcatttctagctggctgggcctcccacagagcataggaaaaacagcccagggccggggcacggtgggctcatgccctggtaatctcaacanctctggggaggcccgagnccgggntgggataaccctggagggccaggnaatttccaagaacaggccctgggcccacaatgggtaaaaacccccttcctcctacttaaaatttattaaaattttgccccagggctgg

SEQ ID NO: 50103 - DNA, 1003 bp, Homo Sapiens
ccgagatcgcaccactgcactccaacctgggtgacagagcaagactccatctcaaaaacaaagaaacactgaacagttatcctatctgatctttttatatgcaggatagtgattaaatcactctacaaccactttcctctaatttctcctcataagcctaatcaaatgtatttgccttacttcctaccattctgttgaagattctccgaaaattggagaaagcactaaatatggtaggaagattctcttgaagttcctgtgatcttttgaaactgcattcctgagttctatccttacttccttaaagcagcatgcacttttggtttgttgttaatcaggggtctcctgtgcttggtgtgtggggtaggaaggcaggtgatcacctgcaacaattcttcacagattggaagttaaacatgaaaagcccccggagaccccacgaactagatgccagaaagttctgcagtcattgactgttaactgcaattccaactatacggtcagccctccatatccatgggttccatatccgtggattcaccaacatggattgaaatattccaaaaaaaaaaaaaaaaaacccataaattccgcaaagtttcaaaaaagcatagccttgaattttgccctgcacgggattcctgcactgaatccacacaaatgaaagtgagtttgtagggcgttggggtaaaaaaagggattctagaagttgatttaaaagtggacccggagaaatgcagggtagggtttctgcaaaatactggaacccttttttatttcaggggacctggagcattccacagattttggtggttttgaaggggtccctggaaaccaaatcccccccccccccccccggccccaaataaccaagggagacaaacttggaacaagggtttccggccccggcgctaaaaaaaagggggaaaaaccctagctttagaaaccaaacttctccctggaaaaaagtggggacaaaacccccctcttgaaaaacacccct

SEQ ID NO: 50104 - DNA, 613 bp, Homo Sapiens
gtgacagcgcgggagatggaacgactggagatgtactacgcccgcctaggctcccacctggacaggtgcatcatcgcaggcctcgggctgctcacggtgggcggcatgctcttgtcggtgctgctcatggtctccctgtgcaagggcgagctgtaccgccggaggaccttcgtccccggcaagggctccaggaagacctacggctccattaacctgcgcatgagacagctcaatggggatgggggccaggccctggtggagaatgaagttgtccaggtctcagagactagccacaccctccagaggtcttaagaactagcccaccttatctggctgctttagctccagtgctacaaggtccaccccctgctcccgcccacctgacccctgccaaggccctggggttttaaactgagctcacatagggccttgtggaagaagtactgggtgctggagggagagctcggggcccagcccatgccccacacgggcaagcagcccactgatctgttttgtagctgaggttttgcatacggatttgtttggaggatggcttctgctgctaaaaatacaaaagtttggaaaccgctaaaaaaaagaaaaaaaaaagaaa

SEQ ID NO: 50105 - DNA, 557 bp, Homo Sapiens
  misc_feature (526)..(550): n is a, c, g, or t
ggcaaagaagaaacatggaaaagatcaacttcctggtacaatggccaccctttctctggtgaatgaggcacagtatctgctgatcaacacatccagtattttggaacttcaccggcaactaaacaccagtgatgagaatggaaaggaggaattattctcactgaaggatctcagcttgcgttttcgtgccaatattattatcaatggaaaaagggcttttgaagaagagaaatgggatgagatttcaattggctctttgcgtttccaggttttggggccttgtcacagatgccagatgatttgcatcgaccagcaaactgggcaacgaaaccagcatgttttccaaaaactttctgagagtcgtgaaacaaaggtgaactttggcatgtacctgatgcatgcatcattggatttatcctccccatgtttcctgtctgtaggatctcaggtgctccctgtgttgaaagagaatgtggaaggtcatgatttacctgcatctgagaaacaccaggatgttacctcctannnnnnnnnnnnnnnnnnnnnnnnnaaacagt

SEQ ID NO: 50106 - DNA, 552 bp, Homo Sapiens
aagagagctagcactattcccaattgagcaaaatgggactattaagactgatgtaaaacaaaaatattttgttagttcataatacgtactaaattgaggggatttcagataattgacacctgcagaggcatagtcacaacagattcctatcatttaagaactgtacttcttgttgaaaataagggagtgttagccattttggtccttttttgcatcatctaatggacatgagaagtgtcgtggaccctattggaaacagcatgattgggttaggaatttgcataggatgagttcagtggtgagacttttgaaactacacacatctaccttgttttagtcctattttcaaaattttggcattgtgagattttatttactgtgtgaacctaaagttactgtttaagtacatgccacgcaactctgtgttattaagaagcactgtctcagaagctgtgtgtaaatttaatattaaggcactaaagaccaagcataggtacatgcctgtagtcccagctacatgggaggctgaggtgggaggattgcttgagccca

SEQ ID NO: 50107 - DNA, 443 bp, Homo Sapiens
gtgtatttggtctcacaggctgttcagggataatctaaatgtaaatgtctgtcgaatttctgaagttgaaaacaaggatatatcattggagcaagtgttggatcttgtatggaatatggatggatcacttgtaaggacagtgcctgggaactggtgtagctgcaaggattgagaatggcatgcattagctcactttcatttaatccattgtcaaggatgacatgctttcttcacagtaactcagttcaagtactatggtgatttgcctacagtgatgtttggaatcgatcatgctttcttcaaggtgacaggtctaaagagagaagaatccagggaacaggtagaggacattgctttttcacttccaaggtgcttgatcaacatctccctgacaacacaaaactagagccaggggctccgtgaactcccagagcatgcctgat

SEQ ID NO: 50108 - DNA, 340 bp, Homo Sapiens
  misc_feature (66)..(66): n is a, c, g, or t
  misc_feature (69)..(69): n is a, c, g, or t
catgcacgcgtacgtaagctcggatcctctagagcggccgcctactactactaaattcgcgggcgngtngacggagtttttaatagatgtctgcttactccactagagcaaagttctctatagtcagcaagtatatctttatcactcttttaaaaacattagtgtttaggctgggcgcggtggctcactcctgtaatcccagcactggccagcctggcgaaaccctgtctctactaaaaatacaaaaattggccaggtgtggtggcacgcacctataattccatctactcaagtggctgaagccggagaatcacttgaacccccgaggccgaagttgcag

SEQ ID NO: 50109 - DNA, 665 bp, Homo Sapiens
aatgacagggatctagcaatgctgcatcatcagccttccaataccaggtttaagggtattttaaacacagctcctcttaaatcctccaatctcagtacccagtgttttagccatgctcgggtggctaaattacatccaggaatggtgccagggcctttagccatttgtctctcctcacactccagggcccatatggcccaggttctgacagtttgccttactcccttggcctggggctagccctacctgataccctgtgtcaatgagtgtaccttggagagctatccactcaggccccagtgcctctatttgctaagggactctgccacagaaaagaaggggagagatgttcatgtaacctcaaaatacttaggcttggttttgatgctagagaggaagaaggacttggagagagagaaggaatggctggtccagaggcttttgtccactccctctcactggaagtggttgatctccagggaatccccaaggttagcctgcttaggggaagggctaggggtacctggaatgtaggatctcccccatgcctggcctaccaccctaatgtgtccggaattggtgggttcttggtcttgctgacttcaagaatgaagccgtggaccctcacggtgagtgttacaattcttaaaaaaaaaaaaaaaaaa

SEQ ID NO: 50110 - DNA, 777 bp, Homo Sapiens
ggagagaaaacagtccgtgataaagagtacaaggcccttcaaataaaactggaacggttagagaagctgtgcagggctcttcagacagaaaggaatgagctcaatgagaaggtggaagtcctgaaagagcaggtatccatcaaagcggccatcaaagcggcgaacagggatttagcaacacctgtgatgcagccctgtactgccctggattctcacaaggagctgaacacttcctcgaaaagagccctgggagcgcacctggaggctgagcccaagagtcagagaagcgctgtgcaaaagcccccgtccacaggctctgctccggccatcgagtcggttgactaagatgaggtgtgatcactgtattgagagatatattttgtgtataactttctctgttagtagttaactattggttttgtggtgaaaattttcttactttttctaccatatctgtattttcttagaactactggacttatgtggtacaggaggctgcttagcagttttgaatagtttaatctataaattttcctcagctgtgttgcacatcagcctcgttctccctccactggaatgcatgtgttcactgccttgtcctttctctccctgctccttgcacattatcatcctaatgaaaatttcactgacagggccgaccattacaagggaactttgttctgacgatggttccttgatgtgaaaacaatattaatttaaacgtcttagcccccccccccataatattattcagaaaaacaaaataccaaggcgatt

SEQ ID NO: 50111 - DNA, 843 bp, Homo Sapiens
cactcctgcctgggtgacggaagggaccctgtctcaaaaaagaatctgaaaacaacggaaccatgccttcagaattctataaagttattttcaactgataaatctatattcaggcaaagaatcaagggtgaaggtaaaataatacatttttagacaagcaaagactcaggggttacatgtaccctttcttgggaagctatcggagaaaatactccagcaaaatgaaggcgtacacaaaccagagaatgacgtggatccagcaaatagtatccaacacaggcaatattccagctatggagctagctttaaaaagaaacagtaaaaatactaatagattagctgggtgggatggcccatgcttgtagtcccagctactcaggaggctaagcaaaaggatggcttgagcccaagagttcagagcagcctggccaccatagtgagatcccttctcttaaaaataataggttattgccagatttggggcatttggaaagaagtgcattgaagataaagcaaaagtaaaaaaaaaaaaaaacaaaaaaaaacaagggggaagggttggttaggcaataattaattctagggcaggaagaagtacaggataggaagtaagagcatcatacgctgtttttctcaacaatgggcaatatgtacatagtcataatgatgtggtgactgactgcttagcccctaaatctggtaactactttgggacaatatgggggggaaaagtgaagatagtgatggtgtaaaaagctaaatcctcatctgtcatatcaagaaatccactatataatgtataacataatccaagaaatgactaaattagttatgtgaaaaaaa

SEQ ID NO: 50112 - DNA, 677 bp, Homo Sapiens
tatcatgaaagaacacactagggagaaaccctatcaatgtaagcaatgtgcaaaagcctttatttcttccacttcttttcaatatcatgaaaggactcacatgggagagaaaccctatgagtgtatgccaagtgggaaagccttcatttcttctagttcccttcaatatcatgaaaggactcacactggagagaagccctatgaatataagcaatgtgggaaagccttcagatcagcctcgcaccttcaaatgcatggaaggactcacactggagaaaaaccctatgaatgtaagcagtatgggaaagcgttcagacctgacaagattctttgaatacagataatgaatgtaaacaattaactgtttataataactgtatactaacaaatgatattctttttaaataagaagctataatatcccattggtgtcatgtattagatcagccttatactgttaaattgttattatttggacattgtgagtcagtataaccatgtggataaaatgccagacatctttttattcgaaaattttacttttcatgcttctgtacttacatttttatctcaaccttaatttttctttcttttttttttcccccagaaagaatctcgctctgtcacccaggcctggagtgcagtggcgtggtctcgggtcactgcaacctctgcct

SEQ ID NO: 50113 - DNA, 761 bp, Homo Sapiens
ggaacagaaacaccgtaaaatgaatgaactggaaactgagcagaggctgagcaaagagcgtattagagaattgcagcagcagattgaggacctccagaaatctttacaggaacaaggttccaagtctgaaggcgaaagttccagcaaattaaagcagaagttggaagctcatatggaaaaactcacagaggtccatgaagaattacagaagaaacaagaactcattgaagatcttcagccagatataaatcaaaatgtacaaaagatcaatgaacttgaagctgctcttcagaagaaagatgaagatatgaaagcaatggaggaaagatataaaatgtacttggagaaagccagaaatgtaataaaaactttggatcccaagttaaatccagcatcagctgaaataatgctactaagaaagcagttggcagagaaagagagaagaattgagattctggagagtgaatgcaaagtagcaaaattccgtgattatgaagaaaaaactcattgtttctgcgtggtataataagagtctagcattccagaaactggggatgggatctagacttgtgaacggcggtggtgcctgcagtgacactggtgcgtgcactcctgcgcggtctttcttaacgcagcaacggcacatccccaacaccagaaagaaatctctctgttaaagtccccgcctaccacattctgattaaacccacgggggaagaaagtgaaaccggggaaagtaaatgttgggcccccctcggccc

SEQ ID NO: 50114 - DNA, 366 bp, Homo Sapiens
gcacagaagatgatgaggctgttgaactgtggaggcatagattagagtgacgtggtcacaagccaaggaacacctgaagccaccaacagcttgaaaaacaaggaaagctttctctcctgcaaccattggagggaccctggcccagctggcactttgatttcagcccagtgaaagtgattttgagcttctgacccccagaactatgagaggaaaatttttgttgtttttatgctcccccagtttgtggtaatttgctactgcatctccaggaaactactgcactttgtactgaaacaaatgtaaaaatagattgtaaatataaaataaaccaaccataagagaaaacactttaaaaaaaaaaaaaaa

SEQ ID NO: 50115 - DNA, 588 bp, Homo Sapiens
tctactaaaaatacaaaaattagctggggcgaggggataggccgagttccgggtgtaagggggccattagggagagcagagcgaggcagctgatcttccggattgggggccttgcccggaagctggacctcacggagatgaaacggaagatgcacgaggatatgatctccatacagaactttctcatctacgtggccctgctgcgagtcactccatttatcttaaagaaattggacagcatatgaagattggacatcacatgtgaatgcatgatatgaagagcctggttacagtttctactgttctctgcaagtaaataggcccagaaaggtataagagactctttgaatggacataaaaattctgcttgttaagaacaagttgagctctggtaactgatcttaatagctaaaatataaaaatatttgggaagtctgaaatgaggtctcctggccctggtgtgcccttaatgcctgtgacagttggcctctgtgaatattggtataattgtaaataatgtcaaactccattttctagcaagtattaataattaagggaagtatgtctgaaaaaaaaaaaaaaaaaaca

SEQ ID NO: 50116 - DNA, 466 bp, Homo Sapiens
tttttttttttttttttacaagcccacaacatcatagctttgcagtttttaaccaggagctggtggagatctttgaaatcatttaggccaattcttttagttacatttatgatgaaactagggatctaccttaaagttttgggaagctctttcaaaacttcagacacctagaaatatatatagtgcagttcagttttagtttctgcagcatggtttggaaacaaaagatacataggatttaaactcgatttgttttcttcttacagtagaagtaaatgctcttgtggcttgaatcgcatctcccaagaaagatacgttcacgttcaaacccccagtactgtacatgtgaccttatttggaaatagggtctttttagatgcagtcaagatagaattagatcatactggattacagtgggccccaataactaggtttttttgttaaaaaaaaaaaaaaacctcgttcc

SEQ ID NO: 50117 - DNA, 548 bp, Homo Sapiens
cagatctctaccagctgctccagagactcttcaaaagccactcatctctggagggattgctcaaagccctgagccaggctagcacagatcctaaggaatcaacatctcccgagaaacgtgacatgcatgacttctttgtgggacttatgggcaagaggagcgtccagccagactctcctacggatgtgaatcaagagaacgtccccagctttggcatcctcaagtatcccccgagagcagaataggtactccacttccggactcctggactgcattaggaagacctctttccctgtcccaatccccaggtgcgcacgctcctgttaccctttctcttccctgttcttgtaacattcttgtgctttgactccttctccatcttttctacctgaccctggtgtggaaactgcatagtgaatatccccaaccccaatgggcattgactgtagaataccctagagttcctgtagtgtcctacattaaaaatataatgtctctctctattcctcaacaataaaggatttttgcatatgaaaaaaaaaaaaaaa

SEQ ID NO: 50118 - DNA, 542 bp, Homo Sapiens
  misc_feature (1)..(1): n is a, c, g, or t
ngcacgagagaaagagcttgaaatttgctttattagcatagttataatcttatttaatctgaaggatgtttcttaatttcatattcagaaacatatcctaatttatcatttaaacactgatataaaaatatgtctacttagtaacctattttttcttaaggtatttactatgcaggatctattacaactcattaaaatcaaccctacttccagtctctacaaatcactggtttcaggatctgataaagaaaatcaaaaaggtaggagccgtcatctttgtagagaacagcaacagttttctatgtactttttcctctaaaagaatgaagcaaatttttagggagaagagtaaaatttaatttgatttaaattatttgatttctgcaggtcatttcccctatatttccatttttgtaataacttttagatattcaattaaaaaaactgtagacagtatcaaaggccctacagacaggctgaaagatactgtttgtaaaaatacccactgttgggaatatttctgcaaaaaaaaaaaaaaaaaa

SEQ ID NO: 50119 - DNA, 834 bp, Homo Sapiens
gcctggtaccacagtcctcacgatggtaccagggctggagaggagtgccccctcctcacaaggggaggggcctccttcacaatcatccctgggggctggttaaagctgcctccggcttataaccagcctgacaaaatgacgtggagcaaaagaaaaactgggagggagacaagcccctggtaccacagtcctcacgatggtgcagtgatttctagccaggcgtcaagatgcgctgctttccctctcctgcctcatcccttgttggcagctccagttcaggccgtggagggacgtgatgctgggctgtgtttactaaacccacgggttttcagcctcttaagcccagctccgatctccaattagttgagagcgctgggttgactaacctctggtatctgagcacagacagagggtgctgtgggtctgctgggtggcagaaatggttccttccggcttggcgttctctcctggccactcttcctgctgcctctgactactcagccttgttttcggtgtgtaggccccagctgcccactggaactgccggctaatgctttgctctcccaagatctttaactcctcctggctgcacctgggtagggatggtggcatcgatgcccctctgtctgctgaaggacctgttgctgcttctgtcttttcacccctccttggctgatgacccagagccctctgatgatggcattctcctgggcaagagaaaaagacttaactagacttctgaaacttgaacagttcaggttatattttaactttctttttttgtaccgggtcctgattctaatacctttcaacatttcaaaaaaaaaaaaaaac

SEQ ID NO: 50120 - DNA, 612 bp, Homo Sapiens
aaagttaaatattagaacaaattctatgtcaagcaaattaagtaaacatctatgaagagactgaaaatggaatgtttttggaagtaaatagaaattgctaagcacctagcaataaagaattacaacaactcaaggaaatatgtttattagcaggatcatgaattaattgacccatttccggtacctctggtcataattggaagtaaatatgatgtttttcaggtaagctcttccgcttctagctgagtttgttgtacatatatggctgtgctttttatgagggaggtacaaaaataatatcaaaataagaaaaataattattgaaggaatcggttaagtcatgcatcttaaagattttggaaaagacatagttgggacagaaaaaaataggtaaagaaaataaatgcagtgattagaatggggataaggcagatttagaaaatgaatcttgccgggcacagtggcttatgccagtagtcccagcactttgggaggctgaagggggaggatcaattgagcccaggaatttgaggttacagtgagctgtaatcacaccactatactccagcctgggttacacagtgagacacttgtctcaaaaaaaaaaaaaaa

SEQ ID NO: 50121 - DNA, 671 bp, Homo Sapiens
  misc_feature (564)..(564): n is a, c, g, or t
ttcaatttaggtgacactatagaagagctatgacgtcgcatgcacgcgtacgtaagcttggatcctctagagcggccgcctactactactaaattcgcggccgcgtcgactgcttatcataattgagatactgaactgggtatattatgtacctatgtcaattaaattttcataccttacattcttcaccacaattattaaggtgaaatttattaacccagcttaatgataaggaagctaaatatcaagatacccaattataatataaaagacacaaaatattatttaggaagaaaatttttcagcaacccagaatatgtttcttgttgtattaaggcacattttagttctctagcatttgagggttaggcaggggaagctcttactgtgtttataaatctcattgcccattaatgaacctgaagacataatcatacctggcaacaaattctagaaggaatatatactatgaatgtttatctaatgtatgttagagactataattatggtgtggcaaaaatataaagttatttttaaaactctttctctgttgactcactacanaagccaagggcacaatatgatgtcataatgcagggaagtaatttcttcaggaaatgcaagtagtagagtctgagcatattgatttttggagctctagctcagtgttt

SEQ ID NO: 50122 - DNA, 582 bp, Homo Sapiens
ttgcttgttccttgatttttataagcattcaattaagttagtattatgtcaagtaattttgagaaaatgtaacttgacattttttgcaagtaaaaaaaattgtttatttgtttaggcttagtaaaccagttcccaaacacagtcagactcttcccattgtcatctgattgcagagagaaagcacaccttatttccagggaaagctacaacaagcccaaggtcaaagtgtattattttttgtcttgttgttgtctattttctcccaatttttttttgaaattcagaggctcatatctgaaatagaattttagttcctctttcctttcctaaaattggggaagtacagcccatgctgacattattttcaggctattcttagatatacaagttgttaggccaggtgcaatggctcgcacctgtaatcccagcactttggggggctgaggcaggcagatcgcttgagctcaggagttcaagaccagcctggacaacatggcaaaaccctgtctctcccaagaatacaaaaattagccaggcatggtggcacacacctgtggtcccagctactcaggagactgaggt

SEQ ID NO: 50123 - DNA, 1167 bp, Homo Sapiens
  misc_feature (1075)..(1075): n is a, c, g, or t
caccctctgtctcccggattcaagcgattctcctgcctcagcctcccgaatagcagggactacaggcatgcgccaccacgcccagctaattttttttggatttttagtagagacgaggtttcaccatattagccaggatggtctccatctcctgacctcctgatccgcccacctcagcctcccaaagtgctgagattacaggcataagccaccgcgcccagccagatgtgtgagcttttaatctctggctgatcttaacccacatcagcctaagcttgggatgattactcttgacccttttttttcagtgattagcaaatctccccacaacccaggtgtggagagaagagaggtagaatggtgctagtttcctattttatttttgtggtaactgtacagcactttaaagttatatactctatgtttaaatatctcccttaaaaagcctgagctgtacaacaatctggatgtgactctgttacccttttcccacaagataggagggaatcccctttgtaaaactatgaatcccaataaatgtttacaaagtggctcttgtgataattgggaaattaaaccattaccaattttatttttgaaaaggcaacactgtaatagtatatgctgtcattgccctggagcctgatctgaaacaagagtctagtttgacctgtcttctaccccagggaatttttccttgttggttgatgggggtatcctaagaggcttaaacaaccttctaagggaacaaatttgccaggtttataaaaaaaacgcctccctttttttttttttttaacttaaatttttaattttttttgaaaaccgggcttccccttctcttgccccaactttggaaagggggggggcaatgaaacccgggtttcccttgggagcctggaaccttcctggggggagggttggccttggaacacccgggagatttttaaaacaccccccctgggggcacaccttaggccaagaacccccccttgccttaaaaaaaaaaaatttaaaaaattttccccccgcggattgttggggggggggccataaccctggtggaggccccccngcttacttcttagggggggggttcaagggggggggagaggggttcctcctttgtaacccccccgtgaacattttttgggtgggggggcttcc

SEQ ID NO: 50124 - DNA, 666 bp, Homo Sapiens
atctgtacaaattattgagtaataatagtatctcttataggattggtataaagacttaaaaagttaatgtcatgtaaaatgctttagcataatacctgactcagagtaaaggcttaataaaccctagctgatcttactgtcagaatcaataatattactatttgtaatataattaccagacttaacaaatgggagaagtattaaccatctgcaggaataagtaccagagcctgcatcaaaatagtttatattcaacatgaagtctttaaattggcaaaagcactcagtttaatatatacctgttaagaaaattttaagagacagtcatggtttttagctggatactctgggaaaccaaataaagcagataattgtacagtatgataatcaaaaaaaggatgtctttataaatagcttgaaatagttccccagatgcaacttgaataaaggaaataaatagccgacttgctctaacttgaggttagagcaaaattcctagtctgattcactggatgctgaaaacccttgccccacattttcccactccctcttggttagaaaaatttacattggtttagcattatactcttggagctattttttttcaaaaaaaaaaaaaaaaacctcgaggggggcccggtacccaattcgccctttgtgagtcgt

SEQ ID NO: 50125 - DNA, 463 bp, Homo Sapiens
ctgatgtctgctcaaatgtcccctaattcaccttgtataacatagtagcccttccccttgccccaggtgatcccccccaccatgtttgccatgttcaatctccaacgagccagtctccatctgaagggccatctcctgcactcctcatcagacataagctcttggacttggtccattttattctcacccgcacttctagaacctaaaacccatcgtggtacttgagaggaactcagtgagtgaatcaaagtggatcacagctcagttttggaaacaaagccaaatcacttacctagattagagctggcgtcagccatctctcctcagataatatttgaaggctcagtacagtggcgcgcacactttgggaggccaagacaggaagatcacttgagcccaggagctcaaggtggtagtgagctgtgattgtgcccctcagcctagatgacagagtgagaccctg

SEQ ID NO: 50126 - DNA, 315 bp, Homo Sapiens
cagtgttggcagcctaggcgccagaatttgttataaagtgtctgaaagtggcacaggtatcacttaacttttcttcaagaaggtctatgagttacattttactcggtatcccaggcatcaaggagtgtaactttcaatgaatcaaagagaaacagaatcattttaaattccagcctctgtttaaagaaggatcttatgaaggagagaaattaaccacctgacccagggaaggatcccgcctcctccagaaagtgaaatcgccgggtgtggtggctcacgcctgtaatcccagcactttgggaggtcgaggtaggt

SEQ ID NO: 50127 - DNA, 651 bp, Homo Sapiens
  misc_feature (28)..(28): n is a, c, g, or t
gaatgactccatatatttatggtcacanttggagacaaaagtgtatccaagaaaatgtagtgtgcgttatagagaaattccaactggtcacactcaccattatggtttttcatgctttagagaaaatgctagatttatactgtcttttgttccatccttcagcttcccatgcattataaaggtggcacttaagtttttatctttgaaaagtgggccccaaagttttttggggtacaaaaagacatgtatgagaaccatattttctgtttctctttttcactctctaaactctttttgtataaataaggattatcctgggcataattcatttgaatatgaaaccaacatactttctttcatttttgtgaaaaaataaccaaaaacatgtattaatgtgatacaaagaaagtctcattcacacaatcaacaatgaggctaagaggtagctaccatgtggctaatgaatgtgcctaggtaacttcctgtttctattcaaaactgctgctttatttgtacattcagaaatatttttttcaactatgaaatttcaatatcaattttttaggccagtttctgcaaaaggaaatgacctgtcatttgatgtgttcatgtgtgttttgtgtttggatagtttatatcatgccattctat

SEQ ID NO: 50128 - DNA, 529 bp, Homo Sapiens
agatggcaccactgcactccagcctgggtgacagagcgagactcagtgccccccaaaaaaagatttttattgctgcattctctgaaatagcaaggaattaaaaactgcctgtagatacagcaattaaagtgaactccatccgcatgtaccaatatagacgaagtcctaaaaacataataactaagtgaaatgtacattgtgaaaggatagctacagtgagatgcctgtacttggaaactgtaaaaacccaaaataatgctaaatgctcaggaagagacagagacacaccagcttcaaggatagtggtggcctgtggtgataggtggaagggaatgggatggggtgatggggtttttagccatatctgtatttgtattttactataaaaatacttgacataaacatgacaaaatatgaacccctggtaaatctgggcaatgagttccccaatgtctactatattattttctacctttttctgtttttcaaatagttccataattaaacatttaaaaaaaaaaaaaaaaag

SEQ ID NO: 50129 - DNA, 545 bp, Homo Sapiens
gtatcggccattatggccgggattgactgttttttccctctaagtttacactaacatctacccaagatagactgttttttaacagtcaatttcagttcagctaacatatattaatacctttgtaactctttgctatggcttttgttatcacaccaaaactatgcaattggtacatggttgtttaagaagaaaccgtatttttccatgataaatcactgtttgaaatatttggttcatggtatgatcgaaatgtaaaagcataattaacacattggctgctagttaacaattggaataactttattctgcagatcatttaagaagtaacaggccgggcgcggtggctcacgcctgtaatcccagcactttgggaggctgaggcgggcagatcacctgaggtcaggagtaggagaccagcctgaccaacatggacaaaccccgtctctactaaaaatacaaaatcggcagggtgtggtggcacatgcctataatcccagctacttgggaggctaaggcaggagaatcgcttgaacccgggaggcgga

SEQ ID NO: 50130 - DNA, 414 bp, Homo Sapiens
atacggctgcgagaagacgacagaaggggcttctggattgcgttgggagcgggcactgtcccctacccactcctgctcagtttcccaaagtccagcgacttccgaccctccttggggggaaaaataccagtacccagacacctttgcaccctgttatatgactgggcttgcttcaggaatatcttacaaagaagaagaagaagaaagaacggcttggagtcatgtttacatctagttctactgatccgttcacatctggagagtttatttataactccctctataactctctgtttggagacactgtggctctattgacagactgatatctaggaaatattgctctatgtctaaccgtacctaaatgtgctgtggttgtatgtacagatttatgtttgagggaaatataactat

SEQ ID NO: 50131 - DNA, 735 bp, Homo Sapiens
  misc_feature (559)..(559): n is a, c, g, or t
ggtgaaagaatcccttcgcagcatcgagcagaagtacaagctcttccagcagcagcagctcaccttcaccgccgctctggagcactgcagggagaacgcccacgacaagatccggcccatctccagcattggacaggtgcagagctacatggaacactactgcaacagctccacagaccggcgggttctgctcatgttcctggacatctgttcagagctgaataagctctgccagcactttgaggccgtgcactctggcaccccagtcaccaacaacctcctggagaaatgcaaaaccctcgttagccaaagcaacgacttaagcagcctcagagcaaaataccctcatgatgtggtgaaccacctcagctgtgacgaggcccggaaccactacggcggcgtggtcagcctcatccccctcatcctagacttaatgaaagaatggatcgcccactccgagaagttgccgcgcaaggtgctgcagcacgggacgacttagcttctgtattattgttgcttcctcagggggagacagtcaagaataaaaagtattctaccnactctctgcctgacttggtttcctgggatttatccctgaaagaaaacctacatctcccctaagacatcaaaggacactgggcagtaagcctcagcagacagcagagagagaggccaccctaggcaagggggcatgctgtctcaagtcggttctaagaggtcatgcccaagtccagg

SEQ ID NO: 50132 - DNA, 846 bp, Homo Sapiens
  misc_feature (623)..(623): n is a, c, g, or t
  misc_feature (682)..(682): n is a, c, g, or t
  misc_feature (794)..(801): n is a, c, g, or t
  misc_feature (803)..(805): n is a, c, g, or t
  misc_feature (807)..(809): n is a, c, g, or t
  misc_feature (811)..(814): n is a, c, g, or t
  misc_feature (818)..(819): n is a, c, g, or t
  misc_feature (823)..(823): n is a, c, g, or t
  misc_feature (843)..(843): n is a, c, g, or t
caggagttacaaacttaataggaattgtcattttacttacagtttatttcctgattagttgttaatttttttcccctcagttatctttattcagtcttattggtcaaaacaaagaaacaaatagtccatcaactaaaataagctgtaatgaatttagaagatgaatgcatatattagatttccatttaaatcacttctgttataaatcatataaagaactttaaacttgttttatctaatactgagcactgtttttttgtcaagtatttttttaagaccacataattctttttgtctgctcaaggaaaggatagataaataattggcacacatttgtttctcactgaattttacagtagtaaattaatgttataatgtaccacatggagatgagttggtaagaaatcatctagttccagagcccagagattataaacagtaggtgaaatagatttatgacttacgaaatatgttgtgacaatatatttaaatgcatttttatattacttgcatattctcacattgatttgtgcaatagttcagttttaaaaaaaatcttcctatgcatcatgtattttatttttatttattttcacaagtatttgacagtatggtagaataanagatgattgtaagattaaaaatgtaaaaattgcttatgtattattctgaattgtgttanggttgaaaagatgattgtggtgactattatttcttggcccactatttgttttttgttttttcccaataatgtcttcatatttgaccctattcaataagacctggaagcttannnnnnnnannnannncnnnnacannaaanaaaaaaacacaacaaaaaanggg

SEQ ID NO: 50133 - DNA, 833 bp, Homo Sapiens
cttcggactgctcacttgccttgttcagccctgaatcatcagggctcccagaatggggaccagagatgggaagaacataggagacgttgtacacaagatctaagagaagagggagatgaagagactacaaatgatgttccccatatccagtgtggagatggctgtgacccccaaggactcagggacaacagtcagttctgcttgcaaaggatccaccagggtctgattttttatgagaagctgctaggatcggatattttcacaggggagccttctctgctccctgatagccctgtgggccagcttcatgcctccctactgggcctcagccaactcctgcagcctgagggtcaccactgggagactcagcagattccaagcctcagtcccagccagccatggcagcgtctccttctccgcttcaaaatccttcgcagcctccaggcctttgtggctgtagccgcccgggtctttgcccatggagcagcaaccctgagtccctaaaggcagcagctcaaggatggcactcagatctccatggcccagcaaggccaagataaatctaccaccccaggcacctgtgagccaacaggttaattagtccattaattttagtgggacctgcatatgttgaaaattaccaatactgactgacatgtgatgctgacctatgataaggttgagtatttattagatgggaagggaaatttggggattatttatcctcctggggacagtttggggaggattatttattgtatttatattgaattatgtacttttttcaataaagtcttatttttgtggcaaaaaaaaaaaaaaaaaaaaaaaaa

SEQ ID NO: 50134 - DNA, 673 bp, Homo Sapiens
  misc_feature (645)..(645): n is a, c, g, or t
ggattttattgccattgaaagtggctctcagcgggagggagagagctggaaaatggggatggagtgggaacgtattcttcccctgaagtactgccatcaagcagtcccgctaaagtcaagctgctgctctccgactcagactgcagtctccgacgtgcagctgcttctcctcttctctgctctgtgccagtggagcctgggatttttatgggtacaggatacggggtggggtaggccaggggtggttttggaaaaggcaatatttgagcaggaaaacaggaatgtaaagttctcactttgggcttgagagtgggtcttggccagggaccctgccctttttctgtgtacaatttctgtgcctcctgtccctctcagtctctacagaatgtctcagaaatctccatagtagaggatcatcattactctgcccctggcttctgttttattctgctatagtttaagcatctttatgaattttatttgacccagtttttgaattgtctgtcttacacttctgtaacctctctttcaatatcattttcttccagttccatttacaaaacagtccactattcttttaggattaataattttatctgcctgacctcatcttcatggttttctgattcttctggtgtataaaanaaaaaaaaaaatcaatggcccgcgtttt

SEQ ID NO: 50135 - DNA, 719 bp, Homo Sapiens
cacgcgtcgggtcgtgccactgccccactagtccatttgatctgcccccatcctaggatatcctgagtctaagccctggtttctgccaatggcaaataggaagattttattaacaggttttaaaaaattattattattactggttatttggtttgacaaggcacttaggctccctgagctttgccttagctggaaaataaggatagtattacttgctattctatcaaccctgtaagatatttgcggccacgcgcggtagcgcaccctgtaattccaacactttgggaggccggcgggaggggcagtggggaggatcgcttgaacccaggagcaggagttccagcctgagcaacatagcgggaccccctgtctcttcaaaatttgtttttaaattagcagggcgtggtggcgcaggctctgtagtcccagatactctggaggctgaggcccaggaggacgaggctgcagggagccatgatcacgccacggcactccaccctgggcgacagagcgagaccttgtctcagaaaaaatctgtgaggttaaaaggctgtgtgtgtgaaaatatcttggaaattgtaaagaactacacaaattaaaaaaaaaaaaaaaaaaaaaaacaaaacaactaaaaaaaaagggggggggggaaaaaaattcccccggggggccccattagccccattttttgtaaaggggcccaagaggggattttaaag

SEQ ID NO: 50136 - DNA, 620 bp, Homo Sapiens
ctaggtcaagaacccagtatggaagggagaagtgaaaagttgaagaaaaatccacacattgcatgaaatacaatgtgaaagctcctttgtatatcttggtaatttatattttcaaaacgaagttcttacttttaaagagaattacctatattctcccgatactgattaccatgtcattcacctgaacaccagaattagaattaaacattgtaccatacaatttcattatcttatcagaatgaaaccaattcacagggaaactagagactacggctgcggtggtaacctgcagatatacacattcccatgcactgacataagttgaaaacacatagtactttctagatggaatttttttctttaggcctcaatgaaatacatttcccctatataattccaacagcagtttctctagttctaaattttaccaattcccaaaaaacctaagttttgctgaaatctgatttgaccaatttatcaaatatgtcattttaattacctagctggaagttagagacatgaaatgtactagaggagcccttttccaatggagatattatataccacattttttgttaatggaaataaatgtctccattcccatgttaaaaaaaaaaaaa

SEQ ID NO: 50137 - DNA, 706 bp, Homo Sapiens
agccattaatgaaaagatgaataaagtcaactgtgtaaaaatgtttaacaaattttacctggtaccaaccactacaaacaaaagacaacctgagaaaagaatatatgcaacttgtcacaggcaaaaggctaatttccgtaatatatacagcattcctacaaactaacaaggaatgcattgttaatttttgtgcattgctagtgagaaggtaaagtagtgcgatctttgcagcaacaatttgtaagtatcaaaattataaatgcacatgccctttgacttaggaattttacttatagaattgtgaatgtacagcttattcattgtagcattgtttaaatggcagtacctcaaaaatctatcagtagggactaattaaatgaactctggtccattatatagtcatagaaattaatgaagagccaggcacagtggctgaagcctgtaatcccagcactttgggaggatcacttgagcccaggagttcaagaccagcatgggcaacataggaagaccccatttctacaaaaaaaacccaaaaatgttagcaggatgcagtggggcaagcctgtggccctagctactagggaggctgatgtagaaggattgcttgagtcccagaggtgtaggctgcagtgagctgtgattgcaacaattgcactccatcctgggcaacagagtgagatcctgtctcaaaaaaaaaaaaaaa

SEQ ID NO: 50138 - DNA, 719 bp, Homo Sapiens
  misc_feature (568)..(568): n is a, c, g, or t
  misc_feature (608)..(608): n is a, c, g, or t
  misc_feature (649)..(649): n is a, c, g, or t
  misc_feature (672)..(672): n is a, c, g, or t
  misc_feature (682)..(682): n is a, c, g, or t
  misc_feature (701)..(701): n is a, c, g, or t
  misc_feature (711)..(711): n is a, c, g, or t
gaaacagcaagaaatagcatctattacggagcagcttatgactactaaattaatctcagaacttcagaagctatttatgagtaaaaatgagacttacgtgttaaaattatggcctttgtttgtcaaactacttggaaggaccttgcatcgaagtgggagtttcatcaattctctcttgcaactagaagaacttggatttcgtagtggagcacccatgattaaaaagatagcttttattgcttggaagagtttaatagataattttgctttaaatccagatatactatgtagtgcaaaaagactcaagttgttaatgcagcctttgagttccatccatgtgagaacagaaactctagcattaacaaaactagaagtctggtggtatttactgatgagacttggacctcatcttcctgctaattttgaacaggtttgtgtgcctctgattcaaagtacaataagcattgattctaatgcctcacctcagggcaattcgtgtcatgtagctacatctccaggtttaaatcctatgactcctgtacacaaaggtgcttcctccccgtacggngccccgggaactccccgaatgaacctgagttcgaatttangtggaatgggcacaatcccatccattcaacttttggggacntgaaatgttgcctcatttcctgntggggtccanaaagccttgagttttggcnaagcaaaatnaaaccttg

SEQ ID NO: 50139 - DNA, 630 bp, Homo Sapiens
ggaactgtgctgctgtgactcctttccccagtgctaaaaaatagatgtagtcaggaggaactaacatagattggcagtcacccacacatttctggtgttaccttagtcttgtttcaagcatacaagccacaagtttttgggtgtcttaaatatacctaagttgtagtctctatttatttttttattatacttttaagttctagggtacatgtgcacaacgtgcaggtttgttacatatgtatacatgtgccatgttggtgtgctgcactggttaactcgtcatttacattaggtatatctcctaatgctatccctccccctcccccaaccccacgatgtagtctctttctaagttccattaaacagaatactaaaatgaccttttttggtgactcttgcctgtctctaccactaactggcttaaaagctgctgggtctcttcctttgtaaagagcaacatgagtttacagatgaggtctgtctatatctcctcttatgtttttctcttaagaacttcaagtgaaataaaacaaaatagctcttttatgaatactaccttttgtattttacctcataagatttaatgtattaaacatttctataccaacaaaaaaaaaaaaaaaaaaggac

SEQ ID NO: 50140 - DNA, 619 bp, Homo Sapiens
gataaaagggctgttgtatctctagacccaaatttagccacttcaaatgctgagaacctagaagatgctgcaaataaaagctcaggtcatatgcaaacacagagctctcctttgctcggggaaatgtatttggtgagcctccaactgaacttcagattaaacagcaagaattatacaagaattttcttcgtttccagattgaggaaaagaaacaaagagaggaagcagagcgagagagactgagaattgcagaagaaaaagaagaaagacggcttgcagaacagagggcacgaattcagcaggagtatgaagaggaacaggaaaagaaaagagagaaagaggaggagcaaaggctaaaaaatgaagagcatattcggttagctgaagaaagacaaaaagaagcagaaagaaagaagaaagaagaagaagaaaaatataacctgcaacttcagcactactgtgaaagagacaatttgattggggaagaaacaaagcacatgagacagccttctcctatagttcctgctcttcagaacaaaattgcaagcaaactccaaagacctccttcagttgacagcatcatacgttcctttattcatgaaagttccatgtccagggc

SEQ ID NO: 50141 - DNA, 490 bp, Homo Sapiens
atggccgggattaaagcaaaggtggatttaagaattaaaccattacatgccccttccaaaaggcagaaatccattcaaacgtgactgtcccaaatgccttatgtcaaataaagcagattgcactgatggacatcagacttgaaggaaatgtttccaattttatatttaaggggggtggtgggtgggagagggcaagtaaagacggaacaagtttagtagcagtaatagtaaataatgtttacatatgagatttatagtcgtgggaggggaataaagttctgttatatttccttgctcgagtttcataccagatgcgttggtccataaaggattgtatcaagtagatgggacaacattctgctctgaacgaaaagtaattttagagacataacctgcttaccaatgcctgtctttgattcatattctactttcaataaagcatgaaagtgaagaacttgtcctaagtgtggaaaagtgtcttcagatttag

SEQ ID NO: 50142 - DNA, 849 bp, Homo Sapiens
  misc_feature (641)..(641): n is a, c, g, or t
  misc_feature (734)..(734): n is a, c, g, or t
  misc_feature (825)..(825): n is a, c, g, or t
  misc_feature (835)..(835): n is a, c, g, or t
  misc_feature (842)..(842): n is a, c, g, or t
atcctctgatcaaatatctgagtgccaccactggctttggaagaaattacattatgacccagaagatggacctagatgaagacactgctgaaaaattttatcaaaagttactggaactggaaaagcacattagggtcactattcaaaaaacagataatcaggccaggctcagtggctcatgcctataattccagcactttgggaggccaaggcagaaggatcacttgagaccaggagttcaagaccagcctgagaaacatagtgagcccttgtctctacaaaaagaaataaaaataatagctgggtgtggtggcatgcgcatgtagtcccagctactcagaaggatgaggtgggaggatctcttgaggctgggaggcagaggttgcagtgagctgagattgtgccactgcactccagcctgggtgacagcgagaccctgtctcaaaatatgtatatatttaatatatatataaaaccagagctgacaatgacactctggaacattgcataccttctgtacattctggggtacatggatttctactgagttggataatatgcatttgtaataaaccactctgcgcgcccgctcttctgctgctgtttgtctacttcctcctgcttcccgccgccgccgccgncatcatgagggaaatcgtgcacttgcaggccgggcagtgcggcaaccaaatcggcgccaagtttttgggaggtgatcagcgatgaagcacggnatcgaccccacgggcacctaccacgggggacagcgacctgcaactggaacgcttcaacgtgtactacaatgaggccccggcggcaagtccntgccccgcgncctgctntggatct

SEQ ID NO: 50143 - DNA, 856 bp, Homo Sapiens
  misc_feature (560)..(560): n is a, c, g, or t
aaggctgaggcaaaagaattgcttgaacccaggagatagaggttgcaatgagccaagatcactccactgcactccagcctgggcgacagaatgagactctgtctcaaaattaaaaaacaaaaaaccaaaaacaaatagatgaaaaagtagactggagacaaataaaagtgagtttctaaaggaaattcacagtaatgctgcattaaacactaagctcacttaggtcactttctagtgagctaaccgtaacagagagcctacaggatacacgtgagataatgtcacgtgtagaagatcgttgtgaattaaagttcaaaattaagacttcttagattatgatgtagattttagagctccttaaaacataaagcgaatcttataaatgttcaattctaaagttattccacttggaaaaattagcttttgggacaatttttaagaacttttgtgtaaaatgcagctccatgtttagcataatctaaaaataatttcaagcaatccagaatcttccaagaatttattaaagctttaaaaaaagcaaaacaaaaagacctttgtgncttatatgggaagaactccaaaacagaaaagaatagagggacaacaccacttcaattgaccttcatgcttcacatcagaacttagaagataacagctgagatgtccgtgttaaattctgttcttccagaccgaggggttgctgtccaggcattttccagtcttgggaggctcctcttcgggtcgaaacgtttccacaaaactgttttgtgcccttcaaaagagctggggaaacccctgggccttggtccggacaccgggtctgcaaccgggggcccttatgtctcacccccgtcgc

SEQ ID NO: 50144 - DNA, 934 bp, Homo Sapiens
tgcgttctcatactkgagaaaaaccatacaaatgtgaattatgttccttccgctgcagtgatcgaagtaacttgtcccatcatcgaaggcgcaasataaaatggtaccaattaaaggtactaggtcttccttaagcagcaagaaaatgbggggggttttacagaagaaaacaagcaatctgggctatagcagaagagcactaatcaacttaagtccaccttccatggtggttcagaaaccagactaccttaacgattttacccacgaaatcccaaatatccagactgactcctatgaaagtatggcaaaaaccacaccaactggtggccttccaagggacccccaagaactcatggttgataaccctttgaatcagctctcgactctagcagggcagttgtccagtctgccacccgaaaaccaaaaccctgcatcccctgatgtagttccctgccctgatgaaaagcctttcatgattcagcagccctctacccaagcagtagtttctgccgtatcagcaagtattcctcagagctcctctcccacaagcccagaacctcggccatcccatagtcaaaggaactatagtccagtggcaggtccaagcagtgagccaagtgcccacacgagcactcccagcataggaaacagccagccaagcaccccagccccagccctgccggtccaggaccctcagcttctgcaccactgccagcactgtgatatgtactttgcagacaacatcctttacactattcatatgggatgtcatgggtatgaaaatccttttcagtgtaatatatgtggatgcaaatgtaaaaacaagtatgattttkcctgtcattttgcaagagggcacataacmacattkattgaaatagtyatattttacttakttttgctgttttgtggttkggtttttttgtttttgttt

SEQ ID NO: 50145 - DNA, 651 bp, Homo Sapiens
  misc_feature (616)..(616): n is a, c, g, or t
gcttctgaggaacagcgggacagggcttccgactgccacggggctcctctgacctgatggtgttggggtttgggtaggggaggggagctcggctgtcagaactccatggatatgtttctttggatggaggggagggcctttgttaccttttgcacttattctttctgtgggtgctttgacaagggcatggcaagagagcttgtcagtatcatttctttcattttattttggctgtaaaaattttgtttgaaagtcaaacatttgaacatcaaatatgtattgattagatccagtccttctaagaaacctcctttcctttaacaaaaagaccttgaccatgaatcagagattgtattcaatgacattatcatcatttttagaacgagccactaacctattagagaagaggcagataattatttatcattgtgccttcctctgtctctttctctttcctttgctccctcccatgtttctggtggactaaattgtgtatctgggagttctcactttctagccaggcctgatgagttaagttacatgaccaggaaggttatgccactttgtggtcattccatgcaagtcatggcgtaatataaaataataaaaactttanagtctaaaaaaaaaaaaaaaaaaaaaaaaataggt

SEQ ID NO: 50146 - DNA, 587 bp, Homo Sapiens
taatggctgcataggaatctcttgtgtggctgtaccatggttttgcttttactgttaaccaatttcctattaatggacatttaggtgttgaccagttttttgccactataaacaactcttctactttgacatatattgtgaagttgaccaaacatctctttaggatcaattccctgggttaggatttacaagtcagagagtattccatggccctgcatcagggaacttgggtttatccttcatgttctcaccaactcttgtattagctttttttcatcttttccaatctaattggcaacaagtaatatctcattctacatatattttctttgtttactagtgagattcaggagtctttcacatggatagtaaccataattttttttcctcttatgaatggcctttatactattaaagcaaaatgttttatactattagatagccttactaaaggaacgtgcttattttgtggtttacaaaaccccaaaaaaccccaagcaaaacaacaacataccaaaaaaaaaaaaaagaaaaactccagcaactctctgtagcagtttctctttgagaaaatgtcttgtttttgg

SEQ ID NO: 50147 - DNA, 627 bp, Homo Sapiens
cagatgaagtacaacaaagatttgaattataaataatgaaaggagctaggtatgcactgtaatcttcatgtcagcaacaagaatgtactaattgcattctttaatttaaaaaatggtttttaaactttcgtttttaggtcaaagataaccactgcattgttaaaatgatgtaacatagaaataataattttctacaaaaattagccaggcatggtggcgcatgcctgtaatctcagctactcaggaggctgaggcaggagaatcaattgaaccgagcagacggaggtgagctgagagctgagattgcaccactgcactccagcctgggtgacagagcaagaaaataataataataataattttcaaaatgttaggctgggggccgtggccagcactttgggaagccaaggcaggtagattgtagcccaggagtttgagaacagcctgggcaacatggcaaaaccctgtttctacacaaagttagctgggtctggtgcctctgtagttccagctcctcagtaggctgaggtgagaggatcgcttgagcccgggaggtctaggctgcagtgagcttatgttcatgacactgcattccaggctggatgatagagcaagatcgttgtctca

SEQ ID NO: 50148 - DNA, 793 bp, Homo Sapiens
  misc_feature (756)..(756): n is a, c, g, or t
cttggtgcaattgtttactgtgttggtgtgaaagatttaatgagacacagctggcccggattgcggacagtaaggatcatgtgtttcccgtgaatgacggctttcaggctctgcaaggcatcatccactcaattttgaagaagtcctgcatcgaaattctagcagctgaaccatccaccatatgtgcaggagagtcatttcaagttgtcgtgagaggaaacggcttccgacatgcccgcaacgtggacagggtcctctgcagcttcaagatcaatgactcggtcacactcaatgagaagcccttttctgtggaagatacttatttactgtgtccagcgcctatcttaaaagaagttggcatgaaagctgcactccaggtcagcatgaacgatggcctctcttttatctccagttctgtcatcatcaccaccacacactgtagcctccacaaaattgcatcaggccccacaacagctgcttgcatggaatagcagagaataccgcctgctccctccggacagcacactcctgaaaacggggagagaggagccaaacatgctcggtttacactttccttatttactgaatgagtggagggcagagacaggcctggagttacgcacactgagtgccccaacatggaaagaaacatcaggagggacaggaaacgttccctccttaccaacagttttaagacctactggaggcacttattggctcataatactcatgcgtggcataggcagatcctgtgcnacccacttgagtgagattcaagttcttattgacttcc

SEQ ID NO: 50149 - DNA, 651 bp, Homo Sapiens
gttgatggggaggtcaggtctgggaaactaggccctggggttttccctgagcaggagcggtgcccgagggcctcaggctgaacctcctcagaagagcaactggagatagaagcatgaatcttttatccatacgttccgccaggctcgagaggtccagcaggtaactgccaaaggtggaaactgttcacacttgcctcccatcctgcctgcagaaaacccagactgcattcagtgtcctcagtgtagccaccactttgctcccaaggtggctgagcaacacattcccaagtgtaagaccatcaagaactgtcatccacctctaaggaagcattatagttgagcagacaacaatggaaacttttggatagttcagaaagctctgcttctcttcagcagtaaatgggagtagaatttgatgcaaagcagaaagaaatcaaacagctcccagatctgcctgcagagctaaaatctgtgaggagagagccactgctaagcagcaggaggcagaaggaagccccagcttcccactaaattacaaccttgggctggtatgctttatgttattgccctcagaattgatgggtgaagacactgaagagtcatgagcaggctccattaaagctcttttcttgcatgaaaaaaaaaaaaaaa

SEQ ID NO: 50150 - DNA, 516 bp, Homo Sapiens
tgagctggtaccgagtgggtctgcggaagggacagcgggtgaagctcagcacacaggagcaaagctgtagggcagaggtaggggtggaagccaggccttggccacacggcctcaggcaggtgccagaggcccagtttgcccaggacagtcttgatttataccaggtgagggtcctcgtgcagatggtgcattctctagtttccaaactggcagagagcttggatgttttccttgatgcagtgggaagccgttgaaaaattttaagcctcaagtgacaaaaggtgaattttaaaagattgttgaggctgggtgcagtggttcatgcttatagtcctaacagtttgggaggttgagacaggaagatcgcttgagcccaggagttcaagactctgtctctacttaaaagaaaaaaattagctgggcattgtagcatacacttgtagttccagctactggggaggctgaggagggggcatcgcttcagcccaggagttggagtttgcagggacccactcg

SEQ ID NO: 50151 - DNA, 830 bp, Homo Sapiens
gggaagcttctttggatctgagatgttgaagaatctggtcctgcaattcctgcagcagtattacttgatctatgactctggagatcgacagggtctccttagtgcttaccacgatgaggcctgcttctccctgagcattcccttcaatcctgaggactcagccccgagcagcttctgcaagttcttcaaggatagcaggaatataaaaattctcaaggacccctaccttcggggggagctgctgaagcacacaaaacttgatattgtggactccctcagtgcgttgcctaaaactcagcatgacctcagctccttcctggtggacatgtggtaccagacggaatggatgctctgcttttctgtcaacggggtgttcaaggaagtggaaggacagtctcagggttctgttctcgccttcacccggaccttcattgctacccctggcagcagttccagtctgtgcatcgtgaatgacaagctctttgtgcgggataccagccaccaagggacccagagtgccttgttcaccctagtgcccacagccttctccagctccgtgcctgccttctcccaggagcagcagaaaatgctgccttcgtaacaaccagtgtgactacgtcagagctcctcatgttcttgcatggcccaagatgtatttccctgtgactgaaccaggagatctggctggggctaagaagccaaagcccaactcacagggctgactctcatccttccaaaggggccagttgttctgtgcacttgtccacccctgttacccccaggatctctgttccttttcacaataaagtatggtgtcttgttatgtmaaa

SEQ ID NO: 50152 - DNA, 604 bp, Homo Sapiens
gtgttggcaattatagattgtgtttgtgtatacttgtacatgtaagtttacatgtgaaaacatctgaaggcctgaaggcttgcgtcctttccattggcttatatttctagagacactgttctctctctcaaccatcttttaaaatttaaactgtctataatcttacactattatgttagtcacattgaatgcaagataaagcattttattctaaagatgaggtccagattctaatcaggagatgagtcaagctcagaaaaggaaatctgatttagagttctctcagtcttcctggcttatgtcttagttcattttcagtctgcttttgtgcttgtttgatgtagtctctgtacaaggtatagtcaccatgtagttgcatgttcactacatgaaggggattgtgctagattcttaatagattattacttgatatcctgtagtaatttgtaactgttacaaagatcagaaaatgtagtgccatcaggaggctgaggcaggagaatcgcttgaacccgggaggcggaggttgcagtgagctgagattgcaccactgcacaccagcctggttgacagagggagaccccgtctcaaaaaaaaaaaaaaa

SEQ ID NO: 50153 - DNA, 717 bp, Homo Sapiens
  misc_feature (660)..(660): n is a, c, g, or t
  misc_feature (704)..(704): n is a, c, g, or t
aaattgagtagtcatttcttaggataagcactgtctcaataacatcaggaatttggcagaaacttgatctgtaggagccagtgtatttgaccaaaggacattgagtcggggatgctgaccctagcccaaactctgtagtacctatagccgtgttgtacattatggtagccacatgtgactatttaattaaaattcagttcctcagttgcacttgacacatttcaagtacttcatagccacttgtggctagtggctaccatcttggatagcacacaggtagaatattgccatcttcacagatatttctattgggccgtgctgttctatagaattatttacaaagtgagtcaggtctaccacagtggagaaaagataatatttaggcagtacgtcatgtacctttaacacgccccacccaaggatcattacctggccatgagctgaccttgaaagccagaggcattcccaatggaaactgagaattttgatgaatgtataattgaacttaactgtcactatatttatctatttagcccatcatgttatctaagaacagataatgtatgcctaaccaaagtaaaatacctatgaagacatgattagcgtcactgtgaggtctcagttatctttaaataataatcatattcaagctatagaagntacttatgttaaggtaaggattttttgaattttaagaaatacanaaaaaaaaaaaaa

SEQ ID NO: 50154 - DNA, 651 bp, Homo Sapiens
ggatcacttcccatttttcttactgatctcagtgcaaactacactagtctgtttctttgccctggtctcaagtctctaagacgctggtgtgtattatgtgggctaagttcatgtgttatcctaaggcacaagagttgaggaatgggtgagcttggtgtcagagcactgtgtggttggagggtggactcttgtgatgctgtggggatgaaattggccctcttttagcataagttggggagtgtgcactggctggaggcttccagaggcttccagccatgaggtgtgagctgaaaccaatttttcctctttccttatagcatgttgagaaaatctgttgggttttcagcagtcagggaaggccggagttctgctttaatctgggtaactgaggctaatatgagcaagactttggttaattaactgggttctcagatgccacagactccgtgagaagtcaccattattttcaatggttgtgatagaatttcccccagtagccattattttaagattatattgcagagttgctttattttgagctttttgtgtatacacaatcccaaactggaagaattttaaaaaaaggaatcctgctgtgaaagtatatatactctagattttctactgtaatattgaagatgaatactgtca

SEQ ID NO: 50155 - DNA, 921 bp, Homo Sapiens
gtttgggaagataaaagaaaaagccctcagcctcagcagcatttcctttctttctgctttttatttattttgcctttttatcatgatcgagagaatctgtaaatagtgtacaaaggcatatgtctttgaatatatacttctattgtacagactcaacttgataaaggttttgctactgctgtgtcaaaaccttgttagctgtggataataatataacacactgaaagaacaaatataagaatgataacactggaagatatattcttatctaattactagtggattaaatactcacctgtgctctgattaaatctacatcaattgtaaatgtcgatttgattttaaagttttttttttaatgcgactatttttatctgaaaagtaatccattacacttttctatgttttatacatttcaaaagggagggaaattccaaagcctgaataatggaatggatacatttcaatttaacatatattctggctttagatcccgacattcactcctgtgcaaattacttaggtatgacttaggctaattttaagctaataagtgaacggtacattcactccctcaagagaatcaatacctcagaaggttacaaagtttcctttatagaatttcaatcaatcattccatctaaaaccttaaaatctctacaggactacataacataaatacgtgccagtttataaacgatggcctatctgaatttttatacctaccactactttaatttatacagttagttagcaaaattagcaacccagtaagtacagttatcaaaaatactaggaaactatttccatattcgttggggggtacagattgtatctgtgcatctaaaaatatttaagtcaatactcaagtgctctcagaagaaaaaaataaaaaaaaggggggcgcgtctagagtttccg

SEQ ID NO: 50156 - DNA, 583 bp, Homo Sapiens
  misc_feature (493)..(493): n is a, c, g, or t
cccatcccagttttcatcattgagccccagaccctctgagcagcaccttgaagagggcagataatcagacttgaggaaactgaaagccccaggttgagagaacagaggcctagggacctccagaccattggaatcactgtttgccagctgtgtggccttggtcatatcatcagcctctgggaagcctagttcccacatctggaaataaggatgatcatagctacctcacggttacattgcaaagccttactctaaaagctcccagcctccagaggctctcaatgaagagtcaccttcatggtcgtcttcaggaacaggacggatgaagaaggggtggggttaagactcaggggcacctgagggtctgagcccccttatgagtacccaagaaggactgtctatgcatgcacacccacaagcctatacaccatttatatacctacacgcaacgcaagagacgcggagagataggcgatgcagactcgcgattcantgatcgatatgctcataaaagtgctcaattatattttctgtattttgtatgctgtattttccaagacgtatattattttactattaaaga

SEQ ID NO: 50157 - DNA, 461 bp, Homo Sapiens
ccacaacgcacccacgataagattggtatccataaagcagagatttctaagcagtgagagacttcagtattttagattagattcttgggttataatagaataagatcattagtagtagaacatctggtatcagaaaacttgagtgtttttattgccatgttagcatatgaatcttaaaggattacagaattcagttaagagaaacaagcttttattggatgggtatttaaagagtttcttgataagagagaccttagatttcttacgtaaagccatgttcacaaggaccactgtccttgtgattctaatttgccagataaaagtctatgtcctggcgcagtggctcgtgcctgtaatcctggcattttgggaggctgaggtgggcggattatttgaggccaggagctggagatcaacttagccaacatggtgaaatctcatctctactaaaaacacagaag

SEQ ID NO: 50158 - DNA, 875 bp, Homo Sapiens
  misc_feature (736)..(736): n is a, c, g, or t
  misc_feature (741)..(741): n is a, c, g, or t
accactgaatggaactggtgctgtgactcctgctgctggggatttatgtcccgagaccttagcctggctgagtggagcctgagacctgcacaacagctcatggtcatgcatgagagagaagtggctggccacagccagagggaacagtaacagcccaggggcctttattttgggaaaggctgtcccgggctgttactgtctcttctggttataaagcagacatgtggccatcttttccgcagggttagagtgggctcctttctttttggaatccttttcttctcctttggtagcagctccctgcctccagggcttccgccaccagcgtctctgctgtgttgcgcagtgcagtggggtgcaagggctttgtttctgcctgcctgaaagagagggctctggggatggagatgagaaacaacacgctctccttcagacaatgaggcattctgtcctcctgctgccattcttcatctccactgagagccagagctggtaggagccgagtgccacaggcattctgcattgctctactcttaggtttgtgtgtgtgatccttcccctccctgtcgcccactcctccctcctctggctatcctaccctgtctgtgggctcttttactaccagcctatgctgtgggactgtcatggcatttagttcagagtggaggggctttggcctgaaataaaatgcaagtatttaagattgttgttgcaatttgtgtctaacaagctgtancaaanaaggagggagtgagcgcctggcagtatttcctttcataaatcatgaatttatcagggtggaaaataatgcttcagaactgtggctcctgtacccctccctgcattggtgtggtggcagctcaaaggtcaccacc

SEQ ID NO: 50159 - DNA, 726 bp, Homo Sapiens
ctttctgaacattgagatatcctgaacttagagctcttcaatcctaagattttcatgaaaagcctctcacttgaacccaaaccagagtactcttactgcctcttttctaaatgttcaggaaaagcattgccagttcagtcttttcaaaatgagggagaaacatttgcctgccttgtaataacaagactcagtgcttattttttaaactgcattttaaaaattggatagtataataacaataaggagtaagccaccttttataggcaccctgtagttttatagttcttaatctaaacattttatatttccttcttttggaaaaaacctacatgctacaagccaccatatgcacagactatacagtgagttgagttggctctcccacagtctttgaggtgaattacaaaagtccagccattatcatcctcctgagttatttgaaatgattttttttgtacattttggctgcagtattggtggtagaatatactataatatggatcatctctacttctgtatttatttatttattactagacctcaaccacagtcttctttttccccttccacctctctttgcctgtaggatgtactgtatgtagtcatgcactttgtattaatatattagaaatctacagatctgggtttgtactttttatactggggggatacttataatcaaaacttttactaggggtattggaataaatctagtcttactagaaa

SEQ ID NO: 50160 - DNA, 739 bp, Homo Sapiens
gagtcgtaaagaggaaaggcagaatttttccttgctatggctggaacaaacgcacttttgatgctggaaaacttcatagatggaaaatttttaccttgtagctcatatatagattcttacgacccatcaacaggggaagtgtattgcagagtgccaaatagtggaaaagacgagatcgaagccgcggtcaaggccgccagagaagcctttcccagctggtcatcccgcagcccccaggagcgctcacgggtcctgaaccaggtggcggatttgctggagcagtccctggaggatcgcttgagcccaggcggttgaggctgcagtgagccatgatcattccactgcatttcagcctgggggatacagtgagaccttgtctttaaaaaaaaatgctgcaaaaccaaaaataaatagccataatttgccatctttggagagattatggagataatctccttgtctattagccactagcatggctaattgatcattgattggacctcattacataagggggctgtggacgtctttggaatttgttaggggaaggctatgtggtaagctctactaaatgtatctgtacaaggatgaagaaaaaaaaataatactacttttggaggaaacttggaacaagaagagtacatagtttgatccattcctacggtcgagtctaatcaattccatttcttagtgtatgcatctaatgaggcttacaattggtaacccaaaagaagcaata

SEQ ID NO: 50161 - DNA, 603 bp, Homo Sapiens
atttggccctcgaggccaagaattcggcacgaggatagtaacatcacagagagataacccaaagagtgtgtaccttttaatttgatagaattagaagtagtatacaataccaactgcaaaatagtaagttttcttgccaaagaactaaatctgaatcaaatcaggcctctaggtctaacttcttctctatggaaaatacaggaggacatgtgaaatgacaccagaggagtataaccagcaaaattcaggatatggaaaattctacagaacaaaaggcctggtatcatcaacaatttaattgaaaaaaaagaaagggagaccaaacaagagttaacaaactttttctgtaaagggtgccagataaaagtagtttaggctttgcagaccatatagactctgtcacaaatgcaaaagcagtcgtagacagtacattaacaaatgagcatggctatgtctggtaaaagtttatttacaaagccaggtgtgaaggccagtttgtttacatgtggctttaaataaactctgtaaaggcaggttggagtttgctgaccctgaattaaaagatgcttaaaaagacttccaattgttttgtgccactgcact

SEQ ID NO: 50162 - DNA, 463 bp, Homo Sapiens
cagaagatagtgctgcacgaagtggaggcggatgtagcccaggttaggaactcagcgactgaagccctcttgtggctgaagagaggtctcaaatttttgaagggatttttgacagaagtgaaaaatggggaaaaggatatccagacagccctgaataacgcatatggtaaaacattgcggcaacaccatggctgggtagttcgaggggtttttgcgttagctttaagggcaactccatcctatgaagattttgtggccgcgttaaccgtaaaggaaggtgaccaccggaaagaagctttcagtattgggatgcagagggacctcagcctttacctccctgccatgaagaagcagatggccatactggacgctttataagaggtccatgggctggaatctgatgaggttgtatgatggctgctgggcagcacctcctaacttcagggaataaagtgctaaagtg

SEQ ID NO: 50163 - DNA, 841 bp, Homo Sapiens
ggtgtccaggaacgctaaggtgtattggttccattcaacagctgaaaagttggtaaagattatttactagaaataaaaatgaaagaacctactcaggtggaagctctccacacagagattttgaagcttttcccacaggctgcttggcaggaaagatattcctctttaatggcatgtaagttacctgtggaggatgtccaccctctgtctcaggcctttttcaaattaaaggcagtgaaacagaccttcaacctggaggaatacagcctctctcaggctaccttggagcaggtgttcttagaactctgtaaagagcaggcgctgggaaatgtgatgataaaattgatataacagttcgatggaaacttctcccacaggaagattcttaaaacgaagaacctcctaacattcaattttaagtcctactgcattattagtttccataattctacaagaatgtttccttttacttcagttaacaaaagaaaatattcaatagtttaaacatgcaacaatgattaaagttttcatttttaaaaatcttaggatgaaggaaacaaggaaatatagggaaaaagtagcagacaaaattaacaaactcagacatgttattcatcccccaacatgggtctattttgtgcttaaaaataattttcacaatccttaaatatcaggtttgtttggttatcatcactcaagttacctggagcctttccaataacatggtttctgctaattcaattttcagttttttaacttggtctcgatctattaggggctgcttaaagaactgtgaaggggccaacattttttaggcccgttccaggggggtgcatggatt

SEQ ID NO: 50164 - DNA, 1567 bp, Homo Sapiens
gcctcatccctgggttgtggtgtggacattgtgggtgtctccacaggagccccagggccacgaaagctggggtggcctctgccccttctggggttccttttcctgcacagctgctttctgactccacccacagctgggagcaggtgccggagccccggcctgcatggccctgtgaaggccactctgggcgtttgggtgggcgtgagtgccttcctctgctcccagcatgtggttttctccgttggccgcctcctggacctcctggtgcctgacatcccagagtctgtggagatcaaagtgaagcgggagtactacctggctaagcaggcactggctgagaatgaggttctttttggaacgaacggaacaaaggatgagcagcccgagggctcagagctcagctcccactggacacccttcacggttcccaaggccagccagctgcagcagtgacgcctggaaggacatctggtggtccttaggggagtggcccctcctgagccctgcgagcagcgtccttttcctcttccctcaggcagcggctgtgtgaaccgctggctgctgttgtgcctcatctctgggcacattgcctgcttccccccagcgccggcttctctcctcagagcgcctgtcactccatccccggcagggagggaccgtcagctcacaaggccctctttgtttcctgctcccagacataagcccaaggggcccctgcacccaagggaccctgtccctcggtggcctccccaggcccctggacacgacagttctcctcaggcaggtgggctttgtggtcctcgccgcccctggccacatcgccctctcctcttacacctggtgaccttcgaatgtttcagagcgcagggccgttctccctcgtgtcctctggacccacccgccccttcctgccctgtttgcgcagggacatcacccacatgccccagctctcggaccctgcagctctgtgtcccaggccacagcaaaggtctgttgaacccctccctccattcccagttatctgggtcctctggattcttctgtttcttgaatcaggctctgctttccccctagccactacaggcagcctctgacagtgccgctttacttgcattctgcagcaattacatgtgtccttttgatccttgcccaacttccctccctctcccagctcctggcccctggcccagggcccctcttgctgtttttacctctgttccttggggcctagtacccagcaagcacccaaatgggggaggttttgggatgagaggaggaaacgtgtatacctgtaacatctggtggctcttcccccagaagtttgtgttcatacataattgttttccacgctggatcataatgtgacgtgcagttctgccctgtgctggggagccacatgaagcttcccctggctaacttgctaccccgcagcaatcccagtgtggctgtctgcttgctaaaaaatggatctgtgctcatctgtattgatgtccttggagttctacaagtggaacttaagtgtcaaaaagaatatgtggtttttagggggatcctctagagtcgacct

SEQ ID NO: 50165 - DNA, 801 bp, Homo Sapiens
gggggcatatttccgagcagtggctccattggtggtgaagatggcagttccatttccatatgggttgttatttacaatctggatggcttcatccaatgtttctgtctccagaaccacaagaactggaccaaaaatctcctctttgtaacaggtcatatttggctgccaggagtgatgcatccagaaaagaagtcagctttttggattctgagtattttatgcttatttggtactttcacttactacacatcatttacgtggacaactttcatattactaatctcttttcatttcaaatcacctatttaaaaaaaaagtcctctctcaagtgtattccgtcttccaagttaccaatcatataaacaacttggaattcctatcaacaataaccacacttcctttaagggactgtatctttagttcatgacccatcatcagctgcctttttaatacctgaacgactagtttcatccaattgttatcaaaaagttacatgaaaatttattttttataaatccaatctatagtaaatataccaggataatttttctctttacagaaaccccatgctgttttctgtaacataaataatccattcttattcactcctttgcctcccaaatatgtctgtacgtttatattttgatatcaggtcgcagacactcaaaacatccttcaccatgcaattaatggttgttgctgataaacggatttttctgtatgggtctgtggcaagagatttcataatttctactgcacttacattcacaactgatgattcactattatagtaaggatatt

SEQ ID NO: 50166 - DNA, 710 bp, Homo Sapiens
gggggcgggggcagctgtgtcatctttctggggcccaggaggatctgggctggtttgtctggggagacagacaggatgttgtggagctggggtggaacctggtatggagggattaactcagtcatggcattctccgaccaaaaccacacctgtgtctctggcaggctggctggccttgctcccatccctagaactgctgcctctccctggatattccagctcaattagtgccacatatgggggaaacgacacatcccagtgggatttccaacactccccctccccatgcaacaaagcaacttacttctggagttctctcccaaggagaggacacagacacagttgtttgctgtgttatatgttagctccgaacaatggttctcatttggctaagcatcaaaatcacctagggagtcggtgcaaaacaaaatatcccagtcccctcccctgaaacactgactcaggaggtttggttgggggccaggagtctgttcctaaatattccaggtagttctggtgcaggtaagtggccctgagacagtatgttgggaaatgctgacgtaaaggtatcagggccgggcgctgtggctcatgactataatcccagctgtttgagaggccaatgcaggaggatggttgagctcaggagttcgagatcagcctgggtaacatagcgagaccccacctctgccaaaaaaaaaaaaaaaaaa

SEQ ID NO: 50167 - DNA, 364 bp, Homo Sapiens
  misc_feature (74)..(74): n is a, c, g, or t
  misc_feature (323)..(323): n is a, c, g, or t
  misc_feature (331)..(331): n is a, c, g, or t
gttgatgatgattctggtaatcatggcagtaagaataatagctaacatttaacaagttaattataattgttctnccatttgtgtgagtgggtactattatctccattttacagataagtaatttgagatataatttgaaggcactcaaccttgagtgtcttgctgagggttactgtatctagcaggtgatggagcttggatttgaacttgagtaattcgatattagattcatctttttgtacaccaatgtgcttttgttaattaaaaaaagtcggtggtggctaggcgtggtggctcacgcctgtaatcccagcactttgggnaggttgangtgggtggatcatgaggggccaggaggtttcaa

SEQ ID NO: 50168 - DNA, 574 bp, Homo Sapiens
ctcagcttccccagtagctgggaccacaggtgcccgccaccacacccaactaatttttgtatttttagtagagacagggtttcaccatgttggccaggctgctctcaaacccctgacctcaaatgatgtgcctgcttcagcctcccacagtgctgggattacaggcatgggccaccacgcctagcctcacgctcctttctgatcttcactaagaacaaaagaagcagcaacttgcaagggcggcctttcccactggtccatctggttttctctccaggggtcttgcaaaattcctgacgagataagcagttatgtkacctcacgtgcaaagccaccaacagccactsagaaaagacgcaccagcycagaagtgcagaactgcagtyactgcacgttttcatctctagggaccagaaccaaacccaccctttctacttccaagacttattttcacatgtrgggaggttaatctaggaatgactcgtttaaggcctattttcatgatttctttgtagcatttggtgcttgacgtattattgtcctttgattccaaataatatgtttccttccctca

SEQ ID NO: 50169 - DNA, 851 bp, Homo Sapiens
tctagcgaggtgacagcgtagaacaagctctatgcaccccccacctggggtctggcttctccatctccacacccccttgaggggcttctgtctccccctgccccttcgatcgcaggaggcagtgcctggccggggtcgcaggcacctgtcaccccagctcctcactcctcacccactcacatccagtccgtttgtaaaatacacccaggatgagacctgcacgcagtggctcacagcagcacgatttgtgacagcccgaggcggagaacaccgaacacccagtgaaggtgaggggatcagcacggcgcggccacccacgcacccacgcgctggaatgagactcagccacaaggaggtgcgaagctctgacccaggccacagtgcggatgcaccttgaggatgtcacgctcagtgagagacaccagacacagaagggtacgctgtgatcccacttctatgaaatgtccaggacagaccaatccacagaatcagggagaggattcgtgggtgccgggactggggagggggacctgggggtgactaggtgacataatggggacagggctgccttctgggtgatgagaatgttctggaatcagatgggatggctgcacggcgtggtgaaagtactgaacgccacctcactgtaagacggtagaattttgtattttacccacattaaccaaaccaaaccaaaaccaaacccaaaacccaaaaaaaaaaaaaagaaacatcttccaagcggctgggatcccgggcccataaaggggccctggatccctttcgaaggggggggggcccccgggtaacccaggcctttttggtttccccctttttagggtgaaagggga

SEQ ID NO: 50170 - DNA, 908 bp, Homo Sapiens
acgccaaggagctgaaggagcacgtagcgcggcgcgagcgggccgtgcgggaggtgctggtgcgagcactaccggtggaggagctgcgcgtctattgcgccctgctggcgggcaaggccgccgtcctggcccagcagcgcaacctggacgagcgcatccgcctccttcaggaccaactggacgccatcagggacgaccttggccatcatgccccgtctcccagcccggcgcggcccccagggacctgtcctccagttcagccgcccttccctcttctccttacatagttataggtggagagggtggggtgcaccgcccctatctctcacccacgtaagtggggtgatgctgatttagtctctgcttttcccttgagggattggggaggacccagtccaggcctttctaagatactcctccagccgggcgcggtggctcacgcctgtaatcccagcactttgggaggccgaggcgggcggatcacaaggtcaggagatcgagaccatcctggctaacacggtgaaaccccgtctctactaaaaatataaaaaattacccgggcgtggtggcgggtgcctgtattgccagctactcggaaggctgaggcaggagaatggcgtgaacctgagaggtggagcttccagtgaatggacatcgcgccaccgaactccagactgggcgaccagagaagactccgcctcacaaatccccagaaataccccccgtaacccgggtatttctccaaaggggcctacggggcgctaaacaccgcgcctcgggccatatcccgcaaaaccgccccgcggaattacgccacccgcaccgctcccgcgcttccaagatataaaaaagaccgcccctacacaaccgcccccgcctcctgtggcaccgcctcacccacccgtcga

SEQ ID NO: 50171 - DNA, 693 bp, Homo Sapiens
  misc_feature (25)..(25): n is a, c, g, or t
cactgttggtttttattttgatttnctatactcatttttgaacatggaaatacagtggtgaaaccacctatgcaaaaatgataacagtgaggaaattatgacagtgaaagagatctgacctaactaactatctatcttgcctcgaaactgcccttggtcgttcctgagtgtgggccaagctaactttgggagaaatttactttataggttaaattataatagcccttcccaaaactaaacgattctcctgcctcagcctcccgagtagctgtctttataataccatcagccttatcatttattcgtcatgtatggattgtttcctatatccactatcataaaattatcatttgaaatatttttttatgaaaaaaaaaacacttctcagtgaaaaaacaagattacaagggggaataatatttattcagctaaaatagtacttcacaggaaatataggaaaagaaacactagttcagttttattccaaataatgtacttctaattatactcttgaatttattggataagaaggtctgaggtgggtctgaaattcatacatgaagtcaggaaaagaaaagaaacttagttctaccttgattacatatgttgttacaaattatcattataaaatgtttaaacaattagtatagtatatcttttgaataattgcttataatatgccttaccataaag

SEQ ID NO: 50172 - DNA, 465 bp, Homo Sapiens
  misc_feature (432)..(433): n is a, c, g, or t
  misc_feature (436)..(437): n is a, c, g, or t
  misc_feature (444)..(444): n is a, c, g, or t
  misc_feature (455)..(458): n is a, c, g, or t
ggggggcgggaggatcgcttgagcctgggagtttgaggctgcagcgagccgtgattgcgctactgcattccagcctgggtgacagagtgacggtctcaaaaaaaaaaaaaaaaaaaaaagcacaccagtgtcttccatttctcttttaatcataatcatgctttaaaaaataccctcgagcatatggagcaaatttaagataattgttccttttctgctaattcattattactgtcatatctaggtctgtttctgtcgactgtggaccacttatgtgcgatccgtggaccacttgcgtgcgatctgtcggccgacgatgagcttgttcggatgtagctccatcgtaagtcgaggagcatctgtgatttgtcctctgcttatgggatatgtttttccgctactgagtctgtgtagtaaatttttgactacgannaannaaaaaanaaaaaaaaaannnncccttgt

SEQ ID NO: 50173 - DNA, 670 bp, Homo Sapiens
ccctgcctagaaaagacattttaataaccttggctgctaaggacaacattgatagaagccgtctctggctatagataagtagatctaatactagtttggatatctttagggtttagaatctaacctcaagaataagaaatacaagtacgaattggtgatgaagatgtattcgtattgtttgggattgggaggctttgcttattttttaaaaactattgaggtaaagggttaagctgtaacatacttaattgatttcttaccgtttttggctctgttttgctatatcccctaatttgttggttgtgctaatctttgtagaaagaggtcttgtatttgctgcatcgtaatgacatgagtactactttagttggtttaagttcaaatgaatgaaacaaatatttttcctttagttgattttaccctgatttaaccgagtgtttcgatgagtaaatatacagcttaaacataaaaaaaaaaaaaaaaaactcgcggcacgaggggggggcccggtacccaattcgccctaaagtgaggcggtattaaattccactggccggcggttttacaaccgtcggaactgggaaaaaccctggcggtacccaaattaaatggcttggaggaaaattccctctttgccaacttggggtaaaaacgaaaaaggcccgcaccg

SEQ ID NO: 50174 - DNA, 873 bp, Homo Sapiens
tagtgcagttatattagaatgcatatgtttttaaaatgctagtataactagatagtatataatgtacagtataaagaggaatatgtgctttgaaaagagtatactttttacttttatttatgtactagtagatgtaaaatttcacattgaaggtttatatatattggccaactcatatagaaattttatttataggaagctactactaaaaaaagtcactaactttgtgtacctataatccctaaattaaaattaaattttaattggctggctgtaatttgcattgagagaccttttactagtagctagtgttaggaagtgaacctaaaataagaaaatataatgatctgtgtttatcattagccttgtacaaatgtaaattactaatagtgatgttcttttgcaaggcatagaacatttgtatgaaaagacatttagtatgctttgaaaaaaactcagcttttagtttttttccattagaatactggaaaaccatatatctttttaaaaaatttatgtactcacagtctttccctgaagagaagattgaaaaagtctactgttcataaaccatgctaaacattttccttttagctagtttgaagttaggaacatactgggaaatataaaacagaaggtaccatgtcaggcagtggtatactgtgggtagtcttcgaattggatatttggggtattctgaaatatagaggaagggtttcacaaagttaaacaggttcaggcctaatgaacacttttttttcactcgaatgaaggagaagaggggagctttttggcgaaagagggttaagaagattttgttggactttgtgtggggggtgggatggggggcaaagaaaaaggaagtgtgaaaag

SEQ ID NO: 50175 - DNA, 628 bp, Homo Sapiens
  misc_feature (45)..(45): n is a, c, g, or t
tttcggctactattctcagtggtttagcttcggttactgtgaganttggtgaatattcagtagatggaacggtgatactcttccatgaagaaatagaagtaccaagagagcagatgagaatgaatttctagggaatattgacggggggagatctgaaggtaccttgaagaagaagctgacagtatttcaaatgaggattcagccacaaacagtagtgataatgaagaccctcaagtaaacattgtagaagaggaccctttaaattctggagatgatgttagtgaacaggatgtgccagacctgtttgacacggataatgtaattgtctgtcagtatgataagattcatcgaagcaagaacaaatggaaattctatttgaaagatggtgttatgtgttttggagggagagactatgtatttgcaaaagccattggtgatgcagagtggtaaaccttgtgagctcagtacatctattttgtgaacatcagttggactatattgcatattgtgaattcatttttattttgaatatagtccagcacagagctgttcaaatttttagttcactgtatggaatttaataaaattataattcagatgcagatacaattacacaaaaaaaaaaaaa

SEQ ID NO: 50176 - DNA, 654 bp, Homo Sapiens
ccacccccacgaagaggctacaacccttccagaggaggcaccttccaatgacgagaggacccctgaagaggaggcgccccccaacgagcagaggcctctgagagaggaggtgctccccaaagagggagtggcttccaaagaggaggtgaccctgaaagaggaattgccccctaaagaggaagtggctccaaaagaggaggtgccccccatagaaagagcctttgcccaaaaaacacgtcctatcaagccgcctccagactcccaagagacgctcgcgctcccctcgctggtcccgcaaaactacacggaaaacaagaatgaaggagttgatgtaacgtcgctgaggggcgaggtggagtctctaaggagggcgctggagctgatggaggtgcagctggagaggaagctgaccgacatctgggaggagctgaagagcgagaaggagcagcgccggcggctggaggtccaggtgatgcaggggacccagaagtcccagaccccgcgcgtcatccacacgcagacgcagacctactgagggtgggcctgggaagggaccgcggcctgacctggctggggccacccacgtccttgcacacgactttgggaaacgcgagaaagtaaactctgcctagcacggcgaaaaaaaaaaaaaaa

SEQ ID NO: 50177 - DNA, 876 bp, Homo Sapiens
cctttccccattgtgaaattctcttcatttctttagtatttataattttatttacagaatgctagggatttgtctattgggaagattaacagctaagaggatttcatgtgtttccattatttgttgtcaatctgtgtcattttgaatattgttcgactttcacttggttttataaccattggactccaaactgcaaaataagccatacgaggcagggtttcctggtttgtgagacatgtccttggtctatgccaatataaaagccatctccctagcttttgtttgtattcaggtaaatgaagtttatcttggaaaaatccaaaaaggcaaaaataaatggattttttttcttgctgctgaacagaagtaggtgaatggataggaaaaggtaactagaagttgtacgaagtagaaggctgtcttctaatgtgttttcttatcctagtttgctatccttattatttgtttgagaaaactcaaaaatggatattggctactcccttttaaaaaaaaagctaataatttaagctttctaataaaaaaaaggcttgaaaacctgatttccagaatttttaatcttgaaattgttttttgagtttcttgtagaactaaaccatttttatcattgacattaaggttttgaacccaaatctattgtatctcttcagccaccattaaggaaacaaatttatttaaaagtaagcatattagaaaaagacctgtattttgtgcaatagagtcctcagaaattgttataaaaactgtacagaagcacctaaaaagtaaatgtggttgaggcatcagaaaatttgactatgaaaacattattcaacactaatgatttatgagaaatgacaaggaaggaattaaagatgg

SEQ ID NO: 50178 - DNA, 781 bp, Homo Sapiens
ctcttttgacttaacgtcaagctttgggttgatgtgggtagggtagtgtcaaactgctttgagaggaatgggaccagttctgctgcctaagaaggtctgtctggatgtttataggcagcacctctgaagtggcctaaattcaccctgatctgatagttttcctgcttagaaagtgtgccttggccagatcagtatcccacatgggagtgttccctaggttgtagctgtgattgtttccagatgaccagattgtttttctgaaaatgagcatatttttagtcatgtcgattagctgttcttctacatcacattgttactctttctgatgatgattctagggttaacattggaaccatctcaaaataattacaaagttttagatgggtttacaatgtcttctaaacaatgtaatctaaaaataattgagtcagatgctaacgagatactgcaggcataactgctgtttttctgacaactgattgtgaaaccttaaaacctgcatacctcttcttacagtgaggagtatgcaaaatctggaaagatattctattttttttatataggtagataggatcgccatttatttcctatttagatatactgacattcatccatatgaaaatatgcaggtcattagcttactataatttacttttgacttaatggggcataaataaaactttcatagtacacatgaggtggatatttgatacacagaacatttgcggtgggctttctgtgggttagatgtaaagcccacatattttaatattcactattt

SEQ ID NO: 50179 - DNA, 506 bp, Homo Sapiens
gcgtcgacaaatacaaacaaatattgataacataaattgtactgcaaagcagtattcctcagcctttggttgggtctttgatatgtggtgatatcctgggtttcaactcttctacaaggttttcttatatataatgtaggatagatacagttgttctgtgatttgggatggttataaaattaaataaccaaatggaaaggcagaaagtgagaaatgttaagtgacattgtagtaccatataatattttagatcttgacttaggcatatacaaagagtatcttacttattttatacaaagtctacaatgttatgatgctacaaagaatgagttaagaatgagtaaacgctaggttttatggagactcataagaaaatataaagattttcgtcttactattcaagtctgaaatgcataaatgaagctttataattggtgtgcaaaaccagacatagaacctgcccttctggactctctggtcaagtgaagaaagagtaatcaagttaa

SEQ ID NO: 50180 - DNA, 652 bp, Homo Sapiens
ggtgaagctggttgtccgttacacaccgcgagtgctggaggagatggaggcccggttcgagaagatgcgctctgcccgccggcgccaacagcatcagagctactcgtgagcccctgggtcaccacacccctggggcctccacgggctccctttaaccccaggctcccaaaccaggccagtgcttactggatcttccagccctggcccctcctctgggatcctgacccttgacccttggcccaggctctcacctcaggctagtttggccaaatcccctggggagcccttagcttccttccatcccaagatacggaacctactgtggctgggatccctcagcccacttacctgggcccttgcctctgcaaccccagtcctgcccctcttgtctacccggagcctccctgatcccgggtcccttctccaccccccttgcaggtccttggagtctcgaggttgaaaccacagatctggacgttcacgtgcactctcttcctgtacagtatttattgttcctggcactttactttaaacgaatactttgacccctcaaaaccaaaacaacaaaaaaacaaacacaaaaataataaaacaccaaaacacacaccacccacccttctccccgggcaggcacccaacaccagcaacaaac

SEQ ID NO: 50181 - DNA, 274 bp, Homo Sapiens
ccaatgctttggccatgcaacagaagtggaattccctggatgaaggccgtcaccttaccttaaaccttttaagcaaggaaattgaactaagaaatggagaggtaaagaaactgaacctttcggcttcatgcttaatgtatttgttttctgctgctgcatcttggttataccattactgagtgcattttggtgtgcctatctctgatggatgattgattgcttttaaaacttataacagaaataaaattgtaatcccagaaaaaaaaaaaaaaag

SEQ ID NO: 50182 - DNA, 567 bp, Homo Sapiens
tcattgctaattcaaatgctgtgttaatggacctggacagtggtgatgttaagagaagagtacatttatttgaaacccagagaaggacaaaagaagaagatccaataattccctttagtgatggacccatcatctcaaaatggggtgcgatttccagatcttcccgtacaggttaccataccacagatcctgtccaggccactgcttcccaaggaagtgcgactaagcccatcagtgtatcagattatgtcccttatgtcaatgctgttgattcaaggtggagttcatatggcaacgaggccacatcatcagcacactatgttgaaagggacagattcattgttactgatttatctggtcatagaaagcattccagtactggggaccttttgagccttgaacttcagcaggccaagagcaactcattacttcttcagagagaggccaatgctttggccatgcaacagaagtggaattccctggatgaaggccgtcaccttaccttaaaccttttaagcaaggaaattgaactaagaaatggagagttacagagtgattatacagaag

SEQ ID NO: 50183 - DNA, 748 bp, Homo Sapiens
  misc_feature (691)..(691): n is a, c, g, or t
  misc_feature (699)..(699): n is a, c, g, or t
caagctgttagagatgcagccacggaaaccgtgacaactgccatgtcacaagaaaatacctgccagtcaacagagtttgccttctgccaggtggatgcctccatcgctctggccctggccctggccgtcctgtgtgatctgctccagcagtgggaccagttggcccctggactgcccatcctgctgggatggctgttgggagagagtgatgacctcgtggcctgtgtggagagcatgcatcaggtggaagaagactacctgtttgaaaaagcagaagtcaacttttgggccgagaccctgatctttgtgaaatacctctgcaagcacctcttctgtctcctctcaaagtccggctggcgtcccccaagccctgagatgctctgtcaccttcaaaggatggtgtcagagcagtgccacctcctgtctcagttcttcagagagcttccaccagctgctgagtttgtgaagacagtggagttcacaagactacgcattcaagaggaaaggactttggcttgcttgaggctgctggcctttttggaaggaaaggaaggggaagacaccctagttctcagtgtttgggactcttatgcagaatcgaggcagttaactcttccaagaacagaagcggcatgttgaagaaaatctgggggattgggatgggggaatgtgtggatttttcctccactanatctgcangaaacatgttgaacataaattcaaaaattttaaaaaaaaaaaaaaaaaa

SEQ ID NO: 50184 - DNA, 742 bp, Homo Sapiens
cgcgtccggaaaaatatcgattcccagccagggacactgtgtggagttcgcacactctccctatgtctccgggtgctccagtttcaaaccccaaagatgtatacattaggttaattgacatatctaaattatctcagtctgagtttgtgaggaagtgtgccctgcagtggaatggctcctaatcagggtttgttcccaccattgccctgagctgctaggatgcgctctgtccacccatggccctgtactggaataacagggtaaataattatcttatctgtttttattaatccgtcttaaatgtgtatatagctcagatttattttaatgtctgatattggaagcgtttggggtctttagaagtttgatgatgttgtgaccagacatttgccttaggaacttaactcttgtttgtatccattagtctatggtaaaattggttttgttatacatcatttcacttaaagttgcagttcctaagaacctattgatgatgttcagtgcagacttactgtacctttgggaatttaggctggagagacgtccatagccttaggtatatcatttataccagacattatgaagttattaaagtctcctatactctgtacaccagaactgtgtcttctgtaaactacctcaggatcccatctggttcttgagccaagaagtatgacttaatctgccccaaaaaattcacactgggagacattcccaattaatgatgatggtagctttttgg

SEQ ID NO: 50185 - DNA, 1244 bp, Homo Sapiens
  misc_feature (12)..(12): n is a, c, g, or t
  misc_feature (1069)..(1069): n is a, c, g, or t
aacaaaaccacnactttaaccccaccaaacacccatgttctaagtagcgaggcctgggtggcgttcccagcacgagggaccctataaatgtaccacctgtgataaagccttcagctgttccacttcccttcgttaccatggaagcattcatactggagagagaccctatgagtgtaaacagtgtggcaaagcctttagtcgtttgagttccctttgtaaccatagaagtactcataccggagagaaaccctatgaatgtaaacaatgtgatcaagccttcagtcgcctcagttcccttcacctccacgaaagaattcatactggagaaaaaccctatgaatgtaagaaatgcggtaaagcctacactcgttccagtcaccttactcgccatgaaagaagtcatgatatagaggctgggtgtagtgactcagcctataatcccagcactttgggaggccaaggcgtgtggattgcttgagcccaggagttcataaccagcctggattaaaacaatgtgaaacaacctgcgcaacatggtgaaaccctgtctttacaaaaaataaaataatgccgggcacggtggcttatgcctgtaatcccagcaactttggggaggcccgaggcggggaggcatccccgagggttaagagaatcgtatgacccattccttggccataccagcggacgcacaaccccccggtcctcttacctcaaaaattaccacaacaaaattttatctttggggtccgatggtttgggacacaaacacacaactggcggggatccaccacggtttaacctttccttgggaaaggggcttgtaaaagggccaaagggataaaaaatagtggccacttgggaaaaccgcccggtgggtaaaggacgtgggaaaacctcttggcccacgagggaaagaccccgtaagaaaattcctcacaacccaaacgttggggctaccttttccacacgccccctgggggcatgggaacacagaaaaactcgataacaaactttctgggtcccctccccacaagataagtacccgaggaattccgactatcaaatacanttttcccacacacaccctcccatttctcaccctgtggggcgctaaactataaacaagagagtaactacaagacacctttcaacaagggcataaccttacttcgtgcaagcgggccgcgagcatgccaaaagaacacggccaaacttggaaaatgggggcccccccctgtgtctcc

SEQ ID NO: 50186 - DNA, 941 bp, Homo Sapiens
aggagcgttcatgaaggtgttacaagcccggaagaactacacaagcactgagctgattgttgagccagaggagccctcagacagcagtggcatcaacttgtcaggctttgggagtgagcagctagacaccaatgacgagagtgattttatcagtacactaagttacatcttgccttatttctcagcggtaaacctagatgtgaaatcactgctactaccgttaattaaactgccaaccacaggaaacagcctggcaaagattcaaactgtaggccaaaaccggcagagagtgaagagagtcctcatgggcccaaggagcatccagaaaaggcacttcaaagaggtaggaaggcagagcatcaggagggaacagggtgcccaggcatctgtggagaacgctgccgaagaaaaaaggctcgggagtccagccccaagggaggtggaacagccccacacacagcaggggcctgagaagttagcgggaaacgccgtctacaccaagccttccttcacccaagagcataaggcagcagtctctgtgctgaaacccttctccaagggcgcgccttctacctccagccctgcaaaagccctaccacaggtgagagacagatggaaagacttaacccacgctatttccattttagaaagtgcaaaggctagagttacaaatacgaagacgtctaaacccatcgtacatgcccagaaaaaaatacccgctttcacaaaactccgctcccacgtggacccaccgaaacacccaaagtcaaaaaagagtccaaaaggccaaaaagaaaagttatcctgaatagactgatgcctcccaaaacaagctttccatttcttcttgcagcgaaagagccctcataaaatttccccctttcaccaaggggcctttttttcctccccttagggaggaccctgaaatccctccaagaaaa

SEQ ID NO: 50187 - DNA, 700 bp, Homo Sapiens
aagctcttagaagaattaaagaagcatccccagagtcagaggacgaagaggaggctttaccttgcacagactgggagaactaacaagtgacataacagaagaaaaatatcattcaagattggttctggttcttttggaaaatgacagtttaagcacttggttcctcagttggataacattagatccaaagttcattggttcagtggtgtgaagaaaggaagcacaattggcaggttatcactttccagtcgttccaatagatgatggttaacatgaattttacatgtgcaatgttcctgactgcaatgaagaaaaggccttctggagatttctgttttttaagcacattctccttccatccacatatttacatccttgtaatggccagttaagctagggcttgctgtaagttggaagaacactgggttgacagagatctactgtgagctgtattgggactgctttgagaaccatctttcaatgcactgaaaagtcatctgaaaaaatagcttcttccatatcagcttatattaaatactgtgacactctgagaaagtttatcatcatgatagctgtaagtcaggcattaaaatcaaatggaaatacacctaaaatgtccgcattactcatttccaaaggatttttcataaagatgttcagcaacatctgaaaagctgcatttatggagatacatctatta

SEQ ID NO: 50188 - DNA, 715 bp, Homo Sapiens
ccacgcgtccgagacgagtgagcctaaaaaaacactggccgatcacctgggaatgattgctgggggcacaggcatcacacccatgttgcagctcattcgccacatcaccaaggaccccagtgacaggaccaggatgtccctcatctttgccaaccagacagaggaggatatcttggtcagaaaagagcttgaagaaattgccaggactcacccagaccagttcgacctgtggtacaccctggacaggcctcccattggctggaagtacagctcaggcttcgttactgccgacatgatcaaggagcaccttcctcctccagcgaagtccacgctcatcctggtgtgtggcccgccaccactgatccagacggcggctcaccctaacctggagaagctgggttatacccaggacatgattttcacctactaacacctccatgtgctcagcaaatttgcatgtcccttttcatctgtttcagagtaagttcaatttcaccacggtaaactgggatgttttcaaaagtgccttgccatgtaccttggcgcacacactggttctcctcttttgggtgtgggcctaacaaaaagggctcaaggggctggagactggctgctggggcctccttgcttggaggctggaaagagctccatttcagtatctttctccgtggttttgtgaaataaactcaagtacaaagcaaaaaaaaaaaaaaag

SEQ ID NO: 50189 - DNA, 504 bp, Homo Sapiens
ggctgcctggcaggtggggcgctcgagagaactgcggctgcgtctaccagctccgggtccgccttctggatgtgtatgaaaaggaagtggtcaagttctcagcctcacctgacccggtccttcagtggactgagaggggctgccgacaggtctcccacgtcttcaccaactttggcaagggcatccgctacgtatcttttgagcagtacgggagagacgtgagttcctgggtggggcactacggcgcccttgtgacccactccagtgtgagggtcaggatccgtctgtcctagcgactggactactgcctgacgttgtcagtcaagaccagccttgcagccaggtgcagtggctcacacaaatgtggaatcccagcacttcaggaggccgaggtgggaggatcacttggagctcgggagttcaagaccagcctgggcaacatagtgaaaccgtctccacaaataatttttaaaaaattagccaggcatggtggtgccgcctgta

SEQ ID NO: 50190 - DNA, 707 bp, Homo Sapiens
  misc_feature (678)..(690): n is a, c, g, or t
  misc_feature (693)..(702): n is a, c, g, or t
gggtaaggggcgcattgcatctgttgatcactttgggtggaattgtcatctaaacattgtcccaatccatgaacatgaatgtctttctgtaggtgggttattaaaaaaaaaaaactacctatgtgaaaatgatacttgtatattaataaaaagtcaaataatatagcaatgtacaaaggaagaaagaacacattactccagatctcactactcattgataaccactgttaagtttctggtgaacatctttctgagcacctctcttacaattttacataaataggatccatttgtctcccatttaatatgtaatagttgttttctgatgtcaatgactagatttaaattatgtttgtctcatcatttacttaagcaaacttaccctgatagacatttaatttgttgtctgtgtactgtgagtaatttttattaatatcatagtattaatggccatccatagctattgtggactagtttcttctctgtcctagtagacctttaaaaagtttagggaaaactgtataattttgaatgcttaatgttgttgcttttgaataaagaaaagtacaaagtttttcatctaatcagttcctgcatatctgatgtactgtaatgcataaataatagatctttggtgtgataatttgtgaagcaataaagggcagagaacccgaaaannnnnnnnnnnnnaannnnnnnnnncttgt

SEQ ID NO: 50191 - DNA, 838 bp, Homo Sapiens
  misc_feature (797)..(797): n is a, c, g, or t
  misc_feature (799)..(799): n is a, c, g, or t
aaaattataccgaagatattttcccagtgacaccaccggagttagaagaaaccattcgagatgaaaaaataagaagacttaagcaggtgctgagagagaaagaagcagctcttgaagaaatgcgtaagaagatgcaccaaaaataaaatctcctgtaaagacttcagtgaaatagctgttttttaaaatatacttcagcattaataagttaattgtaggtgtgttctgaaagtgtctttgaatatgaagcttgttttttcatcagtcgattgtacaactttaaggaatacagaaaaggttgattcacatatgacttgtgaataatttacatggggtatctatacctttgtcttagatacctttttttggaaggataaattttatatttttctattattttaactagaattctccaagtttgaatatttgggcagggtttttgttattgtttgtatctttacctaaattgctcaggcattattccagcagtagatagtgactgtgtattactgaaattttacaattcaagagaggaaatcagctccaaacttagcttttccagtggatttgtatatgtacttgctttatctctttacccttaaaatgatgataccttgtattcaccattgttttttttaatgtcgtgaaataatatgtattatggcaacattatttaaacattcaaacatttctcaagaatgagcaacatttgtaactttacaatgtaattttatataatccaaaggtattttagaattcaggccattttgatggttttggttgcttataggggatgngntcccaggcaaatgctggcttttttttttttttgggggac

SEQ ID NO: 50192 - DNA, 607 bp, Homo Sapiens
gggctccctgagcgtttctaagggggccgcccggccttgtctttcggcagtggccgagccaccgccgcctgccgcgcgttccagagctgggcgctgcagctgcactgccgatcgccgtgtttggtcgatagaatccccagtgtgcccagagagtgcgacccctcgcccggcccggcgagccccgggcgtgaaccgagctgagggaggatggcagcctctggggtggagaagagcagcaagaagaagaccgagaagaaacttgctgctcgggaagaagctaaattgttggcgggtttcatgggcgtcatgaataacatgcggaaacagaaaacgttgtgtgacgtgatcctcatggtccaggaaagaaagatacctgctcatcgtgttgttcttgctgcagccagtcatttttttaacttaatgttcacaactaacatgcttgaatcaaagtcctttgaagtagaactcaaagatgctgaacctgatattattgaacaactggtggaatttgcttatactgctagaatttccgtgaatagcaacaatgttcagtctttgctggatgcagcaaaccaatatcagattgaacctgtgaagaaaatgtgtg

SEQ ID NO: 50193 - DNA, 266 bp, Homo Sapiens
ttcaaattgtcttggagaagcagaaaaagttgatcagagccttccagagtgtggtatgcttttcactgtgtgatgatccttagtggcacatgaatgaacgtccagatgtttgtgcagtagcccacccttatctgcaggatacgttccaagacccccagtgaatgcctgaaactgcagatagtactgaatcctatatatactgtgttttttatgatacatacatgcctatgatgaagtttaatttctaaattagacagtaaaagatt

SEQ ID NO: 50194 - DNA, 621 bp, Homo Sapiens
tgtgggggcatctcttgcggatcaaacccacgcagagcgtcttcatttccacgtgtctgtccttgtcaagcacacccctcgtgtccaggttcctcatgggcagtgctcggggtgacaaagaaggcgacattgactacagcaccgtgctcctcggcatgctggtgacgcaggacgtgcagctcgggctcttcatggccgtcatgccgactctcatacaggcgggcgccagtgcatcttctagcattgtcgtggaagttctccgaatcctggttttgattggtcagattcttttttcactagcggcggtttttcttttatgtcttgttataaagaagtatctcattggaccctattatcggaagctgcacatggaaagcaaggggaacaaagaaatcctgatcttgggaatatctgcctttatcttcttaatgttaacggtaattctcaaactatgtgttatttatgtaatctgatacataatctctttcactgaaatcttgtgatccattctttacctttccattttaataatggttaaaatatttgaaacatttactagtattttttattttatacacactttcttatactacccatcaaaatataatacagggagctaaa

SEQ ID NO: 50195 - DNA, 572 bp, Homo Sapiens
gctgtaacaacttgccggattagtgtatcgactctgtgcagttgaaaatctgcatagaacttttgactcctccaaaattataactactagtaacctgttgaccagaaaccttactgataacataaacagttaatacatactttttatgttacgtgtattctgtacaacaaagtaagctagacaaaagaaaatgttatttgaaaagtcataaggaagagaaaacatatttactgtttattaagtggaggtggttttcttaaaggtttacatccttgttgtctacacattgaatagactgaggaggaggaggggcaggaggggttttgctatctgaggagtgacagaggcagaagaaaatctgtgtattaacgaacctgcacagttcaaacttacatttttcaagggtcactgtgtgattggaatggacaatattttaggaaaatatgaataactaatattgacttacatagtaaaaaatttgaaattgaatatgcaatcaagcttctttagtgaagacaccaaatggtgatgacttcatagattagttctcccacactttcaagaaattgtcc

SEQ ID NO: 50196 - DNA, 583 bp, Homo Sapiens
  misc_feature (6)..(6): n is a, c, g, or t
  misc_feature (64)..(64): n is a, c, g, or t
tcgagnaggcccctgtgagcgctgtggtattgtccacactgcccagataccagacacttgcttnagaagtaacactgaaaaacgaaacgagtgatgatgaggctttgttactttgttaggtacgaatcacataagggagattgtatacaagttggagcaatatccatttattattttgtaactttacagttaaactagttttagtttaaaaagaaaaaatgcagggtgatttcttattattatatgttagcctgcatggttaaattcgacaacttgtaactctatgaacttagagtttactattttagcagctaaaaatgcatcacatattcatattgttcaataatgtcctttcatttgtttctgattgttttcatcctgatactgtagttcactgtagaaatgtggctgctgaaactcatttgattgtcatttttatctatcctatgttaaatggtttgtttttacaaaataataccttattttaattgaaacgtttatgcttttgccaacacatcttgtaacttaatatactagatgttaaggttgttaatgtacaaaaaaaaaaacccttatactcacc

SEQ ID NO: 50197 - DNA, 668 bp, Homo Sapiens
ccagagttaccttcgacggtgtctggcaatacagtaaagagagcactgatttcagccaggtttagcactaccctataattagtgcagtcttatgttataaaagaaagaagttaactatatttggggacaaaaaaatatttcaagagttgataaagattacctgtgcagtgcagagcactttaatgcaaccagctttcaagaaaaagccctatctagtacttgatgtcgatgtttttatttggctgagcaaaataaagccaatgggagaaagactattttacccttggcttttctccttaaacgtaatccagatgactttcctgttactaaacactgagcagcattacactacaatgcttctttggtttccaggaattttttttcaaatggggctgtttctggaaaaatgaaaaattctatgggacaatggcaatatcaacaatgaggaaaattactgaagaataagtttccataagtctcctacatagcagtgttatttatgtacagataagaaaaccatatgtcagccaaagattttatctcttcttctaacttttagtaggaggaaaaagggataataaaacccttcataaatcaagaaggcatcacttagaacgaaccccaaaaaaaatgcctaattaaattgtgaatcagggtgtgaagacaca

SEQ ID NO: 50198 - DNA, 625 bp, Homo Sapiens
gtccggaattcccgggatgatcagtgccctggaggaggagatctgccagatctggggtgagactaaatgccagaacgcagagtacaagcaattgctggacatcaagacacgcctggaggtggagatcgagacctaccgccgcctgctcgatggagagggaggtggttctagttttgcagaatttggtggtagaaactcaggatctgtaaacatgggatccagggatctggtatctggtgactcaagatctggaagctgttctggtcaaggacgagattcaagcaagactagagtgactaagactatcgtagaggagttggtggatggcaaggttgtctcgtctcaagtcagcagtatttctgaggtgaaagttaaataaggaacttccagatcaacaaaagtgtctttcaaagaaaaaaaaatcaagaaggacacaagcgaagaaatggcatcaatctaggcatctttctggataatttcaggaaaagcttcagtccagaaatggatgactagccaacttttctgcatcttcttatttcctcattagaatgctcttgaaatagctgaattaacaactttgctttaattgtttctatgcttcaataaatttacttttgcaagttaa

SEQ ID NO: 50199 - DNA, 528 bp, Homo Sapiens
cgatctagaggatctcctccataatgtgtgcccacttactgttcccccaaacttctgttcttataagctatgtcaaagctattactccaggttgtagtgcttttttttctactttactttgatctaagtcctgtctttccttcaaattttggctacttattgcatgaagctttttccaatatttccattcttggtggtaattttagtctaagaattcctgaagtactacctaattgaaacacacatttgatacttggatcatgttatcttgtattataacttattactccattaatatatcctcggccgggtgcagtggctcctgcctataatcccagcatgttgggaggccgaggtgggagggtcatttgaggccaggagttggagatcagccttggcaacatagtgagaccctgtctctacaaaaaaatttaaaaaattaaaaaaattaatatgtcctatttctttagcaaaatcattggctccttgaggggagagagcttgtcttatatgcccctttgtaattcc

SEQ ID NO: 50200 - DNA, 528 bp, Homo Sapiens
  misc_feature (118)..(118): n is a, c, g, or t
ttttttttttttttttttgcaggcaacagtcatgggtacaacaaattgtctctttggggaagaccaagaattattctgtcaaaactggggctagttgcacactgtgtgtgtgtgtgtngtgtgtgtgtgtatgtgcatgtgtgtgtgtgtgtgtttaaaggggtactctgttttcaccctgaaatcaaagatcccactcctttcccaaaactataaagggaagtgaaaaaaattcaaaagcacctagggtttatcttgtttatctcaaggaaatacgtgtgtgtatatgtagccacagcgcatacataaatggacacacacacacacacacacacacaccccaagtacataaacgcacactgactatggcagttcaaacacgaacgccatctggcgagaactggaatttgcaatgcccattctgagacaaatctactgaagtgaagggaatgtttttgtggagattagggttctgactgtgccgatttcggcttcgagcagaggacaacatcaaattgcaacctggga

SEQ ID NO: 50201 - DNA, 529 bp, Homo Sapiens
  misc_feature (11)..(11): n is a, c, g, or t
  misc_feature (13)..(13): n is a, c, g, or t
acaggctccananaccatggccataaagcactgacactgacacggccccagcaagcccttggggaagggcagccaccaccgttgctgctgctgtcacttactgttgctgttgatttaaggcagtacatactcaggtctcatagcttgtaaaacaaaggaaaaatgaaaagtcaccatcatcccagcaaaatgtaaggctcccctgctgcccagattggaatgtgctcgggagggccctggcagtctgggctccagcaggcctgggtgggcctgggtgcctgtgcgtctcacccactcccagggcgtgtggatgcaactcctcagggtcacactttgaataacaaggagctaatgagtagccttcccaaaaatgggggccaaatccctcaccttcctgagccctcccacggggagagggagggtcttttatggagcgtggtgcttcatgcttcatcggtcagaagggagcgtggtatccagaaacagggaaagcattgctgagtaacgtggcggagtgagcaggctccag

SEQ ID NO: 50202 - DNA, 691 bp, Homo Sapiens
aagataatgtaggtaaaacattattagaacagtgcttgagtgagtcagctctcaacaaacgttagctgtgattattgttattactattattacttttgctaccatctaagagctccagctgatttatggcagagccatgtctgatgtctgacagtccagtgtccatcccgtcaggaaccctcttcaacacagcgccgggtttatttccgcctctggaatgcagcactggggggattcctggcagtgccggaccatgtggaggacatgaaagcaggccgtgtggtggtcgccgacccccaagctggaggtagctgcatctggtactacgaggatgggctgctgaagaaccagatggcccccaccatgagcctacaggtgattggaccccctagcccaggctccaaggtggtgctgtgggccgagagccgcctgccgcgccagacgtggatcatcagtgaatcgggccacatctgcagccagatgttcgaaggccagatcctggacgtgaagggaggccggggctacgaccgggaccacgtggtgctatgggagccggatgaggacagggcatcccagatctggactatccacgtgctttgaaacttttcccctcaccctccagccctggaggcttttgctgggatgaatgtttttatagggtttttgtttaacataagctattttctaataa

SEQ ID NO: 50203 - DNA, 683 bp, Homo Sapiens
gccccaagccatggtcttttggctaccagatgaagatcgggctaatgtccaacgacgggcacctggaatgcgccagatatatggacgtcagggaggcaacagaacggagaggccccagtttcttaacctcccctatcaagatctgccactattggatatcaaggcattgcataaggataatgtctcggtgaacctatttgtagtgaacaagccctggctcttctctctgctttggtgtgcaggggtggattcggtcaccaccaacgactgccagctgctgcagcagatgcgttaccctatctggcttattacccctcaaacctacctaatcatatgggtcattaccaattgtgtttccaccatgctgcttttgtggaccttcctcctccaaaggagatttgttaagaagagagggaaaactggcttagaaacagcagtgctgctgacaaggatcaacaatttcatgatggagtgaatgccctgccctgcttccccacccaagccagtctacattgcccaaacagcaagggttggagagtggcttaagtggaatgcttcaggggtggtgggttgcaagtggggggagctttgccaacaggaggttttgaaccatgagggccctctgcccaggtgatggggcattcccctaagctgctatggaatctgctccctttggggttttg

SEQ ID NO: 50204 - DNA, 638 bp, Homo Sapiens
ttgaatttaggtgacactatagaagagctatgacgtcgcatgcacgcgtacgtaagcttggatcctctagagcggccgcctactactactaaattcgcggccgcgtcgaccataaagatgccatagaaccactaaattcattgtcctttgtcacctctcagccaataatagtcattgatatactctccataccacaaatttaaagttttttgtgaactgtacatgcaatagccaagtttattttaactttagtcattactggatcccagagattttctttctcttttttggcatatagattatttatgtcacttcagtatgcccagtccacagatgagatcttctgagggactgcttctggagccggccctcttgtgtgattgaattagtcagtgatggttctcaggactagattagattgttactcttaaaataattacttaaaaaaaaaaaaaaaaaacttccataacttgaaaattttgtggccaggtgtggtggctcatgcctgtaatcccagcactttgggaagccgaggtgggcggatcgctggaggtcaggagttcaagagcagcctggccaacatggtgaaaccctgtctctacttaaaatacaaaaattagccgggcatggtggcgcac

SEQ ID NO: 50205 - DNA, 435 bp, Homo Sapiens
tttttataataaactcaattttattcatttgaaggcagtattagatattcctttgatgaggaagaaaaattcatcttcaagttccaaatcttgctaccttgactgctggtgtaatttcccatctcatggagtcacagagttttcttgccaactgcagtgagttggcaaatgggaatgatcagtagcctcagtgtgttttctgatccactccatcctgtattatcatctgcgaataccgtttttcctttaaatgcaatgtgtctttcaaagctgacttgaatttctcacctttcgagttacctgccatttggactcacttatttggaggagatatgtaaagacccagcgtaatacctgtatgctcaataaaaagtatttgctggtactccttcctgcccgtcgtgtgacctgactgctctgggcttctgggggctc

SEQ ID NO: 50206 - DNA, 512 bp, Homo Sapiens
  misc_feature (508)..(508): n is a, c, g, or t
attttaaaatgttgcagggaggagaaaaattaggttccatgcaaagaaataggaatcagatggtattgagattttcagtagcaacaactgaataccacaatacagtgaagtagtgtcttccaaaagctgatggaaaattattttaaacacaaaatcctatatttagccaaacagtcaatcaagtgtaaggctaaataaaggcatttttcagtcatacctcgaaaaactgcctgtgtagggatatttcccctgcttccccactcaggcagctgctgggaatgtattccaccaaatgacgaagcaaaccaagaacaaagaagtgaaggatctagaaaatgggctccaacacgggaaggaagcaaagggagatcccacgcatcagccacacagtaggtcttgtgggcattcagtctagcccagaccgggagggtgaaagtctccaaggaaagaggtgtctcggaagaaatcaattactttcaatgtttgaacattaaatagcaatgacaangcaa

SEQ ID NO: 50207 - DNA, 933 bp, Homo Sapiens
ccacgcgtccggtattacagtgccacgttggaaaacgctacaggaagcatgacctatccacatctttccaagatagacactaacatgtcatgtcccaaacattagcacgtgggggttgagctctgtgcagtaatcgagattgggagaatttgggcagcgcgtgagaagtgctaagctacttgttttctcacttgagcccgggtaggctgtgttggccctcacttgggattctcagcagttacatgaaagttgtgctgataatctcttctcttgtaccaattttagtcaggcagaaaatggtaaacatgagggtgctcttgtgacttaatttttgttcaagggactaaattgcttatgtttattccctgtcagcggagtggagaatgtcattcatcaataaaccaaagccaatagctggagaattgagatctggttgaaagtggtttatggtttacatgctgtactatcctgaggaattgcgagatattgctgaggggaaaaaaaaaatgaccttttcttgaaatgtaacttgaaaacaaaataaaatgtggaacataatgtttaattagaattgtggtggtggtagtggaaggggataattgtaaataggaaacatgaatgttcatttttttctttaaagaattcttattaaatggctccctgccttttttttcttttttcctcatcagctctttcatggctgaattttgttttattcttcctaagactgaaggattgtgctggagtccagaagtcatttgtggtaacttggacatgaggggtccttcccatgtttttaactggaaaacccacctttgggtcacattccaaggtattgacaccgctggtttcttctggaggattttaaaccaatattttttggggttttgggcccttttccccgttttttttttttttcccaaaaataaggac

SEQ ID NO: 50208 - DNA, 691 bp, Homo Sapiens
ctgccgtgatttagaggaaacaaggacacagcgggggctgcccccacctggtgcacgctgcctcaaggccttctgttgctgcccacgcctccctgggcagtgcttctaaaggtgccagagcctcaccacagtgccactctggctgggcaggggcttccctcagcttcccagagtgcacatctgaaggtgcctaccctgggtgaggggctggtgggcaggaaggtaaaggggagaccatctgagcagccgccacccgctccccagtgcctctgtatggccctatccagggacacccatgggcatgcgcacatggcaatcctgaccaccacctgagcacaggtgccccctcgggaccaccccccttctctttgtttccatcagaataaccaaaagcatttaaacgtgttacctttctccatccatctagactccagaaacaaaaatcaacacaaatctttattttttgatttaaaagatataacaaaaaattatggggagagtattcattatggcaggtgtctgtctgtaagaaaaaaatatatatctctatgtcatatagcgtgttagcaggtttattttttaaatgaaaggtaagaaagaaattgatttgaaatatataccacaagaagtcccgtgtcctgtcaaactgtcagtattttataaataaacttttttttttggaaaaaaaaaa

SEQ ID NO: 50209 - DNA, 649 bp, Homo Sapiens
gccggcttccgcccgcagcccgaggggtctgggcgcgctgaagaccccttcggctgctgggccaacgcccccacccttggtcacctactcctgccgccgagcggttcgcgggaggtggcctcgggggtcgtagctactcaccggcggggcgctccgagtccatctgccccgtagcccggcagccggggcgggagggctgcgagcccggggcgcggtccgcctgaggcctgagacccggggccgcctgcgctcagggccgcggtgccggcgcgcgggagcctggcggggacggcgcggtcagtgttcggctcctccgcagtgactcaccagcgtcctgaagcttttgatcaccattggctgggaaggaaaaacagaatcagctgttccctgcgaaaggtatcatatgtttcttacaaagtggaggtttgtggcagccctgcatggagcaagtctgtcagcaccatctttctaacagtatgtgctcacttcatgtctctctcacatttggtaattcttggaatgtttccgttattacatcagtcatagtgatctgtgattagtgatctttgatcattacctgtcatacttgccttgggggggcaccatgaaccacccctatataagacagcaaactgccgtcgatacaatg

SEQ ID NO: 50210 - DNA, 847 bp, Homo Sapiens
  misc_feature (820)..(820): n is a, c, g, or t
tggcaggggagaacttcgctacgccgttccacgggcacgtgggccgcggcgccttcagcgacgtgtacgagcccgcggaggacacgtttctgcttttggacgcgctcgaggcagcggctgccgaactggcaggagtggaaatatgcctggaagtagggtcagggtctggtgtagtatctgcattcctagcctctatgataggccctcaggctttgtacatgtgcactgatatcaaccctgaggcagcagcttgtaccctagagacagcacgctgtaacaaagttcacattcaaccagttattacagatttggtcaaaggcttgctaccaagattgaccgaaaaagttgatcttctggtgtttaatcccccctatgtagtgactccacctcaagaggtaggaagtcacggaatagaggcagcttgggctggtggcagaaatggtcgggaagtcatggacaggttttttcccctggttccagatctcctttcaccaagaggattattctatttagttaccattaaagaaaacaacccagaagaaattttgaaaataatgaagacaaaaggtctgcaaggaaccactgcactttccagacaagcaggccaagaaactctttcagtcctcaagttcaccaagtcttagcatacagtgtgtgcccagaactactggaaactgaatgcatttagcatattttgaaactggagtcattcattaggtaacaaggaattttatcagaaatttgtcattaaaaaaaggtagaaaggtggaacattcccttttcagtcaggcctatagaaattatttgcacaagtaccagnaaaatatgggggattaatatttataga

SEQ ID NO: 50211 - DNA, 610 bp, Homo Sapiens
gcacgagtcaatttgtaaagatgactttagcccaattaataggatagcttatcctgtggtgcagatggccacccagtcaggaaagaatgtatatttgacggtcaccaaggaatctgggaacagcatcgtgctcttgtttaaaatgatcagcaccagggcggccagcgggctctaccgagcgataacagagacgcacgcattctacaggtgtgacacagtgaccagcgccgtgatgatgcagtatagccgtgacttgaagggccacttggcatctctgtttctgaatgaaaacattaaccttggcaagaaatatgtctttgatattaaaagaacatcaaaggaggtgtatgaccatgccaggagggctctgtacaatgctggcgttgtggacctcgtttcaagaagcaaccagagcccttcacactcgcctctgaagtcctcagaaagcagcatgaactgcagcagctgcgagggcctcagctgccagcagacccgggtgctgcaggagaagctacgcaagctgaaggaagccatgctgtgcatggtgtgctgcgaggaggagatcaactccaccttctgtccctgtggccacactgtgtgctgtgagagc

SEQ ID NO: 50212 - DNA, 858 bp, Homo Sapiens
  misc_feature (812)..(812): n is a, c, g, or t
tccccaggaccaagaaacagccccagcctgcaacccccccaccctgggagcagcactcccaccctggccagtcgagggatcttagggctatcccgacagagtcatgctcgagccctgagtgaccccaccacgcctctgtgacctggagaagatccagaacttgcgtgcagcttctcctctcagcacactttgggctgggatggcagtggggcataatggagccctgggcgatcgctgaatttcttccctctgcttcctggacacagaggaggtctaacgaccagagtattgccctgccaccactatctctagtctccctagcttggtgccttctcctgcaggagtcagagcagccacattgcttgccttcataccctggaggtggggaagttatccctcttccggtgctttcccatcctgggccactgtatccaggacatcactcccatgccagccctccctggcagcccatgttctcctcttttctcaccccctgactttccctgagaagaatcatctctgccaggtcaactggagtccctggtgactccattctgaggtgtcacaagcaatgaagctatgcaaacaataggagggtgtgacaggggaaccgtagactttatatatgtaattactgttattataatactattgttatattaaatgtatttactcacactttgcctctaaggagctagagtagtcctctggattaaggtgataaataacttgagcactttcccctcaccagcccttaactagaacacagaaaataaaaccaagactggaaaggtcccctctacccctcccanggcccagagctagctggactgtggtattgaaccctggggagaaatg

SEQ ID NO: 50213 - DNA, 576 bp, Homo Sapiens
ctatttgcagagagccaatatagcaacagaggatttaatatcttgccaaaaaatacaaaatctgttcccctttaagcatgacactctatcctttcttgtggatcttgctaaaaggaaaatatagctttaaactcccctattccttctgttgaaagcttaagaatctttttcaaatgagctatgtatggttttgtggtattttatgtttccaaaagaaaatggctacatgaaaaatctgtccagtgttatcatttttcttacaaaaaatacttctagttatggttgtattaattaatttgattgtgataatgattacacaatgtttacctatatcaaatcatcatatcgtataccttaaatatatataacttttatgtgtcaattataactcagtaagtctgggaaaatatcgttaagtcaaagattagagtcaacagaaataaagaaaaatcatactttgataacttcaggactaatcaaggatcaatgggtgacatgatatcatgctatgtgccattttgtgttaaacaaattacaccaacaataaaaaaaattggcttcaaaaaaaaaaaaaaa

SEQ ID NO: 50214 - DNA, 787 bp, Homo Sapiens
gttcttaaatatttatcgaattaacccagaattttctaaactaaatttagcatgtaccactatttgttattcttgccaccaccccccattcccctagctcctcacactacctgccaatgtcatcctaaggtacatgtggatacctaggttgtagaaatgctggactacacaattgctgagttactctctggctgtagattatatgatgaggtattttacaatcagcttttgaaggtcaacattgaataatgctcttttaaaaaaattatatcctcagtgtttttccatggaaaaataagtgaaaattcttttaagagttgctgtttggtgaaaagaacaaacatgactttcaaagaaaatgttttactatcaccaaaatctcccaagtgaataagtaccacagaaattacttattgcacctgtatctgccattggctgtgaaaaaggctgcaaaaagtagggctgaaagggaaactttagaaactaatactctgaaagatgttttcctatggattaaatttagtgtctttctgaaagttgggggcaaattcccagatactaatagcatctttgctaagtgtctgattatcttctatcccctaggaggaaagagtggtccatgttgctgtaactactactatgagtgcttatgctgtattgtttttaaagagtaaaacctttaagtactaatagttgtcttttctcattcacaggagcagaaaggtgcagttttttattctcttagccttttttttttcctgtatttcccacaaatctagaaataatt

SEQ ID NO: 50215 - DNA, 537 bp, Homo Sapiens
  misc_feature (464)..(464): n is a, c, g, or t
  misc_feature (470)..(470): n is a, c, g, or t
  misc_feature (473)..(473): n is a, c, g, or t
  misc_feature (481)..(481): n is a, c, g, or t
  misc_feature (492)..(492): n is a, c, g, or t
  misc_feature (511)..(511): n is a, c, g, or t
  misc_feature (518)..(518): n is a, c, g, or t
  misc_feature (531)..(531): n is a, c, g, or t
  misc_feature (535)..(535): n is a, c, g, or t
gaacatggttcaagcaagtccttgttaaggcaaactattgatatttcattaattttaaatttacttaaaatgtggttttaaattctatttaaacatttggattaagcatattactctggagctttgtattattctttaaaaatgaatcttgcttcatttgatgaatttcatgtcacaaagcttctctcaagagctctcgtagtggcctgtcaaccactttcggagaatgagccaggtcagtcactgggaggacctgtgaaagaaagttggtcactgagtgccttggggactggcaaaacattccagaatgaagagagctgtctggggagagcccttcttcccttctccacctagtgaagggagaacagaaggggagtcctctcttcccacaagtccattctgccttcaaagtgtaagttctcatgtcattatggatttggagtttgtcagttttttcttaaaantccacnccngggtgtcntgtgtcctgtnctgttctgtttcctggttnccccttngatcctctctctntctntc

SEQ ID NO: 50216 - DNA, 343 bp, Homo Sapiens
gcacgagataaaatcctcgaaagtttagaaactaggttttagtagtaacggagctagaatcatcttcgggcttattcctgctagttgttccatatttctagatttcatcttgaattttgaaaactgatttaagaatatatttagtattattattagtaagggaatacgcaatccagtttcaattttattcagaagtaggtcacctaattctagaaaatggttattagtctagtgtcgcttagcaaggtacttaaaagaaaatctgcacatatccttgtgctgcccttcttaaaaacagaaaacaaaaagtgtaagatcatcattgcttcccacataggaaaaa

SEQ ID NO: 50217 - DNA, 666 bp, Homo Sapiens
ttgtgttattttgattgtattattgttattttattattattattgttataattttattttgttgtcctggtcttaaactactcttggttgtcttcctaagggtgtttgttgacctcaagcaagaagagtctgcagttcactgatgtttcagatttctactgaagtcaatatgttattacttttatataactttatttgagattgagttaaatcatagcaatcaaatgacttttgaaacgcattcatcacaagagacagcttagaagaatgttctcttggggcttaaagatgcaatatcgacttttatttggtttctcaaattcaatgtgatacaaatatttactggtgaaaggtaccacaaaagtgctttatgcttcctatggggaagggactctgtaacataaacttgagttttgtaatttatacaaggacttaaatatataaacaataattttcttcatctttagaatttttaaagtaaatgaatacctatgattgtatgtttattttttaaaaaaagttttaacaaattgaggagtttgttccacaagcaaccggtactggtaccctggtcttatgacaattatgagctccttcacaatgtctgctataaaatgcgaatgaactttattttctcaggcaatatgatttatttaaatattcatg

SEQ ID NO: 50218 - DNA, 668 bp, Homo Sapiens
gggaaggcaaaaaatgcagtgctgtttggaagtgtaatgattttatcacatggtgaatgactactaagagtaatgattatatcacattgtgaatgactacttgccacagtaaaaatacatgaagaatgtgttaggtttaaacgtcgtttctttcttctaaaaaatatttggttagtaccttcactgagcaatagtggaaaaataaaaaaataagtaaacagaaaaaactaaagttgtattttcccacaaatatagtatgaatgaggtcatattaaagaacagcaactgttaatgtttgttcacaaattcagaaatctaataggaaaacatgatactttcaatgtgccaaaactaaaccttagtatacaactaaaaatctcctgccttcttgcctacctgtcttccctcttctgttacagaatttgttcctcaaagtagatgcaatgtttctaacacaatttaaattaggaaatatatatgaatgtcgttgaagtctattttgagactgctaaagctattaattgatactgtgtttttatgcccaaatcccagtatgtttatgtaccaataatgactcttacccagcgcatgtctttatcagtgtgtactcgtgacgatttgtgtgaaaatagacttgatgttttataattaataccatttacaatgtt

SEQ ID NO: 50219 - DNA, 442 bp, Homo Sapiens
actcgactttttttcagctgtgaccattcctgggagctctttgagcctttctgtctcatttggaaccagggggaaccaggaagagggctcctggcctctctgtgtcctctgcagtgggggttgtggggggcgcagcatccacgccttgctgcccttctttcatgaagtctgttttttaagtgctggttcccccgaatattttatgcagaggagggaaaatttatagtggcaattattttctcacagtctggtgagcaggcaattaattaggagtaagggggcctagtagagcgtggcgtgtggcagaatcgcaccgccccggctccccagcccaccgccatgcagggctcgcgtgcgggaaaactaatatgccggcgtttaagcctgtgcccctctgctgggtgtaactgctctgaaataaatgatctgacattgtggaaaa

SEQ ID NO: 50220 - DNA, 366 bp, Homo Sapiens
ctactactactaaattcgcggcccgtcgactcatgctgctcctgagttctgtcttccgacttcttttcttgagattctctctctgcaggagtgctaatcactgtggcttctgttaagaattcccaacttgatctctctcctgatgctgctggaaggatggaaccgtcatctcctccatctgaatcactgacaggcattcttagatttttaaatcaggatgctgaaaactatctttgtcccttacctccaccttctttttgtacctcccagacccaggcccacctctcacgtttataaggtctaggtcaagaatacaaatggagccctacataccattaggaagggaaaaaagtcgacgcggccggg

SEQ ID NO: 50221 - DNA, 532 bp, Homo Sapiens
aataattgtaacaggcataagtgaataacactctgctgtaacgaagaagagctttgtggtgataattttgtatcttggttgcagtggtgcttatacaaatctacacaagtgataaaatgacacagaactatatacacacattgtaccaatttcaatttcctggttttgacattatagtataattatgtaagatggaaccattggggaaaactgggtgaagggtacccaggaccactctgtaccatctttgtaacttcctgtgaatttataataatttcaaaataaaacaagttaaaaaaaaaacccactatgctataagttaggccatctaaaacagattattaaagaggttcatgttaaaaggcatttataattatttttaattatctaagttttaatacaagaacgatttccctgcataattttagtacttgaataagtatgcagcagaactccaactatcttttttcctgttttttttaaatttgtaagtaattttataaaatccacctcctccaaaaaaaaaaaaaaa

SEQ ID NO: 50222 - DNA, 803 bp, Homo Sapiens
  misc_feature (734)..(734): n is a, c, g, or t
  misc_feature (796)..(796): n is a, c, g, or t
  misc_feature (801)..(801): n is a, c, g, or t
tctggctcagaggaggtacaagattgtagcaaaaaatttgagagctgggccaccctggggcctgccggaccaggggcatactggggccagtgtgcactctctgaagggacaactgtgatttattctggctaatcattgtcgtgtaggatcacaggctgattgctagcacatttgccagtttttcaaaagaaattagaacctatatttttaatcaaaagtcttttgatttgtaaatagtggcaaccaattcatatatgtcttcaatgtatagtgaaatctggtcagtaggctgcccctgctctctctgacgtagaacataccgattcaccctttgttttctgttcagagcagactacttcaaattaaggaaaagagtacaaaaccaacaacaaactctccatggcccttgaggttatcttcctcttccagtggcttccagtgggaatcagaacaggtcaggcagtctcctctttgccactaaatgctttgcccaaagaaagaccagatttcatttggctttgggatcaaagctggggctggagggtggaggtgtcaagccaggccaggcaaagggagatttgaagccagagcaggtgggcgcatctcccaggaaaccctgcatcattctttcctggtgattctttccttctttgttatggttcacatgagtctatggagtgctcattctacattctccgttcttatcttcatcctatgcaactttagaccgctgntttttaaaagtgatttgatttgggctgtaacctttttttattggtggtagctttgactttgnaatgngt

SEQ ID NO: 50223 - DNA, 901 bp, Homo Sapiens
agctgccacatccctggacacactcgtttcctcacaaagccaagcccgctgcagctgccacatccctggacacacttggttcctcacaaagccaagccggctgcagctgccacatccctgggtttatgatgcagcaggtgcttttttcaagacaggaatcaaagtgttaggaacatggcagaaaggtgacacctggagaccaaatgcagggtaaggagtactgcagaggtcacagggaagtcacagaacagtaatacgctagcaggggcatggggcgtgaagaacagaagacaggaagcgtttcagagactccaaagaagaaatcagggccaaccacagcttcccgagtcattcaccaggtggcaccactgccttcatttcagcttccggccactgggaggcgctgctcgaaagggtttgccctgagacaccaagaagaagctgcgggaaggacagcaggggccctggggttttagcctctggcccaggagttatgtgtccataaccaaagggagcacagtctgcacccagctctcatcccatcagagctgctgcgactcccgcaggttcttccagaactggtttagcttgcctgcaggatcaggaaagtttgagaaaagcatctgcaaaatactaaagagcagagcttacttcattgtctgtccccaccccatcccaggtcaccacctggctgaacccaggtccccgacccaaaacaacccctcccaagtccctaactccctcacttggacttgagacccttcacaaacccagcagcgctccgcctcccaacttgacatcatgctttctgggaaacttccccgtggtgtcccactttcccacaccttggtgccgctgggaggcaccttccgggcctctaacatgcctggtacggttcccc

SEQ ID NO: 50224 - DNA, 1612 bp, Homo Sapiens
aagacagtgtcttgcactccagcctggggcgacagagcgagactccaaaaagaaaaaaaaagcttactataggaaggcaatacttacagatctgatgggataggcttacactttgttgaatgagcaaagatctttattcaacaaagtcttgaagtgcttgaaagtttcacattttcttttttgtacctatttctgtaccttgctaattcttcagagtgatgtggaatatcatttatccaatgttacctgaaaacatccccctaggggagaaagtgagagtcacctttgtacaggagtgtgttcaaaagaatgagaaaggtttttttctagacccttcaaccagcatcttttctagtctgcctgagttaggtcctgcacctgttcctaaccaatacagtctgtccaggctgatctcaaactcctggcctcaagccgtcctctacctaggcctcctaaagtactaggactacgtgagagtgccaccatgcctggcttgataatacaaatttaaaaaacagcgtagcgactgtttacacagcatttacactgttttaggttattataagtaatgtagagatgatttaggtatatggaaggatatgcatagattatatgcaaatactataccattttatataagggacttcagtgtcctcggattttagtgccacagaggtcttgaaagcaatgcccttcagatgctgtgggacaactgtatatgttatttgattttctagctattacagtgaaaaaagagtacttttttacttcttaaatctgaattattagtacctactagtgtatgaaagcagccctttagagaactgctgaatctgagaaatctgagttggatatatataaatttgcagtttgacacatcaagagtgtgtaacacgtgtgttaagtggttgatctttctcagtaatctaatttggccaatttatttttagcttgattaagataaatagtaaaatacttggtgaattttagggtgattagtataagctggattcagatgattttttatttttaacttctttttaaattgttttcctgtcttattcaggccctgaatattttcctcctctttatattagcaattaccaacttgtattccttctaatcagtgttttttcttgtattttactgctccctcttatctaaatccaccatcaattagtgtcttaaaagattttgctgctttagccactgtaatggggtttggagactggcagaagaataaaaccaaataagtatgttttagataaatgttaatatgtatatattgagtcacaaggtattaatctgatattagcaaatcatgacttcataccatgccattatattaatatagtaatcttaggtttagcattgacttctgatttctagaacctcactctatctgtaaattgttcattccagttataaaagtaatgaagtatatgaaaatgtttctgttgtcatttgtctatatcagaatgcataagttatgagaaaagcgtgctttttgttttttagtgtgtatcatttaacctcttgacagtcattaggttgacagtgttcacatctgagagaacctgatttaggttcttgaaagaattttgtgaaggcc

SEQ ID NO: 50225 - DNA, 608 bp, Homo Sapiens
cctgacatgagttcttatctgtttggtacttctagtgcgtgagtttgaacaagttaattaacttctcttgagccttagtcttctcatctgtaacatgaagataataccagcgtatcctgccttatagaattgaatagactctgagctaaaaagtaaagtgtttagcactatactttttagttcagcacccagtaaatatgttttttgtagaaggaatgccttcctggggaggggatgttaacataatgcttagcggtaggaaccaggcctcttccattttaatttcatcccaaatgcatatttgtgaggaaggactgaacccctaacaaatctcttatctgaaggctccaattttccaatattaagttagctaatttaggtctaggcacaatggctcattcctgtaatctcaacactttgggaggccaaggcgtgaggatcacctgaggcgaggagttcaagactggcctgggcaacatagaccctatccctatagaaagtaaagtaattaaaacattagctggcatggtgtcacgcacctatattcccagctacaattgaaggctgagctgggaggatcacttgagcctgggagttcagtgggagaa

SEQ ID NO: 50226 - DNA, 567 bp, Homo Sapiens
ctctcacgacaaggcacaggcaggcagcacgtggggccagttcatagccgggaccaccccaagctcttggggaggtgcctcagccaccccagtgtagattctgatccaagttggaggtgtagggcctggaggtccaaagtgggaaggagggccttccccaagtccttagagtcacacaggcagggaacaggcaggagatggtggcttttcaggttttcagagtctcacttgatccctattttgctggtcttgagattaggaatctctgtaaacctgctgattgttaatttagccgtatgttcactgcctaaggagtcagctctgttcagattctcagttgaatcgtttttatctatacgtgattgttattaagacatcgggtaaatataggcctggcgcggtggctcacacctgtaatcccagcactttgggaggccaaggcgggtggatcacgaggtcacaagattgagaccatcctggccaatatggtgaaaccccgtctctactgaaaatacaaaaattagctggatgtggcggcatgcgcctatagtcccagctactcgggag

SEQ ID NO: 50227 - DNA, 725 bp, Homo Sapiens
acatgaaagagaaaagtgctctgaaacagaacaaggaggtgttggaattggccttctccatcctgtatgaccctgatgagaccttaaacttcatcgcacctaataaatatgagtactgcatctggattgacggcctcagtgcccttctggggaaggacatgtccagtgagctgaccaagagtgacctggacaccctgctgagcatggagatgaagctgcggctcctggacctggagaacatccagattcccgaagccccaccccccatccccaaggagcccagcagctatgactttgtctatcactatggctgagcctggagccagaaacgacggtacccaggagaagggattttgggcccaggagaaacacttacattctggtgccttgtcttttgcttgtacagaatctgtagtgattttggtggccagtaaatgccagccatttctcaaacccacctcggaccacccagagtttcctcttggtccctgtctactaagagtcatgaaggcagggtgctctgcccactccatcaccatgaagcctgggattgggccacgaggaacaaacagcagatgcccttgccttccagtccaagaaactgcttcttgaaatggatttaacaacagccactcaccttttcctcctgagcctgctctctgatcagctggatccccacgtgagcaacagctggcccaggaaaggctgcctgcagaggacaggtg

SEQ ID NO: 50228 - DNA, 736 bp, Homo Sapiens
ggcgcagggttcttatggcctcgaagcatgctttcttggcattataaaccgtgtcagcatggttgcctggctacctgctcatgaaggacttgattaatagcaaattggcaatttaacgagccacttccatgatctccaaagaaaccaaaatacaaacacaatatttaatcttgccaaccgaagacgatgtgactgcatgaagtgcccttcgttttaaaagaaagattattggattaaaagatgagttttacaaccgctacataatgaaaagttttttgtttgaaccagtagtgaaagcatttctcaacaatggatcccgctacaatctgatgaactctgccataatagagatgtttgaatttattagagtggaagatataaaatcattaactgctcatgtaattgaaaattactggaaagcactggaagatgtagattatgtacagacatttaaaggattaaaactgagatttgaacaacaaagagaaaggcaagataatcccaaacttgacagtatgcgttccattttgaggaatcacagatatcgaagagatgccagaacactagaagatgaagaagagatgtggtttaacacagatgaagatgacatggaagatggagaagctgtagtgtctccatctgacaaaactaaaaatgatgatgatattatggatccaataagtaaattcatggaaaggaagaaattaaaagaaagtgaggaaaaggaagtgcttct

SEQ ID NO: 50229 - DNA, 500 bp, Homo Sapiens
ccccgctacctggcgctactggagactctaacccgagacctgggccccacgctgctggttcatggggtcactccagtcacctgcactgatctgtgatgcccctgcctccagggctaggtagagagggcccaggcaggcggcctatcctgatccttggaggaggaggaagaggaggccactgtggcccgtggccctgcccttgggacgtggagcccaggggaggtttgaaggggatcctgggcttgggcatcacgcccacctcctttggcagagggaccccagcacactaactctgggtggctgtccccaccgtgcaggggagggagtccgcagcctcccttcactggtgccttgatgctaggggccaggcctcctctgtgactctgggctacctcagtttccccattttggccagactcaccggcccactggggtggtgatgttttcgttctgttttatttttctaactctgctgaccatgaataaaagaccaaaacact

SEQ ID NO: 50230 - DNA, 729 bp, Homo Sapiens
ggagaaacgaataaggaggacgtggtgatttttaatttatacagtaacttttgtacttctctggtatggagagtttggagccgaatgatttgcattttttacatgtccgacattatttaataaataatttttaamagaaaagaacgataaatgaagccaacatgattttctcatttcgggaggaactctgttgcttcgcctggacaagaaggaaaatgctgatttcctccttgggtagaaagagggagcgagggcaaatggggagtagagagaaaacaggcgagaacaagcactctaattccagtgggctttaaaataagacaaaatcagctttacaacaatccctagaggctcgaccacagaataatgccagtcaccaccctgaacgcacaatctccagtgcaggatctaatgactgtacatattattgttattattattattgttattattgttgttctgtaaacatgttgcacaagcttagcctttttgcgttctgttgtgtgtggctgtaaaaccccatgctttgtgaaatgagaatcttgacatttttcttgtgaaatttggaaaatgtgatcaattgaaatcaactgtgttttgtgttctctatgtcaaagtttagttttatattgagaatgttaacttattgctttgtatcttgggaaaaaaactttgtaaataagttataaagtttctttgagacagtaaaattatgatttcttgaaaaaa

SEQ ID NO: 50231 - DNA, 234 bp, Homo Sapiens
cggtccctgttccctaatatcaaggagccccctgaccccttctttcaaacagatccttttgtctgtctcatttctgcattcgtcgtccttcgttcggtccagaagcaaccgcgacagtcctgcatgtgttgatgccacctgtatgtgcaggtgtgacctcaggtgtgtgagtatccctcataccccttatcatcactgcctattcgctcttcctccagcctctgcctcgtgccg

SEQ ID NO: 50232 - DNA, 842 bp, Homo Sapiens
aggcagtgtgtttccgcccagagctggagtctcccagctgccagccgaccccgaacccgcactcccgccaaccgcgctttttgtgggcggtcggaaaccacagcctccgttggatatgttcggtgcatgttataaacaaccacttaaaccctccggatctgagcctcccgcagaggaatgcagaatgacgccacggcacgcaggatgtgatgtcaccgagatgcagaggatactcagtcaaccaacatttactgagcatctacttcgtgccgtatgtcttgtcaacggaaaggggtccctatccagaccccaagagagcattcttggatctcttgcaagaaagaatttgaggcgaatccatagagtaagcaaggcaagttacttctatatagaagggtgcacccttacagatcaaacaatgcttagtgatgtgtgtcagacctctgagcccaagcaaagccatcatatcccctgtgacctgcatgtatacatccagatggcctgaagcaagtgaagaatcacaaaagaagtgaaaagggccggttcctgccttaactgatgacattccaccattgtgatttgttcctgccccaccttaactgagcgattaacctgtgaacttccttctcctggctcagaagcttccccactgagcaccttgtgacccccgcccctgcctgccatagaacaaccccctttgattgtaattttcctttacctacccaaatcctataaaacggccccacccctatctcccttcgctgacactctctttggactcagcctgcctgcacctaggtgattaaaaagctttattgctcacgcaaaaaaaaaaaaaaaaa

SEQ ID NO: 50233 - DNA, 510 bp, Homo Sapiens
gaagaactgctttcttatagcacaaaactacttactctgatggaccaataatgaagaaagcactaggagctcttttgggggtgtagtggtgcccccacatgaacatgatggacacccttgggtctgcaaggagccagcatcttacttggtcccacgtcctcctatagctctgatggtggctacacaaactgaccctcttgggacaaggacaaaagatgtcattgacgtagtcagtgctaagagcagaaatgcaattctttgttatgaacattatgaaaaccaccttcctatgtttgtaaaatatttaagaaaaaattggcaaacaattaatgcttaatattttggatactatttgtttttctttgtaggaaaaaaaagttgaaagtttctattttctatgaagcctttcagataccaatttagtttatgcagaaaaaaattgaacaaaacagggtaccagcacggaagactttcttaaaacgcaacctgaattgaatgatgaaatgttgt

SEQ ID NO: 50234 - DNA, 583 bp, Homo Sapiens
cttggctggtccagatgagagcacagacttttaccaagtggaaccttctgagatccctttaaaactagaagattcccttgtggcactggaagaagatcaatgcctgagacaggctctaggagaaacctttattcgatattttgttgccatgaagaaatatgagttggagaatgaagaaatagctgcagagagaaataaattcttagagtattttatttagaatagagctcacaactactcctttagacatgtaattgttacttaaagctaatctaccaaaacaaaaagactgaacttttgtaattaacaacagcaacaataacaagattacgaatgcttttgacttttttttttgtccatggaatatttgacagatgaagtaggactgctgagaagattctgataacagaaacaaacaacaaagttgtggtgaagctataatatgcaaacttaccagatcttgtcagtcatttcctatgtgtatgttgacctggataagaatatccaattttgggtggcaataaatatattcgcacattaagaaaaaaaagacttaagcattagaaagcaaaatttaaatgac

SEQ ID NO: 50235 - DNA, 472 bp, Homo Sapiens
gtaaatggaaatagacaaaatgggaatcagcagagatatggaggacagaatacaatgaggaggccttgaccgtcagtagcagagagggcagcagaagcctaattcccaaattctttagatggttttctgatttccaaattagtttcccttttaaatttattgtgtcaggttcagcttatgaggcctcaatacttttcagtcttaattgtatattgaaaatactttttgtttactaaatgctttttacattaattcagtgtgcacttcgtaaggataatgatgatttgagttagtttagtattcaacagcttcctctattcctttatatgatctctgtatttaatggctgtggcataaagtttccaactaagtttaagtatcaagttttctttgtgctgttttctgcaaatattgaaggatgacctggattgtcctagaactttgttccaacagattacatgtgttcataatg

SEQ ID NO: 50236 - DNA, 711 bp, Homo Sapiens
  misc_feature (687)..(687): n is a, c, g, or t
ataactcctgcaggaataaacctgagcggccttctaccctcaggaggtctgctaccaaatgcactgcccagtgcaatgcaggcagcttctcaagcaggtgttccatttggtttaaaaaatacttcaagtctcaggcccttaaatctactccagcttccaggtggttcacttatttttaacactctgcagcagcagcaacagcagctctcccagtttacaccacaacaacctcagcagcccacaacttgtagtcctcaacagccaggggagcagggttctgagcaaggttcaaccagtcaagaacaggccttatctgctcagcaagctgctgttattaaccttactggagtaggaagttttatgcagtcacaggcagctgcagttgcgattcttgcagcatcaaatggctatggcagcagcagcagcacaaacagctcagctacatcatcatcggcatacaggcagccagtcaaaaagtaaaatgaagagaggcacgccaaccactccaaaattttgagtcttgcattactttttgttccttttttaaaaacacaagagcactgaatcaaaagaattgagtttctactttttgttttttttaatgtgtcagtattttacattgctagatgtacaaactttatacagaagcacaaccttatcatttttaaataaaaacagggaaatggnttaacaaacaaaaaaaaaaaaaaa

SEQ ID NO: 50237 - DNA, 636 bp, Homo Sapiens
  misc_feature (3)..(3): n is a, c, g, or t
  misc_feature (14)..(14): n is a, c, g, or t
  misc_feature (27)..(27): n is a, c, g, or t
  misc_feature (567)..(567): n is a, c, g, or t
tcnttatttgtttnattacttctcagnataatgaaagaacacaaggatacaggatattgagaatcttaaaatgttatgaagtatgcatttttgttttgaaaacctgtccctgtctgtttaatggtttggtttttaggaactattttccttcctgaagtgggcagatttacaaactagaattcatactggactatggatcctttaatcattaatagagccttattaaacttttcattgtattttttatgtcctgctcagatttgatctgagttgggaactaaaaggaatttactatttcagaatctaatatgtcctcttcattttctggatttgatacgtaatttttaatattatgcagaacaaacggatcttaagagaatctcatgcgtatgactctggagagcgtatattaactacttttttacatgtcagtgacttgtcacttttggagaggctacaaaaataattgtacaaaactatcttattaaggaacttaaagtaacttaagtgccttaataagatgtttataaattttcagtactagctggagaaagcaaaactataagntcaattactgtatatctgtgaccttgccttgacctcagactttacataaagagcaaaaaaaaaaaaaaa

SEQ ID NO: 50238 - DNA, 586 bp, Homo Sapiens
aggagactgaacatctttgcagcaggataggctggtaatttgatcaaatttattcaaaaagctctcagtctgtgtcatgtaaggacatgcttatgaaatgtgagagaggctcgccactaagtattctaaatactcttcaatggcttttctaacaacctcagtagtaatttgctgagcatcatccagaccattaatagaatcagcaaagcactggaatttcacactttaatgataatattccacatagtctatgggcaaatattttcaacatttccaatttttaaagcttcagaattgaagccaaacaaattaataaataatgttttaattactatttaaaaactcaggtttagatgtttaaaattagttgcttttgatactcagctgtcatgtttataattcaaacatgtagtaaacatatgtaggtaaggttgtttttttggagatgttgcagctcaaatttcagtccacatatgaatcatcagtgtattttccataaagtgattcgggcatatttgtgtgaaaacctcagttctgtcacttcttacctctataaacttggacgataatgtgccttctctgagac

SEQ ID NO: 50239 - DNA, 760 bp, Homo Sapiens
  misc_feature (632)..(632): n is a, c, g, or t
  misc_feature (653)..(653): n is a, c, g, or t
gccagactctaatacgactcactatagggaaagctggtacgcctgcaggtaccggtccggaattcccgggtcgacccacgcgtccgggtttgattatcatgaatgagtttattgtcccatttttgccattattactggtggatgaaatggaagaaaaggatatactagctgtagaagatatgagaaatcgatggtgttcctaccttggtcaagaaatggaaccacacctccaagaaaagctgacagattttttgccaaaactgcttgattgttctatggagattaaaagtttccatgagccaccgaagttaccttcatattccacgcatgaactctgtgagcgatttgcccgaatcatgttgtccctcagtcgaactcctgctgatggaagataaactgcacactttccctgaacacactgtataaactctttttagttcttaacccttgccttcctgtcacagggtttgcttgttgctgctatagtttttaacttttttttattttaataactgcaaaagacaaaatgactatacagactttagtcagactgcagacaataaagctgaaaatcgcatggcgctcagacattttaaccggaactgatgtataatcacaaatctaattgattntattatggcaaaactatgctnttgccaccttcctgttgcagtattactttgcttttatcttttctttctcaacagctttccattcagtctggatccttccatgactacagccatttaagtggtcagca

SEQ ID NO: 50240 - DNA, 545 bp, Homo Sapiens
  misc_feature (516)..(516): n is a, c, g, or t
tcgactaaagagtagagattgatttgggaatcattctctgagataaccttagaaatcatggaatttgagatcctagggaaaaatctgtggagaaagaaaaggagaacaagaacacaatcatagagacctatatttagtggatggtaggaagaggacaaaccaaaaaagggatgatgagaagtgggagtacaagattacaaaagcactgtcacagaaattaagagaaaaatgttctttaaaagatgggacatttggccggtggcggtggctcactcctgtaatcccagcactttgggaggccaaggtgggcggatcacttgaggttaggagttcaagaccagcctggccagcatggtgaaaccccatctctactaaaaatacagaaaaaagttagctgggtgtggtggcatgcgcctgtaattccagctactcaggaggctgaggcaggagaattgcttgaacccgggaggtggagattgcagtgagctgagatcatgccactgcactccagcctgngcgacagagcaagattagattctatgtca

SEQ ID NO: 50241 - DNA, 750 bp, Homo Sapiens
  misc_feature (719)..(745): n is a, c, g, or t
  misc_feature (747)..(747): n is a, c, g, or t
ggcaggtccagagtcacagtccgcagtggtgacagggttcttagatgcctgcatgggtctctaaatgtctctttaagcacagtttactcctcagaatctagcctgaatcccaggtctttcctgcagctgcacaaccagcgtcttaggctttgtagatgtcttggctttgacttgacgtcatgtatacatttttagtgtgacctggccgttaattacttaagtgagagaacagaccgtattaatagctttcctaagtaggttgaaatcttccgttttctaaatgatatcagtaggagacgatgggtgtatttcttttctgggccaggtagctggcagctgctagagctcgctgagggtctgttgggaagggtttggtgagatgcgttcacaagtctccccagccaggtagtgggctcgatggtaggagcacaggacaggaccagggatcatcctgcatccctcactctgctcgcaacgcagagtcagagacacacgtccaagagcctcatcatgtaacaggaactcaggttttaaaagctaagtgcatctccctaatctagtaagaagtagcacatcagtcaaaaaaatgaccaaatttaggccgggcgcggtggctcacgcctgtaatcccagctctttgggaggccgaggcgggcggatcacgaggtcaggagatcgagaccatcctggctaacacggtgaaaccacgtctctactannnnnnnnnnnnnnnnnnnnnnnnnnncntgt

SEQ ID NO: 50242 - DNA, 573 bp, Homo Sapiens
ctagagtatccccaagaaactccagcaagaaaagaagcttatggtgatatttctgaaagaaaattactacgagagcggttgagatgcaagagctttgactggtatttgaaaaacgtttttcctaatttacatgttccagaggatagaccaggctggcatggggctattcgcagtagagggatctcgtctgaatgtttagattataattctcctgacaacaaccccacaggtgctaacctttcactgtttggatgccatggtcaaggaggcaatcaattctttgaatatacttcaaacaaagaaataaggtttaattctgtgacagagttatgtgcagaggtacctgagcaaaaaaattatgtgggaatgcaaaattgtcccaaagatgggttccctgtaccagcaaacattatttggcattttaaagaagatggaactatttttcacccacactcaggactgtgtcttagtgcttatcggacaccggagggccgacctgatgtacaaatgagaacttgtgatgctctagataaaaatcaaagttggagttttgagaaatagagcacaacagca

SEQ ID NO: 50243 - DNA, 903 bp, Homo Sapiens
  misc_feature (12)..(12): n is a, c, g, or t
  misc_feature (16)..(16): n is a, c, g, or t
  misc_feature (20)..(20): n is a, c, g, or t
  misc_feature (29)..(29): n is a, c, g, or t
  misc_feature (33)..(33): n is a, c, g, or t
  misc_feature (39)..(39): n is a, c, g, or t
  misc_feature (46)..(46): n is a, c, g, or t
  misc_feature (53)..(53): n is a, c, g, or t
  misc_feature (67)..(67): n is a, c, g, or t
  misc_feature (99)..(99): n is a, c, g, or t
  misc_feature (820)..(820): n is a, c, g, or t
  misc_feature (879)..(879): n is a, c, g, or t
gttttaaaggtncttncagncaccaaaancttncccttnacacggncacaggnaggattcatactgngagaaagaccctatggctgcagtgaatgtggngaaatcctacagcagtagatcttaccttgctgttcataagagaatccacaatggggagaaaccctatgaatgcaatgactgtgggaaaaccttcagcagcagatcttaccttactgttcataagagaatccacaatggggagaaaccctacgaatgcagtgactgtgggaaaaccttcagcaattcctcatacctcagaccgcacttgagaattcacactggagaaaaaccgtacaaatgtaaccagtgttttcgtgagttccgcactcagtcaatcttcacaaggcacaagagagttcatacgggggagggtcattatgtatgtaatcagtgtggaaaggctttcggcacgaggtcatctctttcttcgcactatagcattcatacaggggagtacccttacgaatgccacgattgtgggagaaccttcaggaggaggtcgaatctgacacagcacataagaactcatactggagaaaaaccctacacatgtaatgagtgtgggaaatcctttaccaatagcttttctcttacaattcacaggagaatacataatggagagaaatcctatgagtgcagtgattgtggaaaatcctttaatgttctctcgtccgttaagaaacacatgagaactcacactggaaaaaaaccctatgaatgtaattattgcgggaaatccttcacaagtaactcctacctttctgtgcatacgagaatgcantataggcaaatgtgaattcagtaactgtggggaaagcattcattgatctttcatgcctnaggatacatgaggcaactcttaca

SEQ ID NO: 50244 - DNA, 680 bp, Homo Sapiens
  misc_feature (424)..(424): n is a, c, g, or t
tctggctggtgtcagccagtcactttctctgaatgcttctgagcctgccctaacatctctgagccttaactacatgtctgtgggtatcacactcgagtggtggagtgtgtccacacgtgctcaagcagaaggacttttgtgtccatgcttgtgtctagaaaacagactggggaaccttatgtgagcagcacatcccaccagtgaaacagggtattgctcttcttcttttcttgatcttcctgtctgggcagacttcagagactttgtggcctggaggcctattaagcacgacacagtatcagtggaattgatccataaacctccctgtccacatcttgcccaatggggaatggatctttcaccaaagagctcaccagcattttccacagagatgcaaattctgagcccttggagttcccagtgnattcaaggaaggaagtgggaacaaggttggatgcctacttatgagcttgccatcacagctatcggtaatcagaaatctgaaacaaaatctctgcacaaaagagccagctcttaagttcacaggggtgctggggtgcatttggatatcacttcccctctggattttcccatcacatagaagactttgacctgtgaagctggcaagaattactcatcggggtacgaggccgaatcgtatcatggctagctgttctggg

SEQ ID NO: 50245 - DNA, 810 bp, Homo Sapiens
  misc_feature (711)..(711): n is a, c, g, or t
  misc_feature (749)..(749): n is a, c, g, or t
acgatggacttgacagttcggtccggattccgggatggaaatctcagcagcaagagtcccaaccatggggtgaaccttgtggagaacctggacagcctgccccccaaagttccacagcgggaggcctccctgggtcccccgggagcctccctgtctcagaccggtctaagcaagcggctggaaatgcaccactcctcttcctacggggttgactataagaggagctaccccacgaactcgctcacgagaagccaccaggccaccactctcaaaagaaacaacactaactcctccaattcctctcacctctccagaaaccagagctttggcaggggagacaacccgccgcccgccccgcagagggtggactccatccaggtgcacagctcccagccatctggccaggccgtgactgtctcgaggcagcccagcctcaacgcctacaactcactgacaaggtcggggctgaagcgtacgccctcgctaaagccggacgtaccccccaaaccatcctttgctcccctttccacatccatgaagcccaatgatgcgtgtacataatcccagggggagggggtcaggtgtcgaaccagcaggcaaggcgaggtgcccgctcagctcagcaaggttctcaactgcctcgagtacccaccagaccaagaaggcctgcggcagagccgaggacgctgggtcctcctctctgggacacangggtactcacgaaaactgggccgcgtggtttggtgaangtttgcaacggcggggactcaccttcattctcttccttcactttcccccacaccctacaca

SEQ ID NO: 50246 - DNA, 725 bp, Homo Sapiens
atgaaaatgaaggtaacagcagcagtaaactaatttccagtagatgaaatgtgactttgtaatcccaggaaaagggaagaatttgcaccaagaagttactgttacctcagaatggcaagagcatggatggctcttatcatcatctttatacttcttttacatttcctcattttttaaaagttttgtgtacatattacatttaggaaatccaatatatagtattaaaacagaaaaagtaaagaagcaggctgggcttggtgcccactactcaatttgactggcttaaaaaaataattttttaaacgacatgtacggacagacataatacttgcttctgagcctcccagtctttcaaaaccacattagggaataagcagtatttgcatggttccagtgatatctgggagtaagtgaaagtaatgaaaacacagaagtaaacacaaagtaattatagttcacctttatacacacgttaacagaaatcatctgatcccctttgctgctaagtgagttgaaaagcgaaagcgtctgaatcccaccagcatcgctggatgtgtcatccactgagccttcatctcccatgaacttgacttttaaccaatttgctagaattctacagatttaaaaaaaacaaaaaacaaaaaaaacacttgaagaatctaattctatatttgattttaaagacctttcacggaaaagagaaggaaaatttcccagacctagtc

SEQ ID NO: 50247 - DNA, 583 bp, Homo Sapiens
  misc_feature (36)..(36): n is a, c, g, or t
  misc_feature (384)..(384): n is a, c, g, or t
  misc_feature (434)..(434): n is a, c, g, or t
  misc_feature (518)..(518): n is a, c, g, or t
  misc_feature (537)..(537): n is a, c, g, or t
ctggccttttttgcacagctgctgttgcctgcccanagatcgggaactctgccccgtaggactggaagaaacctcagtaatgggaataagactttgtccaatagggggctgatgaatgtgtgggggcgacaatggcaaggagtgggactcccggcccggggttcgccaaccccaggggccacaggtcctcctacaattgaaccagaattcacccacccgggcctgccctgtgcagggtgccgagagcccagggatgcatgagagggtggctcctgcctctgggaactgggacagtgggagagacggataagttgtcacacagaggctgctgggaggaaggaggagacagaaggagtaggggatgggacttcattcattcatcanatgcacacgaggcacaaatgggaatcaagggtggatgtgctgtgatgaanaagagtcctgccctgaacaggtggcgctgtggaggaggcagagatcagatttgtctgcggaagtgttatggactgaactgcgtncctgccccaattcctatgntgaaggcctaaccccatgtgactgtattgggagaaaagcttttaag

SEQ ID NO: 50248 - DNA, 872 bp, Homo Sapiens
  misc_feature (647)..(647): n is a, c, g, or t
  misc_feature (753)..(753): n is a, c, g, or t
  misc_feature (757)..(758): n is a, c, g, or t
gcttaatgaaacatgtgaaagctggtatttttaacaaatgctgtgtgattctgaatcatattgtcatgtttaaaagtgagagctgcttgtacatctttagaatggcagaccatatgtgtcactgtgagtgtcagaaatacttgcatgagctcattttcaccaactggggggaaaatgtaatgtttctattgatggtataatttagacactataataagttcagccatttgagttcttcaaaatggttatattaaaatgatatttttattaagcttcaataatgaaaaacaatgtgatttaatatgtgtatttttatattattgtatggattaattgttaattcagcatttaatggctaacttaaatatgattggaaaagaaacttcaagttgccattgcttttacctaaagtttttaaagtctgaaagatttcagcaaatgcattaagcaggaatgtgtgacatcttcttttagattgcttgtctaatttggagagattaaaaatggtaaaatgcaactttgagtctctttacctttgcatatttaaaggtacaatagtgtggtgttggtaattgtaagtaagcttttctgtgctatgtctttggagtgaaaattcatgttttctttctgaattacataaatgcttntgttttattttgtataatgactgtcttttagatctgaataagtcacttttaaacctttggcctatgaactttgccttatcaatcatgaatctagatgaatgctatnctanntctttggttcagttttacctatttttttattttttgggtccactgccttgcttggagcaataacctgggaaatttgtaagccccatttttccaaggcttaatttgcaatccccc

SEQ ID NO: 50249 - DNA, 854 bp, Homo Sapiens
atggcaattcactggggaacttttgccttagcaaatgagcattacttagagcctccagtgaagctgaatgaagctctagagagatacggacttaacgctgaagattttttgtcttgaagcatggagaatcaagatacctaaataataatgatgaaaacttttaataaatgtgagcacaggcacttttaatgaaaaaggcatcatctaagtttaaaaacaaatgaaaagacttagaaattcatgaatatgtgattattttacatttggaaacaacttctgcaagtttatgttttatgtttgtgtaataacttgcttcctagtatgatcagctcatgtacactatgagagggttcaggggtgggtcatttaaataatgaatggctaatgtggattttaaatttcatatcatgatataagcactgcaatggaaatgtttttactaaaacattatattttgtggtactagaatttcctgaggtgaaaaaccgatattgaagattcatttttcttttttccattcttcaggaccttcggcaaggtgagtcaagggctctctacctaccttagatgtttttcagagggctacaaatacaagtatctttcttatatgcacattctaataaatgatgaaattcagtccaccatgcttattataaaacattagcaattcttggtcctaatcaaataggttaatggccaaatattaaatgggtctttcggggagctaaaaccatgggctacacctcaagaacggagtctcttggggacatataacactttgggcttaaattcccgtaaccctggggacgcgttggtaaggccacacccacctatttaagaattcttccacgcgg

SEQ ID NO: 50250 - DNA, 829 bp, Homo Sapiens
  misc_feature (357)..(357): n is a, c, g, or t
  misc_feature (387)..(387): n is a, c, g, or t
  misc_feature (447)..(447): n is a, c, g, or t
ctggggccttaccatgacaagtttcgttctctgaacatgggtctctgagtgccttttctctctgataaatggagatgatatgtttgccacgtttgcaaaaatgcagcaaaaaagttacttagtctggctgtttagtagaatttacctctactcattcatcagcctctttatatatatgattttaagtcttttcattgcactgatcactgatacatacgaaacaattaagcaataccaacaagatggcttcccagagactgaacttcgtacatttatatcagaatgcaaagatctacccaactctggaaaatacagattagaagatgaccctccagtatctttattctgctggtgtanaagtagctatcaggtttatctgtactttanaaggaaaatataatgtgtaactgaagtggaacactggtgatattctaaaatcagatgtantatgtttgaaaactgttattttgagcttattgaaaccctataatttccccataactggtttaaattttttaaaagcaaaattttaagggcctttgcaactttatggctggggattggttttttaaaaaaacttttatgggggggaaaccttttggggttaaataataaatttcccggggggaaattttcccccgggggttttaaaaaaaggtattccggggtggcccccctccctttttgcccccaaaaaaacggggggggccccccccgcttattttcggaaatggggggccaacctgcgtttttatatttagtggggggaaaaaaaaaacccccttggggggcccacaaagggtgggaaacttttgtgtggacacacacc

SEQ ID NO: 50251 - DNA, 616 bp, Homo Sapiens
gcttatttgcactctgaaggttaaatatgtcttttggtcttatagtgtgtgggtgaaagcttctctagaagtaggaagtgtttgtttcactaactttattagttattgacttaattttcttttagtcatctatgttgaaattaaggaatataaatgctttttataagtcagcttctgtggatatcctgaaatacatgaagattgcagccagtttcaaacctacatttttatttctctatctaaaagttccacgagaatttttacttttgagggaaaaaaattgtcttatgtattgcatgtgctgtactttaaaaaaaaaaaatctgttctccctaggttctaagactttttcagtaatataaaaatagcagtgtgaattccttcccccaacattatggctttatcagtaaaaagaaatactggtatttcattgtagcactttctaaaattcagtactaagtgaatcctctaatccagagatttggttatctaggcaccaaaagaaacatgatttaaagtggttatagaaataggtcacatgtactagtgacagatttagtaatgaacttgttaatgcaaaatcagaataccctcttaatccctcctatacaccctc

SEQ ID NO: 50252 - DNA, 685 bp, Homo Sapiens
  misc_feature (637)..(637): n is a, c, g, or t
aacatctttacacttagggtttgagtttctgtatctataaaaaagggtttggattaagtgatccctggcacttataaaatgttagggcttaatattattcatagatcgaggatagtttcattcttagtcgcctccttagtcactcttcctataccaatctgagaccattttacaatttagaaaagacaaataactggttgggttacttgatagtataataaccaagaaaaataattttagaaggaattaagtttgaaaccacatgttaacaaattctaccaaagtgggatttgcctgtgattaaagatgctgtaaacatttgggccagtagttataatttgaaaaatgtttatagccatatatataattttttatttaaatatacagtttcatcagtctattagtatttcattaagtctaagatgccatcagtggttagcaaacaccactgttttatgcactgctaagaaagaataaagggctgtgtgcagtggctcacacctgtgggacgccaaggcaggagcatcacttgaggccagaagttcaagaccaacctggtcaacattgtaagaccctgtctctacaaaaaaaaaaaagttaaaaattagctgggtgcggtggcacatgcctgtagttncagctactctggaggctaaggtgggaggattgctagagccacgggtgt

SEQ ID NO: 50253 - DNA, 679 bp, Homo Sapiens
ctgttacccaaactgatataaactccctcagaaagaaagatactactccctaatcctggaagtgttaagtggcaataatgatcaaatgttgtaaaggggattgttactacagctaatatgaaatgggaggctggactaaatctaacctttctacccttgatttcaattctaaaaggacacgtaataccattgcagaaagaaaaggcagttccaaatgataaattttagagttgttttgctaggatgcaagagaaattggataagtggaccactcatacgttgctggtgagatatgaaatagtagagccactgtggaaaatattcttggcagtttcttataaaactaaacatacatttaacatataactggcatttgtactacttgacagttatccctgagaagttaaaacttaacattcacaaatgttacatagcaccttcatttataatagccaaaacccggaaacaacctggatgtccttcaaaaagagtgaatggtttagtatgtccacaccatggaatactaaatagtaatatgaaggaacaaactactgatacatgtaacaaattgcatggacctcaacggaattatgcttgggtggttgcgggggacaatcctaaagtgttacacactgtatgattctgttttgtaacattcttaaataataaagtatagaga

SEQ ID NO: 50254 - DNA, 523 bp, Homo Sapiens
tcccgggataaacgattctcctgcctcagcgtcccaagtagctgggattacaggctcccaccaccatgcccggctaatttttgtatttttagtagagacgaggcctcaccatattggccaggctgttctcgaactccggaccttaggtgatctgcctgcctcagcctcccaaagtgctgggattacaggcgtgagcaccatgcccaatgggtgtgggatttagtatattaatgagtgtataatgaggtccttggtgaaacctacatcaaatccagcaccgtgttgggtccagtctgtcttagccagcttggtccacaccctggttttttagggtcttattggccccttacttctgcagcaaaagtttccttttgctagtcatgtgaaactgccacctggaattttctattctctagtgaccaccctgtattattcctgtctcactgggaccctaagaaattgggaattccaactacacatccaaaatagtttgactaaaactgttgaaaaaagaaaaaaaaaa

SEQ ID NO: 50255 - DNA, 469 bp, Homo Sapiens
aatgatttgaaaaaaatctctatgacaagaaactcctaattgggttttgaaaaagtctaaagaagtaagtaaactgaccactgtgattcttacttaaatggatacagttctttttgctttttaaaaaccaataattcttgtgaattagttatttttgagaaaaagtatcattttaagttggtataagtaacttggttaaatttgtcttatttaaatttataacttgcaggcacgtgcctgtaatcccagctacttgggaggctgaggcagaaggattgcatgagcccaggagtttgggaccaacctgggcaacatagtgagacccccgtctcaaaaaaaaataatttataacttaaacactattaattttaggaaagaaattttatagatattagcacttcaatttaattactattaaaataattcctttcttctgcaatatttctcacaggggaaaaaaaaaaaaaaa

SEQ ID NO: 50256 - DNA, 504 bp, Homo Sapiens
ttatgtaacactgtatataaatggttgcaaaacagctctggagtacagtacatgcagcagaatatacctgttgaatatactgtactccagagctgttatgtaacactgtatataaatggttgcaaaaaaaaaaaaaaaagtcagtgcttctaaaaagaattcaagataatggtttttaaaatgcctttataataagctttgtttctttgtgaaactaattcagcaggctgaaggaaatggttcatgtgataatgtgggctggtatcctctagagtacctgggtacataaacagaaactcctgtaggtaaaaagtaatttgtgccattagtctttctatgtttctgcatccagatagagtgcagttcatgagggagggggcgggggactgaaggggaaagggcgttaaagtgatacatttttataccaaatgtgtttatttttttgtgcaagtaatccttaaaattgcaattgtattaggtgttaaaataaagtttttaaaaaat

SEQ ID NO: 50257 - DNA, 885 bp, Homo Sapiens
atttccggacgcccggcccgctgttggttcttaatgacacagcttaactttattgtgaaaagattgcagcaacaaatgagattttacctgtatttgttaaaaatgcttatccttgtctaagactggcaacataagcagttcttaggcttctatgccaatggacactaggcagtaatacatgtgcagtgctaatagaaaaattggagtaagggtgtactaaggaagttctcaatctttccccttcacaatcttctgtaatgtaacttcaataaatgtgattctcatcttggcacaaaattgggaatggtgtggggagcgctgtttttcccaggtttatagtagagaaataatgttttctggtactaaaactggcatggtaagtgcatacttagagtaaggactttaaatcacgggccagttaatctctagttagtggtttggtacgcaagaagtacccatgggtgtattacacaaatgcaggaataccatatctagaaatacacctttgatattcatagtgtacctgagaatggtttcacgcataattttaggtaaaactgccttagtcactctggttttacggatctttgcccacagttcctcgttcataacttctatagcccttgttatagtcatgttgtgtgtgttaggccacaggaaactcacttcacttctgcccttttacccttcctaagaaggggactctttgatcttccccctaccttttctgtggagtccctaaggaccccccattttcagaagaggggtttctggtccctaaaactcctggcggaaaaaggaaatgccggtccatcctttgaaaagccctccccctaccaaaaaaccttatgaagaggacctcggaagtttttggcaatatatggt

SEQ ID NO: 50258 - DNA, 706 bp, Homo Sapiens
  misc_feature (641)..(641): n is a, c, g, or t
  misc_feature (667)..(667): n is a, c, g, or t
  misc_feature (682)..(683): n is a, c, g, or t
  misc_feature (694)..(694): n is a, c, g, or t
  misc_feature (696)..(696): n is a, c, g, or t
tagtaagagaggttgttaaatgccccagaggtcttctgaacatccataggaaataaagttaagtttaattctcatattctatgtaagaatagagttccaatgtcaaatgggatattagaaatgtaagtgcctcagtgtttactgttcataaatttgagaacagggtttgataagggataagtggaattctggcagatttacttgtaggttattgtgagtttatcataattttgacaacaaaaaaaaactccacagtatgttgaaatgcatttcttcattttattcaataatttttcaagatttttagaaatatttttaaaaatctaaattaagaagtttatttttggcatatatatatactagttttcaaaacttgtactccttttctgtaatcccagctatttgggaggctaaggcgggaggattggttgagcccgggagttcgaggctatagtgagccatgagagctatgatcactcaactgcattccattgtgggcaacagaatgagaccctatctctacaaaaaaccttcaactccaaagtagattaaatatgacaaatttatgttgcaaattaaccagtaaatctaaaggaactccacaaaggaaatttcaccattgatttatttaggccagattnggttgattgatatccttgtttctggngattgggaaatcaanncaaaattaatntnaccctaactg

SEQ ID NO: 50259 - DNA, 548 bp, Homo Sapiens
  misc_feature (32)..(32): n is a, c, g, or t
  misc_feature (73)..(73): n is a, c, g, or t
  misc_feature (122)..(122): n is a, c, g, or t
  misc_feature (131)..(131): n is a, c, g, or t
  misc_feature (147)..(147): n is a, c, g, or t
  misc_feature (208)..(208): n is a, c, g, or t
  misc_feature (217)..(217): n is a, c, g, or t
ggccatgaaacgaggactctgactccggactntaaagataatccgtgtgtagtcactagttgtggtattgttncgtggcacagaactaaatatcccaaaatggtgatgaaaaagtgtattangtatgattnctttactaaataaaanacggcaaactatcttgattttagagtcaggatagtaactttcagcagaagagacgtgttanatggggaanaggagggcttctggggtacactatgctctgtgttttgatcgagactagtatgtgagtttgtttaatttgtgaaaacctttatttgtgtactgttttgtgtgtgtgtggtatatgcagttttaaaaactgatgccttttaaacacttactaatctgataatctgccgaaaaagaatatataacatatattcaaggggatggaaaattacttactgaacaataattttatttctcaagaacgctgaagattttgtttctctcttcaaaagatttaaaaaattttaactggcaaaacataatagtgactcttaaatgccaaaaaaaaaaaaaaa

SEQ ID NO: 50260 - DNA, 549 bp, Homo Sapiens
tttttttagtaaaggcgaggtttcaccatgttggatgatcttgaactcctggcttcaagagatctatctgcctcagcctcccaaagtgctgggattacaagcataatccaccacacctgacctacttttgtatgttaaatgtgattatacttctctttgacttgtcagcttagctttagctgatacactctggtgcccaactattattgtatcagtgaacttccactttcttttccttttctctcaatttttgttgtatcattcctaccttgtgaggacatataatatttacattctgttgtcatcctcacatttcttagttccacagtttaaatgtatttgaaactcaaaacattcccattaatctcttggtcagctgaaattaatgatttaatagtttccttaaaaaagactcatggaacaatttccctaaatttttgccatgtcaaatatgtttatctgtagcctttacacagtaaaaacaatttggctagataatacaattctcagttcatatttttctttggaatattaaagtattgctataga

SEQ ID NO: 50261 - DNA, 697 bp, Homo Sapiens
cgtatggaggtcagtgggctcacggagttctagctcaggtccaaccctcggtgggtgcagaggtcacttccctagcctcagatgggtgagtaaacagacgtatgtggcagccagcagagcccccacatttgttccctgacctgagggtgggggctactatgctgggaaaggccaggtggaagccattggggtgaactctgcctaggaaaattgtcagtcaaaagcaacctgcagccctggagggactgcaaaggtcagtgccgccatcgaggacttggaagatgcagggtggtgacccccactgcagcctcgttccactcgtctaattggcttgtgtggaagacaggggggtcccggagaaagaaggacagtgaatcctggtaaacttaaccaggactccaattgcaactgctgttccagatatgactactgatcactggggcaaatcaaagcatccccggacacctggtctacagccattgatctggtgaaagctttaatttttaatatagattttattttttagagcagtttcatgtttacagagaaattgagcatatttgagagtcctcatatagcatctctccctacacacagtttcccttattattcatatcttgaattactgtgatacatctttgcaattgatgaaccaatattgacctagtcattgatcaggttacatgagggttcactc

SEQ ID NO: 50262 - DNA, 442 bp, Homo Sapiens
  misc_feature (403)..(403): n is a, c, g, or t
ttcttttttttttttttttagtttttgagatcgtgtctcgctcctgttgcgcaggctggagtgcagcctccaaggtggctgggattgtaggcgtgcgccaccacgcccggctaatttttgtgtttttagtggagacggggttttgccatgttggccggactggtctcgaacctctgaccttgtgatgacccccctcggcctcccagagtgctgggattacacccagcctctgctgccttttcatatttccccatctgctttatggatcaactctcaacagtacactttttcttttctttacctaccctatgagtgcaacccagatgtaagagttaatcctcgtcagagaatcattgccttaaacctctcagaaatatgtaattaggaaatcttattttaattntttaaaaattgcttgtatagtttcaaagaataagatctg

SEQ ID NO: 50263 - DNA, 484 bp, Homo Sapiens
  misc_feature (37)..(37): n is a, c, g, or t
ctgaaccggacgaaggagtagaattcactctcctganatgatcgttctcacactcatattagctcatgttggaatttcccatcctgccatgtcctttcccatttctttttggcttttttgcctccaccttttagcccacatcatttaactccactactgtgaaagcttgcttaaagaaatccctcttggccgggtgtggtagcccacgcctctaatcccagcactttgggaggctgaggcggggagatcacaaggtcaggagatcgagaccagcctgaccaacatggtgaaaccctgtctctactaaaaatacaaaaattagctgggcgtgttggcacacacctgtaatcccagctactcaggaggctgaggcaggagaattactttaacctgcggggggagcctagattgcgctactgcactccagcctaggcaacagagggagactctgtctcatcaaaaaaaaaaaaaaaaaaacccagcc

SEQ ID NO: 50264 - DNA, 489 bp, Homo Sapiens
agtggtgctgggattatgcaggctgaggcctctccacacattttcatgaagtggttgctcaccctctaagtgagacgtaaagactgcagtgttcggagccctttgggaaataaatgtggtgaaaagaaaggagggacgaggtttaaaggaaggggaaatggaggttaaggaaaaatggctagaaggtgtgttctggaacaatcagaaacctgaggcaacttgaaatgggggaaaaaggcaagaatggagagatgttaccagaacgaaatctagtttgagcagagaaaaagactggctttctagtaggcttgtaaaatgctttcctgcagcaagctacttgtgtccatagatcttctctggagggttaaggtagccttttgtaaaccaaaggaatctataatatctatatttgaaataattaatgagttggaaaagccacccagcgtagaagagtcaatccaagctttaattctgccatctcagaatggt

SEQ ID NO: 50265 - DNA, 699 bp, Homo Sapiens
catcgatttcccggatgaaactctgtcattcatcaaatctcatcccctgatggactctgccgttccacccattgctgatgagccctggttcacaaagactcgggtcaggtacagactgacggccatctcagtggaccattcagccggaccctaccagaactacacagtcatctttgatggctctgaagctggcatggtacttaaagttctggcaaagaccagtcctttctctttgaacgacagcgtattactggaagagattgaagcctacaaccatgcaaagtaggtatatgttacgagaacgcccttcagcactgctcaaaaattttcggcatgtatttcatctagtcatgtccttttggtcctctaaattagcagtggtttggcataatagtgttttgtgttttttttctcattgaaataaatcttgggtttgattttttcccgagcctgctagggcgaggggggtgaatggttgatgagtttaaaaataatgcagcccttgtttttcacctgtagaatatgagaacattttaacagcacctctcttatcttgcagatatattccacgatgctacatgcagcagacagctgtgagcttgcatacacacacacaccaatatacatgcacatcatacacagaatgtagtctagttaagtattccttcctatcttaatacgtaggagtattagaccttt

SEQ ID NO: 50266 - DNA, 1051 bp, Homo Sapiens
  misc_feature (948)..(1002): n is a, c, g, or t
ctggaccggtccggaattccttggatgtcctctccaggggagtaggtaagagccctacagcagtgaaaagcattgaaggaaaagtgtgttcagcagtgctcttaatctgatcagagcagcctgaacacattctaaacacagggcatttagaactagggtagaggcactagagcaccatagatacaaactcagattctgaaggtaaatgcccaggttcaaatccaagccccctcgccaagtgaccacgactcccccgagtcacctgacctctgtgtttacatcctcaaagttaagtagtcaggaaagggggcttggggcttgccacatggatggttgccactctcctttgcaaagtgtagtccccaaaaacaggtggaagagggaagggtccaattagaaggccgagtaccagctgccatgaatatgccagagctgctggctagtgataaataactgaaacccagggggacagcagagcttgggtgaccatacattctaggaaagaaaacatgcctgttgtcctggctttttatccagcttagacaaagatgggcaaagaaaataatttagaaaatggtagagatgggcacagagaaagggcacggagggaggcacaaacagaaggccaagtgatggtggaggcagacattggagaaatgcctttacaagccggggaatgccaaggatgctggcaaccctgggagtgggaagaacctggaacacaccctccgtcagagtctccagaaggaactggcccttcatcacctttcggacttctggcctccagaactgggcaagaaaatgtttctgctgttggaggccatccagctggtggtcatttgttatggttgccaccagaaaacgaatatagatttagacatctaatttgcatatatagatatggcatgggtattttgttaaataaaagataaagcatggacaactcgnnnnnnnnnnnnnnnnnnnnnnnnnnnnnnnnnnnnnnnnnnnnnnnnnnnnnnnggggcggggcgcttctaaaaggattccctcgagggggccccaaacttta

SEQ ID NO: 50267 - DNA, 708 bp, Homo Sapiens
aattttactgggcctctccgctccctctgctcttggaggtgccatgaggtcagttagctacgtgcagcgcgtggcgctggagttcagcgggagcctcttcccgcacgcaatctgcctcggagacgttgataacgatacgttaaatgaactggtggtgggagacaccagcgggaaggtgtctgtgtataaaaatgatgacagtcggccatggctcacctgttcctgccagggaatgctgacttgcgttggggttggagacgtgtgtaataaaggaaagaacctgttggtggcagtgagtgctgaaggctggtttcatttgtttgacctgacacctgccaaggtgttggatgcttctgggcaccacgagacactaatcggagaggagcagcgtccagtcttcaagcagcacatccctgccaacaccaaggtcatgctgatcagcgacatcgatggagatgggtgtcgtgagctggtggtgggctacacagaccgtgtggtgcgagctttccgctgggaggagctaggtgagggtcctgaacatctgacagggcagctggtgtccctcaagaaatggatgctggagggtcaggtggacagcctctcagtgactctggggccactgggtcttcctgaactgatggtgtctcagccaggttgtgcgtatgcaattctactgtgtacctggaaaaaggacactgggtcccctcc

SEQ ID NO: 50268 - DNA, 889 bp, Homo Sapiens
  misc_feature (869)..(869): n is a, c, g, or t
  misc_feature (872)..(873): n is a, c, g, or t
gaatatttactgggcctctccgctccctctgctcttggaggtgccatgaggtcagttagctacgtgcagcgcgtggcgctggagttcagcgggagcctcttcccgcacgcaatctgcctcggagacgttgataacgatacgttaaatgaactggtggtgggagacaccagcgggaaggtgtctgtgtataaaaatgatgacagtcggccatggctcacctgttcctgccagggaatgctgacttgcgttggggttggagacgtgtgtaataaaggaaagaacctgttggtggcagtgagtgctgaaggctggtttcatttgtttgacctgacacctgccaaggtgttggatgcttctgggcaccacgagacactaatcggagaggagcagcgtccagtcttcaagcagcacatccctgccaacaccaaggtcatgctgatcagcgacatcggtgggcatgcctacctttgcaggcagccaggagagtaggagtcagtggatactagagcatatcccaagggattggggtgagagggagaatccgtattcatgtatgcatttgttatgtgctgagctcccatgataagccaggcatcactcaaggcactggaattgccatagtgaataaatagacaaaaattgctgccctcctgggccttattatgaagaaacagaaaagaaacaatataggctaggtgtgctgcctctcgcctgtgataccaacgcttttgggaggctgagatggggaggatcactttgaggcccaggagtttccaggcctgtaattgaggctattgattctcacccacttggcaccttccactttccaggggttggggaaccccctggtcctccttatttttaaaaanaannaaccccaccaggcgct

SEQ ID NO: 50269 - DNA, 776 bp, Homo Sapiens
  misc_feature (22)..(22): n is a, c, g, or t
  misc_feature (26)..(26): n is a, c, g, or t
  misc_feature (30)..(30): n is a, c, g, or t
  misc_feature (39)..(39): n is a, c, g, or t
  misc_feature (45)..(45): n is a, c, g, or t
tggttctatcattggaaccccnttgngaanatttgtaancccttnttctcgggacgcgcgccattgtgttggtacccgggaattcggccattatggccggggatgtctttgactgttggaaaccttgcagagcaagaatttgtaaccattgcacgtcactaccgtgtgcctgagggcacatgttcagatatggatttcttaatcgcactggcccacgaaaagttcaagaaaaatatgtttgagaatttcgacactttcatttattcctgtgtgtatgaagatcgagaaaaaaaaatgtattacccaccaaagacattaaaaggctgtgcaaatcctccagattacctttgagtgatgatcttctagaatccttattgtcaaggtttgaagacagtgaaaaacaaatagattataagtcatttttctctgccctgaactggagaaagaatccagtgcctgaattgcaaccagcatcataccttaaagagagatgtgaagatgtttggcttggtatgccatcacctattcctgcgaaatacattgactactggacctttttgaaggacgcgtttggcttagaggaggaataaccatgccagttttggtcaattctctatgatttacttctctcattttgccacatttactttagtagatataatttcattaaaaacaagaaacaaggtttatattaaatggaaatccatccacaattaatcctattttgcatgttaagtttaccagcatcatgtacattgccgacgtactgttacttt

SEQ ID NO: 50270 - DNA, 725 bp, Homo Sapiens
tctagcgaggtgacagcgtagaaccagccctttctgatctctttttcatgctcctccttgctccaaagaaaagccggatggcaaaagagcccagaacctattggaactgacaaaatcaagtcacggcgcctacaaagatgaggggcagattctggctgccttttaatttcgtccttcacctgatatctgtgccagagaatgtcttccaggagttctgctacagagaagagagtaacccccatccatcatggccaaagcacccagtcaggctccgctctggatccagcccgacaaatgcaacccttgaatagggtttgtgcaagcaaactggatgacgaccgaagaaaccctgtcgcttctgagaagacacccaatccaagaatgaaagcatcaggttcaatacctaggaactcctgtagagggtgttgtggaatcttctttaaaagaacaaaacagggcataatcaagtttaatagggtagagcatccaggtgtggtgggtcatgcctgtggtctcagcaatttgggaggccaaggcaggatctcagcaatttgggaggcgaaggcggcagatcacttgaccctaggattcaagactcgcttgggcacatagcaagaccctgctattactaaaaaaaaagtgaacttagagtatgagctgcttaagtcgtggtgtacattgccttttggaggcaaagaggggatctctgaatcgagagttgaccg

SEQ ID NO: 50271 - DNA, 792 bp, Homo Sapiens
cccttcttctcctttactttttgcttattttcaaatattataaaatgtcaacatataatttcagaaaggcaggtgggggtaggagagaaatgaatgaataaattctctaggtatttagaaagataagaaactgaagaccgagagactaataaggctgcttacctaattattataatcatttcatttgcctgaatgttttaagcaggaagtagaaatactttggctgcccaaatgtatcttttgttcctcttagaagtaaaataagctacatacaataaaaatttatttcagaaccccatttctagaaaataccaccccagagtcctcatttgatagcatctgtctcctgcagacctcatcattccacagtatttccctgccatgtaaaaatcctgactttgtgcgtatataaaatgtatgcaattaagtctgtttaaatgatatttaagttttaaagactgtattttgttgacacatactttgtgcagtttttatgtatgtatgtattataaaaaaagttaaggttaaaaagatctcatttaatagtgagttcactatttttttttttttgtctctgggttgtaatttaataatcttcaaacaaaatgtttacgaaaaatgccaaagattctaaatcttatcatcccggtgtctgtttttcttcatgttggatctcactggggttgctttctggctgagccagaattctgcatgatttgattaccttcaagttaatgaagctggctggaaaagagccttgcagaaattataaagctccagtaatctcgtagt

SEQ ID NO: 50272 - DNA, 414 bp, Homo Sapiens
gaggagtgcataacagtaaagaacatttttgagataactaacatttgttttttatagctatttattttcctggggtaaaagaaaaattgtgacaagtatcctagaagaaattacaagttaaaagaacaataaccatatcctctattcttagtttctgatgctttgttttaaaactttgcctttaccacttatatggtattaggaaataaaaaacatggtactttgttctcctgcttcctagacgaaatctaagcaatattttatccacttctttttagtaaaagaaatacatattgcctgttggggtcatgagctatgtagggaatgacaaacttttttaaaggagaattataaagagaaggaggatacaagagaaaggaaacgaaagctggtgggaagttgaccatgtttatc

SEQ ID NO: 50273 - DNA, 913 bp, Homo Sapiens
  misc_feature (744)..(744): n is a, c, g, or t
  misc_feature (747)..(747): n is a, c, g, or t
  misc_feature (757)..(758): n is a, c, g, or t
  misc_feature (771)..(772): n is a, c, g, or t
  misc_feature (776)..(777): n is a, c, g, or t
  misc_feature (781)..(781): n is a, c, g, or t
  misc_feature (844)..(844): n is a, c, g, or t
cagaattctcctttttgttcgaagttcaattttaatcaagacaacccacctacctgcacttgcacccctagcttaaaatgctcgaatggctttttattgtccttaatgatgaaaaggaaatattttatgtgaccaaatatatttgacctatgaggtcagatatattagggccactatctaaagcatagttccaagcattaaaatagttactgtctcagattaaaacagtggctggcacatcacctcaatagaggttacctattcttgttgccacttagcctcatatgtaccatgttttacttaataccttcattgtcctttaagtattcggaatgagaattacagtgcttcattcagcataagacttttgttcatgctgtttctttggcctgaaatatctatcccttcccaattgcctaattaattcctatttgtctttcagatcttagctagttcatcacttcctcagggaaacattccctaatttctgtcacagagtaagacccgttgttatacgtctcacctgaccatgtacctctacttagcatttaacacgtgtaattttgtatgtattggtttgattaatgtcagaaccactagattgtaaactccatgaggaccggaattttgtttctgtcattgtcattgttcaactttgtattttttatgcctcatacagtgcctggcacatagtaggtgctcaattaactttattgaaagaataaaatgaatggatgaggtacnccncccccccccnncccacaccacccnnaccnnccanaccacccactactccctcccctctccatccccgaaaaaactccccggggggcgccccccctanaaatttccccttcggggggggcgccggcttctacacaaatcaccacccttccgtgtgccacaaattggc

SEQ ID NO: 50274 - DNA, 643 bp, Homo Sapiens
  misc_feature (17)..(17): n is a, c, g, or t
aaatcaaggctccaatncccaaagccaggaagatgatctacaaatcaactgatttaaacaaagatgataaccagtcttttcctagacaaaggacagactccctgaaagcgagaggggctccgagagggatcctcaagagcaactccagttccagtagcacagactcagaaacccttcgttataatcacaactttgaacccaaaagcaaaattgtgtcacctggcctaaccatccatgagagaatttctgagaaggagcattctttagaagacaactcttccccaaactccctggagccattaaagcatgtgagattctctgcagtgaaggatgagcttccacagagtcctgggctaatccatggtcgggaagtaggagaatttagtgttttagaatctgacagattgaaaaatggaatggaagatgcaggggacacagaagagtttcagagtgaccctaagccttctcaatacagaaagccttcgctttttcatcaatcaacctcaagcccatatgtatcaaaaagtgaaacacatcagccaatgacttctggttcttttccaattaatgggctgcattctcattcagaagttttaactgcaagaccacagtctatggagaattcaccaaccatcaatgaacc

SEQ ID NO: 50275 - DNA, 591 bp, Homo Sapiens
aaatcattagaagtttacctggcttctcaagttatcttcttccctggttcagactgttggtaagagctgtccagatacccagatgggaaggaaggagacagccgcgcgcttcactccatttgtcacctcatgcatggaccatactctgggtttgagatcattcttcattgaagtttgtaaaaataggttgaaattgtaaagctccatgatcattgctatatgtagatatatttcaatttaagcaaaacaagctgcaagttattccctggcatgctcaaaggattttcgtgcttttcacttaatagtccaaagtctcttaaattcctgctgcagacatcaatagcttatctatattctcaaacaccaaaaggaaaagttgaatcttgctctctttggtatactaatgtagtggtatgctaagctggctcataccaacttagaaaagctgattgtaaaattttcattttgacagctggttattaaatgcagccattattaaaaatcaaatcatacaaacttataattaaatcaattacatttaaaacaaaggtaataaatattcaaagcatatcacttcctaatttgatcttg

SEQ ID NO: 50276 - DNA, 836 bp, Homo Sapiens
ttcccgggatcagcttcacatcacagtactggaatgcggtcagccaccgggcccctgccattatctatgactgctatctgcggctcactggaaggaagcccaggatgacaaagctcatgaatcggcttttaagaactgtttccatgttggagtatttcatcaaccggagttgggaatggagcacgtacaatacagaaatgctgatgtctgagctgagtcctgaagaccagagagtattcaactttgacgtgcgccagttgaactggttggaatacattgaaaattatgttttgggagttaaaaaatacttattgaaagaggatatggctgggatcccaaaagcaaagcaacgcttaaaaaggctccgaaatattcactacctctttaatactgccctcttccttatcgcctggcgccttctcattgcaagatctcagatggctcggaatgtctggttcttcattgtaagcttctgttataaattcctctcctactttagagcatccagcacgctcaaagtttaagagcatttagccatcgctttttatctggaacctctcagatacctctaaaacagcaaactgtgattctcaagattagaaagtaacaaggaatatgcccaaactgtcaaatgtcacctgttatgtattcgtccctattccttaactatgtatttttatttcagtgagagaaggaaagttgtaaactagcccatagtcacctatattttagggraaaaaatccaaattgtttcctaacattctattttatgcccttgcgtattaaacgtgaaagtactcccacttttctatatttwgtttttcttttctctctga

SEQ ID NO: 50277 - DNA, 754 bp, Homo Sapiens
cggacgcgtgggttttctcggcagatctgcaaggctggctttaagagcacaaggagggaaagtaacgaaagggctggactactataaaagttacaaatacgtagttagaccaatagatttatatagtcaggtttttgtcatgtaatttattaactaactattacagaaacacagctaagaatatcaagtatttctctggctcttgacagaaaaaaatcagttgacttaaccctttgctgtcaaaagagttggcgtttcctgttctgggtgctactgccaaacgttatggtacttagagtcgggatgcacaacttcaaccaccgacttatcaatgcagccgcctgtgtattgcaattggccgttaccttaagcactgagccacccgggtttagttcagccatttcaagaagtatatttaacgtcggtagttctgctttattaaaatgcagcagaggtactcttctgtcccttccgtttatagttctctgagagagttctattttttggttttgttttgtgttttcttttgcattttgtatcttgtatttatccctgaacatgttttgtaccttttttttttttttttttaagaaaaggaattcttttgtgtatatatagatacttgcatgatatactgtagtcaatgttcggttcctcaaaagggcttgctgctgtcaggggttatgcactccatccatcataactggatgaaacacatttcatatgtaaaataaacgtgggacatttggccctt

SEQ ID NO: 50278 - DNA, 576 bp, Homo Sapiens
tgacttagtaataaaatagaggcaaggctatataaactgcagtatttctatacgatggaatttatgtagtgactttaaagactatggtccaggtgtggtgactcggctctaatcccagcaatttggaaggctgaagcggcagaatctcttgaggccaggagtttgacaccagcctggacaaaacagcaagacccccatctctacgaagattttaaaaaattagctgggcatggtggcacatgcctgtattcctagctactagggaggccaaggcaggaggattgcttgagctcagtaggttgaggctacagtgagccatgatcatgtcactgcactccagcctgggtgacaaaatgagaccctgtacccaaagcaaaaaagaagcctatgtaaaaatatactgtttaaaattttgtgaaattaaaatgagtctataaaatattcttccaatatgtaggggaaaagacatatgaataagacaaatgaaaaattgcatatggtggggaaattatcgctaaaataatattttaaaaatataacttattttcaataaactttaaaaatgtaaaaaaaaaa

SEQ ID NO: 50279 - DNA, 562 bp, Homo Sapiens
  misc_feature (503)..(503): n is a, c, g, or t
  misc_feature (512)..(512): n is a, c, g, or t
  misc_feature (514)..(514): n is a, c, g, or t
  misc_feature (525)..(525): n is a, c, g, or t
cagacactggcatcaattacaaaatcactgctgtttctgtgattcaagctgtcaacacaataaaatcgaaattcattgattccatctctggtccagatgttaaacgtttataaaaccggaaatgtcctaacaactctgtaatggcaaattaaattgtgtgtcttttttgttttgtctttctacctgatgtgtattcaagcgctataacacgtatttccttgacaaaaatagtgacagtgaattcacactaataaatgttcataggttaaagtctgcactgacattttctcatcaatcactggtatgtaagttatcagtgactgacagctaggtggactgcccctaggacttctgtttcaccagagcaggaatcaagtggtgaggcactgaatcgctgtacaggctgaagacctccttattagagttgaacttcaaagtaacttgttttaaaaaatgtgaattactgtaaaataatctattttggattcatgtgttttccaggnggatatagntngtaaacaatgngaataaagtatttaacatgttcaaaaaaaaaaaaaaa

SEQ ID NO: 50280 - DNA, 640 bp, Homo Sapiens
caagaagactttctttaataaaacatccagagtgctccaccatgagtggtgggaaagccatagaacatttggccaaacaaggaaatagatttcattttgacatcaaacctcccttgcatcatgctaaaaattgtgatttttcttttactggacttcaacacgttactgataaaataataatgaaaaaggaaaaagaggaaggtattgagaaggggcaaatcctgtcttcagcagcagacattgctgccacagtacagcacacaatggcatgtcatcttgtgaaaagaacacatcgggctattctgttttgtaagcagagagacttgttacctcaaaataatgcagtactggttgcatctggtggtgtcgcaagtaacttctatatccgcagagctctggaaattttaacaaacgcaacacagtgcactttgttgtgtcctcctcccagactatgcactgataatggcattatgattgcatggaatggtattgaaagactacgtgctggcttgggcattttacatgacatagaaggcatccgctatgaaccaaaatgtcctcttggagtagacatatcaaaagaagttggagaagcttccataaaagtaccacaattaaaaatggagatatgatttctgct

SEQ ID NO: 50281 - DNA, 711 bp, Homo Sapiens
  misc_feature (669)..(669): n is a, c, g, or t
cgtatgttctgagtcttgctgtttttacctggtaatatttagaaacatttattttgagataaaggagagcacttttaagttgaacctgtagttttaaaaagtacatttcaagtaagccaaagcagagaagtaaatgtatttttcattgttgtatcagaattttgaatttactattttaaaaattcaagagttttgtagctgatctatttcttcccctcagccatcccaaataggtcatttgtcaacagatttaagaatgtttagaaacaacaactttgggaaacgggaaacaatttggtataagtgggtgtgccataacctctctcgtagccattcattcccggatacataccctagagaaactcttacacatgcgtaccaggggatggatttaagcatttgtgtgtaataggaagaaaagaagaaaaaacccgggaagatcccaagtgtccaccaacagtgtgttggataaatactgtggtatattccaacagtggaattccacagaagtgaaactgaactgcagctatgtatgtgaacatggacaaaactcaacaatagaaggatcaaaaaaagcaagtcacagaagaatacatcactatggttccatttcaatgaaagtcaaaaacaggctgtcaaatacatgataaaaggaaacgattaagacanaatttaatgttagccgttttgatggagggagaggtgatcatg

SEQ ID NO: 50282 - DNA, 615 bp, Homo Sapiens
gtcctagagaatcacccaggaaccaattctaactatcaaatgcatttgctgaaaaaaaccctgcagaaatgcgaaaagaatgggtggatggaacagatctctgggaaagggttcagtggcaccttccagctctgttttccctattatcccagcccaggagttctgtttccgaagaaagagccagatgattctagagatgaggatgaagatgaagatgagtcatcagaagaagactctgaggatgaagagccgccacctaagagaaggttgcagaagaaaaccccagccaagtccccagggaaggccgcatctgtgaagcagagagggtccaaacctgcacctaaagtctcagctgcccagcgggggaaagctaggcccttgcctaagaaagcacctcctaaggccaaaacgcctgccaagaagaccagaccctcatccacagtcatcaagaaacctagtggtggctcctcaaagaagcctgcaaccagtgcaagaaaggaagtaaaattgccgggcaagggcaaatccaccatgaagaagtctttcagagtgaaaaagtaaattttataggaaaaaagggtatcatgatgaaaattcaaaatcttattttctaag

SEQ ID NO: 50283 - DNA, 757 bp, Homo Sapiens
  misc_feature (734)..(734): n is a, c, g, or t
  misc_feature (742)..(742): n is a, c, g, or t
tgggaatccaatttgatgtgaagttttggtcccaacacatttccttcattcttgttggaataatcatcgtcacatccatcagaggattgctgatcactcttaccaagttcttttatgccatctctagcagtaagtcctccaatgtcattgtcctgctattagcacagataatgggcatgtactttgtctcctctgtgctgctgatccgaatgagtatgcctttagaataccgcaccataatcactgaagtccttggagaactgcagttcaacttctatcaccgttggtttgatgtgatcttcctggtcagcgctctctctagcatactcttcctctatttggctcacaaacaggcaccagagaagcaaatggcaccttgaacttaagcctactacagactgttagaggccagtggtttcaaaatttagatataagaggggggaaaaatggaaccagggcctgacattttataaacaaacaaaatgctatggtagcatttttcaccttcatagcatactccttccccctcaggtgatactatgaccatgagtagcatcagccagaacatgagagggagaactaactcaagacaatactcagcagagagcatcccgtgtggatatgaggctggtgtagaggcggagaggagccaagaaactaaaggtgaaaaatacactggaactctggggcaagagatgtctatggtagctgagccaaacacgtaggatttccgntttaaggntcacatgggaaaagg

SEQ ID NO: 50284 - DNA, 489 bp, Homo Sapiens
gggtattacacatggatggtgagaactttagaattgttttggaaaaagatgctatggacgtatggtgcaatggtaaaaaattggagacagcgggtgagtttgtagatgatgggactgaaactcacttcagtatcgggaaccatgactgttacataaaggctgtcagtagtgggaagcggaaagaagggattattcatactctcattgtggataatagagaaatcccagagattgcaagttaatgaattttcatcttaagaagtaaagatcaggactttttaattactgtggtaattaaatgtgttcagtatgtacttatcagtacatttagtctgcaatgttttaattttttaaaaagttacatgaaactaacattccaagggtcaggaaaaaaaccaattatgtatagtcataaaaattacaatttatgatgcaaataatgtaaaatgttttaaagacaaatggcaaataagatatggaccaaagtca

SEQ ID NO: 50285 - DNA, 591 bp, Homo Sapiens
actccatctccaaaaaaaagaaaattacgctaaatatttttgttcagacattttaacatatattaaatgtaaaatctagtatgtttattgagttaattatgagtaaataaatgtaaaacttggattgtgttgtcagctttttaaactcttatttcagtattaggtatattcagatgcttacaaagacatttttagacaactgagcatcaggatttatcacataggtcaaaaatttaaataaacaagtggctatattatgtggcccatgtgtggagcagttttgcttttgttcagtaacagatgaattaagagccttgcccaggaatcttggttcaggatgggtggtctacacatggtctgcttgttaagtaccagtccattatgtgccaggtagtgattcctatttcagagatgagaagagaaccatgagaaaaagtaggcctgtgtaagattaaaagtaagactgcaggcctggtgcagtggttcacgcctgtgttcctagcactttgggaggccgaggcaggcggatcacttgaggtcaggatttcgagatcagcctggccatggtgaaaccccatctctagtaaaact

SEQ ID NO: 50286 - DNA, 590 bp, Homo Sapiens
  misc_feature (580)..(581): n is a, c, g, or t
aagaaagacgatgaggagggggacccgctggaccagctgatctcccgctctggctgtgctgcctcccactttgcagtgcaggagtgcatggcccagcaccaggactggcggcaatgccagccacaggtgcaggcgttcaaggattgcatgagtgaacagcaggcgaggcggcaagaggagctgcagaggaggcaagaacaagccggtgcccaccactgagaccccaaaccacctatccccagtagatggccctgccaagaccagcacccagcaagattatagaggaagaaatcctaaatgctggtgtgggaggtctaaaacatggggagagtttttggatctggagttgagagccatgggtttggacatgactggcacaaacagctgtcatatgttcatggtcagatgtcatacattctcagctgtcttgttccaccagtatttaccaggaaaacaaagaatgtgttaagggatgctcccccaccccacatcttaagtcagtgtgccaagtactgagatgattttagggacattttattttaaattaaatttacaatctaatggtaaattgattacctannaaaaaaaaa

SEQ ID NO: 50287 - DNA, 786 bp, Homo Sapiens
  misc_feature (768)..(772): n is a, c, g, or t
  misc_feature (774)..(774): n is a, c, g, or t
  misc_feature (776)..(786): n is a, c, g, or t
aagtgtccttctctgatatgggcagcatcacaatccagcctcaaaagaagccaccttgggcttccaagacacaaagcaggggatatggagaggtgtctgcactagagtctggatggtgctactgacaacagtgagtgttcagggtgactgctagtgctgtgcagtgctgagcgccacattccatgggaccacgtgtcctttaataaacatattcagcgtgcgcttatggaactcatggcttctaaagcacaaggcgtatgtttcaagcatagtgctatccctgagcagcatttgtaagcctccagtctgcaacagtgggattacctaccaggctcagctgatggaccgggatgatattggaagagaggctgccagcctgaagacttacctggaaacattttctcgttggtctggttttaataaaatcaccagattccactagaaggaaaccaaagattacaaaggtccaaattaatatatgacaaagtagaaacggaaactgggaggaaatgaggtgaaacacaggggatgatgtattggaaatagggaatgaaaaccgtacagagtagaaacacctgaaagcagttctggaaactccacatgctcctgctgtaccaagacctggtcctatgtgtgctgaccttgttcttctgctcacatctgccacatctgcaaatgtggcaacattttagctgttttctattaacactgaagtactctgagagcttggaaattttcaagtgcaaaatcaggtccagagaacagtannnnnanannnnnnnnnnn

SEQ ID NO: 50288 - DNA, 615 bp, Homo Sapiens
ccttcatccttcatgcacccaacctgtaccaaacaccagcatggcctggctgtgagtgcacagcagatggaggtttgctgggcagagacactgggctggcctagacactgcctttggtgataccctaaaccaaaggggccagtcccacagtaagaaggagaccactactactcctgctgccctcctccccccaccttgcctagtttacaagacaggaggaaagagagaaagcaaaaagttagaaaacaaaacaaaacagaagtaagataaatagccagaagaccttggcgacaccacccggccctggtagttaaaaaaaagtaacaataataataatatcaacccctgacctaaactacttgtgttatctgtaaattccagacattgtatgaaaaagcattgcaaaactttctgctctgttagctgatgcgtgtagcccccagtcacgttccccgcttgcttgagatatcatgaccctttcacgtggaccccttagagttgtaagcctttaaaaaggccaagaatttctttttcagggatctcagctattaagatgcaagtctgccaatgctcctggccaaataaacctcttccttctttaaaaaaaaaaaaaaa

SEQ ID NO: 50289 - DNA, 660 bp, Homo Sapiens
  misc_feature (500)..(500): n is a, c, g, or t
  misc_feature (631)..(631): n is a, c, g, or t
  misc_feature (651)..(651): n is a, c, g, or t
  misc_feature (658)..(658): n is a, c, g, or t
ctgtgttgtctctggacaagattgccaagcgcgagtgccaggtcctggtggtggaacccgtcaagtagcaccgtgccagctctgttccctcttacactccagagacccaacgcccccagaggggatccctgctcccgggctgtgcctcccctgggatgcctcccagacgggggtgaagaggcctggcagagctgcctgtcttgtgtctgctgatgagggatgggggaagaagctgtgaagtgggcgggcatggctgggactaagccaccagtattccccgagttcctgtggggggggctggccccacccctaggccagggcaagggttcccagagctcccttgtccccggccctttaccctggttctgagtttacaaagtctcttcctcattcccgttgagttctttcccacctctgacattccctccctccctcccgcagggctgagattagagggtggtgatggctaagggcccctgacagtgaccttcctgtctcangggttggggacagggccaggtagcctcctgccccttatgtttacgtttgcagcctgaagcactttaattttttttttttttggtctgttcctgtaacttattttccaactattgcttccaactgaaataanactattaaatgcctgttcangaggggnaa

SEQ ID NO: 50290 - DNA, 852 bp, Homo Sapiens
ggaaatacagaaaaggtgagaggaagcaactttcattgtatcgtagcaataaactccacactgggtgacatctacctagaaatcccttccctctaaccaggccatgatgggaacctttgctgcctgcccttggagaaccccggattggcttccctgggactcaggtctggtggcaggagggcagcagtgtgcccccaccatccctcatggcctgccgccagcagggccataatggcaggactttgatttgacttccagccccacatgaggaggggggctaccaagccaggtgcagtgtttgtggccctttatttaagttgttttcttatattattctgcatataaacaatgacgtttaaatggaaaaaacaacaacaacgaaaacctccattgggtggagccacactttaaatgaaaatttctctttgactatgctcagaaaaaaaaatagaattttgaatatatttagcaggtgttgtctatttttacctaactccatatgctgccagtatcgacttcatgacatttgcccaaataaaattttatttttgcctttataagattttcttggaaaaaatgaattgaatattctgcaagaaaaagttaatttaaaaaggcaatggctcggcaaaaaaaatgggaggtacagattacaatattaacctggaaaaacccccatccagggccgcccccccccgctccaccggcggatcgcgcccccccctcccgttaccgtttccgctcatcccgcggcgcccacgatattccccccgcaccaaccaatgcaccggtaccgccgcctcccccgccgggttcagcatccccctgtcccccccgccccccccgttatac

SEQ ID NO: 50291 - DNA, 618 bp, Homo Sapiens
  misc_feature (363)..(363): n is a, c, g, or t
atcttttcctgaccatgtaatctaaagtagaatcctactttattctttttcagtttatactgttctttttctcttcactgtaatcaccatgatttataattctacatttgtttaattgtgtcatatatatttcttttatagctcataacttctaggagaactggttagccttgggtatctgctgtgcctggcacaatgtaaattttaaatgaatgaacacaaatgaattgtatttccacaattttgaatcttggtatagtggaaagaatattactctggaggtcaaggggctgtagttcttgtcttctccatgaatattctttatgtgccacttctaccatctgtgaaacgagggatcgtagngggaacttgaggaagtggtattagatgatcattaatagtcctgtcagcatattattgtagggttttatgaatattataattgcattttagaccataataaccaaacattacatattgatatatttaatttttttatttaagtggtacatgatcagcattgtccacatttacaatcgatgggagaacagtgaaattcagtgttatgttaatggacaactggtatcttatggtgatatggcttggcatgttaacaca

SEQ ID NO: 50292 - DNA, 770 bp, Homo Sapiens
  misc_feature (565)..(567): n is a, c, g, or t
  misc_feature (569)..(569): n is a, c, g, or t
  misc_feature (572)..(574): n is a, c, g, or t
  misc_feature (576)..(577): n is a, c, g, or t
  misc_feature (579)..(580): n is a, c, g, or t
  misc_feature (583)..(585): n is a, c, g, or t
  misc_feature (588)..(589): n is a, c, g, or t
  misc_feature (591)..(591): n is a, c, g, or t
  misc_feature (593)..(594): n is a, c, g, or t
  misc_feature (607)..(607): n is a, c, g, or t
  misc_feature (625)..(625): n is a, c, g, or t
  misc_feature (643)..(643): n is a, c, g, or t
ggatgctttcatgtctcaaatcaaggcctaaatgagtaaaaagatgattacagattacctaaaacccttaaccagttttggtttttgattatgcatatgtgttggcttgcaattaggtttttagtttctgtttatgtgacttgtttgaaaacattggattcgtcttctctccacagtttctacttgaacctagtagcttattttaattccctgtaagaggaaaataatatagggaatctgttcaactattcctttaataaatcatgtgacttggccaattacagaaattcctaagtgtagtattttgaaatgtggccagtgtcccagatttgtaaggtacagtgtgcatacagtgtgtcttaggatttttttaagtaaattaaggatgtttaccagaaattattgatttactgaaccaagtatttattttcagaagcccacttttggggaaggttgcctatatttttgatagtaattagatggaagattaaatcctgtttaacctggatagaaacagttttaactattgctgaagtaaaatcacttggggtgggggggggggtgnnntntgnnngnnannccnnnggnngngnngagggtggggccngaggattggttgaggggngggaatttgaaaacaagnttggggaaaattaaaataaaagatggattcaagagaataattgaaaaagtggaacgaaaatgggggtaggggaaattgccaaaaaatcctccggtcttcttaagagaaggtatgaaagtaaagaaaa

SEQ ID NO: 50293 - DNA, 385 bp, Homo Sapiens
  misc_feature (381)..(381): n is a, c, g, or t
agcacccttcccacagtagcgagacgcgcactgcggtccagcttgttgtgacagagcgagactctgtctcagaaaagaaaacaacaaatcagttgccttttacatactgggtccacataaggactgtgctatagttagattgtcaacatcacatatagtgtcctggtcaggctgcaactctctccaaagcatgctcttcacatgctttagttcaaaatgagtcattatatctgattgctgcgtggcaggctattctgctagtccttcctttcacatcccatttcagtaatggtgcttgaaattgtgcttcagtgtgtcttataaactttggtctgagagtcacttaagagaaagggctgactgtagtggctctcaccagtnatcc

SEQ ID NO: 50294 - DNA, 602 bp, Homo Sapiens
gcaggtcatacctgcttggaagaaaactggaaagctgaagactttttagtgaaattcaaggaacaccaagagaagtattctagatcagttgtaagcatcaaccacaaaaaactggtgaaggagaagagtaaaatatatgaaaagacatttactctaggcaaaaaccctgtgaattcaaaaaatctacctcctgaatatgatactcatggaaggattttgaaaaatgtttcagaattaatcatcagtaatctaaatcctgcaagaaagagacttagtgagtataatggatatgggaaatcactcctgagtactaaacaagagactactcatcctgaagtcaaatcccataatcaaagtgccagagctttcagtcataatgaagttcttatgcagtatcagaaaacggaaactccagcacagtcatttggatataatgactgtgagaaatcattccttcaaaggggaggcctgattacacatagtagaccttacaaaggagaaaacccatctgtatataataaaaaaagaagagcaaccaatattgaaaaaaaacatacatgcaatgaatgtgggaaatctttctgcagaaaatcagtattgat

SEQ ID NO: 50295 - DNA, 500 bp, Homo Sapiens
tggagatggctttctattagcctgtaagatctacctcatttttttcactgctttgtgatatccattgtatgaatgtaccataattcatacagtccccctgttgatgggcctctaggttcttttctgccttttgctattacaaacagtactgtgccaaatatccccgcacactgtccctggataaattgatgaaattaaatcgtaggtgcatttgttattttgatagaaattggaaatgtagttcccagtgtgtgtatgaaaatgttcattcccctgaatcctctgaaactattgtgttgtttctgatctcataaatgaaaaatgctctcatattttaatttgcattcaactatgagtgaaactgggtaccacagcccatgtttaaaagtcatttgtatttattttctgtgactggcttatttgcgttctttagcagtttttctgttcatccttttaataatcaatttgtacaaactataaagaaattatccttatctgct

SEQ ID NO: 50296 - DNA, 732 bp, Homo Sapiens
  misc_feature (629)..(629): n is a, c, g, or t
  misc_feature (732)..(732): n is a, c, g, or t
cacgaggagcatgcagagcagcaaagagagagcaaccaccaacatcatccagccgctgctccacgcacagtgggtgctgggggactggtctgagtgctctagcacctgcggggccggctggcagaggcgaactgtagagtgcagggacccctccggccaggcctctgccacctgcaacaaggctctgaaacccgaggatgccaagccctgcgaaagccagctgtgccccctgtgattcaggggggcaggggccagtcttgtgctcctggacatgcggtactgaggtgcagacaagggtctccactgtggtgactgggtcccttggccatatcaaggcagcacggcccacccaggcctcccattgccgcaacccctccagtactgcacaaattcctaagggggaagaggagagggtatggggcggcagaccctatcatcaactgtccagtggactggaccttgctcgggttcaagtagagggcataggttaaaaggtaaaagtgcacttattgactcagacaggacactcagcgtcagtctgtttgcaaaggactagcaaacttaaatgaaaaaaaaaattctatctggtttccccgataaataatctacctcacaggggaaaaaattantacaagagaggcgtgtggcagggagtcaatggtgaatgtcaaagcatgctccaagctggactcaagctgtctcaagaatgacacactgtcttcatgtaaaatn

SEQ ID NO: 50297 - DNA, 511 bp, Homo Sapiens
gggaagggcacgactcctggactaaatcagatccctgatcagagaatgtttcaccctgaagtcagcttgttcttaggaggagcataaagaggggttgaatgttgactcaggctgtgggtgggacaaacctcaggcaccttggagaaggggagaaatttaagcaactttggttaacacatattttgttttgaccatcgaagataaaactctttatttaattgcttatgagggggaaaaaaaggaaataggagagtttgtggctttgtgatacctaaaacagggagcatcatctaagtcataacaggaagaagattctttgcagtaagctgctcttgaagaacaaaaaggaagggggatttctttcatcacagctgcttcccagggttaactacctactccatcttttccccactcctttctcttgccctacacatctcttccattaggctgagttgtatcttttataataaactggtcaatgcaattacaaaaaaaaaaaaaaaaaaaggac

SEQ ID NO: 50298 - DNA, 735 bp, Homo Sapiens
cagcttcccaggtgattcaaacgcagtggctcacggaccccactttgagaaacgcagactgggctgtttgccttcagaagctggactggaaatggtattttgaggagaactgaatccactttgcaaagaatgtatgctggacaaagacaaagtatctctgtagggagacgttgttcactgaggatttagcaagggagagcgtaacttgagtgtttgaagccgtctcgttcaaccgatgggggttgtgaattttgtgttcagagcgtcagaggacttgcaggtgaaatagcttccttttggattactcccacaaagctcagacactttgagacatattcgggtaattatctgctgataccagtagtaacaggttatactaagatgtcagttcctaagatctgtcacacagcgaggttgtggtgcggatagcataagtgtctcttgacactgtagtttatatgtaatggttgtaattcagttttaatgatgagtgaagctcagacttaattttctctcttattttgaagtgagttttctgcttcaaaggtgtcgtgcaaaaaacaaaaaatagacggtatggggggggttgacacaaacctgaagtacacctttttcttgctcgaagtctgtaaaagttccagatttatcaaaaactgcacaggaattggggctacagaatctccatgggtgcttgctatcctcttccctagtcatttgttgccagggtcaaaagtg

SEQ ID NO: 50299 - DNA, 753 bp, Homo Sapiens
  misc_feature (630)..(630): n is a, c, g, or t
atatgtgttacttttattcaggtgttctgtggatatgaatataaatgagaaagttgaaacatagttcactaacaacattttgaaatgagattaaaatcactaacaacattttaaatgaggtgaattgtatgtgatgtggactaaactagatagctgtttaaaaacttgtttagagaaaatacaattatagttttagatgacctagtgttagtctagattaatctagtcccatcctctagggattggaagtccaagaggggaccattctaagaatggttgtgaaccccttatagaatctgatgaaagctgtggattttgttttcaggaaatctcacttgtccattttcacacggtttagcataaagtttagtctgtttagcctaaagcattgttgggcttacaggcctccagctcctgagaggtctgcttcccgcttgatccttttatctgtttacttggctctctggagcatgagagtaggtgaacatggagttttccaaagcagggggcctaacttacttattgagctaggcatgtaacaggaagaaagaagtaaagggcattgcaagctgaccaaaaagtaatactttaaagagaatatacttttcccaagttatttctattatttgncttttttctcttttccagttaaaagtttgggcagggtgcggaggctcacatctgtaatcccaacatttcgggaggctgaggcaggcagatcatttgaggtcaggagttcgagaccaccctggc

SEQ ID NO: 50300 - DNA, 841 bp, Homo Sapiens
tgactttcaactgtgccacatgtactggaattggcctggcaccatcagagttccagctccttgcaagtatgcccacaagctagctttcctgtcaggacacatcttgcatcatgaaccagccatccagctgtgcgagaacctgttcttcctgtgactgcacagcttggagatgggctggtgagaagaaaggcggcctcagaactcagctgtgactcttgcagaatcaacagagactgaagtgggcttttgtgttataattttccctttctccaaccctgtagaataagatttctttcttgtcttttaaacctaatatcaccaagaagcaagtttctgagtaacagctgaaaatggccttgttgcctgtgtagagcaagttacggtggtactgccactctgcaggtggagcgggtgactctgggggaccattaagacctccagaccgggtgcggtggttcacacctgtaatccaagcactttgggaggccgaggcgggtggatcatgaggtcaggagatcaagaccatcctggccaacatggtgaaaccccgtctctactaaaatacaaaaaaattagccgggtgtggcggtgcacgcctgtagtcccagctactcaggaggctaaggcaggagaatcgcttgaacccgggaggtggaggttgcagtgagccgagatcacgccactgcactccagcctgttgacaaagcaagactctgtctcaaaaaaaaaaaaaaaaaagccaacatgagctgcagaaaccagcagaagcagccattatacttctaagctggtgccaactaaggggttcccatttctggagccagagatggataattaagtc

SEQ ID NO: 50301 - DNA, 884 bp, Homo Sapiens
  misc_feature (713)..(713): n is a, c, g, or t
  misc_feature (715)..(715): n is a, c, g, or t
  misc_feature (727)..(727): n is a, c, g, or t
catttgggatttgctgcaaaatgacccagaggcaggggtcagggggagaggtagagatgagacaagaggtagaggggagaggtagaggtagccacgagctgataattacagacaagagatgcggagtatgtgggggctcattatcctgcatagtctatctttgtatatctttgaacttttcaagaataaaaaagcttaaaaagtatacatggcctggtcctaccagagactcacccaatgccagcctccagccagggagagccaagtttgcattttcacacgcatctcacactcctctgcactctcaacttggagagctccaaacagggaaaccccaagccttgctggcttctgccaaccccctgagcagaagcatgggtccccctgatcaccacctcaccaccctcatcctgatctcactgtacactccctttcctggtctgctaagtagcgggtgtttttccttgacactaacgctacagctagaccacggtgggcttggcaacaggtgtcttcccagatgctggcgttaccgctagaccaaggagccctctggtggccctgtccgggcataacagaaagctcgcactcttgtcttctggtcactcctcattgtcccctcagctcctatctctgtatggcctggtgtttcctaggttatgattgtagagcgaggattattataatattggaataaagaataattactaccnanaaaaaaaaaaanaaaaaaaaaagggcgggccgctctaaaattatcccctcgaggggggcccaagccttaccgccgtaaccccagccttttctttgggaacaaaagtggggtccccctattaggtggaggttcgttattttaataaagcctaagggccaacctggggcct

SEQ ID NO: 50302 - DNA, 354 bp, Homo Sapiens
gtatagacaggttttcaccatattggtcaggctggtctcgaactcttgacctcaggtgatccacctgcctcggccttccagagtgctgggattaaaggtgtgagccactgtgcctggccactcccttgagacccagtttccacgtctgtgaaatgggggaatacccacagtgagaattagatgagatagatgcatttgaaaccacaaatcggggtgcccacctgtggtgggtagttaggtagctgttacaaagtgccccagcagagacccccttgactaacttttattcttccatcttttcccacaggtggcagctgccaacaagaagcattagaacaaaccatgctgggttaa

SEQ ID NO: 50303 - DNA, 1173 bp, Homo Sapiens
caaatgggaaaaaaaaaaaaaaagggaagtagcaggtggagataatttaaatagcacagggacccctgcttaccaatccctccacagagttttgccctggagtaagcatgacatcagggtgcttgctgcttcctccagtggcccgagctctgtgtgcctttgttgaacaaggttttcgtggagctgaggtgactctcatgaacagagaatacctgtccttcatacagagaagcacccaaatgcaaacatctactttttctggtgttcaaccaggtaaacctctgtttagcaagaaacatcatccccagagtggggactgtcttgtcctttcagaagctagtaccctaagcaagactcataaggaaggtcgggcctccataggtctctgtttcttctgaacagtgatgagctaggtgcagagagagttaaaggtcctatgcagcttgacaagtgtgacccagttcccagtaaattccacttggctggggtttcagaggtgagcaagcaggctttttactcattacacaagaatctagacatccctttaattgggtggcattctgggtgctaaaaggaaggggctttgagaggcaaagatgatgggatatcataaatttttttgttccttttaatgtagcgcagctcctatacttcagatttaactttgaaatgtagcatagctaagatctggtccaaaaagatttctgatatctccatgaatcctagttagggattgataggaaaaaaaaatcttgtgccacagcttcatgctatttttaggaacctttctgaaaccagtggcagcccaagttagagcccagcattaagtccgcctctgcacatctacagttgccagcttatggtaaaagctttctgcaaagcttttctgctcctgggttaaggccttccagcatcagtcacatgtaattaacagctacattgtgtgcttactttttgctagatgtttcataaacattatctcatataaacctcacaataactaggtattattatcccgtatccctgttttacagctgtggaaagtgaagtgaaggatttttgtcatacagccagtaagtgccagaactgacttgaacctagctctctgtcttgattcaggaactactgctctttccattggtggctcctggctaatcaatgtgatagtctttg

SEQ ID NO: 50304 - DNA, 884 bp, Homo Sapiens
tcaagacataccagaattccactgcagagaaaccttacaagtgtaatgaatgtgggaaggcttttaatcaacaatcacacctttcacgtcatcatagaattcatactggagagaaaccttagaaatgtgaagcatgtgacaaagtttccatttggaaatcacaccttaaagacataggagaatttatactggagagaaagcttacaaatgtaaggtttctgacaagacttgggagtgattcacacctggaacaacatactggacttcacactggagagaaaccttacaagtgtaatgagtgtggcaaagcctttggcaagcagtcaacacttattcaccatcaggcaattcatggtgtagggaaacttgactaatgtaatgattgtcacaaagtcttcagtaatgctacaacgattacaaatcattggagaatccataatgaagagagatcttacaagtgtaataaatgtggcaaatttttcagagatcgttcacatattgcaggtcatcggtgaactcatactggagagaaaccttacaaatgtcatgactgtgccaaggtcttcagtcaagcttcatcctatgcaaaacataggagaatttatacaggagagaaacctcacaagtgtgatgattgtggcaaagcctttgcttcacgttcacacgtcattagacatcagagaatctatactggacagaaatcttacaaatgtcatcagtgtggcaaggtcttcagtcccagatcactccatgcagaacatcagaaaattcattttttgagataaccgttccccatgaaatgagtatagcaaaccatccagcataaattggacattgggagtcaattcagcattgaccttgagtttgtgttgacttaactttga

SEQ ID NO: 50305 - DNA, 769 bp, Homo Sapiens
  misc_feature (524)..(524): n is a, c, g, or t
gggatctgaggatagtctttactttgctattaactagctgtgtgaccttgggcaagttgcttatctctgcttcagttccataaactaagaattacagagctgaaccggatcttggaagcaatctagtacaaacctctcattttacagatgaggaagcagataatttgcacaggctttcactgtaagacagttgggctcaaaattcagttttctgactctcaggttggtttttttttccattatactttacagcctcttttcatctgtaaaaatgagagcattggattagaggctctcaaaggtctcttccagctcaaaaatatgtgtcattcctgtgacattagtcgtaatataatttattaggggaaagttgtgtagcttttatttatgtggtgaaagaaatgtttcttgaagaggcagtataaccttgtgcaaggttatatttgtttttttaagagaatatcatcaggcgaggtgctatgtctcagggcctgttaatcccagcttgtgggacgaaccaaggncaaagacggcattggctttggagtcccagggacggtcttgaaggaactaaggccctgagtccctggttctcaataaaaacaaaacactcatacaccaacaaaaaacctggtgggggggcgcccggggcccagagaagaaaggctccaaaacccacctcggtggggggcgcgggcgccccaatggggtagctgaaaccggggccacacgcgttcctcaagggaaccgtggccacacaaagcgccgg

SEQ ID NO: 50306 - DNA, 509 bp, Homo Sapiens
aattgtagactgtgaatttttgtgctgtttgaaatctaagagagagttgcctttctttgtattcttggagcaaagtagaaagtgaacccatgactagaaagataatatcaagtaggatattgtaaacacacctcagggagataacatggggtggaggcagacaaacaggccaatccgggggaggaatggagttaaggaaagctctacaatgaggcagattttttaatacccactccttccaagtccttcagctcaagctgcagccaaatatttgcataaagagctggtaaaggattccagcttcctggttcatgacattacagcatggatcgttttcaaaattaatactgcctcctgtttcagcagtggctgcctgcacagctctccctgtggctcagagtatgggagtgagtatgccctgtaacccaaaagaggtgtggtgagctcggcttcccagcacagaatcacagagcaatacgggtacctttaaactttaaagccacacctga

SEQ ID NO: 50307 - DNA, 627 bp, Homo Sapiens
ataagcttgattcagcaacactccatcctctgcggttagctcttctagttataacattgaaataactagtagttatagagcaatgtctgttggcaggcattgtgccatgaacttttatacactatttcatcttaatcctcacagtcctggggcatactacgtataggtagtatcttcatcgttagtttacgatgatgaggagactggaactgtgtggttaggcacctgatagaaggacacagagctggaattcaagctaggtccacctgagtccagagcttgagctaaaagctgtcatgctctactgactgccttgatgtttattggctagaagtcattaagtgtgcctgccatcttatgatttggactggtgagcaggttgttaatattggttagttaaaaaggaaaaagaaaggaaaaaaatactattacagagaattcctgcagcttgttttcttacattgtttgagtatcaaccaaagtccttaaaaggaatggcagcatcactagcagttgcacagaggccctacccacgggctttgagggggacatggcttccttttgtactttcaaagtattttcttactggttttacttggttcattggcatattttgagtgttgctgc

SEQ ID NO: 50308 - DNA, 437 bp, Homo Sapiens
  misc_feature (1)..(1): n is a, c, g, or t
nctagggtacgttatgcagaactcccatgctgaactgagtgattcagaaattcagatggcaaaatttaggatccctgatgaccccactaattatagagacaaccagaaagtggtcatagaccacagagaagtttctgagaaaattcattttaatcccagatttggatcctacaaagaaggacacaattatgaaaacaaccataattttcatatgaatactcccaaatactttttatgaaacatttaaaacaagaagttattggctgggaaaatctaagaaaaaaagtatgtaagataaaaagaaaagattaatgaaagtgggaaagtacacatgaagaacctcaacttaaaaaacacatggtatctatgcagtgggaaattacctccatttgtaaattatgttgcttaataaaaacatttctctaaaaaaaaaaaaa

SEQ ID NO: 50309 - DNA, 498 bp, Homo Sapiens
tatgtgatggccacagtttgggcaaagcccttctttcttttaaatataggaactgttaccaagtttggggcaggcttgaggaataattacataaaaatgggcttccacgatggtgaatcagcatgctgatttctcttggcaggaagctctcagggaaatgtctgtgaatcatttaaagatgctctctggtggatagagaaaccgcagtccaaaaacagatgggtgtatatttgctttgtaagcaaagggcatgtatcatactcgcatctaaaacagtgtccacatctttgccaaaggcactgaattttacctttttttattacctcgtggccagcacttcctcagtaggcatttcaggtgtgtcacaaaccatgttcatttttaatcttgaaaaagtcaatcgtctgtagtctgtactataaaatgatgcctgcaactttgtggtgaatattatccccaagttaacagtgaaataagtaaataaaactattattgaac

SEQ ID NO: 50310 - DNA, 617 bp, Homo Sapiens
gagctgtctgagggcttccaaaagagctgttcagtgaataagaaggaatccaaccatggagcatcagagtctaagttggatgtataggtttgtgtgtcttcagtattgtcttgtattttaagacagaattagatgtgcccatcagaaatgagtgtatggcatgaaaaagttgcagatggtaggccgcagtgaactccaattgtttggaaggcttaacttgaaccttcctaggctagagaattttaaatgactgagatgtttctaatgtgcctagagcttcttttctaatgagcccagggagggctagaatctctatcagagttagtctgggatgtaaaggggatcaggatgtgccaccccaatatatgccactttagcctatggattattttgagcagttaaaaaattagaaatagcagcctgggtgcagtggctcatgcctgtaatcttagcactttgggagaccgaggcaggtggatcacctgaagtcaagagttcgagaccagcctggccaacatggtgaaaccccatctctactaaaaaaaaaaaaaaaaaaaaaatacaaaaattagccaggcgtggtgtggcacgcctgtaataccagctactcgggaggc

SEQ ID NO: 50311 - DNA, 530 bp, Homo Sapiens
gcagactgggggcaggacagccggaagctgagaccaaggctcctcacagaagggcccaggaagtccccgcccttgggacagcctcctccgtagcccctgcacggcaccagttccccgagggacgcagcaggccgcctcccgcagcggccgtgggtctgcacagcccagcccagcccaaggcccccaggagctgggactctgctacacccagtgaaatgctgtgtcccttctcccccgtgccccttgatgccccctccccacagtgctcaggagacccgtggggcacggaacaggagggtctggaccctgtggcccagccaaaggctaccagacagccacaaccagcccagccaccatccagtgcctggggcctggccactggctcttcacagtggaccccagcacctcggggtggcagagggacggcccccacggcccagcagacatgcgagcttccagagtgcaatctatgtgatgtcttccaacgttaataaatcacacagcctcccaggagggagacgctggggtgc

SEQ ID NO: 50312 - DNA, 786 bp, Homo Sapiens
  misc_feature (736)..(736): n is a, c, g, or t
  misc_feature (746)..(748): n is a, c, g, or t
  misc_feature (751)..(751): n is a, c, g, or t
  misc_feature (755)..(784): n is a, c, g, or t
caggccccaggggcctgaagccagagtccagggggaggaggacacgtgcctgccccggcccctcgggagtccgtggctgttttgtaggagttggtgcccttgtgctaccgctgctccaccaacaacccgctgctcaacaacctgggcaacgtctgcatcaactgccgccagcccttcatcttctccgcctcttcctacgacgtgctacacctggttgagttctacctggaggaagggatcactgatgaagaagccatctccctcatcgacctggaggtgctgagacccaagcgggatgacagacagctagagattgcaaacaacagctcccagattctgcggctagtggagaccaaggactccatcggagatgaggacccgttcacagctaagctgagctttgagcaaggtggctcagagttcgtgccagtggtggtgagccggctggtgctgcgctccatgagccgccgggatgtcctcatcaagcgatggcccccacccctgaggtggcaatacttccgctcactgctgcctgacgcctccattaccatgtgcccctcctgcttccagatgttccattctgaggactatgagttgctggtgcttcagcatggctgctgcccctactgccgcaggtgcaaggatgaccctggcccatgaccagcatcctggggacggcctgcaccctctgcccgccttggggtctgctgggctgtgaaggagaataaagagttanactgtcaaannnaanaaannnnnnnnnnnnnnnnnnnnnnnnnnnnnngg

SEQ ID NO: 50313 - DNA, 616 bp, Homo Sapiens
gctttataaaataccttagtatcagctaggtccaagtctccaggcaggactatcaaaatggactccttcttcctatcagctctagaaccccagaggacttgcccagtaggccagctgagcacttaccaggcagcatctccctggccttccacagtctcgcctgtctgtctctggccttggtggacctggctccctccctaggaggcttttgccctcagcttgaatacagttcctggtgcatcaaagctgtaagttctcagctgctggcctgcactcatcacctcttcctacaaataaacatttggaaaaaagtccatcttcaatatgcttaaagagaagggtaggagataaggagaaagaacagatacggtttttttcccctttaaggcctttagattttgaggtactgtaaggggcctagaaggacaaaaggctttcattccctcttccttttggcaggcaggttatcagtccttggcagaagggcccagccctatccttttctgtatcaaacaaaatccttgaggttggtatacaagttaaggctgaaaaaaggccttaaattcccagtaaagaatgtgaaagcaagcatgtaaaataaactggtcttcaaaaa

SEQ ID NO: 50314 - DNA, 513 bp, Homo Sapiens
attaatcctgtttttagtgctgactgggtcagccttccgggaactggagtctgtctctttcagtgcttttttgtttgtttggttggttgttttttgagacagtctcgctctgttgcccaggctggagtgcagtggcgtgatctcggctcaccgcaagttccgcctcccgggttcacaccattctcctgcctcagcctcccgagtagctggcactacaggcacccgccaccatgcccggctattttttttgtatttttagtagagacggggtttcaccatgttggccaggatggtctcgatctcttgacctcgtgatccacccaccttggcctcccaaagtgttgggattacaggcgtgagccaccgcgcccggcctcagtgccttttttaacttgagggtgtagaggtcctccacgcttgtttgcctgaaagtaatataatgatgctgtctgaacaggttttactgcttgctttccaagtaaaggttaattatgataataaagagatttggaa

SEQ ID NO: 50315 - DNA, 696 bp, Homo Sapiens
  misc_feature (344)..(344): n is a, c, g, or t
  misc_feature (680)..(680): n is a, c, g, or t
attatatttgtttttattcctttggaattagtttgtttggttcttgtaaaaaacttggattttttttttcagtaactggtattatgttttctcttaaaataaggtaatgaatggcttgcccacaaatttaccttgactacgatatcatcgacatgacttctctcaaaaaaaaagaatgcttcatagttgtattttaattgtatatgtgaaagagtcatattttccaagttatattttctaagaagaagaatagatcataaatctgacaaggaaaaagttgcttacccaaaatctaagtgctcaatccctgagcctcagcaaaacagctcccctccgagggaaancttatactttattgctcaactttaattaaaatgattgataataaccactttattaaaaacctaaggttttttttttttccgtagacatgaccactttattaactggtggtgggatgctgttgtttctaattatacctatttttcaaggcttctgttgtatttgaagtatcatctggttttgccttaactctttaaattgtatatatttatctgtttagctaatattaaattcaaatatcccatatctaaatttagtgcaatatcttgtcttttgtataggtcatatgaattcataaaattatttatgtctgttatagaataaagattaatatatgntaaaaaaaaaaaaaaa

SEQ ID NO: 50316 - DNA, 708 bp, Homo Sapiens
tttttttttttttttcttagagtactggagaattattgtgttcctttgaaagtgtcataagccttgcttttctgtgtttcctgtgtctttatgtgtctttatattgatttctgcacatctggagaaatagttgtttcattttattttcgaatttacattcattggaggaagtttttttttttttttgaagttattaccataatgtttattgcatagggccatgtggctttacttttgggtttgtgcagtgggaaagactctgtatgagtttcttcagtataaacaaatatatatatatacacacacacatacacacacacatatatatacatgtctgtgtatgtgtgtgtttataaatacatatatatataaaacaaatgttttattgtctcggggtcatcttttctcttaggttgattttgaattctaagtctaagtctaagtctcagaaaacaataaatttatctttgttgtgttggtcattgagggccagcacacctgacatgaaagagtaagaaggtagggtggggtagatggtgagaaattacttaatagttataatgtacattattcgagtgatggataccataaaagccctgacttcaccactatgcaatctatgcatgtaactaaattatacttgcacccaacacatttgtatacataaattaaacacaaccactagttaaaaaaaaactcgtgccgaat

SEQ ID NO: 50317 - DNA, 642 bp, Homo Sapiens
  misc_feature (598)..(599): n is a, c, g, or t
  misc_feature (601)..(639): n is a, c, g, or t
cactctgtgccccagcttccgccccagacctccgggacaggagcaaattgcaccacagctccccgcctggcctggccctccccaggcggctcagtggctcatgctgtcctgtgagagcccctgccccagagcggccccactaagcgcatgtggctcctgggctacccacagccagggcagcctgctggagccacagggccagggccatgcagatggaggcctctgggagccacctccaatccctcaccactcactcaaccagtggcacagtgtccttgtgcccacactgagccagcaagtcctgctgtccacacccacaagctacctggagggacaggacccacctccatccttcggaaggccttcctggaatcccaccttggcctccgccctcggttccgccccgcccctctccccccgaccttggggcttgtgtcgagcccttgggtggggccaggaggaggtgatggcgtcagaggaggtgtggtcagaggtgacttgttcccacctccagggaggacgcttcgtcttcggccagcgcagacctggtgtttgtttgttgggctcacgcttgcacaatgaaggcttgttcacacannannnnnnnnnnnnnnnnnnnnnnnnnnnnnnnnnnnnnnnggg

SEQ ID NO: 50318 - DNA, 727 bp, Homo Sapiens
tacaacagagaaaacagagttgcccaaatatttaaaagaagttattccttgagaagttcatattttgtgacatctgcattgatttcagtattactgatggtactgttattcataagtcatattaacattctctccgtgaaatcatggtacagtcactgcccagaggtactgaggaaaaagcaatatgggttcggcagatggtggtggtaaaatgaatcttaaggagtgtggtaaatatgtgctccgcttttgttgcatcactatgtgaagtactgtgttgcagaagtggcaaaagcgcttatttttaaaaatgcaaaatatttgtacaatgtaactttatgcttccaaataataatgtatgttagacagcaagaaatgaatactttaaaaagtgatatatgttggagttataaagaaatacactaaggagaggtagtaaatgtgaaccttgttgcagtgtataaggtggaagcctaaagaaatctcaccgaaacttactgctgaatgattacattctcccttaagcagaaaactttggatgtgccatgcaatggtgtctgtgtaattattttgctctttgattaaaaaaaagacccccagcaataaaaagtgggtcactctatgccctctgtgcacattagtctcttgtattcaactttgctgattctctggaattttcctactctttagcataattttgatgattgaaaaatattttggaaaggat

SEQ ID NO: 50319 - DNA, 503 bp, Homo Sapiens
ctgaattacgagctagtggccaaatcctaatggaatttgagacaatgaagcttgaggatttctggtgtgcccaattcacagcatttccaaacctggcaaagacagctctagaaatccttatgccatttgcaactacatacctttgtgagttgggattttcatcacttttacatttcaaaacaaagtccagaagctgctttaatctgagtgatgatatccgtgtggctatttcaaaaaaagttcctcgtttctcggacatcattgaacaaaagctacagctacagcagaagtcactgtaagctgatatacttttttaatgaataatttcaatcttaatatcattgtaaaattaagctgtaattctgtctctttcatatttatgatatactgaattctatgtctaaaaaacttaagaactttaattttgaatgaggcatgtgaaaatatgttttgagaataaaaacacagcagaaaagattaagtactactgcctagttgctatc

SEQ ID NO: 50320 - DNA, 726 bp, Homo Sapiens
  misc_feature (172)..(172): n is a, c, g, or t
cagggaatgagctgctaaatcctgaagatgacctcttaccagggaagattcgagacagcaatcgttcaactcttctagcaacaattcaggaacatggttaccccacgatcaacttgggtattgtaggagacaacccagatgacttactcaatgccttgaatgagggtatcangtcgtgctgatgtcatcatcacatcagggggtgtatccatgggggaaaaggactatctcaagcaggtgctggacattgatcttcatgctcagatccattttggcagggtttttatgaaaccaggcttgccaacaacatttgcaactttggatattgatggtgtaagaaaaataatctttgcactacctgggaatcctgtatcggctgtggtcacctgcaatctctttgttgtgcctgcactgaggaaaatgcagggcatcttggatcctcggccaaccatcatcaaagcaaggttatcatgtgatgtaaaacttgatcctcgtccagaataccatcggtgtatactaacttggcatcaccaagaaccactaccttgggcacagagtacaggtaatcaaatgagcagccgtctgatgagcatgcgcagtgccaatggattgttgatgctacctccaaagacagaacagtacgtggagctccacaaaggcgaggtggtggatgtcatggtcattggacggctatgatggtcaccagcaggagaaagctttgatgca

SEQ ID NO: 50321 - DNA, 645 bp, Homo Sapiens
gtgaagtgtttttaagtttgccttgcatccttggaaccaatggagtatctgaagttatcaaaaccacactgaaagaagatacagttactgagaaactccaaagcagtgcatcctcaatccacagtctccaacaacagttaaaactttgattctcaaatgcaatttgagaggctggacttctacctaaagggaaaagtcatttaattttacctatatataggtttgaggatttctgtatcctgctacttacttttacaaactgcttggttaaagtagagggtttcttgattagctttgtgatgtaaatccttaaggagttatacaaggaggggaaaaattaattttatttggggttcttgagatatctatgctgttctttaaatctacagcaggggtaaacattcatctgcagtgtgcatcaatttaaatcatatatcctaaactaaaagcacaattcatacttcgggaatattttataagtaatatatctttaaaagaaaattaccctttgacttttataatcaacataagttccaggcccagtatggatttacaaaatctgtgtcagttgtacattcacaggatccacagcttaagttactaatgtttcttgtgtaaaatcctgttggtagtaatagtaaagca

SEQ ID NO: 50322 - DNA, 669 bp, Homo Sapiens
ccgtcttacagtgagacaacaggcgatgtcagtgagggcgatcatagggcataagcctaagccataccatgcagcctttgtgccagcaaccaaatcccatgtttcctactgtgttaagtttaaaaatgcatttattatagaattgtctacatttctgaggatgtcatggagaatgcttaattttctttctctgaacttcaaaatattaaatattttcttatttatttttttgattaaagtataaattaagacaccctattgacttccgggtaaggggagtcaattgattacccagcagcacagtatttgctttttataattccctttttaaatacttgttcttaattcactggttttccttttctgtcatttttcagagtttagattgtgagtccatgttttgtctgttgtgcctataaaggaaatttgaaatctgtatcattctactataaagacacatgcacacgtatgtttattgcagcactgtttacaatagcaaagacttggaaccaaccaaaatacccacaaatgatagaccggataaagaaaacgtgacacatatacaccatggaatactatgcagccatagaaaaggatgagttcatattcttcacagggacatggatgaagctggaaaccatcatcctcagcaaactaacacaggaacag

SEQ ID NO: 50323 - DNA, 587 bp, Homo Sapiens
gcaacttgtccccagtgccaccagaccttctgtgtgcgctgcaagcgccagtgggaggagcagcaccgaggtcggagctgtgaggacttccagaactggaaacgcatgaacgacccagaataccaggcccagggcctagcaatgtatcttcaggaaaacggcattgactgccccaaatgcaagttctcgtacgccctggcccgaggaggctgcatgctctttcactgtacccagtgccgccaccagttctgcagcggctgctacaatgccttttacgccaagaataaatgtccagagcctaactgcagggtgaaaaagtccctgcacggccaccaccctcgagactgcctcttctacctgcgggactggactgctctccggcttcagaagctgctacaggacaataacgtcatgtttaatacagagcctccagctggggcccgggcagtccctggaggcggctgccgagtgatagagcagaaggaggttcccaatgggctcagggacgaagcttgtggcaaggaaactccagctggctatgccggcctgtgccaggcacactacaaagagtatcttgtgagcctcat

SEQ ID NO: 50324 - DNA, 595 bp, Homo Sapiens
ttccaccacgcgtccgaagattgatggtataataatataagcagaacttttacaagatgtgaatttttagtgagcattaacatttggagtcatctatgacaaaactccacagtagcccatggtgtcctctgtgtcatttaccaagaacatgtcaactcaaattgtttttcagggttcactgaggtagtagaaaaacaagggggtagggggagatttagcttaggaaaatcaatggttagaatatgtatctttttagacaatttaataataaaaaaattcattttcagaacatgctgtagtacatagatgttggcttagacagggaagatgtttgcatttggaattcaagattaaattatttttctgtatggagagcaaaggcattgtggtaaagaataaaaagctggattaggtgaatgaattcattttccttactgattaaaaaaaaaaaaaacacataaagttagcttatttaattgccagtttttccaaggctgaacttgataagagagcaggtacaaggcagtggaatttttcttttttaaactacatatgatgcgatctaagtattaatcaaatttgataatggaatgaa

SEQ ID NO: 50325 - DNA, 885 bp, Homo Sapiens
  misc_feature (821)..(821): n is a, c, g, or t
  misc_feature (828)..(829): n is a, c, g, or t
  misc_feature (844)..(844): n is a, c, g, or t
  misc_feature (864)..(864): n is a, c, g, or t
aatttataatagaatgaattttattaatgcagaaaaataccccagggtgttaaaatatatgaagtgtgggatatattcttatagtttgtaaaatgtagtcaaccaatactgtcttctaatttggtaatttatttataaaattacttaaacattaggtaattatatttgttaggatttgaaattatttgtagttaaattgtcatgctgtttgaaataattgatacttgtctacgtaatacattttactgtatgttttgaagatggttataatttcactttcaaaatttaaaaaatcaattttaaatgttttaaaaacatatagcttagggatttttttaaaaaaggttttcttagtaaaaacataaatttaaaagcccctgagttctaggagagggcttattgaattgctataagaaagctggagttactttgataagtaataaattataaatagcactgatctataatgctttatttctatcggaaggtactttttcttctttcatcatcagttttagccagttagtaaatgggaatactcagttttagggatttgatttttgtttggtttaattttctttcaaaaattaaaagtatatttctaaaagttttccccagaggccagatacagtggctcatgcctataatcccagcactttgggagcctgagataggagtattgcttgaggctaggagtttgagaccaacctggcaacatggcaagaccctatctctacaaaaattttaaaacttagccaggtgtggtagtgcacctgtagtcccagctagtcagtaggctgaaggtgggagtattgcttgangctgcanntgaagtgtgatcacngccactgcactcccgccctnaccagaatgaggaatcctgtc

SEQ ID NO: 50326 - DNA, 640 bp, Homo Sapiens
atctgtttaaaaaagaatgtgcattcctgaatcaagagtttatgaatagcttaaagatgaagaggagagatgaaggaggattagctgttcaccagaagttctggttattctggttattggatctgaaagcatattattaaagtatcgtctagatttcctggaatagttctcatttctaatattctttcccattgtttttataatacatgtctgatttgccctaatttttggttagttgaggtgtggttgatttgtaaaagaacaccaaaagtgggtctacttgactgaagaagctctcttgctttccaactttgtgtttgtgtatgtgtgtgttaaatgtatgttttctaatctatctcttttaacctaaactttgattttaaagtccacattagagaaagagcaatagagacagactgactccactttagaaaattggtcaagaagtggaccaggtgggaatggttacttaatcctagcagaggaataaagtacttgatttccagctacctactgaatgcactctgctactagacagctattcttatttttttttttttgacatattatttccataggggaactttatagttcaattcagtaaccttggagagagatcctgaccaaaaaaaaaaaaaaa

SEQ ID NO: 50327 - DNA, 618 bp, Homo Sapiens
gggactggatcagagaagaaattccgcagtcctgtagcttccacaggactagaaatatttcattctgcatgaagtgatgggtgtatggatgttatttaattgttatgcttcataacttagattcacatcccactttgagaatatctcctatagaaacaaaggacttgtatttaagaatgtgtaagaagagtcaccacggagctgacacggaggctggtggcacctgggcgcaacgccgtatgccaactagcctaccgcgtggatcacggagctcactgacgagaatgtcaagttcatcatatatatatatatgtagatgtgacttaatatttcaatgagaaacactgaaataaaaaaaaagaaaccaaaaagcatttccaccatccatcagttgctaagtagccatgtgccccacctaatgtaatctaatttatcatgtaattttggtttaagctggacattaagacttgcaaagaaatggcttttgcctaagattaatagtaactactaatattgtttttcttcaatctgcaaaggtaatgtaaatgaaacttgcatgttaaaattctgtaattataagtaaagtgttttactaagtaccttaaaaaaaaaaaaaaa

SEQ ID NO: 50328 - DNA, 630 bp, Homo Sapiens
ttttttttttttttttttaaaagattattagtataaaaggggagataggtaggagagagcaggtaagagccaaagtcaccttagtggaaaggttaaaaaccagagcctggaaaccaagatgattgatttgacaaggtattttagtctagttttatatgaacggttgtatcagggtaaccaactcgatttgggatgaatcttagggcaccaaagactaagacagtatctttaagattgctagggaaaagggccctatgtgtcaggcctctgagcccaagccaagcatcgcatcccctgtgatttgcacgtatacatccagatggcctaaagtaactgaagatccacaaaagaagtaaaaatagccttaactgatgacattccaccattgtgatttgttcctgccccaccctaactgatcaatgtactttgtaatctcccccacccttaagaaggtactttgtaatcttccccacccttaagaaggttctttgtaattctccccacccttgagaatgtactttgtgagatccaccctgcccacaaaacattgctcttaacttcaccgcctaacccaaaacctataagaactaatgataatccatcacccttcgctgactctcttttcggact

SEQ ID NO: 50329 - DNA, 864 bp, Homo Sapiens
cagtggatagaattcatattctttggaggtagtgttcaagtccccttcttacttaattggtcttgcccacatctcaatcagcatgtctctaacatgtaagtattcaagatgtcggatgatattctgagagagagagacagtaggccataatagcctggcatagtttggcccatagggtgtttatgggtaggatagcccgataaagatgtcacttttccccctaatgatttataaattcagtgaaactttaaccaaaatcccaaaggaattttgtatgaatttgagaagcctataaagtttgttggtatgtaactataacaaggacagtttaaaaaaacgagattatcccaccagctattaaaatttagaaactactatagttaaaattttgcaattattagcaaaagaacaaatagataaaattagagaacccagaaacaggctaggtgtggtggttacacctgtaatcccagcactttgggaggctgaggtggggagcatcactgaggccagaagtgtgagatcagttgggcaacatagaacctgtctctatttttttttttaaaaaaaggcgggtgcggtggttcaccctgtgatccaagcactgggggaggctgaggcaggtgatcatgaggtcagagatcgagacatcgggcaaattgtgaacccaatctctataaaattacaatgagtcggctgggggtgtgccgggtcccacgtactgcggcaacaacgcacaacaaaaaaatgtggcgcgcgccagaaattcaaacatgggcggcccagaagaacggccctgccagaccgcgcagcgcgggcacaaacaggcgcggagcacagggtatgagcgtgaacgggatcggg

SEQ ID NO: 50330 - DNA, 700 bp, Homo Sapiens
  misc_feature (415)..(415): n is a, c, g, or t
  misc_feature (457)..(457): n is a, c, g, or t
  misc_feature (467)..(467): n is a, c, g, or t
  misc_feature (469)..(469): n is a, c, g, or t
  misc_feature (473)..(473): n is a, c, g, or t
  misc_feature (503)..(503): n is a, c, g, or t
  misc_feature (633)..(633): n is a, c, g, or t
  misc_feature (686)..(686): n is a, c, g, or t
gttttgagagccaattcagttataatgaatggttttaatttactttatattaaagggtgctgataaataatgttcaattagcattctttgggttctgagttaaatgctatgaaactcttatggtattggagaacataaccaataattttcaggggactaaattaaatattcaatatgtttaaaaatgagggccaggtgcagtggctcacacctgtaagaccaaaatgggaggactgcttgggcctaggagttcaagaccagcttgggcaacatagcaagactgccttgacaaaaatttaaaaattagctaggcgtggtgatccatgggtgcctgtagtccaagctactcaggatgctgaggcaggaggatcaaggctgcagtgagctatggtcacgccattgcactccagcctgngcaacagggtaagaacctatctctaaaataaataaataatanaaaataacananatanaaaaaaaaaaaaaaactcgaggggggcccngtacccaattcgccctatgtgagtcgattacaatcaactgcccgcgtttaccacgtcgtgattggaaaaccctgccgtacctactttcgcctgcaagacaatccccttcggccggttgccgtatacgaanagcctcgaccgatggcctttcccacagttcgcaacctgattgcaatggccaantggggcgttttgtt

SEQ ID NO: 50331 - DNA, 748 bp, Homo Sapiens
gagtttactgttaaatgtctacaccatcatccctttttctttttatccttagttctagtccaaattattttgattgtaaattattaggaaagtttttatactagtttttttaaccctatgtattattacagatggaagtaattatggcatgtgtgagttataatctaaattaggggcaagtatccctttttttatatgatgaaattgtgcataataacttggctagggcaagtctccaaagtaattcagatttaactcttcactgctagacccagttgtgttcaactttttacatattattgccaacacactttatctctctgtgtacagtgttaatctgattttataaatctatatttttttctttaagcaaattttgttttaaaatttgaagccaatcataaagataatatagcataagacattttcttttctaaaaacaatcagcatcattttaaaaggatgaactaatacaggtgtatgtaatagcagtgtttccaaactgcaatttatgctttaaatttaaaacataaggtcatttttctccatcaggggcaaatgtttacttgtaattttcttcctacagttcgtgttaaattactttttactattattatattgtaaactccttgggattgtggcaccatttaaaaattcatctttgtattcccttaatattttggaacagtatgtcatatggtaggtacttaataaaggttgaatgagtgtgtcgacgaaaaaaaaaaaa

SEQ ID NO: 50332 - DNA, 690 bp, Homo Sapiens
catccatttgaaaatatggttgcattctgtgcatttgggcaaaatgagccaattcttctgtatatttacgatttccatgttgcccagcaggaggctgaaatgttcaaacgctacaatggaacatttccattacctggaatacaccaaagtcaagatgccctatgtacctgtccaaaactaccccatcaaggctcttttcagattgatgaatttgtccacactgaaagttcttcaacgaagatgcagctcgtaaaacagaggcttgaaactgtcacagaggtgatacgttcctgtgctgcaaaggtcaacagacatctctcatttacttcaccaccagcagtttcctcacaccagtctaggttaaagcagtcaaacatgctgtccgctcaggagattctacatcagtttggtttcactcacaccggctttttctgctttgtatgatggccttgtcgccgtggggttggtccggcccccccgggtcgtgcctctttttggctgcgccgcgcctcggtccggttgcctaaccatccgtcggggtgccttttctccgagtgtttttcatggctcctgcccactggtgggttgtgccgtttgcgggggggtctcggcgggttctttttctcgctcctcctgtgggcttggcgaacctctgtatggaggaacagccatcaaaaaaaaaaaaaaaaa

SEQ ID NO: 50333 - DNA, 765 bp, Homo Sapiens
aatttgcacttttcttttagcttgaaaaaaatttaaagctacagaagaattgcaagaattgtacaataatatgtctatatttatgtatgtatcattgttatataatatgtattatcatcattgttgaactaattttaaatgttgcagacatcatgaccatgaccttatcctaaatacttcaccatatatctcttaagaacaagtatatattttttacataacttagggcaataatcaaattcagaaaatttaattgatttaatactgttatctaatatacagtcatatttcaattttgtttatccttccaatactgttccctccccaccctcccaccccaattcaggagccaatctaggattatgacatggatttagttgccatgtatcttcagtttcaatttttctttgtcttttcataacattgactttttttaagagaacagctggtggttttatagaattccatcaatttgggtttgtcagattattggcttatgattagattcagttatgaattttggcaaggatattgcagaagttatgataggttcttcttagtgcaacttatcacgatacacatgatgtctgtttgtcccattattggtgatgttaacttccgtaacttgctccattgaaaagtacccccttcctttctgtaattaagtaatctgtggagaagatgctttgaaattgtatacatattttatttcctaagaaactttcatctattgataattatttcctgaatcaattattattaaag

SEQ ID NO: 50334 - DNA, 520 bp, Homo Sapiens
  misc_feature (85)..(85): n is a, c, g, or t
gcacgagaaagaatcagtttttagatccagttaaccactgaaaccagaatatgcctatatgtcaggcatgatttactacatgttnattctatttattgagttgatttaattttagtgggtttgtggacattaaaaaatacatgtttaatatttcccaccataattacatttacacctttgtctttctttttcttcagtacttgagttgtcagtgttttgtgactcagtctggaaatctgtttaaactaccttgtctttatacaactaccaacaggaggattggtaatttgggctctgggtgagacatacataggttcagtttccatgtctgcagctgaatgcatgacagggaaaatcatttagcctccctgggcctcagtttcttcacgtgcaaaatgtaattaacacaacctacctcatggggttatattgaggattagagataatgtaggtaggatacctacacatagtaagctattatatattggcaacaataataaacttttaaaaaaaaaaaaaa

SEQ ID NO: 50335 - DNA, 651 bp, Homo Sapiens
ggtggacttgctccctcctatcctcctacttcaaatgcagaacttcaatcgtttacagagagaagactgaatcgtataatagaacacacccttattcattggctggcttcaccaatctcatggctgaacttgtaaaaatacaatcttagccacatacctatgaaatgtatatgtgtgtgtatatatatacatgaatttgcttctgagattatggaggctgaaattcccaagatggaaggaaagctggatacccaggaaagcatttgtttcccattaggcctcttaattctctcctggcccttgattgattgcatgaggcccacccctattaaggagggcaatctgcttcacttagtctgcccatcccaatgttaatcgtatctgaaagactctctggaacacaaccagaatcatgtttggccaaatgtcctggcaccctggtgctcggtcacagtgacaagtacaagtaactatcacacatgccctttgtcatattggtgatttccactgtttttctcccaaactgcagcttatatttgttctcttagtactgttgagcaaaaacttaatttttataaagtcgaatttatcaatgttttctttaatggttgtgtttattgataataaagaacactttacctaaaaaaaaaa

SEQ ID NO: 50336 - DNA, 572 bp, Homo Sapiens
acggatggtctggtctggaagatctaagatggcttctcttaacaggtctagtgacttggcaggagatggccagaggctggacttagctgggactgttgactagaacacctacatgtagcctctctagcatagccatatcagggtaactggacttctcacatggtaactatattcccccagagtgaacattccaagagaaccaggcagaggcttatgtctttgttgcctggtctcagaattcacgtagcattattactaccatactctgttggtcaaagcagtcatgaatctgcccagatttaaggggagaggaatagactctaccatttgataagggagtggcatggtaactttggcaaagaacatatgggatagaagatattgttggaaaatacgatctggatttggaaaatacaatctgccagtttataagctatattaaagtttcccagggaatatttttcctgaattctgtgggatcagtaggaaaaacatagaattccaagagcgttcattgcaatttgcccaagtatggctaactaccatgagggttagtgaaaaaaaaaaaaaaa

SEQ ID NO: 50337 - DNA, 830 bp, Homo Sapiens
  misc_feature (642)..(642): n is a, c, g, or t
  misc_feature (764)..(764): n is a, c, g, or t
ccacgcgtccgatcccctgggccaagacaggggtccattcagccggttgggggatttagaatttatttttggtttgctgtatatatatgtatacacacactccccgcataaatgtaaaaattttaaactaccaattcctaggcaaagatgattctaacattctgttccttttgacaagtgtccaattagagaatgctgagaatgtcccctgcatatcggctctgttggagagcccctgatttttagcagacctgtttcattcaacatgggttacccaggaggtggtcttcataaaaatgtttcttggaggccaggcgccgtggcccacgcctgtaatcccagcactttgggaggccaaggtgggcagaccaccttaggccaggagttcgagaccagcctggccaacatagtgaaactccgtcgctactaaaaatacaaaaaattagctgggcgtggtggcgggcatctgtaatcccagctactctggaggcagaagcagggagaatttcttgagcccaggaggcagaggttgcagcgagccgagatcatgccactgcactccagactgggcaacagagcaagattccgtctcaaaaaaaaaaaaaattgtttcttggtctccatctttcaagaaaatacatnctgtgctgtattttccccttccctcaggccatgatctctgctgttttcccttactaactggcatgtcagtacaagagtgattgtgaaagctgctccggaaagggctttatgctaaacctctngttgcttgaatgacatggtccctcggggactctggatatttaaaaactccaatcccttaaggataa

SEQ ID NO: 50338 - DNA, 474 bp, Homo Sapiens
gctgtttgcttccggccgctgtaaatcataggtgaaaaccagtagcaagtgctcactcagtgcctcccagaagcggtctgcgggtctcagctgggctgggggcagttttcattgggcaaggcttgggcttagcttcgaagcaggggctgggagaggatggatgggggtgtgagagcagaagaaagacctggctttgcagtgaggcagtcccaagttcaaatctgagctcaccactgacccgtcgtgtgatgggcgccaggtgttaggagactggaactgggtatgtgtgtggcattcggccggccatagtagctgctcagtaaacagaaactgtttctcatcctcatcctcatcctcatgcctgcaaactgtaaaccgtcctacttaacaatgaaagtagaaaagtgtttcaatgtgacaggaaagagtgaagacacagaagcttggaaatgatgatgtgttaaagaatcactt

SEQ ID NO: 50339 - DNA, 849 bp, Homo Sapiens
  misc_feature (598)..(598): n is a, c, g, or t
atatgtatattttcctctgattttatgactgatttacaaattaggagtgcaaatgggctgttccccgatagcatcttctgggaagaatccaaccaagatacaaagcagatgatggtggatcggcaaactcttttctatgaaaagaaaaaccagatataccagggactggaaagcacctgcttgaaaattgatatgagcatgtctgaatttttcccttataagagcctgagtattgtaacaggtctcttgcacagggggttgaaaaataaaaaaagaagttaacataattaaaatgcttggacaaaacatttgctttatatagattcttacaagtaatatttgattaggtatcaaaataggtttaggcaggtggaagttctgaatttcaaggcaaataaggcatgaagggtggaacattgcatctagggaaaataagagaaataagtgaaagtctgaccctacattgccaattctcagaccaagtacaaagtattaggaattttttatatcagctgacatctttgtgcttacagtaaagccatattagatgcacacatagtgactttattaaatcaaatgagtgtgcagagcagagcanatctaattaggctttctcttttagagttttcttattttactcttattagctccctccagttggtcatcaatttcctatcctacatcagatatttacactatcagattctttggtttaaaatcctcttccggtttacattttaatttctggggcgctaaacacatacttctgtcccggtcttatccctctattggaattccccacagcgtgggcaaaaacgcgggctcgaaaaatggggggccccttcccct

SEQ ID NO: 50340 - DNA, 632 bp, Homo Sapiens
caatgatgccaggcactactctaggtgctcaggatacaataattaataaggcagacaatgccctggcttcatggagataaatgtgttgatgaacaggaagtagatagagtggtcagagaaggctggtggagagcacagttgaccagagatctgatggaagtgagaaagcaaactatgggaatatctggaaaaagagcattccaggcagaggaatgagcaagtggcaaagatcctcaaatgcctatacttccatggaagaaggccagtgagtgaggaaaagagaggtagcaaaggggatcagagaggatacagggatccagatctcaaagggacttgtaggtaatggccaccactttggacttcatgttttcggagtgacggaaagtccctacagcctttcccagcccctagctaagcctctattgattacttctccttcttgtgctcttatcacctgtacttttatttaccagttagtctatattccatggatttctattcatctcttgtgtatcaattctatgtcctcaactatgtctcaacggcaagaatcagtcatattctcttctgtattcccagggcctggcacctaacagatgctcaataaatctttccagaaaaaaaaaaaaaaa

SEQ ID NO: 50341 - DNA, 620 bp, Homo Sapiens
aggatccccctagtactcagactcctaaggcttgcaacaaggtgttgttaacacaaaccaccctttaaattttcaagggaaggacaggaatttttgagagatatcttcaatctcctgtttttgttgccaagtctaaaggaccgacaacagccaaagtgcaaatcacattcttcaagagctgccgcttacgatttgttagtagagatggtaaaggggtctgttgagaactacaggctaatacacaactgggttatggcacaacacatgcagtcccatgcaccttataaatgggattactggcctcatgaagatgtccgtgctgaatgtagatttgttggccttactaaccttggagctacttgttacttagcttctactattcagcaactttatatgatacctgaggcaagacaggctgtcttcactgccaagtattcagaggatatgaagcacaagaccactcttctggagcttcagaaaatgtttacatatttaatggagagtgaatgcaaagcatataaatcctagacctttctgttaaacatacaccatggataagcagcctctgaatactggggaacagaaagatatgacagagtcttttactgatctaattacaa

SEQ ID NO: 50342 - DNA, 838 bp, Homo Sapiens
  misc_feature (687)..(688): n is a, c, g, or t
  misc_feature (761)..(761): n is a, c, g, or t
  misc_feature (767)..(767): n is a, c, g, or t
  misc_feature (770)..(771): n is a, c, g, or t
  misc_feature (776)..(776): n is a, c, g, or t
  misc_feature (786)..(786): n is a, c, g, or t
  misc_feature (788)..(788): n is a, c, g, or t
  misc_feature (792)..(792): n is a, c, g, or t
agaggtaatccattgggcttgaaagcaggaaggtgtgcggactatgtggtgacaggagcttggtcagctaaggccgcagaagaagccaagaagtttgggactataaatatcgttcaccctaaacttgggagttatacaaaaattccagatccaagcacctggaacctcaacccagatgcctcctacgtgtattattgcgcaaatgagacggtgcatggtgtggagtttgactttatacccgatgtcaagggagcagtactggtttgtgacatgtcctcaaacttcctgtccaagccagtggatgtttccaagtttggtgtgatttttgctggtgcccagaagaatgttggctctgctggggtcaccgtggtgattgtccgtgatgacctgctggggtttgccctccgagagtgcccctcggtcctggaatacaaggtgcaggctggaaacagctccttgtacaacacgcctccatgtttcagcatctacgtcatgggcttggttctggagtggattaaaaacaatggaggtgccgcggccatggagaagcttagctccatcaaatctcaaacaatttatgagattattgataattctcaaggattctacgtgtctgtgggaggcatccgggcctctctgtataatgctgtcacaattgaagacgttcagaagctggccgccttcatnngaaaatttttggagatgcatcagctatgaacacatccctacccagatatactctgttcttgaacacatacaangttaangtnnactgnggatgctacnanagtnacacagtattttctcaatgacatgttatgcagatctctttttgaaa

SEQ ID NO: 50343 - DNA, 352 bp, Homo Sapiens
gcggccgcctactactactaaattcgcggccgcgtcgacagcaagggccgagcccttgggttcgcggggtacaacagagtcacgttccctttgaatctccatcctccaccagccagagggtatctggcaccagataaggatggctggtagcctcctcctctctcagcactttgaatgcaagacagaagagccctcatagggctgggtaggaatacctcatcctctggttgggtaggaatactccatcctgtagtggaggaaaataagatcccctaggggtttggggagggcatggcatgagaattttgtggttgtcctctggatataatgcaaactggcctccatgaatatc

SEQ ID NO: 50344 - DNA, 889 bp, Homo Sapiens
  misc_feature (181)..(181): n is a, c, g, or t
gcctacagtcctctgctccttctacctccactgtatcctgcatcccagaccctacagattgtgtgattgcytcatctgtatcaccccccgagtcctgtggacctgccttctgtgtagagcaaaacccaggctccctcacagccattctttgcagagatcacccttgcagtgagtgtgagtnccttccaggtgtgtgcgcgtacactcaccctctgaattgctgccgctgccaaggaagtgggctccaggtgaaggccagtgccacgtcactctggctggccttcttagtagtttcatttctccggaagctgagccagtctcctggtctagcccaggttgccagaacgcttggcattgcagagtgctagagccagtggagaacttgccaacttgattgttttacagcagaggaaagaggatcacagagggaaagtgatttacccaaagtcacacagcaagttcatggctgagctgagaccaggattaagcttcctgactcccagttcaccatgaaaagggttctggcaacaggttcaagctggagaatccttcaaaatgctacacccacattctctccaactcttcatctccctgatcttccagacaaactacctggatgttgcccttaaaccatttctagctgttaaccctatccagaaaaatgattgagtgatagctgagaagtggaaagtgtgggatttttggcaggtgctctctttcctccgccccccgcgccaatytttctcttcctcctctctgtaatggtatgtmcagcctcactctccctccctggtgctgtatgcgttccccygttagctacatttgtgatacatacccttcttttaagtgaatctttttcatttgatttgtcawwaacgattaaactgga

SEQ ID NO: 50345 - DNA, 442 bp, Homo Sapiens
catgctaaacactgaaagcacatgtcctatgtgttcagaaagattaaacgctgctcagctgaaaaagatttcagactgtacccagtacctgcgaacggaggaggaactgtgattggcacgtgcagatacaatgctcctgagaagacagcattttccacaggaggctgtttcctcccctggtggatttaagagacggtcctttctggatacagagaaatgaaacaacggtgacctctccaggtcggcactttccacttctgtacggtggcaaaacgatgacatgtaaccttgctgtttattgtactttgtatattatttcctcttcaaagtctttcttacatactctatcctctgcactgttaatagtaacctatgacataattgtaaatattcagctttttgctaacttttgtattttgaaaaactttaaaataaaaatgga

SEQ ID NO: 50346 - DNA, 625 bp, Homo Sapiens
ctgaaatcctttaagagatattagagcaagtatttaattcaggtattttcaagttttaaaacttaacctgtttacctactaaaaataaaatagctagtttttttctgcatataaaagttcattgaaatgatatgcccttatttgcaatacttttcccataaagttttaagtgtgaaagaattgtaatttactagatatgtttggtatgggatattttgttaggcaagttttcttttttcttcttaaattgcaataggcttccaaaaagagtataattgtttcagaacaaattaactcttggcattatacgtctccctttttctttacagtattagtaaaaagaaaaattgtacactttctgattttaacttcactaatgtaattactctctcaagaagcttttaaaatttaaattaccatcacacaaccttttttatagtaaagccaacatttgttctctcaccaaaccccatgccaaattcatcatgaagaaagctcagcataagtaattcaaatactgcttataattttagaggggggtagaatttagtaaatattccagccggtcgttttatgcacaaggcttcagtcagaacatagaaaaaaaaaacattctgtgaatgaa

SEQ ID NO: 50347 - DNA, 496 bp, Homo Sapiens
tgcaactttatttcttcagttattgagtagtttatacaaggcatgggatggggaaaggggcatttttttaacttaaagataaagcagatctttaaaaattatgtggattaatgaatcactttttgcctttttcttgctgtgtacagtcatccctttgtatcagtggataccacagatgttcaaattccttatgtaaaatattgtagtatttgcatataacctaaccacatcctctcatatacttgtatgtgtagattatttataatacctaatacaatgcctgcacgtcacttcattcacataaattgaacatagtactcagcacgtggcaaattcaagttttactcttcaggactttgtggaatttttttttttcctcaaatatgtttgatctgtggttggttgggttcagggacgcagaacccatgtatgcacaggaccgactacacttttgttaaagactaaaagagattctggtgttaaaaaaaaaaaaaaa

SEQ ID NO: 50348 - DNA, 539 bp, Homo Sapiens
ttttttttttttttttttgaaacttagaggtactgttaggcagctgccctagggatgactgctcctttatttgttgttaatgaatcttgacctccttgtgtgaccctggttgttactccattctaagattggcgtttttttttgttttttttttttgtaaataagaccaaggtctcgctatgttgcccagcctgggctcgagcagtgctcctgcctcaccctcccaaagtgctgggattacaacaggtgtgaaccaacacacctggctccccaaggttcagtttttatcctcctcttggagaggtgagtgacttgaggtcatttcttcacaagctccggtaggcacccacagtattgtcaaagagttttgtgttagggaagtgtccagttttgtccaagaggaaatagaagcgtcggcctttgactttcagaggtagcatggcagggacttcaccccggtgggcaacatagcgagaccttgtctctatttacaaaaaaaaaaaaaaaaaaaacctgagcaggggccgctcccctcgtgc

SEQ ID NO: 50349 - DNA, 562 bp, Homo Sapiens
  misc_feature (521)..(521): n is a, c, g, or t
gctgctaagaaggcagacagcaccaagcgctaaatgagatggggcacctggtgctcttctgtgctactggtaggggtgcagcagagtggtcagtctggacagtagctgacatcacgtgacccaacacacgcattcctggctacttaccaaggagaatagaaagcaggcagatctctacagcagctctctacctgattgcaaaacaatggaaatgcccacatgtccacaaacaagtgtgtggtctgcctgtgccatgaagcacagtgtggctgagcgtcaagagtccccacactcaaaggaggcagcagatacagggctgcacactgtgtgattccacacatgtgacattctggacacggacatgctggatggcaaaacgagcatcgggctgagaggactgctgagaaggggaacggggctgctgggatgtgggttgattgtagcagtagctcatggagatgtgacctcaaaagagtgatttttactatgtgcatactatacctccacaaacttgactttanaaaaataaaatattcacagaaaaaaaaaaaaaaaaaaggac

SEQ ID NO: 50350 - DNA, 699 bp, Homo Sapiens
  misc_feature (678)..(678): n is a, c, g, or t
ccaaaatcagtttcagagactcctccactctctgggaatgacacggactccctctcctgcgacagtggcagttcggcaactagcactccgtgtgtgtcccgcctggtcactggccaccacctgtgggccagcaagaatggccgccatgtcctgggcctgattgaggactatgaggccctgctcaaacagatcagccagggacagaggctccttgctgaaatggacattcaaacccaagaggctcccagctccacaagtcaagagctgggaacaaagggtccacacccagcaccactgagcaagtttgtgagcagtgtgagcacggccaagctgaccctggaagaggcctacaggcggctgaagcttctctggagagtctcactccccgaggatggccagtgcccccttcactgtgagcagattggagaaatgaaggcagaggtcaccaaactacataaaaaattgtttgaacaagaaaagaagttgcaaaacaccatgaagcttttgcagctgagcaagcgccaggaaaaagtcatctttgatcaattggtcgtaacccacaaaatccttcggaaggccagaggaaacctggagcttaggcctgggggagcccatccaggaacatgcagtcccagcagaccaggctcctgagaagaactttcagccaataaagcttgngcttcccccaccgagctcacg

SEQ ID NO: 50351 - DNA, 637 bp, Homo Sapiens
tcgaatcgacggttctctgctgaatgtatggacacatcacaaaataatcaaggcagtgaaatgaagtgtaaagaataatggctgagtttggagtcacatcactgccacttgctagcctgtgtgaccttaaacaaataaaaaactctttcttgacctttagtgtttttctctgtaaaatgggttatcttttctcatttgattatcagataggaatatgtacaacagaggagatgagttgatagtatactttctatgtgccgcctgcaaatgcattatgcacaaattttaattattgccatcatttaaaaaaattcagaagatgttataccttaaaaattagtatttctgcagtctctttaaagtaggatgattgggcaacattagtttcctaatcccacatggcaacaaatgattgtgaagtagccccttcccatttagactgtggtctttgccgggagttcatgtcatttctcatctaacctgatttgcacatgtatgttgaccatctggcccctgtaagcatttgagtttgtcacctctgttgtttataaaagcacttttagatttaggtgcaatgtgcttaacaaagtcactcaatttggagcttgaagacgagctttcaaatactggttctcaa

SEQ ID NO: 50352 - DNA, 581 bp, Homo Sapiens
aataccttactaatatactcccctctgaaaccagaaatgagaagtcagcttcaaataaagaccctgcacaaagcctcagcctggtgaaaacatccgaaaataagtctacggactgtactcaatctacactgcaattaaaggaaaacccataggtggaaatgagaagaaaccaatgcaagaactccagtaactcaaatggcctctgtgtcatatgtccttctaacaaccacaccagtgtctccaacaagagttcttaacctggatgaactgtctggaattacataaatataattcagaatatggataggaaaaaaaatcatcaagactcaggagaatggcaaaacccaatccgaggaaaataagaataacagtaaagtgttacaggagctgaaggataaagtagctggtataataaaaaagaacctaaccgatctgaaagcgccgaagaacacaatacaggaattccacaatgcaatcacaagtattaacagcagaaaaaaaaatctgaggaacgaatctcagaacttgaagattggttctctaaaataagatggacaaaaataaaaaagaatgaacaaaac

SEQ ID NO: 50353 - DNA, 437 bp, Homo Sapiens
cttgcttggcagtgatatttcagcttggacattttacccttcagtcggcccaagaaatcaaaataaaggaaacacatttcatatactgcaggtaacaaaagtcaaagtattttatcttttcacagcaagaacagtccatgttgtatataatacaaccaacattatagaacttttagggttgtgactggctttggtgcaaatgtgtgctcaagctaataagttattgtgaaactgagtttcctttaacttacaaagctagttgccatatttctattttattttaaaaagtaaacatgcggctgggcgtggtggctcatgcctgtaatcccagcactttgggaggctgaggtgggcatatcacctgaggtcagcagttaaagaccagcctgaccaaaatggagaaaccccatctctactaaaaatacaaaactagccgg

SEQ ID NO: 50354 - DNA, 852 bp, Homo Sapiens
ggattggcagactagtcgatacgatggctggcaaatctcctggtccctttccaaactgtgactggagattcaatgagtttcccaacccagctgcccatgctctccatgttacttgtgtggagctcatggccttggcagtttcaggcaaagaagttgggaatgcccttctaaatgttgtcctaaaaagtcagcctttagtgccaagagagaacattacagcatggatgaatgcaattggtttgatcatcactgccctaccagagccatattggattgttcttcatgatcgaattgtgagtgtcatcagcagccccagcttgacgtctgaaacagagtgggttggctatccattccgcctctttgatttcactgcctgtcatcagtcctactctgagatgagttgtagctatacgttagctcttgcacatgctgtgtggcaccattctagcatcggacaactttctctcattccaaagtttcttactgaagtacttcttcctatagtgaagaccgaattccagttgctttatgtataccatcttgttggaccatttttaccaagatttcagcaacgagagaactcgtcgtatgactagacgatcggtcgtggcgcttttatgacatgcctgtgcactgttgacccagtgtagcaccccattttaacttaacatggatcccatctgtgacttcctctatcacatgcagtatctgtctacctggtgacagcgtgacagagccagtagaccaagattatctgtaccttacaagcagctttacgacttcggctcgatcatcaccaccttcgccgcctggagccgtgcaggcctcccacgccggaccggggctccggac

SEQ ID NO: 50355 - DNA, 705 bp, Homo Sapiens
  misc_feature (553)..(553): n is a, c, g, or t
  misc_feature (601)..(601): n is a, c, g, or t
cagaagcttcttctttccatcaccttctctaaagcctattcattctttgctagcttagagcctcctttctcagtgaatgaagccttccctgacttttccagctcacatgaagactcctttctctgacctccacacatatttttttaaagtttattatttttaaataagtaataaagctatagatttattgtttgataaattaattgatttactgcatagtgtatatcaggtacctaaatgagctggacagatacatgtatggagccccttaactcacagttacttctcccaggttgttactgacttaatttgaccagttacaaagccacccagctgtattgtgcagaagctggaaaaatagaaaactttaaagaatgagaaaacactattactttagactttggggtggaatgctggataagtgatatttttcactagctttcctccgattttaaaggagccatattggattgttcttcatgatcgaattgtgagtgtcatcagcagccccagcttgacgtctgaaacagagtgggttggctatccattccgnctctttgatttcactgcctgtcatcagtcctactctgagatgagttgnagctatacgttagctcttgcacatgctgtgtggcaccattctagcattggacaactttctctcattccaaaggttctactggagtactttcttcctatagtgaa

SEQ ID NO: 50356 - DNA, 632 bp, Homo Sapiens
tctgtcgctcctgccccagttccctctgggtcccctcctaggtgctgtcctgaatggcccgttgtcatcccaggggtgactcctggtgatgggagtcagcagtttcagattcttacactccatagctccccttaccatgaggtggagctggcttccttttccctgtcttcagccctccctgtctcccccacttcctggccagggctctcattctggacctgtgttgtaattgtgtacagaggatggcgttggcctggggtgggggtgctcgctttgtcttctgtcctttggttctccttccataatgctcctgtacccagtttatttaaggggacatgcactggaataggaaatgtcccccatctcccttcctgcaccctgctgtgctccctccaaacccaccttgctctgtgttctcaggcccccctgcttttgtctcaccaggacccatacctttcaccttgttcccttccacccctccagttagtccctatctgggtaagggtcttcccttgagctccagggggtggaacccaatgtttacattctcttctgtctctgcccccaccccatgcagcgctttgaggaattggaaaagaacctgctgttgtacctggaaaaaaaaaaaaaaa

SEQ ID NO: 50357 - DNA, 796 bp, Homo Sapiens
  misc_feature (669)..(669): n is a, c, g, or t
gagaacggcttcctcccaattcacctgttgggcctccgagtggactgggatgaccgctggatcaacgatgtggaagacagctacgggcagcagtggacctatgagcagaggaaaatcgtggagttcacctgccacacagccttcttcgtcagtatcgtggtggtgcagtgggccgacttggtcatctgtaagaccaggaggaattcggtcttccagcaggggatgaagaacaagatcttgatatttggcctctttgaagagacagccctggctgctttcctttcctactgccctggaatgggtgttgctcttaggatgtatcccctcaaacctacctggtggttctgtgccttcccctactctcttctcatcttcgtatatgacgaagtcagaaaactcatcatcaggcgacgccctggcggctgggtggagaaggaaacctactattagccccccgtcctgcacgccgtggagcatcaggccacacactctgcatccgacacccaccccctctttgtgtacttcagtcttggagtttggaactctaccctggtaggaaagcaccgcagcatgtggggaagcaagacgtcctggaatgaagcatgtagctctatggggggaggggggagggctgcctgaaaaccatccatctgtggaaatgacagcggngaaggtttttatgtgcctttttgtttttgtaaaaaaggaacacccggaaagactgaaagaatacattttatatctggatttttacaaataaagatggctattataatggaaaaaaaaaaaaaaaaaa

SEQ ID NO: 50358 - DNA, 754 bp, Homo Sapiens
caattccagtcttcatttccagccccaaaggacatctcagcaacagagccattatccgagccccttctgttagaggggctgcgggagtgagaggactgggcggccgtggctatttggcatacacaggcctgggtcgaggataccaggtcaaaggagacaaaagagaagacaaactctatgacattttacctgggatggagctcaccccaatgaatcctgtcacattaaaaccccaaggaattaaactcgctccccagatattagaagagatttgtcagaaaaataactggggacagccagtgtaccagctgcactctgctattggacaagaccaaagacagctattcttgtacaaaataactattcctgctctagccagccagaatcctgcaatccaccctttcacacctccaaagctgagtgcctttgtggatgaagcaaagacgtatgcagccgaatacaccctgcagaccctgggcatccccactgatggaggcgatggcaccatggctactgctgctgctgctgctactgctttcccaggatatgctgtccctaatgcaactgcacccatgtctgcagcccagctcaagcaagcggtaacccttggacaagacttagcagcatatacaacctatgaggtctacccaacttttgcagtgactgcccgaggggatggatatggcaccttctgaagatgcttttttaaatttaagaataagacacacaaaactctattaaaaaaaaaaaaaaa

SEQ ID NO: 50359 - DNA, 601 bp, Homo Sapiens
tctcaaggttattattctgacaccagcttgctgctatgatttcagagcacataagtaaaggtgctttttaatgtgcagtctatttccagagcttacttagttgctgatttccagatttcgatgtttcttaagtctaggtgaatttatatatatatttttttgcttttcattttctaaagttagttattatttccattgaagcttgttttctttttttcttcccattttagctactgcagtgcttttgtttcacacttgatttgtaaaaattttatatatatgtatttaaaatgtgccattttattgctaagtgaagtatgtcctgttttctgctataattctttctcggtcagattgcaatgtcagcagttactgccacactcctgtcagcttaaacacaaatgttactgcttatcttttcttaaaaaaaaaaaaaacaaagtgtaggtattttgaagtactgggcttatatttcattggaatacatgtgtacagcaataagcaggtttccaaatccggtacttagtttgtgtacaaatgtaattatgttcattgtgtatatattatacaatgagcacatgtaatgtattaaaggctactt

SEQ ID NO: 50360 - DNA, 648 bp, Homo Sapiens
aaaacaattgaattacattgtgcaatgcattaagaaacccatccagctgtcatggtatgttacaaggttttcagcagactttgctcctaatggctctctgaaagtgacagacttaaatattgctctgcagtgcttttcagaatgtagagtgagacctctggtggaaaaattattgccctgtggactcctttaattttttttacattagacgaagcttctcctgtttgtaaaggaatgctataagaaatttcaaacacaggttttgcggaattttaaatgctggaaaacataaatgaaatgcctaaatatattgttacagattttaatactgtggatcaaggaaagatagcaagcattcttttcctgaaattggtcatgtagcttttctgcgaaatagtattgaatctgaatactttcacaaaataatactgaaaggtaaaccctaaatcttgccagactgcattagtattttggcattgaaacttgtgcaatatctgtgtaatgtagaatgtggggtgtgcatgcagatgtctggtactggagtaagctgaaggtatgtgcagtatttaagaaaatgtacattctaattaattcacttataaaaccatttacatattgtgtatatgtttttattttcaaatgataaac

SEQ ID NO: 50361 - DNA, 993 bp, Homo Sapiens
ggacgcgtgggttagtatctataacacctttgttgtctttcttatattttttctaattcacattaaaacaagtgtataactattaaaatacaaaatgttgcacaccacctaacactttgtgtagcactggtggcacacaccccacactgggggaagttgtggactacgtgagcttcagttctttcgcacagtgttgaattcatgcttgtgaacacctacagagctgggaactgaggatgcggcagaaaataagcagaagtctctaggctggtgtgggagagtacacagatcatggcagtacaaatgactgcgatttatgatgggtgccacaaaggaaaagtataagagttgcgaacctatggatataaaaaacatgaaacaggcccagtagctcccgcctgtatatcccagcactttgggaggccaaggtgggtggattgcttgagccaaggaatccgagaccagcctgagcaacatagttagacccctgtctctataaaaaatatcatctacaaccattctctctcacatttaaccagtcgcattggttggaataatccctggttccccaactatcctcgagagggttaacaggcgatcaatatcttgacacccgtgagtgttcaaagctgcttcggtgcccgaatgtcgcctctgtaaccctcagcacctgtcatccccggggcgaccgagacacgaactcctgctgacaaaatccaccacacaaatgcggggcccgcgcaaaatacttccctgcagagggaccaccgatcgtcgatccccgcatcgtgatcacaaacgtgctcccctcacagaccgtgcataaaacaccacgcacgacgcacgaacacacgcgtcaatggacacagtcacacgcagacatcgtaacgaccccactcgcgggacaaaagcaccaccatagtgaataagccacggacaatacccagcacgtcgacaaccaatgccccgatgcatgcagattaagcaccacca

SEQ ID NO: 50362 - DNA, 789 bp, Homo Sapiens
  misc_feature (626)..(626): n is a, c, g, or t
  misc_feature (638)..(638): n is a, c, g, or t
  misc_feature (674)..(674): n is a, c, g, or t
  misc_feature (694)..(694): n is a, c, g, or t
  misc_feature (744)..(744): n is a, c, g, or t
  misc_feature (784)..(784): n is a, c, g, or t
aggtgtttgtgaggcagaataatggtggattccaagtactatgatcattgatatcaatttttagaatgtattagatgcatctggagtcaataatttatctggagaagtttttatatcaaactgataggtaatattaaaaaccacttagcattttggaagagaaactttagtaacaaacactgactgttttgtgtacatttattttctcacatcagtgattaaatttctttttatgtagaaaacttaaggtgcttttgtttatttgtgtaggtgagtatattaaggctcaggttcagaaatgtttatgaggatttctgtaagtgttagagaaggaactaagttctggtctagggaatattattaccagagtttatcatgtggttgtgtttgaggaggagatctaccaactaatcagcagttctgagatgaatcgcatagggcctcatgcgtcccttttatgggagaaagttattttgctttccggtacaggatacagctgtgcttctcctactttgtatttgccatatacggatagatacaaaacctcatgactgatttttccctatttattttgagtggctctgtataccattttcatgtattacttcatttttctgtttttcagntatgttctctgntttcgtatatttttggaagctagttctaagtcatgntttgtaggaaataagcatcntaaatacatgcataggggatttctttcttctgaggatccttaatttcttntatttttaagattcaaattgaatgattaatcagtaacagnttatg

SEQ ID NO: 50363 - DNA, 926 bp, Homo Sapiens
  misc_feature (745)..(745): n is a, c, g, or t
  misc_feature (771)..(771): n is a, c, g, or t
  misc_feature (907)..(907): n is a, c, g, or t
ttcaagagcagtgagattgagcaggctgtgcagtcactggacagaaacggcgttgacttgttaatgaagtacatttataaaggctttgagaagcccacagaaaatagcagcgcagtgttactccagtggcacgaaaaggccttagcagtaggaggactaggctccattataagagttcttacagcaagaaagactgtttaaaaaaaataaaaagactcatgttaccttgagaagaattctggatgcccaggctggtgaagaagggattgacaatggaccatcttcctaggaactcccaagtaaactatttcaggacatgtatctgctgaaatgtattttattttcaaggtggaggggaaaatcgtctgtttcctaaatcctgtttaggatctgatagtctatgcctttgtctccgagtactgcagaactgacattttgacggtctaccagcgtggcggctggtgttggtcagatgcacctgtgtgcactgggggagggatggtttgggcaggtgcagatccaagggctgtggtaaacgggagagcttgtgtttttgaagtggaaaaaaacccaagagtttgtacagacatcctgtcttcccagagaaggtggacactcttgggctcattgtaaagtgcctgctgcatcaataaagctcttggcttattagctataacattggcggtgtgtttcgtgtatgtaaaaaaaaatggtaatggaatgggatggtaaatgaatggagagnttcagtttgttggttccgggaaaccncgatgtgggaagggagtaaaacctggtgtcccctggtttgagccaccccctgggggaagcgagcatgggcaatcccacagggcccctcctgccacagggaacgccagccctcgggcctcaaaagctgccggcttgncttggcaaaaaaaggtgtc

SEQ ID NO: 50364 - DNA, 813 bp, Homo Sapiens
cttgtctcagaaagtccctcagggtttgtagaggactgcaggggggcatccgctgcagactcagcctttctctgcagccatcctgcagtgggggtgagcgggcacaggctgagaactgctcttgggtggtggaagcaggtgtcacggtgcaagtctccccctgcacccctcccccagcttgagccgtgtcacccccctctccctccagcatgggcctgtgtctcaggctctctggaaggtggccctgccccggaccctcttgcaggtgtcctggtttgacttggaactagatggccatctttccaggctttggtggcccaagagcagtctgggtggatggaagtggctgtcccctcctctccagcccctgcccacccactggtggaggtgctaactagcagggacgtggcataggatgggagctgggcgtgaggtgcttggggtccattctttgtccctcagcttctcagagtccggccagcccttgtgttcccgtgccccacactttcctcctccccactgcagtgaggcaatagtccagggtggggcctggcctccctgccctgattggggactcaggaggtgaggcctggggggcttcctgccccctccttgcccacctgcctgcccccgggcagcacgggagggagagcagggtgagcacgcttgttggtttcagatgcactttctgcttgcattgccgtatctgtgcgttccttcatcctggtcctggctttatggaacaccatgtttttagcatgtttttaaataaaaacggataaagtgtcaaaagcaaaaaaaaaaaaaaaaaaa

SEQ ID NO: 50365 - DNA, 879 bp, Homo Sapiens
  misc_feature (711)..(711): n is a, c, g, or t
ggggcagcccaagtggcagccgtcctggcccagcatcgtgtggccctgagtgttcagcttcaggaggcctgcttcccacctggccccatcaggctgcaggtcacacttgaagacgctgcctctgccgcatccgccgcgtcctctgcacacgttgccctgcaggtccacccccactgcactgttgcagctctccaggagcaggtgttctcagagctcggtttcccgccagccgtgcaacgctgggtcatcggacggtgcctgtgtgtgcctgagcgcacccttgcctcttacggggttcggcaggatggggaccctgctttcctctacttgctgtcagctcctcgagaagccccagccacaggacctagccctcagcacccccagaagatggacggggaacttggacgcttgtttcccccatcattggggctacccccaggcccccagccagctgcctccagcctgcccagtccactccagcccagctggtcctgtccttcctgcaccttcatcaatgccccagaccgccctggctgtgagatgtgtagcacccagaggccctgcacttgggacccccttgctgcagcttccacctagcagccaccagaggttacaaggggagagtggcccttccctcacaagtccgacatctccaggcccccactgaactccggggacctctactgactgcttgctgggacagtcaccagnggttggggggaaagggccacaaaatgaaaccattaaagacccttaagagccagcaaaaaaaaaaaaaaaaaacaccacaccaataacccacacaaaacaaaccacaaaacaaaaaagaggggggggcgcccaaaaaaaaatacccacaggggacacaaatactcgtcc

SEQ ID NO: 50366 - DNA, 535 bp, Homo Sapiens
ctcccgcttgtctgtttctcaggctcctgtgagcctcagtcctgagaccagagtcaagaggaagtacacgtcccaatcacccgtgtcaggattcactctcaggagctgggtggcaggagaggcaatagcccctgtggcaattgcaggaccagctggagcagggttgcggtgtctccacggtgctctcgccctgcccatggccaccccagactctgatctccaggaaccccatagcccctctccacctcaccccatgttgatgcccaggtcactcttgctacccgctgggcccccaaacccccgctgcctctcttccttccccccatcccccacctggttttgactaatcctgcttccctctctgggcctggctgccgggatctggggtccctaagtccctctctttaaagaacttctgcgggtcagactctgaagccgagttgctgtgggcgtgcccggaagcagagcgccacaactcgctgcttaagctcccccagctctttccagaagacattaaactcagaattgtgtttca

SEQ ID NO: 50367 - DNA, 432 bp, Homo Sapiens
  misc_feature (421)..(421): n is a, c, g, or t
  misc_feature (431)..(431): n is a, c, g, or t
aaccactagaaacttactctgcagggcatctttgtaattatggcactgagtagcccaagtcttagattatttcattgtgatgtttccagtgtaccatcaactgtataggtgattagcatttgcctattaattccttcttcctctcttatcttcttaatgactcttatacattttgttatcttttcttactctccatgtagtagttcttactctgcatgttcagactctagtggaggtgctaggaagttccactttctggtagattatttagagtacaggatagtcaagggaataaggatggtgctaaggcaggctgtggtggtttaagcctatagtgccagctactcaggtgggaggatccctggagcccaggagttccagggtgtagtggagctatgattgtatcactgcactctagctngggcaaaaana

SEQ ID NO: 50368 - DNA, 742 bp, Homo Sapiens
tctgcagcttaggtacagtgtaggaacggacaccttcagattgtaagctttgaagatgaacaatacaaacaaatgaatttaaatacaaaaattaataacaaaccaatttcaaaaatagactaactgcaattccaaagcttctaaccaaaaaacaaaaaaaaaaaaaagaaaaaaaagaaaaagcgtgggttgttttcccatatacctatctatgccggtgattttacattcttgtctttttcttttcttttaatattaaaaaaaaaaaaaagccctaaccctgttacattgtgtccttttgaaggtactattggtctgggaaacagaagtccgcagggcctccctaatgtctttggagcttaaaccccttgtatatttgccccttttcaataaacgccccacgctgatagcacagaggagcccggcatgcactgtatgggaaagcagtccaccttgttacagttttaaatttcttgctatcttagcattcagataccaatggcttgctaaaagaaaaaaagaaatgtaatgtctttttattctcaggtcaatcgctcacactttgttttcagaatcattgttttatatattattgttttttcagttttttttttttttttgttccagaaaagattttttgttttgttaacttaaaaatgggcagaaagtattcaagaaaaacaatgtgaactgctttagctttctggggatttttaaggatagcttttctgctgaagccatt

SEQ ID NO: 50369 - DNA, 1089 bp, Homo Sapiens
  misc_feature (701)..(701): n is a, c, g, or t
  misc_feature (860)..(860): n is a, c, g, or t
  misc_feature (914)..(914): n is a, c, g, or t
  misc_feature (1001)..(1001): n is a, c, g, or t
  misc_feature (1041)..(1041): n is a, c, g, or t
ttacctagccaggagttaagatgcagaagcagttatgaacccccttccccatcaggtgctgcccacctggaggggtaggcaggcattcattcagtcgctcatttcaccaggactcccagcaaccgataaaacagaccaaaattcctccccttgtggccttaataccataagccttgtaggcaggacattttggtcccctgaggtaatatgaggtaatatgaagattggttcagcaatagcagagctactgtacttgggggttaatatgcaacttttctgttcttcaagtggtcataaaaattcttagaatcccctggttatgtctcatggttctttcatttactcagaaggtatttattgggcatcttgtgttgatcacagcactgtgaatccagaaataaaagccagtgcctttgccaagctacagagttaaagaaaagaaaaatgaaatgaataaaagtaaaagaaaacctgtgcctgtctacaaggagctcaggtcagacgagggcagggattgtggctatcaagcacctcccatatgcctagctaggagccaggcttgggaactctcaaatgggtaattcccggtccttgttatcagctagctcacaacatgctgacctcaggctttctcttactctagcagaaacaggtatgttttactttgtgtcccactatggatagactgctgaatacatcangtatgttcaagcattaccacatctctatttgtttccgtatctcagtaacagcagagatgagctgagaatgaatcagaacgtgccctgtagtgacattgatatatttccctgaggtacatcacgatagtctaggggacaaaaggcgcagggaaacccagngtactccttatgtctacactggatcttagccagaaagctgaaaagtgatacttnttatggcctacctccggtttctggtgactacagataagagactcatcccttggatcacctcatccaccaaatatgactgaacaccgnctctaacaggacatttggcctggtcctcaaggaagctaanttggcaaggaatcttaaaagcagccctttcttggacttgacatgacct

SEQ ID NO: 50370 - DNA, 529 bp, Homo Sapiens
  misc_feature (393)..(393): n is a, c, g, or t
ctgtttcttcaatggttctcttcccttttccatcctccaaacctggcctgagcctcctgaagttgctgctgtgaatctgaaagacttgaaaagcctccacctgctgtgtggacttcatctcaaggggcccagcctcctctggactccaccttggacctcagtgactcagaacttctgcctctaagctgctctaaagtccagactatggatgtgttctctaggccttcaggactctagaatgtccatatttatttttatgttcttggctttgtgttttaggaaaagtgaatcttgctgttttcaataatgtgaatgctatgttctgggaaaatccactatgacatctaagttttgtgtacagagagatatttttgcaactatttccaccttctnccacaaccccccacactccactccacactcttgagtctctttacctaatggtctctacctaatggaccctcgtggccaaaaagtccattaaaccagaaaggtgattggaaaaaaaaaaaaaaaaactcgagggggg

SEQ ID NO: 50371 - DNA, 681 bp, Homo Sapiens
tcaagaactggttcccccagttcgggaaactgttccacagactgcctcacagctttgccacagaaccttctgctcaccacttgtgtttggcaggtgatttcatgtataaatctgctttctgctcgaggatgtcaatctagagtttctggggactgcttaaggcaaattcgtaaataatttggctctcttagtaataaatgagtggctctgcacagactgttgttttgacttggagagaagtctgcccaggattccatcttaatgcacgtgctgatcttctggcatgtcctgagctttagtccatctgttaggggcattgtgcccattgcagaggtagcctgccaacaccaagcatcctgaaatgaagcaagtaaattccattcattgattggtataaaaagtgccatggggtgctcaaagctgcctagtgtgtacccatgtaacagacagtttcattttagaccatgcttagttaataagagaaacattcattcactccctcagaacattttattagtggccaagtgctgtggctcatgcctgtggtcctaggctacttgggaagctgaggttggaggatcacttgagcccaggagattgaggctgcattgaactgtgattgtgccactgaactccagcttggatgacacagtgagaccctgtctcaaaaaaaaaaaaaaa

SEQ ID NO: 50372 - DNA, 608 bp, Homo Sapiens
cgacgcggagggcgagcatggggacggcgcggaggaggaggcgccgcccgcagggcccaggcctggccccgagcccgctggactcggccgccggccctgcccgtacgaacaggcgcaggggggagacgggccggaggagcagtgaggggccgcctggtccccggactcagcctccctcctcgccggcctcagtttaccacgtctgaggtcggggggaccccctccgagtcccgcgctgtcttcaaaggcccctgtctcccctcccccacgttggggacgcccctcccagagcccaggtcacctccgggcttccgcagccccctccaaggcggagtggagccttgggaacccctcggccaagcacaggggttcgaaaatacagctgaaaccccgcgggcccttagcacgcgccccagcgccggagcacggtcagggtcttcttgcgacccggcccgctccagatccccacagctctcggccgcggacccgggccgcgtgtgagcgcactttgcacctcctatccccagggtccgccgagagccacgattttttacagaaaatgagcaataaagagattttgtactgaaaaaaaaaaaaaaaaaaaatag

SEQ ID NO: 50373 - DNA, 732 bp, Homo Sapiens
tttagtcctgtctgatgatggtagctggctctctgtagctgatagatggctagagttccatccaaatccttgaccacgacttcatggagatttgaataatctatttgatgagatttctatttcaataacccacctctatcaccccacattcatatccctaaatttgaccctctgggccgagtcacattaccttcaggagacttgatcccagtagactgaggtcttccctttcagcagaaagatttcatttccctggcttgccagtggcactgatttccgaacacccaatgagtttaatattctttcctccttggcattactgccccagcctctttttattttttttgtgtgtgtctaataaccaggaaaaaaataaagcttaggttttaaaaagttgtaaaaataatctgattcagaaactgtcaaatgtaccatacttgtattaagagttgctgggaatttttgtacaatgaatttacacttatgtatggtgacatatttacgcttgtgatcaaataatgatgttaaattcttaaatcatatttgctatgcagctgaagatgatattttgaattgtatcttgcgggtccctgtgttgaagtgataaacatttgcatcttattaaaactgctttcacacttgtagaccccacaacttacaacaattaattggccgttgttttacaacggctgactgggaaacccttgccgtccccaactttattgcttgtcc

SEQ ID NO: 50374 - DNA, 656 bp, Homo Sapiens
tcttctggtcttggtgctactgaaattgtcacccagaatttgaatcctgaccctccccactgcaagcccagggagccccagcccaagatggccagcctgaaactgttggccagggctcctcttgtggccatgtacccagggctggctggcctgccatttgcctctccccggagacagccgttcttctgcaaccacaccccgtgcctagccacaaccccaggctgcagctgctcagaagctccaggcattttgtttctggtgaccgcccctaatgggatatcggtgatcactggtccacccttcctgtcagggcttttctggggctgctcttggaaatgaagtcttaagtactgaataactcccctggggatagctggggcatttgtctagctgggctactttctaacactttgccatagctcagaccacttctcatcgttcagggatggactgcaaccttaatttacttgccggagtgtacattctagtgtggtgtatactggtggctgttgatgatgatttttttttttttttttacacaattctctgtagactaggagaagaatgcttgtgtttttcggaagtgtgatgcttctctttgactgccaaactcttttatggaatatatctttatattaaaaaaaaaaaaaaaaaaa

SEQ ID NO: 50375 - DNA, 945 bp, Homo Sapiens
  misc_feature (770)..(770): n is a, c, g, or t
  misc_feature (830)..(830): n is a, c, g, or t
tccgctggttgacccgggcagcggagagaggaggttcttgtgtactgtgtttaacattgacaagaagataattaggaaataaatatatataaatacaggaacataaagagaaataaagaggaagcaccacagtcaactaaaaaagagagattcccagcaacctacacaaccatttctataggctctcagctgatgcttagtgtttggacaactcatacatgcagattgacagatgaccaacttataaaagagatttttaataattcttaatgatttcacagggtgttgtcaatggaaatatggattcttctacagcaaacatgtacatctatatcatgtggaacaaggatagtgggaaaacctctgattgtgaggacgtagaactgagaagagcatatgaaatgtcataagaaaaacacttctggagcatgtcgtcttcaagaaaatggtgcccagacagtcaggattgtgttacattttaataggaatggggatatttgtgatatactgacaaaccaagacaggtgactataaaactgcaatgtaaagtgtcagcttctcctcacacctttatagtagacatctgagaacctcactcctgtcagcatattcttggggttgaatctcaagtgatccatagaatcttagataaagcagatgaaaataggcttttctgtcttcctaagtaaacagcaatgaagttgagagaaagaagatattgctggaagtcatgataaagtctatcttctgtgaccatatgttttccttanagagttttagacattggaccctcatctaaaaaaatggggaaaaagggactctcaccaggnctggttaatatgtaatcaatatgaaaagaaattactgggtaaacttcctaaggcaggcattgggggctaccttttttttatcctttaatggggccggggaaaaggaatgggggga

SEQ ID NO: 50376 - DNA, 747 bp, Homo Sapiens
  misc_feature (719)..(719): n is a, c, g, or t
gcaaggttttttgcttttctcctgtgcacctggcgaggctgaaggcgaggggtggaggaggccccagcacagcctcatctccatgtgtacacgtgtgtacgtgtgtatgcgtgtgtgtacgcgtgtgtacgcgtgtgtacgtgcgtgtgtacacatgcgtggccgcctgtggtgtgcacgtgtgctctgggctccgaggcttctccagagctgggagctggctggcgtggcaagggcatgctctggggcagtgtgtccctcaggaaccagggtcctccctcccctttctgcctggtcagccccgtggcctctggcccaccaagctccctgtcacccagccatggtgtggtccaggcagggacatctcggtaccctttctgcactccgtgggccctgggtgcgctgaggcctggaggcgtctacactggctccacatccacttcccccgcagctcgtgtgggcgctcgtccacaaacactccgtggctgagaggcagcggatccaggcagcgatgctgagccacctcctccgagccttcctttcacacagaccaccccggaggacacgtggatgatggggtcagagatcactgagctgccctcaagggggcctggaacccgggtgctggggtcatgctgcctccgtggctccaaggtgagggtcatcttcacgagcaaagagaaccaataaagtgacaacgaacgtctgaggcttccagncctccccccaaaaaaaaaaaaaaaaaaa

SEQ ID NO: 50377 - DNA, 511 bp, Homo Sapiens
  misc_feature (346)..(346): n is a, c, g, or t
ttttttttttttttttttaaaccaaagctaagaactgagaaataggataaaggtaaaagtgttcattaggttttagaaagagtgcttatagaatattttggaaaaaaatgacataggaaagcattacttttttcccttcaatttgattccaaaattttgggtgtctgttgagatctccatgtttttttttttttcattttatatgacaaaactagaaatattgtagttctgccttatcctcaggtgatgcctgaaatctaagatagtaccaaagtttatatacactatattccttcaatccgataacctagagggctactaagtggtcagtgtgtgggtaatgtanacagaatgaataagttgattcacatccagggcagaacagagtaggatggtgcaagatttcatcatgctacttagaatggcctgcaaatttatgaattgtgtatttccagatcacagaaaacaaaattgtggatgcgggggtactaaggtaacaaaactgtcatct

SEQ ID NO: 50378 - DNA, 590 bp, Homo Sapiens
atttcaattgtgttttaaggttcattgactctttaccacctccaagctgctcctgaacgcaactgattattattttttaattttgaaaacgttctcacttctagaatttccacttaagcctttgttattattgtagtttcttcttctctgctgtgatttcctatccatttattttaagggtttttggggttttgattttagtaagaattacaataactactttaaaaatccacactaattccaacatctgggtcatctcgaggtcagtctctattgattgcctttttctttgaatatgtttctttatatgtttattataatgggattgaattctgaagattgtaaaactagattttgttctgttcctctgaaaattttgataattttttgttgtatttgttgtattgtgcttgatttttttctattgtatactttacaatatattttcctccaatggttttaacatatctatttctcaaaatatttatgtttatgttaaaaattatacaaagtagcttggtgccgtggctcccgtctgtaatcccagaacttttagaggccaaggcaagagggtcactcgagcccgggag

SEQ ID NO: 50379 - DNA, 355 bp, Homo Sapiens
gatcacgactggagaagccccctttctgagtgcaggggggctgcatgcgttgcctcctgagatcgaggctgcaggatatgctcagactctagaggcgtggaccaaggggcatggagcttcactccttgctggccagggagttggggactcagagggaccacttggggccagccagactggcctcaatggcggactcagtcacattgactgacggggaccagggcttgtgtgggtcgagagcgccctcatggtgctggtgctgttgtgtgtaggtcccctggggacacaagcaggcgccaatggtatctgggcggactcacagagttcttggaataaaagcaacctcagaacactt

SEQ ID NO: 50380 - DNA, 233 bp, Homo Sapiens
taataaaataaaaaacaatagcacagcccttgttgaggtcagcagggaggaggggctgcccggagttgggtccttgcctggattttgacacagcaacttcctgtagtgagcactttgtatgaatcgtggacttcctgttctcaaggcgcaggtatttattctgtatctgtctagagcacacaccaaaatccaaccttctaataaacatgatggcgcagtcccaaaaaaaaaaa

SEQ ID NO: 50381 - DNA, 620 bp, Homo Sapiens
  misc_feature (584)..(584): n is a, c, g, or t
  misc_feature (614)..(614): n is a, c, g, or t
  misc_feature (616)..(616): n is a, c, g, or t
cttttcaaaatattttctaaagtgggggaagaaagtttatagactttccaagcacatttatggttttttattactattattatggttttaaaaagagtaactttatttctttttgtaaggaattaagtaatatcctttacagttctgtgaaaggacttattttttaactgtaatatttattagttttaaaatatttgtatctcatttgtaacaatttgttttaattttttatatatatgtttttatttttaaaaaacataccagttgaatggggttaaagctttcaatatcttaaaatatttataaaacatttcactgttgcaaaatcacttccaaaatgatagctatctaacaactaattactaatttttaaagaacaaatcacacatttaaaaaatctgtagaatttattttaactatgacctttaattgaaaataaataattaaaatatcagacatgttttgggtcttaatttgagaacaccaaaggaaactaccccagaatctaatgtagttcgctattaataacaatgcattattgaaagtatattgcaaatacatgtttcctcatgtctaagtaattntgttgtggaatagtgtcactgttacatttncncctg

SEQ ID NO: 50382 - DNA, 769 bp, Homo Sapiens
gttggttgaaaataaatgatgaaatgaaggtataggacatgtgagtgttattaggccattttagcaattagcttttaaattttgctggtcagttctttcttcttggccccagtgccttgctccccaccctactcctcttttaacagtcttcccgtggtttctcatgctgcaagttccttactttagcacacattctaattatttgtgatctggcctgcagtatgccagcttctgctctgtttctcatgtccttcccatttgtgccctagtcatactgaactgcctaggatgtgttgtcccacatcatagccattagtcacctagggctgtgagcactgaaatgggattgttcaaatggagctgtgctgttgagtgtaaaatactgatgttgaagagttagtacagaaaaaggtaaaatcttttttttttaatggttacatactgaaatagtagttgggtatatggggttgaatcaaatatattattaaaatgaattttacccatttctttttacttttgaaatgtactgtgggaaaatttaactttacatacggggctcacattgtgaagctcacattgtatttgccgtggggcagcatgtgggctgggagtatgctggagaagcatcttgtttatcacccctcttatgctttagtgtaagctcttcactgtgactgggaaaggccagaaagcctgtccctcccgaaacagcaatacccaacattgaacgtttggtactaacagattatagccttggtgggaccctttc

SEQ ID NO: 50383 - DNA, 588 bp, Homo Sapiens
  misc_feature (564)..(564): n is a, c, g, or t
tgggatgcactacctagcgaaaattgagaaactatatacttctcagagaaatatctgacatctattgtcattccattgctattttttttccccagagacttccataatttaaaataaaatcctagatccagttcttgttttttggcataaatacttaatctattttaaatttataaaatctgagcttctaggatccagctgtgtcaacctttatttagcatatataactataaatcacttattacagatgctaaatagatcaccttttacagatgctgaaatgtttgggatatgtttgttgacaaggtaaatggaaatgagaaactttatacttcagttttcagatatatggatctagatcccaaataaatgattaatcttcattggtttctcaaattcaggttgaaatacaaattaatagcctttattgattttacttttatgagtcattgtagacatctataaatataaaagggcctgtacccaaaggatgccagaatactagtatttttatttatcgtaaacatccacgagtgctgttgcactaccatctatttgttgtanataaaagtgttgttttcaaagcca

SEQ ID NO: 50384 - DNA, 583 bp, Homo Sapiens
atggaagaacatacctttgacaaataactaatgtttttacaacataaaactgtcttatttttgtgaaaggattattttgagaccttaaaataatttatatcttgatgttaaaacctcaaagcaaaaaaagtgagggagatagtgaggggagggcacgcttgtcttctcaggtatcttccccagcattgctcccttacttagtatgccaaatgtcttgaccaatatcaaaaacaagtgcttgtttagcggagaattttgaaaagaggaatatataactcaattttcacaaccacatttaccaaaaaaagagatcaaatataaaattcatcataatgtctgttcaacattatcttatttggaaaatggggagattatcacttacaagtatttgtttactatgaaattttaaatacacatttatgcctagaaggaacggactttttttttctattttaattacacataatatgtaattaaagtacaacataatatgttgtttctctgtagcccgttgagcatatgagtaagtcacatttctattaggactacttacaaggacaaggtttccatttttccagttgta

SEQ ID NO: 50385 - DNA, 677 bp, Homo Sapiens
  misc_feature (602)..(602): n is a, c, g, or t
  misc_feature (613)..(613): n is a, c, g, or t
  misc_feature (631)..(631): n is a, c, g, or t
  misc_feature (641)..(641): n is a, c, g, or t
ggcttcctcattctactcatcctccaatacagaaaagcccctcccttatttagttctgttttacgtcataaaggaaactgggccgggtgcggtggctcacccctgtaatcccagcacttagagaggctaaggtgggtggatcacctgaggtcgggagttcgagaccaaactcaggcctggccaacatggagaaaccccatctctactaaaaatacaaaattagctgggcgtggtggcacacacctgtaatcccagctactcgggaggctgaggcaggagaatcacttgaacccgggaggctgacattgtagtgagctgagatcacgccattgcactctggcctaggcaacgagtgaaactccatctcaaaaataataaaactgaacacatctaaatacctgatggggatttgggggaagatggcatatgcttaaggcatgatgagggatgggggcatggcaaacaagattttttaaaatctgtttttgaagaatccataaagtagtttcaaaagacatcaaagagtctggctacccaaagaaatctagttagttgtctgcatgtctgtctacctgactagactgtaagctcctagggagcangaattttatcntctttatatgccccacancctggcccantgcttgcactgtagctgctcaaaaatgtctgctgac

SEQ ID NO: 50386 - DNA, 1083 bp, Homo Sapiens
  misc_feature (571)..(571): n is a, c, g, or t
  misc_feature (720)..(720): n is a, c, g, or t
  misc_feature (724)..(724): n is a, c, g, or t
  misc_feature (734)..(734): n is a, c, g, or t
  misc_feature (736)..(736): n is a, c, g, or t
  misc_feature (742)..(743): n is a, c, g, or t
  misc_feature (752)..(752): n is a, c, g, or t
  misc_feature (776)..(776): n is a, c, g, or t
gggtccggaattcttgcgatggacttggaaatatttactgtctgtccaccacggcctggaggagggaggttgtggttggatggaggagatgatcttgtctggaagtctagagtctttgttggttagaggactgcctgtgatcctggccactaggccaagaggccctatgaaggtggcgggaactcagcttcaacctcgatgtcttcagggtcttgtccagaatgtagatgggttccgtaagaggcctggtgctctcttactctttcatccacgtgcacttgtgcggcatctgcagtttacaggaacggctccttccctaaaatgagaagtccaaggtcatctctggcccagtgaccacagagagatctgcacctcccggacttcaggcctgcctttccagcgagaattcttcatcctccacggttcactagctcctacctgaagaggaaagggggccatttgacctgacatgtcaggaaagccctaaactgaatgtttgcgcctgggctgcagaagccagggtgcatgaccaggctgcgtggacgttatactgtcttcccccacccccggngaggggaagcttgagctgctgctgtcactcctccaccgagggaggcctcacaaaccacaggacgctgcaacgggtcaggctggcgggcccggcgtgctcatcatctctgccccagtgtacggtttctctctgacattaaatgcccttcntggnaacaaaaaancncaaaannacaaaaacncaaaaaccccaaaaaacccccacncaaccccccccccacccccccaacaaaaaaggggggcccctctcaaaaatcccccccgagggggccccaggtttaccgggaaccccagttttctttggaacaaggggggccccctaaagggggggccggtatttataagctagggccctggcgccctccttttttaaaacgcccctgggactggggaaaactgtgtaaacttggggaacttttttgtggaggggaacctttctcttctgtgggggggggcaccataatgggggacaaatctttctcttcggagggtattttaaagccccctctaggg

SEQ ID NO: 50387 - DNA, 1171 bp, Homo Sapiens
  misc_feature (706)..(706): n is a, c, g, or t
  misc_feature (910)..(910): n is a, c, g, or t
  misc_feature (955)..(955): n is a, c, g, or t
ggtccggaattcccgggatgcggtggccatgactgcggccgtgttcttcggctgcgccttcattgccttcgggcctgcgctcgccctttatgtcttcaccatcgccaccgagccgttgcgtatcatcttcctcatcgccggagctttcttctggttggtgtctctactgatttcgtcccttgtttggttcatggcaagagtcattattgacaacaaagatggaccaacacagaaatatctgctgatctttggagcgtttgtctctgtctatatccaagaaatgttccgatttgcatattataaactcttaaaaaaagccagtgaaggtttgaagagtataaacccaggtgagacagcaccctctatgcgactgctggcctatgtttctggcttgggctttggaatcatgagtggagtattttcctttgtgaataccctatctgactccttggggccaggcacagtgggcattcatggagattctcctcaattcttcctttattcagctttcatgacgctggtcattatcttgctgcatgtattctggggcattgtattttttgatggctgtgagaagaaaaagtggggcatcctccttatcgttctcctgacccacctgctggtgtcagcccagaccttcataagttcttattatggaataaacctggcgtcagcatttataatcctggtgctcatgggcacctgngcattcttagctgcgggaggcagctgccgaagcctgaaactctgcctgctctgccaagacaagaactttcttctttacaaccagcgctccagataacctcagggaaaccagcaccttccccaaccgcagactacatcttttagagggaagcccaactgtggccttttttctgaaaattcccttttttcctggtgggaattgggnaaagaaattaaacctatgggccgatattgccgttccatttccaanaaaaaaaccaacagagccccctccacccaacaacttacctacccaccagtgattaccgcccccccatacagacaatgcaccgcgcctacttacaacaaccccacatcgggggggggggcgcctcctaaaaaaatacccccccgcggggggcccccacctttatcgcgccccccttttttttttttaaaaaaaggcgcccccccccaataggtggcc

SEQ ID NO: 50388 - DNA, 582 bp, Homo Sapiens
catgactattttgataaaagtttaaaacacatatgaagttcaaatttcaggaaccaaggactgccagaaaatattagcctctacattacgcatgcatttagaagcttacctgaaatctgccttttataaaggaatagtatggataagtggaattgtacattttttaaacttgattgccattaaagcagaaattataaggttgcaacaatatttgtttctaatcactggctttctcaagagtatggattgacatattgtgttatgaatgcacatctctcagatgtgttgaagcatccattgcatccattttttattattttcttagttttgttcttggacaaatttaaacttttaaaagattattcaagatgaatttaaaagtcaacccttcacacagtttccctactgtatgtagaatccaggtgctgaaaccaagtgtttcttttcccatgctctttgttaaaccccaattatagataatttttccagtcttaagctctgtccaccttcaagtcaattcataaccaagtttttgaacgctgctatgaattgcactgtgaaaagcactcttccctctcagtt

SEQ ID NO: 50389 - DNA, 402 bp, Homo Sapiens
  misc_feature (89)..(89): n is a, c, g, or t
  misc_feature (277)..(277): n is a, c, g, or t
  misc_feature (290)..(290): n is a, c, g, or t
actttagcaggcaggttgtatgaggatatcatgagatatatgtatgaagaactagcacactgttggtgcatgtgagggtctgtaaatgnacccattttattccttaatttcctttatagacccctttccctgcaacaccagtagtccggcttctatcctgacaatgttagtgaagttgcttgcttgaaatttaccaggccaggcttatggctgtaatcccagaaactcaagaagctgaggcaggagaatccctatggtctcttgagtccaggagttngagaccagcctgngcaagatagcaaaatactatctctacaaaaaaatgaaaaaaaaaaaaaaaaaactaattcaaaattttagccatggggggggagccctgggtttcaggcccgggtaaaaggg

SEQ ID NO: 50390 - DNA, 631 bp, Homo Sapiens
  misc_feature (595)..(621): n is a, c, g, or t
gggttgccagaataataaaatgaactgtgtttaattatgaataatatgtaagctaggacttctactttaggttcacatacctgcctgctagtcgggcaacatgaagtaggacagttctgttgattttttagggccatactaaagggaatgagctgaaacagacctcctgatacctttgcttaattaaactagatgataattctcaggtactgataaacacctgttgttgttcactttcctcataaaaattgtcagctctctctgacacttagacctcaaactttagcatctctgtggagctgccatccactgtataatttcgcctggcaactggactgaggggagtgtgcccaggcagctgccaagcactccctccctggcttcagggtcagagtgcccagcgtttatcagaggcagcatccaagcccagagccagtgtcgactcttcggctggtgcctttcctctgaggggctatcaatgtgtagataaagccctgagtaggcaagagcagtgagatccactgctatggtcttgatacatcctcaaactttcccttcccagcacagaggaatattggctggcatgcaacctgcnnnnnnnnnnnnnnnnnnnnnnnnnnnaaacttgtcg

SEQ ID NO: 50391 - DNA, 678 bp, Homo Sapiens
agcgaccaggtgctgtatctcagcagggtggtgtgggtaccacaccagcctcagaacccgctccactggccccccatgaggaccaccagcaaagggagaccaagagagaatgaccccattggacagccatcagtcccaggaatccccaaacctggaaaacatagcaaaccccctagaagaaaatgtaacgaaagaatcaatcagtagtaaaaaaaaggaaaaaaggaaacatgtggaccacgtagaaagttcactatttgtagcaccaggaagtgttcaatcctcagatgacctagaagaagacagtagcgactacagcattccttccaggactagtcacagtgactccagcatttaccttcgacgacatactcataggtcttcggaatcggatcattttagctatgttcagttgaggaacgcagcagatctggatgacagaagaaaccgaatattaaccaggaaggccaacagctcaggagaagccatgtcactggggagccacagcccgcagagtgactccctgacacagcttgtccagcagccggatatgatgtattttattctcttcctgtggctcctggtgtactgcttgctgctcttcccacaactggatgttagcaggctctgatacgtgtgtctggataataaaaaagacaggaccctgaaaaaacaaaa

SEQ ID NO: 50392 - DNA, 781 bp, Homo Sapiens
  misc_feature (748)..(748): n is a, c, g, or t
taaatagctctcatagtctgctccatcttgatagttaagtgatttctgaagcgtttgtgtgtgtgttgatcaggttgtgtgatatttttgcttgataaagaatcaaatttgaaacaattaaccagccagtagattgtctgtcagtgaccttctgtagtaataaagtttttgccactgtaaataaaaacagtatccgtagctatcaggatcattgcgcactcatatatgctaagccttctgttctctaatagaagcctttcttttccattgtttctggatatttgtattatccaaatgtgcttatttctttgccttagcacacgttttatggagtacttgttatactaggtttgatttgaaactggtgcttgtcgcagaactgtcagagcatgaggagcgctcctcctgtgggtggacgcattcacgcactcccaggttgcacctgctgctggcggtgagcagggggttcagcagcttgaccgatgccccccgagggggctctccccagcttaaactttgttgtttaaatttgttaactttttatattaatgactattgaaagtggtaataaaaatttatattataggcttcaatgttttcatgaatgttacccaaaaagctgtgttttctttggtcagaggtcaaaatttatgaaaaacaaaatgctgtatgaatggaaatcattttgcaattgagtgacacttcattgtaattcacagtgtaaatttaatccaaactgaaattttgnttcaactgaatttgtaattaactctgaatttgg

SEQ ID NO: 50393 - DNA, 582 bp, Homo Sapiens
caatggaccctaatgacatgatgagagaaaccgaaagtgttagatgcaaataactgtgattatgagcaaaaagagagatttttgcttttctgtgtccatggagacgctagacaggatagcctcgtgcagtgggagatggaagtctgcaagttgccacgactgtcacttaatggggttcgcttcaagcgaatatctgggacatctattgcctttaagaacattgcatcaaaaatagcaaatgagcttaagctgtaaagaagtccaaatttacaggttcagggaagatacatacatatatgaggtacagtttttgaatgtactggtaatgcctaatgtggtctgcctgtgaatctccccatgtagaatttgcccttaatgcaataaggttatacatagttatgaactgtaaaattaaagtcagtatgaactataataaatatctgtagcttaaaaagtaggttcacatgtacaggtaagtatattgtgtatttctgttcattttctgttcatagagttgtataataaaacatgattgcttaaaaacttgtatagttgtctagatttctgcacctgaatgtatgt

SEQ ID NO: 50394 - DNA, 857 bp, Homo Sapiens
  misc_feature (793)..(793): n is a, c, g, or t
  misc_feature (807)..(807): n is a, c, g, or t
ccattcctcgtcatctaggaggggtctacataaaagcatttataaacacctccaaatgggagccaggcatgcccacctttggagcacttttctctactgcaaatttatctactgctcgtgaaatctctggatttaactctgatgaaagactggaggctgaaggagaacttcaatatcatatattttaaaggttgattcacagtttggaacaagaattaaagaaccacgaacttcaaggtaaaacgggcaacggcgttggggcaagcctctctgcatctgcgtgtccagcctctcctgcgtgccagaagtccccaggcaggagtgtggtgggacatccggctggggtaaggacaggcaccctcccactgtgtcagggcccagagagtgggtggagaagctctgcaagagacctgtgcaagggcgccttgcaggagcctgcagtccccacaggtgtgtttgtggataacacttggggagccctggccttttggggtcacggagggcttggcctctcacctcagagctgcggaggagccgcttctacatcaggacatcagaagctggaacaggatggccggcaaggggcctcttgttggggtcacagagatgggtcgcagagatggccccgtgtggaaggttggattctcaccccacctctgcccctagatgtcctggtgaccctcccctctgtaggtcttgggttttttgcaaaacagttatgacctcctgccatactgggtactttgcttatgtactgtgtttactcctttactgggtgtctctcctgctaagntctacgaagaaggncttttttggggggggggggtccttagagggcttcccagtaccagaaacat

SEQ ID NO: 50395 - DNA, 752 bp, Homo Sapiens
ctaaacttactctttgtgacatagaggtcagaaattggtcgtttccatagagtatgagagagacagaattgtgctcatcataagtatcttttttaaaagttagacttaataaaatgggctgccttggtaggtggtgagttctctgtcacgaaagagattcagccacttgctctgagaaagcatggagaatatcaacattgtaagggtcgaccacctcatctctgaggcgccctcctcacttaggttgccattgcaggtggaacactgggctgagtgtcaaagaacctgggttccacaagctgtgcgaccatggctggttgttttggatctcattcctaatatctgttagttaagctgacccgtcaatactgacccacttcacagagttatgaaggggttaaattaggtattacatgtaaatctgttttgtttgctttttgttgttcttttttgttttgcttttttctttgcattatgaaatcccaagtcaactttttccattcttttatttttttaaaaattgacatcatcattataaccacaaaataatttttaaaatggaaaaaaaaactcacctgcaaccccacaatctaatacaataatcatacttttttccctttattctcctttattgtgaccaaggatgactttgggcattgctgtgaggaactatttcgtttaacaccctactacctgaacatgatgcgtactcagcctttcaccacccccccagtagctacacatgatgtgat

SEQ ID NO: 50396 - DNA, 602 bp, Homo Sapiens
cccacgcgtccgcccacgcgtccggtttgcttctcaactaatgatccaggatcatccaatgcatcaggttcttataaaaagcaactgaatgtagtctctacttttcttgaaaggtaaaattgaagagttgttgccgggtagctcaattgatgcagaaaccaggctggttcttgtcaatgccatctacttcaaaggaaagtggaatgaaccgtttgacgaaacatacacaagggaaatgccctttaaaataaaccaggtgggggaagctttttaaaatcctgctagtttgatgaagaagttgaatggaaagatttaactttgtaaaagtgtaagtgacataagcgtaagccaaaaggaatttgaaacttaaagtatttctgaatgaatttcttaactcagtagaaaaaaacggaaggagtaaaagatatttgctgcatatatatattatatatacgtatatataatatatatatatatatatgtagtgttttatcactgctcttaactgcctttgataatttctcataaaccattgctgccacctagttttggaaactaaagatcttcctataagcccaatttacttggctagaaagcaaaaa

SEQ ID NO: 50397 - DNA, 603 bp, Homo Sapiens
ctagtacttatgaaatgagtgtttatctagtagtaagacctaggatttttacattttccaattaagtgcaaatagtatttataagcagagtgattatggattgagatgtttttaacttgatggaaggagctagttttcctgagcctgtgtgtgcaccaggcactggggctgatgttccagcctcgtggcgtgggagcaggagagctccgtcctgcatttctgtggtccgtggccgctgtttctgtgcgcctgcgcctcggagagcaagtgaaggagcatcatgggttttgttttctcccttaaccctctgaaagacagtttgatactaacaaaaaacgcagcagaggggatccaacgtcagagcttttagaattacttttttaagcagctgtcttctggctgggtgcggtggctcatgcctgtgatcccagcactttgggaggcgggtggatcacctaaggtcaggagttcaagaccagcctggccaacatggtgcaaccccgtcttagtaaaaatacaaaaattggcctggcgtgagagcgggcacctgtagtcccagctactcgggaggctgaggcaggagaatcgcttgaacctgggagg

SEQ ID NO: 50398 - DNA, 834 bp, Homo Sapiens
aaggctattaatgaaggtaaggtaatgagccagtccaaatccctcactgtctggctaagagattgagccattccactttacagcccctaattcccttcttcccaactgcagcaacatttccaacagggacaaaaaggaagtgaaggaaaccacttcagtattgggatcaatagaaattcaagaggtagttcataatgaccttatatgtgacacaaatggaaatactctacacttctggcatgcttctctcccaaatatttagaacattagtgacaatatgaaaaactttgctgactgagctgatcaatggaatgtgaaggcagtatactttaaggctatttactttcacacagaatgtttatctattagtcagtttgtattctactcaaatgcagatagacgggtataatgttttcttgtgcatttgaaacctatcaaggagaaaataaaccattccactaaaatacataggccaaacaccatctgggaaagtgataaaagctatccagaggctatgctatgtaaaatagcaaggtcaatttacatgggttgcatagtacttggctatgcagttttcaaaagaacacatccaaaaaaaaaaaaattccaaattagtccctataataggctctgtggtaactttaactatttgtgtgggtcgcaaaatacgtcttcagagacctttagaatttcttcctctaaaatgtttcccatccaagcagaaaggagacttctgtactccctctcatggtctgagaatgggtgccatgatcttgatctgctttgccagcgaaggacccttggtgacaatgagccctaagaagtcagatattt

SEQ ID NO: 50399 - DNA, 920 bp, Homo Sapiens
  misc_feature (703)..(703): n is a, c, g, or t
  misc_feature (706)..(706): n is a, c, g, or t
  misc_feature (739)..(739): n is a, c, g, or t
  misc_feature (746)..(746): n is a, c, g, or t
  misc_feature (773)..(773): n is a, c, g, or t
aagttggtgccaagcttcttgaataaaacgtgtttgatggattagtattatacctgaaatattttcttccttctcagcactttcccatgtattgatactggtcccacttcacagctggagacaccggagtatgtgcagtgtgggatttgactcctccaaggttttgtggaaagttaatgtcaaggaaaggatgcaccacgggcttttaattttaatcctggagtctcactgtctgctggcaaagatagagaatgccctcagctcttagctggtctaagaatgacgatgccttcaaaatgctgcttccactcagggcttctcctctgctaggctaccctcctctagaaggctgagtaccatgggctacagtgtctggccttgggaagaagtgattctgtccctccaaagaaatagggcatggcttgcccctgtggccctggcatccaaatggctgcttttgtctcccttacctcgtgaagaggggaagtctcttcctgcctcccaagcagctgaagggtgactaaacgggcgccaagactcaggggatcggctgggaactgggccagcagagcatgttggacaccccccaccatggtgggcttgtggtggctgctccatgagggtgggggtgatactactagatcacttgtcctcttgccagctcatttgttaataaaatactgaaaacactcttaaaaaaaanaanaaaaaaaaaaaaaaaaaaaaaaaaaaaaaaaanaaaaaanaaaaaaaaaaaacaaaaaaaaaaaaanaaaaaaaaaaaaaacacaaaaaaacaacaagaggggggccccccctctaaaaaattccccttgggggggccccaaagatttacggcgaaccccccgtttttttttgggtaaacaaggggggcccccctatatagggggagccgctaa

SEQ ID NO: 50400 - DNA, 598 bp, Homo Sapiens
ttttttttttttttttttacaatgcctaaacagtgataccagtaatccagtttttatactgatactctgtatttcaacatttattatcaccaagactaacttaaagccaactcctttagtgaagagatttctttccccatttcagtactagacgcaatagttctgaatgtcactgagcaagtaacggatatgagttattgataaattaattactaatgaagagtttttatactacctcctttataattagctagttcatagacttaaaacaaaacaatgaacaaaaacaaaaccctatttcttaccctctaaatggtcgcatttccctttcacttacctgaaaatatgagaataaaaatgaccatgtattgagttacaccactgaatctgtttgaatggttctgtttttgtattttttacttatttaatttgaaaaaaattagaaaagtattagtttgaaattagagcagctaacacactgggggcaataaattaaaaacttcaaatggctaaaaatgaaaacacaaagtatctttccttctagataaaaaagattgttttcttcctagaaagcataaaaaaaaaaaaaaaaaaaagc

SEQ ID NO: 50401 - DNA, 611 bp, Homo Sapiens
cgaatatattggggggaggaatagaggggaggtgtgcaggaaccagcaatgagaaggccaggaaaagaaagagctgaaaatgcagaaagccgaagagttagaacttttggatacagcagaagaaacagcggctccactaccgacctgcccccggttcgatgtccttccaagaatgaagtctttccctggtgatggtcccctgccctgtctttccagcatccactctgtcttgtcctcctggaagtgtatctcagtcagccagtggcttcttgatgatggcggtggaggtggtggttgtagtgtgatggatcccctttaggttatttaggggtatatgtcccctgcttgaaccctgaaggccaggtaatgagccatggccattgtccccagctgaggaccaggtgtctctaaaaacccaaacatcctggagagtatgcgagaacctaccaagaaaaacagtctcattactcatatacagcaggcaaagagacagaaaattaactgaaaagcagtttagagactgggggaggccggatctctagagccatcctgctgagtgccctgtgtgtaagtcctaataaactcacctactcaccaaaaaaaaaaaaaaa

SEQ ID NO: 50402 - DNA, 422 bp, Homo Sapiens
  misc_feature (99)..(99): n is a, c, g, or t
acaaaccagagatttcatttaagtagctgtgttttgctcttctctaacttaccaacatcttgtgttgtgttgggtgtgttttgtcacttggagaactantgtgaccccacccaagagcatgacacaccctggtgttgttaatggagcgccgtgaattttcagtgtgggatcctgaaatggcaattgcacatgtctgcatggcagagagcaccctgccatgagatctgagaccagtacttaacttctaggactgcaacacctactccaatgtgtgggaaagatttgctcttaattctcagtctggacagtgagaccaccccgctgtggaaacatgggtgctctgctctgtagttacctactaagggaaaaggcaagcaagtcattctgcttgctaggcatcaaaaaaaaaaaaaaaaaaggac

SEQ ID NO: 50403 - DNA, 1002 bp, Homo Sapiens
cagcttacccatttttaaatatgcaattcagtggattaagtacattctcattgttgtccagccatcaccatcatccatctccagaagttttccatcttcccaaattctgtgcccattgaacaataactccccacctccccttcccctagcaacagccatactttttgtctctatcatcaacttcactactcatatttctcatgtaagtggaatcatacagtatttgtccttttgtgactggtttcacttagcataaagtctttaagatgcatccatgtttccagtgtttcggcttttttagaaaaactcatacgtgattgcagccgggcatggtggctcacgcctgtaatcccagcacttgggaggccaaggcaggcggatcacctgaggtcacgagttaaagacccagcctgacaaacatggagaaaccccatctctactaaaaatacaaaattagctgggcgtggtggcacatgcctgtaatcccagctactcaggaggctggggcaggacaattggttgaacccaggaggcggaggttgcagtggacccgaagatttggggcactggaccccaccctggggaaaaaggggtgaaactctggtctcggaaaaaacacagaagaacaaaacgtaggtggattgcgcaattgtggtccctctaataatttccggggggaaaaaaaatactgggggcctttaccatcccggatcctgggtggggcccttagaaattctgaatacacggggggttcacccacattttcccctccccacttggctgtgggggccttggttcccgccatggaacttctttaaaggtgacaccgggcagggcgtttagggcgcatacaggtacccccccctgtggaaaagggggttttggggctttacccattcgcccatggccccccccagaaaaaacgtccccgggtgtgggatcacacccacacaaataaaggccggcccttatatcgcgccccggcgggcgccaattcaccat

SEQ ID NO: 50404 - DNA, 431 bp, Homo Sapiens
ggacaatcaaagcttagtagcttgagctggtcctggaagagcaagtaggagctctttagccagactaagagacgggcattctcggcagacggaatattctatataacgacgcggagtcagggaacagtagggctctttgaagaactacagattgtgttctaaatgaatgacatgtaaggtttgtacggggcgagtgataaccactgatgaatggcagatggtgttgacaactaggcggggccagagtctgtaggatcttacatgtcttgcaatcagttttgacttcgacctcgggacccagttgaggctcccttccgccccagttcctcatggcagggaaatacatcatgttgtgcgttgtaagacttcaaaactttgctagtgagcggcctgcttaatattatttaatctagttcaatttaatcgtttcg

SEQ ID NO: 50405 - DNA, 751 bp, Homo Sapiens
  misc_feature (518)..(518): n is a, c, g, or t
  misc_feature (561)..(561): n is a, c, g, or t
  misc_feature (638)..(638): n is a, c, g, or t
  misc_feature (746)..(746): n is a, c, g, or t
ttgcctgacgacggtccttgctgatgctgtgaactaacaaagttgtctttttgtttttaagggaacccaccctggcgtctggacagcaggttaggtttgggtggttttgagctagcactgctgtggggcaggggtggccgctccctggtgaagctaatgctgtggaagctggaatgttccttcctaaggagtgggatcatgcccctaccccagcagaggtatctcatcactcgctcatgtgcgagattctaaataaattttgttcttgggcatcttctactaggcctcctataaaatagatcttgctgtttttggtttgtgttaatggaacctcactttctagagataattgtttagttttttatttaggaagttttcaaaatatacaaagcaggaatgtaaggaacccgcatcacctcaaattcagtgttacccacacttgaccatgcttgccccagctgtgccttttttctttccttgggtattttgttgctaaagtattttattattactgcttnggaagacagggcctcactcctgtcacccaggctggagtatggnggcacagtcacatctcactgcagcctcaacctcctgggctcaagccatccccccaccccagcctcctgagtagctgngactacaggcacacatcactgcgcccagctaatttttaaaaaatttttgtggagacaggttctcttcatgttgcccaggatggtcttgaattcctgggctcaagcagncctcc

SEQ ID NO: 50406 - DNA, 595 bp, Homo Sapiens
tcctccggcccagaacatcctggcccggagtcctccctgccctcaggggctctcagcaagtcagctcctgggtccttctggcacattcaggcagatcatgcataccaggctctgccatccttccagatcccagtctcaccacacatctacaccagtgtcagctgggctgctgccccctccgccgcctgctctctctctccggtccggagccggtcgctaagcttcagcgagccccagcagccagcacctgcgatgaaatctcatctgatcgtcacttctccaccccgggcccagagtggtgccaggaaagcccgaggggaggctaagaagtgccgcaaggtgtatggcatcgagcaccgggaccagtggtgcacggcgtgccggtggaagaaggcctgccagcgctttctggactgagctgtgctgcaggttctactctgttcctggccctgccggcagccactgacaagaggccagtgtgtcaccagccctcagcagaaaccgaaagagaaagaacggaaacacggagtttgggctctgttggctaaggtgtaacacttaaagcaattttctcccattgtgcgaacattttatt

SEQ ID NO: 50407 - DNA, 421 bp, Homo Sapiens
tttttcatttttaaagagactcctgctatgttgcacagacttgtgaattcctggtttcaagttatctttccccctatgtcactcaagtaatgtggactacactcatgtgacaccatgcccatctttatgttgtgtatcttatttttgttttgttttactcttgaatcagctcagtctgaaaatctgtcttttaattcatggggattttttagaatgatttcttggagggttttgtcttttgaatgtgtggtcccttctctgcctagaatttttttgtttgaatgagacatggtcttgctgttgtccaggttggagagcagtggtgcaactatagctcactacattcttgaatttctgggctcaagccatcttcccatctcagctttcagaatatcttggctacaggcatgtgacactatgc

SEQ ID NO: 50408 - DNA, 687 bp, Homo Sapiens
  misc_feature (499)..(499): n is a, c, g, or t
  misc_feature (579)..(579): n is a, c, g, or t
  misc_feature (622)..(622): n is a, c, g, or t
  misc_feature (656)..(656): n is a, c, g, or t
acgagggagcagtaagtgcagagtctctgtggtcagagcacacagggctggggctgaggggtgggcagttaacaggacatgcccaggagattgcaggagctagacttgcagagcctttggcccttgtgcacactagaattgtgctctgagcaagggtctgagcacgggccgggcgtaagctaagccccttcaccaggatcgctctagatgctgtgttaaccatagcagggccaggtggaggcaggggaccagtctggaattggaggctggctcctggccaggatgatcgtggacaggatgcgtagcctccctgttgatggttcttcccaggtttttatattcagtgctcacacatctctgagcacataaataagcacttctctgcaatggattcctggaggtgggaagagtatgcagattataaatgttgctgggaactcaaatttctctccagaaataccctattactacaccaccacacacaagagccactcttctncacctgagcaacgctgagtgtgatcagtcctggtaatttttggcaacctgatgggcaagataacctcgtcctttgcattntcctgatgctaatgagggtgagcctctttctacaagttcaccnatcttttggtggctctctttgtgggatggcctangcagtctttcttgcttagtctctctgttccc

SEQ ID NO: 50409 - DNA, 475 bp, Homo Sapiens
aaacaaacatggatgtgagctctgggcttcattccctggggcatccttccctatctctcccctcctcaggtgagttctgtctgagttagcagtgtccctcctcacctttcagagtgatctcacctctttacacactgtgctcctttccctctcattctcctccttcacctttcatgatccctccttcctctcaccccatcacttttccctcatcctcctaactccatccccactgtcctctccctttccactccccaagggttctcaattctcttttcccaggctcgtccatgactgtttcttgtcctcagagcccttgccttccttgctgcctcctcagtcccattctctgtctctttcagcggccccatccttatctaccttccccagtgcatcccagaaaaacatctgtcccttcctccctccatcacacagaccaaacacacacccagagccctcgggctaagagttggta

SEQ ID NO: 50410 - DNA, 498 bp, Homo Sapiens
ccaagtgtgtagttaaacttttattagtctgaattaaactcttttatagtgttttatggttttaaaccacaaagatttataatcatttatatctatttatctaatgttattcaaatgttttctggcattgtatgaagctaagataaatgtaaaaaaaacaaacaaaaaaaacctcacttggggtttggtaatcattagacgatttaacctaatatatcttcccatatgatatgatcttggcatatggcatacttcattcatatgacatagttagaatcttttcccacaaacaatgagtgatgatatctcatttgaaaactcgtgtaacatggtatcagccactgttataacagtgatttacccatgttagtctcataacaactctatgagatcagtaccgtacacatggggaaacttagtatagagaggtgaagtattttttccaagattacaaaataactgtctgagctgggattcgtaaccaggcagcctgatcca

SEQ ID NO: 50411 - DNA, 551 bp, Homo Sapiens
gcacgagagactctgttccaaaaaaaataaaaaagaacagcctttttaggccacagtgacctgcgcaatgtttatatgctttgacctactaactttctcctaactaaatatttgattttaggagagtgtttaaataaattacagtatgtctatatgatgaaatgttattttgccattaaaattttgtttacaaagataatttttattgacataaaaataactttaatgtaatttatgttgaaaaagctgaatacaagtctttatatagagtaatatttgagctgtgttcaaaaatacataggaaaagactgataaaatgaaatatggcaaaatgttaatagttttccctggaataggataataggcaattttaaaacagactcctttaaaaaaacaaacaaacaaaaaaaacatagacttctttatatcttttgagctccctcccttttattatgtaatgaatatgtgttgcttttgtaataggaaaataataaagttaaaatttcaactgcaaaaaaaaaaaaaaaaaaaaaaaactcgagggggggccc

SEQ ID NO: 50412 - DNA, 832 bp, Homo Sapiens
caatttcttggtgaacaatggaggaggccagtttctttcccctgctgaacacatcagttctaagggatggcacgctgtgcttgagaccaacctgacgggtaccttctacatgtgcaaagcagtttacagctcctggatgaaagagcatggaggatctatcgtcaatatcattgtccctactaaagctggatttccattagctgtgcattctggagctgcaagagcaggtgtttacaacctcaccaaatctttagctttggaatgggcctgcagtggaatacggatcaattgtgttgcccctggagttatttattcccagactgctgtggagaactatggttcctggggacaaagcttctttgaagggtcttttcagaaaatccccgctaaacgaattggtgttcctgaggaggtctcctctgtggtctgcttcctactgtctcctgcagcttccttcatcactggacagtcggtggatgtggatgggggccggagtctctatactcactcgtatgaggtaccagatcatgacaactggcccaagggagcaggggacctttctgttgtcaaaaagatgaaggagacctttaaggagaaagctaagctctgagctgaggaaacaaggtgtcctccatcccccagtgccttcacatcttgaggatatgcttctgtactttttaaaagcttatagttggtatggaaacatttttcttattttaaagtgtataattatatctatggaaaactattcctgaatatatacagtctatgtcccatcgagtcttttactatgattaaaatgtatagtacagaattactatttatgactact

SEQ ID NO: 50413 - DNA, 493 bp, Homo Sapiens
  misc_feature (24)..(24): n is a, c, g, or t
atttgccttactataactcttagnaaaaaaggcttacaacttttgaaggtttagcatgatgtcagatgtccatttgtcatatatggcctttattggcttgaggtatgtatgttctatatgtaatttgttttgagattttgtcataaagtaatgttgaattttctaaaattctttttctgcattcacttaaaagttataattggttctgagatccttcatctttctcagaatctaggaggatgcatctgtacctagaggaggacacaaaggcatcatatgttacattctcgtgacatataatgtctactgcttataatgtctactgtgagtttctgactccccaaatgaaattgaggcccagaaactttcaactgctttgttcgttgaataatgccaagtgtctggaaatgtgactattcagattaaatgcttaatgtgtgtgtgttgactaaataaatctcaaccagaaccttctcagaaaaaaaaaaaaaaa

SEQ ID NO: 50414 - DNA, 751 bp, Homo Sapiens
cacgggatggtgtccacggcaagtgtgcacaccctccgccagacctcactggcctggctggaccagtactgctctctgcccgctctccggccaactgtcctgaactccctacgccagctgggcacatctaccagtatcctgaccgacccgggccgcatccctgagcaagccacacgggcagtcacagagggcacccttggcaaacctttatagtcctggccagaccctgctgctcactcagctgccctgggggctgctttccctgggcacgggctccagggatcatctctgggcactcccttcctgccccaggccctggctctgcccttccctggggggtggagcagggtccaggtttcacacttgccacctcctggaggtcaagaagagcagagtccccgtccctgctctgccactgtgctccagcaccgtgaccttgggtgactcgtccgctgtctttggactgctgtgtttcaatctgcaaaatggggatggggaaggttcaatcagcagatgacccccaggccttggcagctgtgacattgggggcctaggctggcaactccgggggctcaacggtggaaagaggaggatgctgtttctctgtcacctccacttgctccccgacaggtggggcacagacctctgttcctgagcagagaagcagaaaaggaggttccctctctctgctccttcactgctgacccaaggggctgcaggatggttcccctgggaaaggccaggaggggct

SEQ ID NO: 50415 - DNA, 530 bp, Homo Sapiens
ttattgatagattattaactaaattacgtattttatttagatttcttgagtttttaccagttgttctttttatattctaggatcccatttgtcataccacattacacttagttgtcataagacaataaaatttctatttagcaaattttattgggtacctcctttgtattgggaactgttttaatagtgtaagggatctgtccagtaaacagacccaaaaaatccctgccttcatatgaagcttgcattttgtttcctttaatatgctcaagaaatttctaatgaaaagtgaaacaaataggagatcatatataccaagggtgtgattattggcctgtaattttgcctccttctttgaattttctttttttaaaatctaggctgggcacagtggcctgtgcctgtaatttcagcactttggaaggctgaggtgggaggattgcttgaggccaggagttcaataccagcctgggcaacatagggagaacctgcttgtatttaaaattaaataaatgaaaaaaaaaaaaaaa

SEQ ID NO: 50416 - DNA, 455 bp, Homo Sapiens
ccagggtgagccccgcgtcccggcgccactcggcccagggcagggaccccgccacggccgggaccgcccggcccggccccagcccgcgcctctccgcgccgccccgcgctccgcaccgcgccctctccgcgtccccgcccgcgcggccggaccgggcagccagaaaaatcatttttcttctctgggaaggtgaacatttgtagcattgatttcccggatctggtaacatggcaaaagatacttttaaagcgtctgaagcgggatgaaggtgaaagatggaaggatctgatctctgaagctgcggtcaccacccacaagttgtggccttggataccacactgcagttgggtggtgatggggtggtgccttctgactttttccttatctttaccgactgtgttaattgataattttaaataaacgccttaattaaattgaaaaaaaaaaaaaaaaaa

SEQ ID NO: 50417 - DNA, 610 bp, Homo Sapiens
  misc_feature (610)..(610): n is a, c, g, or t
ctttcaaggacttggcccaaagtaaagtactcagggagctccttcgttggacctccacactgctgcaaggcctgggccatatgttgctgggaatttcctccacccttcgtcatgcagtggagggggctgagcagtggcagcagaagggccgcctccattcctactaaggggctctgagcttctgcccccagaatcattccaaccgacccactgcaaagactatgacagcatcaaatttcaggacctgcagacagtacaggctagataacccacccaatttccccactgtcctctgatcccctcgtgacagaacctttcagcataacgcctcacatcccaagtctatacccttacctgaagaatgctgttctttcctagccacctttctagcctcccacttgccctgaaaggccaagatcaagatgtcccccaggcatcttgatcccagcctgactgctgctacatctaatcccctaccaatgcctcctgtccctaaactccccagcatactgatgacagccctctctgactttaccttgagatctgtcttcatacccttcccctcaaactaacaaaaacatttccaataaaaatatcaaatatttaccan

SEQ ID NO: 50418 - DNA, 942 bp, Homo Sapiens
cttaaacaggccctgaaggaatttggagaaccctgggacctcaactctggagatggtgccttctatggacctaagattgacgtgcacctccacgatgccctgggccggccacatcagtgtgggacaattcagcttgacttccaactgcccctgagatttgacctccagtataaggggcaggcgggtgccctggagcgtccagtcctcattcaccgagcagtgctcggttctgtggaaagactgttgggagtgctggcagaaagctgcggggggaaatggccactgtggctgtccccgttccaggtggtggtcatccctgtggggagtgagcaagaggaatacgccaaagaggcacagcagagcctgcgggctgcaggactggtcagtgacctggatgcagactctggactgaccctcagccggagaatccgccgggcccagcttgcccactacaattttcagtttgtggttggccagaaagagcaaagtaagagaacagtgaacattcggactcgagataatcgtcgccttggggagtgggacttgcctgaggctgtgcagcgactggtggagctacagaacacgagggtcccaaatgccgaagaaattttctgagcctttgtacatagatgaggcaaaaacctgcgagtgccatcagcctccctcacatgggagaccccagaccagctgacaatgtggagcccccagaacttcagaactggtgtggagggcccatgtctgctctcctgaacacagcgaccttgggatttgggggaccccacaaaaggcaggccagctgtagactgtctcggatgtgaggcagaactggacactaccagcaccacaactcacttgcggccaaggcgcagtggctcctgcctggtaatcccagcgcttctgggaagttagggcgacgcttcatacgtcgggacatcggaccac

SEQ ID NO: 50419 - DNA, 447 bp, Homo Sapiens
ggctgaggctgcctgctgtcctgggggcctcaccctgccaccaacaggaagccacacagagggaagcagaaatgagacgcagccagtgagggcagggtacaaaggtgagatcccggagagacagatgctgggacatcatccttgggtactggttccaacagtgcctgcagatggagccaccctcggagagtccacaacagcagccaatccattctatgcgtgtctgagctactttaagtcgggtttttgactgtttgaatgagagtctcatcttggctaggcaccatggcgcaacaactggggaggtggaggtaggaagattgcttgaggccaagagtcccagagcagcctgggcaacctatcaagacgctgtctttacgaaaaaaaaaaaaaaaaaaacactagcgtgcggccgcaagcttattccctttagtgagggttaatttt

SEQ ID NO: 50420 - DNA, 427 bp, Homo Sapiens
  misc_feature (373)..(373): n is a, c, g, or t
  misc_feature (381)..(381): n is a, c, g, or t
  misc_feature (395)..(395): n is a, c, g, or t
  misc_feature (426)..(426): n is a, c, g, or t
gtatactgatgaaggtgccagaattgatgtccattagactgtaagctccatgggggcaggaactttgctaccgaatctatacaaccttaacattgactagtgcttgtaggtgtgctcaatacttgtttgttaactgaatcaaaaggagtaaatgcacaatatttgaacattgtatccaaaggaagaaacctgcgaaataaaattatttgcagaaatgaacatttgttgaaatgcagaaaaccactggatactgcagcctacaatattaatatgatattactcttttacagttgacacctgtcctctctgtagtctcttctctcaaatttggttcttattgaggagcctgtctagtttcccaaaggtttttatnaaaacatnagttggaggtaccnttgatttttaattttatttttgaggacgggnt

SEQ ID NO: 50421 - DNA, 686 bp, Homo Sapiens
cttacttatctcaatggctaaagaaaaaatagtgaaaataccaaatactgatgaggatacaaactggatattttatacattgctgacaggaatgtaaaatggtacagccactctgggaaagagtttatgaatttcttatcaagttaaacataattttttaatcaagttaaacataagacccagcagttgtgctcctggacattcattccagagaaatgaaaacctatattgtacttgtactcaaatattcataggagctttatttgtaatagccccaaactggaaacaacccagatgtcctacaacaggtacatggttaaacaaaccatccataacttggaatactgctctggaatgaaaaggaactaactgttgatacaagaacttggttgtacctcaggggtattatggtgaacaaaaaaaaaaccagtctcaaatggtcacatactgtatgatcgcatttatataacattcttgaggtgacaaaattattgaaatgaagaacagattaatggttgccagggatagggactggagggggtgtggggtatgtatgactataaagggatgacgcaaggagttcctttgtgctgatggaacagttctatatgattatgatgattacgatgttgattataacatttgattatgaggttaagcacatgagtctttacctgtgctgaagt

SEQ ID NO: 50422 - DNA, 644 bp, Homo Sapiens
aaactcaaggatttaagatgattagacagatggtcaccaaaattagtccacaagtagaagaatttacagcaccatgtcatacatagttcatcctaatttctaccaacttcactgggcaacaatcaatcgttttatttccctcaatgactcttgttatcttcagacctgaaactgattcggagacatggggcccacaaacctaatcagagtaacatgtgttcattgagtacacatgtagacatgagaatctccactttccccttttttctcttggtaaaatgttcacaaatgttcaggtaacacctgctactccagccattcaggccttaaatctgcagctctacattttgtatccaggtcttgagatttgggaaatagaaaatttttatctaaaaaatgaaagtacttttggttatcaaactcagacattgaaatgaacgtgcagttatgtcgttctccccctttaaattatgtattcatcgcttgaaactgttcactattgccacaagtagatatatattaaactaataataccacattggacactatatctcataccctaaaccataatgatatatatctaatcaataaccaatgttatttctttaaataaataaaaatttcctgacaaaaaaaaaaaaaaa

SEQ ID NO: 50423 - DNA, 741 bp, Homo Sapiens
gtgggcccagtccattgggtgagtccttcaaaggtggagacctttccctgctggccagagagaggctgccttgctggttttggagatggaaggaggtaccactagtcaaggattgcaagcagtctctagaacagggattccaacactccggacacagaccagtagtggtccatggcctattaggaagtggggtgcacagcaggttaggggccggcaagccagcgaagcttcatctgtatttatagccactccccgtcgctggcgttaccacccgagctccgcctcctgtcacatcagcggtgggcattagattctcatagcagcacgagccctattgtgaactgcacacacgagggatgtaggttgcacgctccttatgagaatctgatgcctgatgatctgtcactgtctcccgtcacccccagatggggctgtctagttgcaggaaaacaagctcagggctcccactgagtctctgtgatggtgagttgtagaattatttaattatatgttacaatgtaataatagtagaaataaagtgcacaataaatgcaatgcacttgaatcgtcctgaaaccatccctccccgaccccaatccatggaaaaattgtgttccgcgaaaccggtctctggtgccaaaaaggttggggaccgcttctggaaaagctggaaaaggcaagaaaacgcattctctccctcagcctctggaaggaaccagcactgtgggactaatttacata

SEQ ID NO: 50424 - DNA, 618 bp, Homo Sapiens
  misc_feature (571)..(571): n is a, c, g, or t
ccaggggtatatacactttcttcatgtttcttctttgtatatttggtgactgtatcgtcatagatgtacatattgtgtcggtagggctatgaggcatgttacaggaatgtaattttctcagaatttacacccactcgcagtcatttatttaaaaagataaaacaagataatgggttctttgtattggcactttgcaccagaaacatatcattatttattgatgtgattacttatttgttatccaccttgtactagtaagttttagcactgaattccttcttcactgttgtttgtatttatgaaattctgaaattatggggaatcagcgtaatgattaagttattcatcaccaggctgtaagcaatatcttgagtttgtagcttagaattgggaggatacttaacatctggaagacaagttcatttcatcttgagatcatggtgaaatattttggatatataaattccttaagctattgtaaccatgttttattgcaaagatgtaaaatatgccagatgtgtgtgagttggaaattcaaaaaagaaaattaaatatgccaagaattcacctnccaaaaaaaaaaggggaatatatcttgggggggggcccggccccaat

SEQ ID NO: 50425 - DNA, 322 bp, Homo Sapiens
gcacagaaagatgggcagtgctccggttgtcaccaccccccacacccctacacacccccacaccctcccctccaggctccacgacttcacagtcttactgttgtaaatatcattgtacagtttgtaatcctcaaataatcccattgtcagaggcctcgctgatgggccttctcaccctcgagaaaggccagggaatctagaaggggcaacccttcaaggagagcttcagggtcatctctgtgtgagacactattgtatattcctgtaagattgcatttttatctaaggaatgatgttatttaaaaaacaaacaaaaaacaca

SEQ ID NO: 50426 - DNA, 634 bp, Homo Sapiens
tggccgagtctctgggtctgtctacactggccgagtctccgactgtctgtgctttcacttacactcctcttgccaccccccatccctgcttacttagacctcagccggcgccggacccggtaggggcagtctgggcagcaggaaggaagggcgcagcgtcccctccttcagaggaggctctgggtggggcctgctccccatccccccaagcccacccagcactctcattgctgctgttgagttcagcttttaccagcctcagtgtggaggctccatcccagcacacaggcctggggcttggcaggggcccagctggggctgggccctgggttttgagaaactcgctggcaccacagtgggcccctggacccggccgcgcagctggtggactgtaggggctcctgactgggcacaggagctcccagcttttgtccacggccagcaggatgggctgtcgtgtatatagctggggcgagggggcaggccccccttgtgcagagccaggggtctgagggcacctggctgtgttcccagctgagggagggctggggcgggggccgggcttggaacgatgtacgataccctcatagtgacccttaaacctgatcctccaccgcgaaaaaaaaaaaaaaaa

SEQ ID NO: 50427 - DNA, 667 bp, Homo Sapiens
cccacgcgtccgggaaaaggccaactctgtcctggtcttgctgtggcaccccatcgccccacagctcgtaccttctcaccagattcccctgaatccaaactcgtggtgcaaacctctaccttttttacaaaaagatcttattgttaatttattgtttctggcacttgggcaaaccctgtagttaatactcctcccacactagacactgggtttcaggaggagggagactgccctgctttggtcccagagaggccctctgcagataggcgtggcccctcttcagaggacactaccctagggcactttctctttgaggtggagagacccataaagccttgaccacatcactccatatggggaggagaaggatccctgtcaccttctcctctcttcacggggcccttttgcagccctaggcctcatctgtgggaagggagtccctggcttatactgcccccaccacagctccttgccctggccagaactgctgtcgaagaaaatcaggccggaaggccaagaaggcgctaagggggatgggagggcaggttttccaggctggagtcggttccacccactcgcctgtccacaggcttccttgtaagcaagtcagcagcacagctactcacgctgccatctggacttattttatgtcaatctggttataaat

SEQ ID NO: 50428 - DNA, 587 bp, Homo Sapiens
attgacacttagcagtcatagggctgataatacacacagttactgacttagcctaaacaacctggtgcatcgaaatgtattcacctttcttttgtaaagagaccatcttctatcttctttccacctttctctgttttatgaaaccaactgttgacatacaaaccatgattgaaggagaacctgtccaacatgttttatgtacacaaatccctatgttgctataagaaaagtgaaagtaactgttttcttcttggtgctatgacagtgtgagactcaggttgtctgtagagaatgaaaggagcagtggcccgcgtgattgtggcatttaaggagcagtggcccatgtgactgtggcattttcggcacttttcattactttctgcttgaccggaagttgaggcttagctatgtttccatcttcagtttctgaagactagttatatattccttactagaaatatattcataatatataaaagaaatatatctgtgattttaaaattttgctaccaaagaatgcatgttctgtgtgccctgaaaatgttaccagtgttaataaatggatacttatcaaaaaaaaaaaaaaa

SEQ ID NO: 50429 - DNA, 731 bp, Homo Sapiens
  misc_feature (706)..(706): n is a, c, g, or t
  misc_feature (723)..(723): n is a, c, g, or t
  misc_feature (726)..(726): n is a, c, g, or t
tcaacaagcaagatatttacaagagtttcagtaggcagttggatcagttgagtcgtttaggatctagttcacttacaaatatacccgaggaagctcgtgaacatgtaaagctactgttaaatgtaactccgactgtaagaccagatgcagatcaaatgacaaagattcccttctttgatgatgttggtgcagtaacactgcaatattttgataccttattccaaagagataatcttcagaaatcacagtttttcaaaggactgccaaaggttctaccaaaactgcccaagcgtgtcattgtgcagagaattttgccttgtttgacttcagaatttgtaaaccctgacatggtaccttttgttttgcccaatgttctacttattgctgaggaatgcaccaaagaagaatatgtcaaattaattcttcctgaacttggccctgtgtttaagcagcaggagccaatccagattttgttaattttcctacaaaaaatggatttgctactaaccaaaacccctcctgatgagataaagaacagtgttctacccatggtttacagagcactagaagctccttccattcagatccaggagctctgtctaaacatcattccaacctttgcaaatcttatagactacccatccatgaaaaacgctttgataccaagaattaaaaatgcttgtctacaaacatcttcccttgcggntcgtgtaaattcattantgngctta

SEQ ID NO: 50430 - DNA, 1057 bp, Homo Sapiens
  misc_feature (814)..(814): n is a, c, g, or t
  misc_feature (876)..(876): n is a, c, g, or t
  misc_feature (882)..(882): n is a, c, g, or t
  misc_feature (884)..(884): n is a, c, g, or t
  misc_feature (886)..(886): n is a, c, g, or t
  misc_feature (891)..(891): n is a, c, g, or t
gtccggattcccgggatttcaggagaaccgaagactaaaatctttaacatttgacgcagtagctttggatatgttaaatcctcatgttactttgcctgttttttacccacatcttaagcatggtggtgtatgtgctgtatatgtagtaaacatcacacaggttattgaacttttagatggaattcgcacctgtgaacttgctctttcatgtgaaaagataagcgaggtcattgtcagagattggttggtttgccttgcaaaacagaaaaatggaattttagctcaaaaagtagaatctaaaatcaacacagatgtacaactagattctcaagagaaaattggagttaaaggtgagctgtttcaagaggatgaccatgaagaatcgcattctgattttccatatggatcatttccctatgttgctagaccagtacactggcaacctggtcatacagcttttcttgtcaagttgaggaaggtcaaaccacaacttaactgagtactccagatgacagtaactggcttgaagatggaaaaatatcaaaatagaactttatattgaaaatcactgcttccatagattggcatttttagctattactatgacttatataacttatacatataattttgaaaataacaactaaaagatgtataacatagcaaaactgcttaaacatcccattttgacacttgtcttgcagttagtttgacattttgtagttaatgattccaaattggtttagttgggccatctcattcttcacttcctgtaaaccactccatagatttgtcttttcttcaagaaattagntttctttccctttatttgattgatggttcattgactacctgaaataaaaatatgcatttttnggattncncnaccanaccaccacaacaaaaagggcggcccgcctccaaaagtacccctccgagggggcccaaggcttacgcgtaccccaacttttctttggtacaaaggtgtccccctataaatgaagccggtattataaacctagggcccttggcccgtccctttttaaaaccgtcgggg

SEQ ID NO: 50431 - DNA, 587 bp, Homo Sapiens
atttaatgcttgttaaaaccaaatgatgcaaattgttttcacttgtattgactttatgttgtatgattccaatctctgttctgtttggcacttgtatttaattcttcacctttgtaagacatttgtatattgtggatgtgttcattcaagctatttaatatctggcactgttaatacacagtactttattgtacagactgttttactgttttaattgtagttctgtgtactttttttggatggggctggcatgttttctttgtttcctggcaatacgacgtgggaatttcaatgcgttttgttgtagatgctaacgtgtcagaatcctttacattcaacttttctaagaaaagcattttcagtcttgtagtgtgtgcttacagtaactaattttgttgaaaatggtttcaagttattcaaatttgtacaggactgtaaagatttgttgacagcaaaatgttgaagaaaaaagcttatagaataaaagctataaagtatatattaggatctgcaaacaatgaagaattatgtaatatattgtacaaatgtaagcaaaggctctgaaataaaatgccatagtttgtgaa

SEQ ID NO: 50432 - DNA, 652 bp, Homo Sapiens
tttctgtttgatgtttggttctggcggctcaggcattttgggaactgttgcacagggtggagtcaaaacaacctacatataaaaagagaaaaagagaaacttgtccatttagctttcataagaaatcccatggcaaagggtaataaaaaggacctaatcttaaaaatacaatttctaagcacttgtaagaacccagtgggttggagcctcccactttgtccctcctttgaagtggatgggaactcaaggtgcaaagaacctgttttggaagaaagcttggggccatttcagccccctgtattctcatgattttctctcaggaagcacacactgtgaatggcagacttttcatttagccccaggtgacttactaaaaatagttgaaaattattcacctaagaatagaatctcagcattgtgttaaataaaaatgaaagctttagaaggcatgagatgttcctatcttaaataaagcatgtttcttttctatagagaaatgtatagtttgactctccagaatgtactatccatcttgatgagaaaactcttaaatagtaccaaacattttgaactttaaattatgtatttaaagtgagtgtttaagaaactgtagctgcttcttttacaagtggtgcctattaaagtcagtaat

SEQ ID NO: 50433 - DNA, 671 bp, Homo Sapiens
gtccgggatttatttcagccaggatagtgtctgtctgtgagtgcatcattttaagacagtatgacttcatgttgttacaaactatgtatagtatgtatgttttgtgggttgtatatatacataatatatattatatatatatatgagagatttggtgacttttgatacgggtttggtgcaggtgaatttattactgagccaaatgaggcacataccgagtcagtagttgaagtccagggcattcgatactgtttatgatttccatatatgtatagtgcctatcccatgctgtagtcactgttatgttaaatccagaagttacactagagccagcgatactttatttgtagacaatcaatttgaatccatatgttattactggcagatgatacatgattacagttctgaatctgtaacacttacaaaaggaaacccagagcagcttgatgagtttttgtttctgcttcgttcctgggagtcagtagaaacagcagttgtatgtggttatgttagtctcaagatacttaatttgttgaccttacttcagaaaaattttgtatgtattatatttgtgggaaggtaaaataatcatttgagatttttatcaaatatgaagattagttatttatgaaaaacaaagaaatgtctatttttctttggtcccaattaat

SEQ ID NO: 50434 - DNA, 791 bp, Homo Sapiens
tgtctgaaaatgttgtgtgaagtagctatccctcataatagaagaaaagaatgtggacaggaggacttggactctacatttactatatgtgaagacatcaagagctcgaagtgtaaattacccgaacaagaatcactaccaaatgataacaaagacattttacaacggcttgatccttcttcattctcaactaagcattctatgcctgtaccaagcatggtgccatcctacatggcaatgactactgctgccaaaaggaaacggaaattaacaagttctacatcaaacagttcgttaactgcagacgtaaattctggatttgccaaacgtgttcgacaagataattcaagtgagaagcacttacaagaaaacaaaccaacaatggaacataaaagaaacatctgtaaaataaatccaagcatggttagaaaatttggaagaaatatttcaaaaggaaatctaagataaatcacttcaaaaccaagcaaaatgaagttgatcaaatctgcttttcaaagttatcaataccctttcaaaaatatatttaaaatcttgaaaagaagacccatcttaaagcttagtttaccccagtactttcagcagcagaaaaatgaaactcttggtttcttcttgtgtctaaaaataaatccaaaaaaagaaaaaaaaatttgggccgtcgcgcccgcaaaatttaacttcttgggccgccaagaaggacgggcggccggacagtgttaatgggtggtcacaaaaaccggccggtaaacaaggtggtgattaaggcgtaaccg

SEQ ID NO: 50435 - DNA, 593 bp, Homo Sapiens
tgtgactggtacatcgatgtgtcgtgtctgagagagagtgagccctcagagtgcagtgggggcccgcgtgccagatgctccaattcctgagcacctgttccttgccctgccctctgctgagaagccactataatcctttcctagaacaaggcagggtatgaataagatcagtttatttttaggtcattgaacaaatcaagccccatgctatcctccttacccatatttgccctttaataataaaggcaggaagcctatggttgaatgtttgccatgtgcaatttcccataaaacacaaagcagcagcgcaccgcgtggtggccaagagcaggcaagttatctgatttcctgtgctggtttcatcatgtgtagtgtgtagaaaatggctgcatctcatcaaggtgttataagggttctatcagatcatgggtacaaagtacttagcacagggcttgacctataagctctcaaatacttgtgcatataaatattatgtatgtaaagttactcaataataaaggcttattataatagtattatgtaatccagctgctgaattctaacacagttttatgataagtaggagtattaac

SEQ ID NO: 50436 - DNA, 608 bp, Homo Sapiens
gagaaattgcttctgctgtacgagtttgaagttagagccaaattgaatgatccattactggaaagcttcctggaatcagtgtgggagttgcctcatttagaaactaaaacatttgaaacaattgcaataatagcaatggaaaagcctgcacactatcctttgattgctctcaaggccttgaaaaaggctttattgctctacaaaaaggaagaaccaattgatatatcacaatacagcaaatgtatgcacaacttggttaacctctcagtgccagatggggcgtcgaatgtagagctctgtcccctggaagaagtttggggctattttgaagatgctctgagccacattagccgcactaaagactacccagaaatggagattctctggctgatggtcaagtcctggaataccggagtacttatgtttagcaggagcaagtatgcatctgctgaaaagtggtgtggcctggccttgcgtttccttaaccaccttacctccttcaaggaaagctatgaaactcagatgaatatgctgtatagtcagcttgtggaagcattgagtaacaacaagggcccagtttttcatgaacatggctactggagcaagtc

SEQ ID NO: 50437 - DNA, 848 bp, Homo Sapiens
tttttgcttggttttagtttggaggggaacttaagtacacagatccttatctctccccatcccctagcctcacaaaacacagttgagagtcttttaagtacctgagatctcgaagctacccagaactgaactagactcccctaccttagactggtaccctcaaacacaggactgaagcttaattgggaatttggctttatggagaaaagaatctttttcaaagtttgtgtcggaaggggagggtgaggtttgcccactgtctctgcaggaaggctccggcttaatctaggaagtagattccagctgcacgatgaggaacacattagcttttgggatcaaaccaggaatatgaatctgtaattattaagctcattgccaacccacaagatatgtttctgaaaacctgtagtttcttaatttaagtccatccccttcattaactctacagttgtgactcacactgatcccaaacttttaagtgctaaatattaacatttagcattaactgtcttgtcaagcgaaaggccttctctacaacctagtccatctcacttctggtgctacctgagttggacagaattctagctcatggttgctaggaaagctaggcctctgatcatagaagcagatagcttcagtcccagtctaggcctagataaatgactcttattaccacaacccttattattttccaatttcctttctcacatactgtacacaggtagtattttcaatgtgaatccaaagcttgtctggttctctgaaaataattttttcccctttaggttcttttacatttgtgataatgctgtatttaaagagaatatttaaatgtaatattaaagaaa

SEQ ID NO: 50438 - DNA, 453 bp, Homo Sapiens
caaaaaaaaaaaaaaataaaaaattggaagaatggcattttattacagtatagttaagagattggctaaggcagtaaataaaacttagaaatgctcaaatttattgtaaattgcttttataatcattgatatataaagcatgctactgctaatcaattagttttatgtattaagacctatcagcatgtcttttttttagtatctggttgacttaaacatgatgttctctgtaccatttaacattttcaagacatattctccccaagcaaattctgttggaaccaagtgtttccagttctagaagtttacttctagagtcttcatatgaaatttacagttgggctttcatagggttttaatttgcactgaatccttccttctgaaagatgacttatgtttaaagtataatgtagcagtgcttttgtcttacaattaaactcttacagcactcat

SEQ ID NO: 50439 - DNA, 693 bp, Homo Sapiens
cccaagagttctcagtgtctacatgtagactattccttttctgtataaagttcactctaggatttcaagtcaccacttattttacattttagtcatgcaaagattcaagtagttttgcaataagtacttatctttatttgtaataatttagtctgctgatcaaaagcattgtcttaatttttgagaactggttttagcatttacaaactaaattccagttaattaattaatagctttatattgcctttcctgctacatttggttttttcccctgtccctttgattacgggctaaggtagggtagagtgggtgtagtgagtgtatataatgtgatttggccctgtgtattatgatattttgttattttgttgttatattatttacatttcagtagttgttttttgtgtttccattttagtggataaaatttgtattttgaactatgaatggagactaccgcccagcattagtttcacatgatataccctttaaacccgaatcattgttttatttcctgattacacaggtgttgaatggggacaggggctagtatatcagtaggatatactatgggatgtatatatatcattgctgttagagaactgactaaaatggggctggtctgaccgccgctggcttccagtgctgggatcacacgtagcaccagacggctaaatttctcataaatatcta

SEQ ID NO: 50440 - DNA, 719 bp, Homo Sapiens
cctggacctgctgaaaggggtggctgacatgctggaaagggaatgcacactgctgcctgagacagcccaccctgatgctgcattccagctgacccatgctgcccagcagctcaagctggccagtaccggcacctctgagtatgccgcttatgaccagaacatcacacctttgcacacggacttctctgggagcagcactgaaagaatttgaaactgacttttggagctttccttcttttttcatttcaactgaaaatgctttaggtaaaaacctttccagtatgttcacctctagaatagccacccaaagaccttcctgaggctgcctcagaagcaccacttgctgttttgaatgactctactagtatgagaaggatgtgaaggtggttggctggttgggctttaacttcctgggattcataatttttaagcttggaagatagctgctgttcccatgatgggcacatttcctgagaagcttgaatgactgatgagcatagagcacccctgccttcctcaggaaacctgaccggcaggggctctctggcttcctgaaagcttcacctcttccctcgtttatatctcaactgtaagggcattttcaagcttctgttcatggaatgagcaactcagactgtctggagcttgctgagtacaaacacaccaccactaagtttcagaactttccttagaacttgggcaaaatgtggtggtaactc

SEQ ID NO: 50441 - DNA, 665 bp, Homo Sapiens
atcggcacggtgcccaccgtggacctggcctcgcgctacgagtgtgccgcggtggtgctgcactcgccgctcacctcgggcatgcgcgtcgccttccccgacaccaagaagacctactgcttcgacgccttccctaagtgagcggcccgggcggggacgggggcggggcggggcccgggccgggcgcgaagtctcaccggctccacgaccctcccgcagcatcgagaaggtgtccaagatcacgtctcccgtgctcatcatccacggcacggaggacgaggtgatcgacttctcgcacgggctggcgctctacgagcgctgccccaaggcggtggagccgctgtgggtggagggcgccgggcacaacgacatcgagctctacagccagtacctggagcgcctgcgtcgcttcatctcccaggagctgcccagccagcgcgcctagcggcggccccaaccggccggacctcagcaataaggcggcccccggacctcaccccgcgccggcccccacccaggggctgcatgtggaccccccgggcggcccaggggaccccgccccgacccaggggctgtggacgatgtacaggcaacagagctacgcactcctttccttttggaagcaagaagaaaatacgtgaaaacggaaattaaagattgaaaat

SEQ ID NO: 50442 - DNA, 619 bp, Homo Sapiens
gctatttcgttactgagaaaatgataagtatccatttagaatgttcatgtaatgtttggagagttttgtattatggattcaacttatatataatatatataaggtacataatatgcaattatatatctgatatatattatatataaaataatatacctaagtgtttttttaaactatgggagtgtattataaaatcaataataatatgcaaacagttgtgcctgtgtatttgaactacatacaggtatgttgttattaacagatatatttaacatttatttactatgggagccatttcctaattgaattgcgtaattactagaccagaatgcatatgctactatacattgatttactgcctgtttttacactgccattacctttcatgttatccatgatgttgaacatgggaggcatttttaatggaccaaatttttagaaaaattagtttttggatttttttttaagttctgtatactgttttgaatgaactttatttgcagctattctggatgtcagtttaataattcaggtactgaattttattgcttgctaattgtgcctttccgttgctaaattaagaaatgctatgtgtactgtgatgtaaaaataagacatt

SEQ ID NO: 50443 - DNA, 631 bp, Homo Sapiens
ccatagctcacacctgaatcccagcactttaggaggccaagagatgaccaagcgagacgtgcctggcttcgccatcgggggcctgagcgggggtgagagcaagtcgcagttctggcggatggtggcgctgagcacctctcggctgccgaaggacaagccccgatatctgatgggggttggctatgccactgatctggtagtctgcgtggctcttggatgtgacatgttcgactgcgtcttccccacacggacagcgcgctttggctctgccctggtgcccactgggaacctgcagttgaggaagaaggtgtttgagaaggacttcggccccatagacccggagtgcacctgccccacgtgccaaaagcacagccgcgccttcctgcacgcactgctgcacagtgacaacacggccgcgctgcaccacctcacggtccacaacatcgcctaccagctgcagctcatgagcgccgtccgcaccagcatcgtggagaagcgcttcccggacttcgtgcgggacttcatgggcgccatgtacggggatcccaccctctgtcccacctgggccactgacgctctggcctctgtgggaatcacactgggctgacctggcattgggagagggagggag

SEQ ID NO: 50444 - DNA, 611 bp, Homo Sapiens
ccttcccaatcaagtctcttcaggccctcagtgaagtttggctaaaggttggtgtaaaaatcaagagaagcctggaagacatcatggatgccatggattagctgtgcaactgaccagctccaggtttgatcaaaccaaaagcaacatttgtcatgtggtctgaccatgtggagatgtttctggacttgctagagcctgcttagctgcatgttttgtagttacgatttttggaatcccactttgagtgctgaaagtgtaaggaagctttcttcttacaccttgggcttggatattgcccagagaagaaatttggctttttttttcttaatggacaagagacagttgctgttctcatgttccaagtctgagagcaacagaccctcatcatctgtgcctggaagagttcactgtcattgagcagcacagcctgagtgctggcctctgtcaacccttattccactgccttatttgacaaggggttacatgctgctcaccttactgccctgggattaaatcagttacaggccagagtctccttggagggcctggaactctgagtcctcctatgaacctctgtagcctaaatgaaattcttaaaaatcaccgatgga

SEQ ID NO: 50445 - DNA, 877 bp, Homo Sapiens
tttactcttaaaattgtgtcaaggtatttctcactattcgtctaaaacaactagacttgaaaagaaaccatttgagatttgaatctaattgttaacgctattcagattttcccaaagatcttacctcatgaaagtagttctgggtcagaatgatctactcagttaaaaaacaacaacaacaaaaaactaagcgattgggaaaaaacaggaattttatctggttattgcatctggtgatagaggccttcaaagcctattatttctaacctaagtaaaggccccagtgaaaaacatactggggaaataaaacctctgagaaaaggttcaagcaccttttccaaatttaaatcttgccttaaattctctctaccacactgcctttgacactcttggaagtccatgtagttctctacagacagacttcaaagaaacgttaccttatcaaagactaatctgtgccacctctgattcagtgttttatgtctttcactttccctgggaaggagtaaagttcttttctacagctctgggactattacatttaattctgctcttgatagtcaaagaccatggacaacaactgtcatctgaaggactcttctagaagccagagactggtgtttgatggatgttttatactaaataaaacccatcagcatggggttatgtagaaaagcaatttattccattttaagcacttacacagttagtcatggagagtaacaggcctgctgggtgaaacaggtcacccaaaatgggagatggcatccaaactagtgggtcaagggactaactccctaaaaaaaaaaaagccaactccttatcaaggaataaatttaaatttttaaaaccaattccaggttttttggattccacc

SEQ ID NO: 50446 - DNA, 1051 bp, Homo Sapiens
  misc_feature (631)..(633): n is a, c, g, or t
  misc_feature (646)..(646): n is a, c, g, or t
  misc_feature (650)..(651): n is a, c, g, or t
  misc_feature (654)..(654): n is a, c, g, or t
  misc_feature (658)..(660): n is a, c, g, or t
  misc_feature (662)..(662): n is a, c, g, or t
  misc_feature (664)..(666): n is a, c, g, or t
  misc_feature (668)..(668): n is a, c, g, or t
  misc_feature (678)..(679): n is a, c, g, or t
  misc_feature (681)..(681): n is a, c, g, or t
  misc_feature (683)..(684): n is a, c, g, or t
  misc_feature (691)..(691): n is a, c, g, or t
  misc_feature (695)..(700): n is a, c, g, or t
  misc_feature (712)..(712): n is a, c, g, or t
  misc_feature (716)..(720): n is a, c, g, or t
  misc_feature (723)..(723): n is a, c, g, or t
  misc_feature (726)..(730): n is a, c, g, or t
  misc_feature (733)..(733): n is a, c, g, or t
  misc_feature (736)..(736): n is a, c, g, or t
  misc_feature (768)..(768): n is a, c, g, or t
gttccagtaccctgtggaataggaccaaagatggatggaatgacagaatggggaaatgttaagccctctgtcataaagcagaccagtgcctttgtagaaggagtgaagatgcgcacatataagcccctcatggaccgtcctaaatgccaaggactggaatcccggatccagcattttgtacgtaggggacgaattgagcacccacatttattccatgaggaagaaacaaaagccaaaagggactgtaatgacacactagaggaagacaatactaatttggagacaccaacgaagagggtctgtgttgacacagaaattaaaagcatcatttaaccatagacaatttgccaggatctaggaaccacctaatggtaggtggacagaaaaggaaaaaaaaaaaatttacttgcaagtactaggaattcagatgatcagctcttaaaaaaaaaaaaaagcaaaaagactaaagccctattaaggaagttattgctttaataagaaatttcaaatattctcttatcccggtccaaaaggattaagcgattaaagaacgtaaaatggagatgtatttacatacacctggaaacctgtgccttgtattcaaattcattaaagcctaatcctgcaagtnnnaaaaaaaaaaaanaaannaanaaannnanannnanaaaaagggannanannataaaanaaannnnnnaggggccaaaantaannnnnacncannnnnccnggnacaaagggggccccctaagggggccccaaagnaaacccacgcacggggcccccgtttatacacgccccgaattgggaaaattgtaaccttgggatcttgggagagggaacctaacttctgggggggggaataaatgggacaaagggccttcggaaatttaaagccccaaccgcggaggggaaaattttgagagggaaaaccccgtaaaaccaacagggctttactggggcaataaaaaattttggcttttccagggtgattattggggagatttatacccgggggtttaaggacttcataatgtgggggtttttt

SEQ ID NO: 50447 - DNA, 406 bp, Homo Sapiens
tttccaattcttgcagttgccatggtttatcaacaaattttcttcaaatgaagaaaaacattttcatttaaactgtacagttttttcttcaccctaaaaactcatagtcttaaacttctgttccagtgaaagccggcacagtatttcaattctttcttgatttttgttttcaacaagacgttgacagcttgcctcgagagcctttgacgtccttaaaattaaggcaattaagattcaagataaaccttacctacatatttctaagaaaaaataaaataaaaaaacccactagattaaaacaagaagggaaaaagagaaagtagcttaattattgaggaagacaatttgtttccatttctattgcccacctcttgacatcaggttttctgttaaaaaaaaaaaaaaa

SEQ ID NO: 50448 - DNA, 1057 bp, Homo Sapiens
  misc_feature (816)..(816): n is a, c, g, or t
gtccggaattccgggatattttaggagtgagttgcacaaaaggacctaaaatgcattgttttttgccttcttttaagagatggggtctcgctctattgcccaggctggagtgcagtgtgctatcatacatagctcactgcagtctccaactcctcataccagaggcatgtgtcaccatgtcttactcctaaaatgcatttttaaaaagcgaatttttagattaaagtgcctagtttctgattaataaatagaagatgaaaaaagtgggcgggaaaagcataatcttttaagatttgtaattttctgtatgtgccacatttatgtaaattaactataaaatatggaattcaggatcatgctgttttgcatgtactttataggttatatagcatgaaacatacaaattatcactgttctttagtatatagctccttgccttttcttacatagatgcttaatttaacaattacctatttatagttcttattattgacgggaatatgattagaagtaccaaaactaaaaattccattatgtactgtttactttttatttaatattacatgtttttaccttgttgcggtatctttggccttcacacacacatgtgtgcgtgcacgtgcatttcattaccatgtagacaagacagttattgcttatagtaatttacccatttgagggctaagtgttttaagctgtggttttataagcaaagctgtaagtaaatgtaatttattttagaaagatattatttgaaatcaattttgaagaattgcactatttgataatgctgctactacatgagataactctggngaattaattttatgagataagatgaatggctttctagaaggggttgctttttggtttttctttttcttttttacatttcatctttaaaaaaaattgcttatattcagcaagttgggtttgtccaatttcagtggtttgagtttgtttcctgggtcagttcaattagctgctaactttagccagatgttggccttttcaccaaagaaggtaagagtggaccccaataggatttttagggaca

SEQ ID NO: 50449 - DNA, 794 bp, Homo Sapiens
accgcgagctgcagcaggcgctcgagggccaactgcgcgaggcggagcaggcccgggcctccatgcaggctgagatggagctgaaggaggaggaggctgcccggcagcggcagcgcatcaaggagctggaggagatgcagcagcggttgcaggaggccctgcaactagaggtgaaagctcggcgagatgaagaatctgtgcgaatcgctcagaccagactgctggaacgaggaggcagagaagctgaagcagttgatgcagctgaacggaggagcaggagcgctacatcgaacgggcgcagcaggagaaggaagagctgcagcaggagatggcacagcagagccgctccctgcagcaggcccagcagcagctggaggaggtgcggcagaaccggcagagggctgacgaggatgtggaggctgcccagagaaaactgcgccaggccagcaccaacgtgaaacactggaattgtccagatgaaccgggttgatgcatccaattgagccttggagataagcgtccggtcaccagcagctccttctcaggcttccagccccctctgcttgcccaccgtgactcctccctaaagcgcctgacccgctggggatcccagggcaaacaggacccccttcgcccaacagcaattgagcagcagaagtctctcaatggtgggggatgaggggtccttggcccgggtttccaacccttcagggaagataacgtgggtccagcaccagaaattttggcctctttttagcccttggtcttcccaatgttgtatccaccaggacctg

SEQ ID NO: 50450 - DNA, 587 bp, Homo Sapiens
cctacgagcgcatttcgccgtgtggtataggcttctgttcttactcaatggccttatctctctgagttcctgttgatagatgcagttgcctattgagcgactccagcttcctgtctgcttatgatctgccttaaccatttacacagagacagctctgagctattcgtgatgctggccactcttctcatttaccttcccacctctgccttggagtgggtggtatttcagtttgtaatgaagacagcaagttgtagaaaggctaagggacttgttctaggctatgcagctaacaggtagtagactgagatggataagcctgggtgctgccctgcctccctgttttgattacctgcctgggcctgacacccccattaggctgtgaactccttgaagtcaggaactgtgtgttactcatcgttcagtcacctcacagggtctggctttattatttttggttgaataaatgactacaatcttattagaacataacgtattcattttcttgcagatatactggaagcaggtcatgtcttccaaaacatagtgcatactgaataaaaactatggtgatattacataatgtcacc

SEQ ID NO: 50451 - DNA, 890 bp, Homo Sapiens
  misc_feature (43)..(43): n is a, c, g, or t
  misc_feature (133)..(133): n is a, c, g, or t
cggcaagggcggccctcgcgcacctggctgccagcccgcaggngctcgcacgcagacctgcccttgccacctcagcrctcgggtgcgggctgggggcggtggagccacgaaaggtggtgccgagagcggaccnaggacagcgcaggagccccggcgcatcgcarcgcgcacagacccaggatttgtgaagaggtgacccaaatttcaagamaatgttggatgcaaacggatttgccagcaattgcatcactgtmaaaaccagctctgcccgtgtcttccgaagataccaagtgaaatacatgtagatgggatttacatctgaaaaaccaagtgagaaactgaagaccagagagggtgagtggtttacccagtttggcacaactgaccccaacctagccctccatgaggactgagcgcatgaragatcctgagccacagccgcccagccctgctcctctcgaatttctgacctacaggaactgcaagaagtaatgaaagactgctgtttaaagccactgcattttggcatgatttgttatgcagtcgtagataaccagaaaacatcggatttacattttaaggatttggtgcatgggatgggctcagttgggcagttcttctgttccatgtgatggtactggggctgcagtcattcagaggctcaactgggctgaacgtgcaaggtttcttgctcacgtggccatcagtggtgctggctgctgttgggagctccactggacttctgtccagagctcctcagctcacctctctgtatccttgccctgtggctcaggcttctaacaatacagaggctggattccaagaggagggaattagaagcgttcagccttcttaagaccaggattcagatgtcccagactgtcactgta

SEQ ID NO: 50452 - DNA, 585 bp, Homo Sapiens
gaaacgttgaggccaaatcccagtcataaagactgcacaaatgccatggggaggtaggcagaaagttgcaaacaagtgggtttgtatttcagataaccatcttggggctgcaattctaaagttagatataatcacacaggtgagaatagggctgctggtgcatggcaagcgccctccacattccctctggtactgcataggcatgagcctgcaggctaaatgtcttccatacttcagacagaggctaggggagacagggctgactggtggccaaatgtcaaggaaagtaactttttaatacgatatattcctttaagtgacttgtccgtttttagccatcaaattacaaattaagagctagtgattctgcagtaacacacaccaattcctcgaaaaccttctaaagtcacaccagtttaataattccaaccttagggaaacaaagccaaacatattttaacaagtttgaactttgacctttctattgcttcatctctcctcagtgctgtttattctatatagtttttaaaatagtgttattatataactagtataaaatatttgaaaatcaaaaaaaaaaaaaaa

SEQ ID NO: 50453 - DNA, 479 bp, Homo Sapiens
  misc_feature (355)..(355): n is a, c, g, or t
  misc_feature (444)..(444): n is a, c, g, or t
  misc_feature (478)..(478): n is a, c, g, or t
ggcttttcaatctgaagttctgcgaacaaaaagaaaaaggtcatatgctcctttccccacagcaaccaatgtaaaacagcaggggcagggagataactgctatagacactcctgttccaacaggtggaaaccaaggtgcacagaagtcactggttcatagcaattctgaaatccatttgagtacaggtttgcagttctacactcaaagcctgggaataactccctatggcttttggttccaccttctgggctcttggttttatcctctaagtcatccttttttgtgtgaaagggagatgtgtttggacctaaatagttttcttagcctgcttcctgttttgtagaaatgcgtttngtagaaagggtccaaaggcccctttcccttttttggtactctttttcagctcaagctgaccagtaatttctgacaaatacaatttctcnttaaaacaaatttttgaatctactgtgaatcctng

SEQ ID NO: 50454 - DNA, 834 bp, Homo Sapiens
gactttgtaaactgatttcagagaagcgattaaggaattgtactgtctttaaacaatatttagaatgcttcagtaaaagcatttttaaaaaatttttctaatgatgtagtaaatgtacctaatataaagttaagtggttttatttaatacttttcacctgaccatgattatgttataaataagaggatttatagtttgcatgcctgatataatctatttaatttcctttacaaaatttttgtacatgaaagataaatgtcttcattttaccagctacctccttccagattgaatgcttcagtgcactttgattttcaaattggctattattttttaatgtaattaaccttcacaatttaaattgaaggatattctgatccttaggttataaatatgtgacttgatggtttatgtaacattcaagtagcatgttttctataacaatatgataaaagtttgatacataccttgtatgttgcttgacagatctgttttagaaaacattcctctgccttttgaaatgaagccatgtatttgaaattatttcccaaacaattatatcttaagcgtgtgctacataagtaatcatagtcattttaatttagattcatcaagctatattttaactttgaggttgtgaattttcttagacatattaatgactttatagttaatggttgctctcagatttcatttttaagttaacaatttgcccgggcgcggtggtcacgcctgtaatcttagcgccctgggaagccgaggcagtgcatcacgtgacgtcggcagcttgaagaccagccggccacatgtgaaacccatctctactacaattac

SEQ ID NO: 50455 - DNA, 720 bp, Homo Sapiens
accaatgcaatcgttcagaagggtcaacatcctttggtgctaaaatcttgtgtatgttttcagaatggctttttctgtatgttatagaataatcactaaaggaaaggtagttgaatttaaagtcatgaagcaagactctttaattcagttattttaaacaagaattaaaaccccaaacatccttggcaggctttgaagcacacagaattttctagtatttcttattaaatacaccaataataaacatatacttagtttacctgatgagtttagacataattctatataatgttcgcttatattcatttattaactagcaacacttgtgcaagaacaaggtattctgcttgaaaacactgatttttaagttcctgttgcccgattgtaaagaaaatcatctgacacagaagcctggattttgctctcctaacactggtgttttccttgagcctctaattcaaataaaacaaactgatacaccttacagccttattcatctgtgtctggataactcacttttcatctattgaataagaaaaagtgtttaaacttaataaaataaaaaattgtgcaccaattactacagatccttgaaacagtaagccttggatttaagtcaagtaatcagtttttttttaatttaaaaaaaaccatcccttttaaaagaactttaaaaaccctgtgatggccatggggaattggcggtgcctgctttccccc

SEQ ID NO: 50456 - DNA, 512 bp, Homo Sapiens
aaatatatcctaagatcaaagagcctcattactgagaaatgaccttatgaatacttgatttttttaaatttaatgaagaattaaattggtgctctcttttaaaactatattcagattctcaaatagaagttgaagaaatactttccctatctcagtggagccagaattaataagaaattcattccctgtgttttcttaagttaaaatagtcaaactttcagcctttcagatttcggatgtgatacatacacataaacgttgtgtctgaaacagtgctgaaactaatccatgataagaaaactttatttttagatcctgtttgacccatttattaattatttgatagacatgagatactttgctgccatatttttaggttagtggctagatttagtagaactagagtaggaaaggaaatcaatctgatgttgaaccttagtgtcagctacagagatggctatattaagattaccacgttgaaagattgccggatagcctctgtgtctaatatg

SEQ ID NO: 50457 - DNA, 715 bp, Homo Sapiens
ggtatatacctagggatggaattgctaagtcatgtgttcaaacaaaagcgtgaacatgaatgtttaaagtggcattactcataatagccaaaaagtggaaatgacccaaatgtccatccactgaggaatggataaacaaactttgatatatgcatacagtagggtattatttagccataaaaatggataaaatactgatacatgtaacattgatgaaccttgaaaatatgctaagtgaaaggagccaatcacaaaagaccacatattgtatgatttaatttatatgaaatgtcccaaacaggcaaatctataaaggtagaaagcagattagtggttgtcaaggctgggggctcaggggcaataggcatggggtttcttttggggatgatgaaaatattataaaattagattgtcatcctggttgtccaactctgaatgtactggaaaccattgaagtatacattttaaatgggtgtgctaaatggtatatgaattatttctcaataagtgtgtttttttaaaaaagctattgattatttccatcagtctcattcctcttgacaaaaatctgagttgatggtgagcatgtacttcattcctgactccaaagggtacaatatttacaatatttgaatttgggagtgactttactattacaacccttccccttgaagacctggaagacccagcaacataaggacaaacagtagtctca

SEQ ID NO: 50458 - DNA, 512 bp, Homo Sapiens
aaagcctgtcgttaaaaaataacctgttgaaatgggctttaaagacatcaaaataatcacttgtcatgcatagactgtaaatgcagatagagaaatatgtctttgaagctccacttacacaaaaataaaacttgtatatcatgctccctcaaagaatgtgtgatagattattttaagaccatgataatagagtaaaaaggaaagaaagccagaaattacaattttggatgctaaaaagtaactttctagttaaccctaaagtcctgtcagattgtgaagaaatgttccaggatacacttggattagttatgcagtatttcttatcaatgtctagcccttgtgtattgttctgaaaactaaagtttaaatctttatgctgttgcttgctagatatcctgttctttggtagaaaattcccatagtctgtactcaagaagtgcctaaaaatggatttgtgttgattttaagcccatctaataaattatatgtattttctatggtatcgtatggct

SEQ ID NO: 50459 - DNA, 651 bp, Homo Sapiens
ttgaatttaggtgacactatagaagagctatgacgtcgcatgcacgcgtacgtaagcttggatcctctagagcggccgcctactactactaaattcgcggccgcgtcgacaccatatatatatacagtttttgtcaatttaaacagtaaatacaaattttgtatttataaatatacacttatatttataaaacaagaggaagcattttatgagattacttatgttatttcaccatttaatagaaacttcaggctggacatggtggctcacacttgtaatcctagcacttttggaggtagggtggcagggagcagattgcatcgcatgaggccagcctggggaacatgcagaaactctgtctctacttaaaattagcggggcgtggtggcgtgtgcctactgtagtcctagctctctgggaagctgaggtgggaggatcacttgaacccaggaagtcgaggatgcagcgagccgtgaccatgatcatgtcactgcactgcagcctgggtgagagagtgagaccctatatcaaaaaaagtcgacgcggccgcgaatttagtagtagtagtcgacccgggaattccggaccggtacctgcaggcgtaccagctttccctatagtgagtcgtattagaacttggcgtaatcatgg

SEQ ID NO: 50460 - DNA, 560 bp, Homo Sapiens
ctggggagaccacaaaagtaaaacaaactcaaaagtgaaaaacactcacacaatagactctgaggtcagctcaccacacccagactaaagtcactgggctctgtgcgtgtcaccaagactcttaaaagacatacttctgaatcatctttcttgaccctccaccaaactgtagcaagacaggcttcctgggaatgaaaatgacattagcattagtcaagagtgaaattaaagtcattgtactcaaacatctgccaacagtctgtgatttcatagtacccacctctgaaataagactctgtatacaattaaaaacaaagaaaaaaaggtactttaggtcttcactatccactatgtctactgagcacttgaagtgtgtgattagtccaaattaacatgtgctgtaagtgtgaaatattcctcagattttaaaaacttggtataaaaaatacatattttacatataatatatattattcattattcctatattattaattttatgtattatatatacacacatgtaatatctccatttttacattgattaaatgttgaaaata

SEQ ID NO: 50461 - DNA, 623 bp, Homo Sapiens
ggcacgaggctgaagcccagctgcctgcccgtgtatacggccacttcggatacccaggacagcatgtccctgctcttccgcctgctcaccaagctctggatctgctgtcgcgatgagggcccagcgagcgagccggacgaggcgctggtggatgaatgctgcctgctgcccagccagctgcttatccccagcctggactggctgccagccagcgacggcctggtcagccgcctgcagcccaagcagccccttcgtctgcagtttggccgggcgcccacgctgcctggcagtgctgccaccctgcagctcgacggcctcgccagggccccaggccagcccaagatcgaccacctgcggaggctgcaccttggcgcttgccccacggaggaatgcaaggcctgcaccaggtgcggctgtgtcaccatgctcaagtcgcccaacagaaccacggcggtgaagcagtgggagcagcgctggatcaagaactgcctggctgttgaaggccgtgggccggacgcctgcgtgaccagcagagcttctgaggaagcccctgcctttgtccagctgggcccgcagtccacacaccactctcccaggacccccagatccctggaccatctgca

SEQ ID NO: 50462 - DNA, 864 bp, Homo Sapiens
  misc_feature (788)..(788): n is a, c, g, or t
ggagagaagctgaggcggccgaccttcggcccgaggcaccggggcgccgggacggcgaagatgtcggcttccttagtccgggcaactgtccgggctgtgagcaagaggaagctgcagcccacccgggcagccctcaccctgacaccttcagcagtaaacaagataaaacaacttcttaaagataagcctgagcatgtaggtgtaaaagttggtgtccgaaccaggggctgtaatggcctttcttatactctagaatatacaaagacaaaaggagattctgatgaagaagttattcaagatggagtcagagtattcatcgaaaagaaagcacagctaacacttttaggaacagaaatggactatgttgaagacaaattatccagtgagtttgtgttcaataacccaaacatcaaagggacttgtggctgtggagaaagctttaatatttgaaatctcaggactcttctggccgtaggttccaggaaagctcgtggaagctttggggctcactgcagaaatcatgtgactgtcacgtgctggaaaataaagtgatacatcttgaaaatgaatccagtgtgttggattccagaagaaatgatatttatattctctataggggacagaaaatgagaagccatcctctttttggatcatttaggctcttgtatccttgtttagaccagttcattaagttgcttcttggcactgttatcatttctgaatggtgcctcttaatccaatgatgctgactcctcacatctccacgatcggatccaatcgaaagaacngacgcggataaggggattgttccaactaaactttatttgaatctgcccccgacttaacgaatctcaaatatgggaa

SEQ ID NO: 50463 - DNA, 941 bp, Homo Sapiens
ttctatgtagtgggactccggatactctgactcgaatacgaaaatggattgaacattccaaactgagagaaataaactttaaaatcgtggaattcaacccgatggtcctcaaagggaagatcagaccagactcatcgaggcctgaattgctccagcctctgaactttgttcgattttatctccctctacttatccaccaacacgagaaagtcatctatttggacgatgatgtaattgtacaaggtgatatccaagaactgtatgacaccaccttggccctgggccacgcggcggctttctcagatgactgcgatttgccctctgctcaggacataaacagacttgtgggacttcagaacacatatatgggctatctggactaccggaagaaggccatcaaggaccttggcatcagccccagcacctgctctttcaatcctggtgtgattgttgccaacatgacagaatggaagcaccagcgcatcaccaagcaattggagaaatggatgcaaaagaatgtggaggaaaacctctatagcagctccctgggaggaggggtggccacctccccaatgctgattgtgtttcatgggaaatattccacaattaaccccctgtggcacataaggcacctgggctggaatccagatgccagatattcggagcattttctgcaggaagctaaattactccactggaatggaagacataaaccttgggacttccctagtgttcacaacgacttatgggaaagctggtttgttcctgaccctgcagggatatttaaactcatcaccatagctgattaactctaccttaaaatatccctgtatgaaatggggaattggcccttgtagccactttacattgttcttatgaaattaccttggtccattggaccccatttaaaccaaaattctgggggcaatttccttgacatt

SEQ ID NO: 50464 - DNA, 765 bp, Homo Sapiens
  misc_feature (734)..(734): n is a, c, g, or t
aggagccctaacccactgcctctgcctgtccccaagggcccgcctccgtgtctccacagcacaactcgggcccaggcctgacaccactggagagaccccaggcccacttctagccaggcctgtgccttcctagtcactctaactcccagagagaataagaatgcatgtaatagctataccaaccgcgcatccggctttcacatgcactgtctcccctccctccacaccccacttcttcacttcaattggcagcgccacatccaggcgtcagcccccattcactccaggaacactttcttatccccacccctttgctcctcttctgcaaagccaatgcaggtggcaggaaggtgaggggtagtggaccaatggcaaccctctgtgggaacaaggggccgaggccacgctgcctgcatctcgtgctggggacctgcatgcgccagcaccagggcttggactggatcttactcagtccatggtgcccagcctctgccccaacatgccctctgcatgtgaccgtcatgccctggatggagccactcctggctcaccccacctgcactgcactgtccccagagagccacccctccacccactcagagacagctgtggagagggccaggagaatgggattaccctatgaccaaggagacatgggaagaagccctccttccttccacgatcgaggttccgccatcaactcggttctcggatatgcaagtacctcactttgntaacttattaacttattgggttcattaaagg

SEQ ID NO: 50465 - DNA, 662 bp, Homo Sapiens
tgacatttacgaagatggaatcttggacattgtagtgctaagtaaaggatatacaaagaatgattttgccattcatacactaaaaaataactttgaagcagatgcttattttgttaaagttattgttcttagtggtctgtgttctaatgactgtcctcgtaagataacaccctttggagtgaatcaacctggaccttatatcatgtatacaactgtagatgcaaatgggtatctgaaaaatggatcagctggccaactcagccaatccgcacatttagctctccaactaccatacaacgtgcttggtttaggtcggagcgcaaattttcttgaccatctctacgttggtattccccgtccatctggagaaaaatctatacgaaaacaagagtggactgcaatcattccaaattcccagctaattgtcattccataccctcacaatgtccctcgaagttggagtgccaaactgtatcttacaccaagtaatattgttctgcttactgctatagctctcatcggtgtctgtgttttcatcttggcaataattggcattttacattggcaggaaaagaaagcagatgatagagaaaaacgaacagaagcccaccggtttcattttgatgctatgtgacttgcctttaatattacataatggaatg

SEQ ID NO: 50466 - DNA, 609 bp, Homo Sapiens
cccagacaacccctgcaaagtgactctgagaaggacgacaagccctgctgcagtcacacccagaagctgactcatctatgcacagccaaagcatgaggaaactcatcgtgggacttattctccttaaaatttggacttatgtaataaggacttccactgattttccccacatggaggactgttcccaatgtattcatcaggtcactgagtagggcaacaagttaaaacagtttctgttttatagttattattgttgcgggacaatcaaagatgggagagaccaaacaaagtgagttcaggaaaggtctttattgatgatcacttggctcagtaggattagtgtacaggaaagtctgagccctggacaaagaaagcagccaccttttaagcagtcagtggctgggagctacgtgatgcaggaagcacacttagagaagcaagaacaaaggcagttgatcagtcttttacatttatctatattacatgttccaaatccttgggaaaccatgtttctgtataaaccttgtaactttgcagctgcacgggggaggtgaagcagaaactcgctgagcctcaaggaatgtgaaactagcaagtacagatagctct

SEQ ID NO: 50467 - DNA, 568 bp, Homo Sapiens
actctgcaaggacccgagctatttatccctaggtcctttcctcctgcacgtcagctttgagccccgagctggtgcttctgctctctgagacatggcaggcctgatgaccatagtaaccagccttctgttccttggtgtctgtgcccaccacatcatccctacgggctctgtggtcatcccctctccctgctgcatgttctttgtttccaagagaattcctgagaaccgagtggtcagctaccagctgtccagcaggagcacatgcctcaaggcaggagtgatcttcaccaccaagaagggccagcagttctgtggcgaccccaagcaggagtgggtccagaggtacatgaagaacctggacgccaagcagaagaaggcttcccctagggccagggcagtggctgtcaagggccctgtccagagatatcctggcaaccaaaccacctgctaatccccgcccagccctccagccctgagtttgggcctgagctgcttggcgggctactccggggcctggagaagccacagtgatgggggggaagagctaattttcctgtttctttagcaa

SEQ ID NO: 50468 - DNA, 723 bp, Homo Sapiens
gggagcttttgaatataagttgtctgctagatcatggtttgtattgaactaacaaggtttgcagatctgctgacttatataaagctttttgattcctactaagctttaagatttaaaaaatgttcaatgttgaaatttctgtggggctctatttttgctttggctttctggtgagagagtgaggaagcattctttccttcactaagtttgtctttcttgtcttctggatagattgattttaagagactaagggaatttacaaactaaagattttagtcatctggtggaaaaggagactttaagattgtttagggctgggcggggtgactcacatctgtaatcccagcactttgggaggccaaggcaggcagaacacttgaaggagttcaagaccagcgtggccaacgtggtgaaaccctgtctctactaaaaatacaaaaattgtttagctctgtttttcataatagaaatagaaaaggtaaaattgcttttcttctgaaaagaacaagtattgttcatccaagaagggtttttgtgactgaatcagcagtgcctgccctagtcatagctgtgcttcaaaaacctcagcatgattagtgttggagcaaaacaaggaagcaaagcaaatactgtttttgaaattctatctgttgcttgaactattttgtaataataaaactttgatggttgagaaatcacaacttttattgtacactttcattg

SEQ ID NO: 50469 - DNA, 1062 bp, Homo Sapiens
gagttccacttcagacaccctaaacgttctgtgtctttaagcatgaggaaaagtggagccatgaagaaagggggtattttctccgcagaatttctgaaggtgttcattccatctctcttcctttctcatgttttggctttggggctaggcatctatattggaaagcgactgagcacaccctctgccagcacctactgagggaaaggaaaagcccctggaaatgcgtgtgacctgtgaagtggtgtattgtcacagtagcttatttgaacttgagaccattgtaagcatgacccaacctaccaccctgtttttacatatccaattccagtaactctcaaattcaatattttattcaaactctgttgaggcattttactaaccttataccctttttggcctgaagacattttagaatttcctaacagagtttactgttgtttagaaatttgcaagggcttcttttccgcaaatgccaccagcagattataattttgtcagcaatgctattatctctaattagtgccaccagactagacctgtatcattcatggtataaattttactcttgcaacataactaccatctctcttttaaaacgagatcaggttagcaaatgatgtaaaagaagctttattgtctagttggttttttttcccccaagacaaaggcaagtttccctaagtttgagttgatagttattaaaaaagaaaaccaaaaccaaaaaaaaaggcaagggcacaaacaaaaaaaatatccctgggccaataaaaaaaaaatatttttaagacccaaaaaacagaaagcgcacgtgttaagaaacaaaaaggactatcccgcccccgaggactattagtattatcgaagtgcgggtcccgtggggggcctccccagaaaaggcccttaccggcgaaatagaattttctgcacctcgggagctccccaagtttctaaccacgatcaggcggggcgttatccctaaactacagggcacaactcatattcgaaggccgacgggtgtaaatgggtaataaagaacgcctacttcgcacagcaaaagtatat

SEQ ID NO: 50470 - DNA, 575 bp, Homo Sapiens
atacatttaaaattttctaaaacaatatcctaatcaatattgactaatttgagccacattcccaactctaactcagcacacactgccagtcttccccaatatctgtctcctctcaattccccaccacaccttataaaattgtaatcaaagatatctcactctgtcattgttaatctaagaataaaaacactgactttaatacggttttactaagtttcaaccttctaattaggtaggcctctaggtattctgcagatcactgctggtcttgatagccattaatatatgtttgtattatgttatttttcaactaaatcgcagttggaaaaaaacatatttaatattatgcccttggatctgttactgcatcactagcacttgtgatgcaatagaacacttcgcctgtactgaaagggccaagagtaaatgccttgttttgtttttttgttttgttttgttttgctttttgttaaaacatgtctatagagttggcagttaatgctgaatttgtcaaataccccttccaaaattatacttgtatttaaaaaataaatggatctacctaatttctattg

SEQ ID NO: 50471 - DNA, 575 bp, Homo Sapiens
ggttttcctttgttttatggtgcatatagcaataaagacccccctccaccctgcaacccccatcccccaccgggcctttgtccctgccttggcttttctccccttctcattctcctctcccctttcctcactgaaggctgtgagttgctttcaatgtgacaacactatgatgtcatttggaaggatttgccaggacagactgattctgagtcctgggtgccgtatgtgtatgcggcagtgttgtcaggcgatcttgtttgaagctctatgttgccataattaccatcaagtacacactgttggcaaaaggctaacacctgactttagaaaatgctgatttgagaacaaaaggaaaggtcttttttcactgcttaaagtggggtcactttgatacctttgcggtcatgtctgtgtctgatgagtgtagaatctctggatgtgcactgtcagtcatgtgtccaccaggcctcgaatatcatatgggaaatgtcatagttaaaaacgtacagccaggcccgtgtgctgttaatagtgtgaaattgtcatgttaaaaaaaaaaaacaaaacaggaacca

SEQ ID NO: 50472 - DNA, 501 bp, Homo Sapiens
gctgttaatagtgtgaaattgtcatgttaaaaaaaaaaacaaaacaggaaccaaatgtgaccttgtgcatatattggtagctgaaaatcttcaaggctactgatgggtggccccttaatcttgtctttgattgctgtgtgcagggaaaggtgtccccgtttgttcatgctgttttggggggtgggggggtatttgcaagaatactcattttgacataataggtcctcttgtcagagatcctctaccacagacattaatagctgagcaggagccacatggattgattgtatccactcaccattgacgatggcattgagcgtagctagcttatttccatcactacgtgtttttgagcttgctcttacgttttaagaggtgccaggggtacatttttgcactgaaatctaaagatgttttaaaaaacacttttcacaaaaatagtcctttgtcattacattatttactcatgtgtttgtacatttttgtatgttaatttatgaa

SEQ ID NO: 50473 - DNA, 566 bp, Homo Sapiens
gttgcaggtgaccagcatcttcaatctagttaccaccagcttggctagaattttattgaacgcaacttgctagttatgacagagaggaccagggtgagaactaatgctcaagagagcaagattctgtaatcctcttgccctctcacatcacaaattctgatatgccaaacatttggcccaatgagaatgactgatagacttgctgatgtgcatgtggggggatgaggtgtgtatatgcctttctcctgactggccattcagtgttcaggctgtcattcaaattggataggagaaagttggtgaggaaggaatggagagagcaggatccctggactccctggtccccaaactccttgactgtcacttgtaattgtatataatttttgtgtttcttgctccatttcctcatgctgtcatccttaaagtccatctgggaaggggaaaatgctgaacaccattgtatagtttcttcaactgtcccagccatgttgtacatagatatgtcatgttattatatatataaatatatatataattttgaaaaaaaaaaaaaaaaaaaaacgcgg

SEQ ID NO: 50474 - DNA, 588 bp, Homo Sapiens
  misc_feature (568)..(568): n is a, c, g, or t
ggcacacgtggaaagttgatctgcaccagaacccggatgactgtcaccttgaagcgtcctgttctccttctgtgctgtcccaggaagtgtctggcgggcgtgggcagcacagctctacactgtacgattcactagggcatcctgcgagcctcactagccttctggttcatgcctttgacaagcatttttgtgccccctctgcttactgtgacagtcgatgatgaatcttgcgttgccattttctgctgtgggtaactgcgtgcagtgtcttgccttgctttctcttcttactgtcccacagcttggtttcatgttacaaacagaaaagctcgaggctcccaccccgccacatcccaacttcatttccccctcactgtagcccatttccaccccaccacaaagttgccacaggttttctttgtatagaatatttattttgaagctctattttaatagtatttattttagaaagtctactattgtaagagttcttctgtttgtgaagaaaaaaacaagttaaaaactgaatgtactgatttagaaaatatatataaatatatattgttanatataaaaaaaaaaaaaaag

SEQ ID NO: 50475 - DNA, 665 bp, Homo Sapiens
ccagactctaatacgactcactatagggaaagctggtacgcctgcaggtaccggtccggaattcccgggtcgacccacgcgtccgggcgggagggccagactcagtgctgctgtggagctaggtgcttcccccttcccctgagactggtggactgaactccagtcaagttgagttcaagtgaaagattcttccagggttttattttttcccctcctaacaaagtctcatagtgttaacactggttctgcaatatctctgaggtgcaaagaatgcacttttccctatggggcccagagtttgccttttctgccaggcagtcaccacgcttccctaccccagcctgtttcttttggcttggtttggaccacagtcctctgctacccagggttttagagcccctgctctaggaaacagtttaagaaatcattggccccttcccagcacattgaatgggtaagcagacaggccatgatttagttggccagcactaactccacctctgttctccttgaacagcttcccctccagcccactgctttaggatgacacaatgaataacacctagtcatagaaatcagtctctctggtttgttttgtattatgttgtacatcattaaagatctaaatacaaaggatatacagtcttgaatctaaaataatttgc

SEQ ID NO: 50476 - DNA, 699 bp, Homo Sapiens
gatgccattgtaggttttaccagcatttaaatatattatgaattgcttagcaatgaaatgcaagtatgcatcttttacttaaagatactatttatgtattcagctacagagatgaaatagcattttatgtgttaattgttttggctataaaatttaagtccttacagcatttggggattatacacttggatttcaaaattgataaaacccttgtgaacatatctaatagatattctgtttacttgtagaaataatataatgtgtctggttctgttttgttagacattttttatgttctactgaatcagaatagtcagtgttatattccttatttcaagaattcatctattttatggctacatctcatatgtgctatgaggacttctagccagtgggtggcgctgtaataccgaagtactgcactgctttgttcctgtttccttgtgctgattcctttctagtatttaggtaacattaccggatggcatttcccttaaattccaccaactcttaatctttattttaaaaatggctactttttttgggtggttggggtaagggttaaaaccttaaattagtaaccgctgtttattttccagttttatttgttttctgtgattatctatactaattgatatttgtttttacaagtccctgaccctgtataatgaatgcgctatcttaagcaaagcaataata

SEQ ID NO: 50477 - DNA, 582 bp, Homo Sapiens
aaggagtacttactccccaatgatgatgaatggaaaaatacttttcagggagaattgaaggggttaaagtgttaaatatgttgcctagacaagggttctttaaagaaagacagcgcaactttgaatgctttcttacttgttttgtgacctaatttatgtggaagattgttatttcattaggatttagtaaaatttttttttctgattctaaacttattgtgaaaattgagctgtacagatattcttttgatttcaattgggaacatttggaagaacaacagtcttacttgcctgtacaatatagagacatatgaatagtcataacagttttcaacttgttcttgtttctgttaaactatattcctagaaacatagtttgaacaacttggtctttgttaggcttgtcaaattgccttcatggaaaaataatctacaaaagtatggtttaattgattgtcttacatgataattttccctggtaacaacttagtaagtgatatatcttttttcctaaattgcttaaatactgtgaaattgctctgacaaattggaagtgtaccattggcatatttgtcttccttt

SEQ ID NO: 50478 - DNA, 978 bp, Homo Sapiens
  misc_feature (743)..(743): n is a, c, g, or t
ggacaaggagatcaagagcagcttcaaccctgacgcccaggtgttcgtgcccattggcagccaggacagctccctgtccaactccccatcgccatcctttggccagtcacccagccctaccttcattccccgctccgctcagcccatcaccttcaccaccgcctccttcgctgccaccaaatttggctccactaagatgaagaaggggggcggggcagcaagtggtgggggtgtagccagcagtggggcgggtggccagcagccaccacagcagcctcgcatggcccgctcacccaccaacagcctgctgaagcacaagagcctctctctgtctatgcattcactgaacttcatcacggccaacccggcccctcagtcccagctctcacccaatgccaaggagttcgtgtacaacggtggtggctcacccagcctcttctttgatgcggccgatggccagggcagcggcaccccaggcccgtttggaggcagtggggctggcacctgcaacagcagcagctttgacatggcccaggtatttggaggtggtgccaacagcctcttcctggagaagacaccctttgtggaaggcctcagctacaacctgaacaccatgcagtatcccagccagcagttccagcccgtggtgctggccaactgaccatctacctgcccgtggggccaggagcacccaagaccacagaaaagagaaaggaaaggccaaaaaaaagaggaaaagaaanatgtacaaaaagattttcgatcttctcactcttacttctagaaaaaagatccagcccaggcaacggaatggggaggccctgcaaagcacccaagtgtgtttcactcaccccttaccgctcgcccacggcctgggattaattggggtgggtgggggttaaaattccttttcctttttttttttttcctaaacgggaattttcctataaaaactctttaaagggggggctcccggtg

SEQ ID NO: 50479 - DNA, 734 bp, Homo Sapiens
tggccggacgaaagccatgttgataatccaaatggagatggaagatgtgtgacatgtatatattatcttaataaagactgggatgccaaggtaagtggaggtatacttcgaatttttccagaaggcaaagcccagtttgctgacattgaacccaaatttgatagactgctgtttttctggtctgaccgtcgcaaccctcatgaagtacaaccagcatatgctacaaggtacgcaataactgtttggtattttgatgcagatgagagagcacgagctaaagtaaaatatctaacaggtgaaaaaggtgtgagggttgaactcaataaaccttcagattcggtcggtaaagacgtcttctagagcctttgatccagcaataccccacttcacctacaatattgttaactatttgttaacttgtgaatacgaataaatgggataaagaaaaatagacaaccagttcgcattttaataaggaaacagaaacaactttttgtgttgcatcaaacagaagattttgactgctgtgactttgtactgcatgatcaacttcaaatctgtgattgcttacaggaggaagataagctactaattgaaaatggtttttacatctggatatgaaataagtgccctgtgtagaatttttttcattcttatattttgccagatctgttatctagctgagttcatttcatctctcccttttttatatcaaggtttggaatttggggata

SEQ ID NO: 50480 - DNA, 672 bp, Homo Sapiens
cattcagcagtagaagctgtttgatctgttgaccccagcatactgctgtttcttcaccagcttcattgtgtcacagtagcttcctttgggaggatgatgtgatagaacactcagagagagggagggagaagagagatagtgggtatgcttctctagctccccatcttccaggtccacctcttgacttcctgttcccctaaacctgagcacatcacgccaggcctctttgctgccaggacagcatcagctcactcctcagcaataatctagggtatgtgggaaggtcagggctgtggtaaggaatagaatcaaagaggggagtgatacggggtgggggcacttggccgcctgctaaacttggacattaattttatatcatgacccccttttaagccagtgagctgggcttcagtttttcccaggccatgcacatttaatttatttcagagaaactctaattgtattttcactgcagtatcttgtattttttatttgtgatttaagaaatgtgaagagaaaatacacagacacaataatggctaacattgtttctttcattccttgttctagagctaaccactctaaaattgtttggtaatgtcacttagtgtaattaattgtaacatattcttttaaataaattgatttattgatcaaaaaaaaaaaaaaagg

SEQ ID NO: 50481 - DNA, 542 bp, Homo Sapiens
  misc_feature (483)..(483): n is a, c, g, or t
aggtgttctttcatcccgtctgattttaacccatggttgagacgttccaagttagatctgctgctcttaggtgtggggctgtccacattagggaacttgcctcaaaaacagtccacagtggcaataccggacttctgttcaagctttttaaagtgctgagtcttacaaacccctgaaggaaggtgaccctttaagagaggatcatctttttttatatttattttcaccaaatagggtgatgagggttggtttttgttccctcaacccatttgggtaaaataacggatctgattagaaactgttttaaggaggggctgggctcggtggctcacgcctgtaatcccagactttgagaggccaaggcggtcacgaggtcaggagttcgagaccagcctagccaacatggtgaaaccccgtctctacaaaaaatacaattagcccgggtgggacacgcctgtaatcccagctactcaagaggcttangcaggagaatagctttgaacccgggaggcggttgcgtgagcccagatcacaccactgcc

SEQ ID NO: 50482 - DNA, 756 bp, Homo Sapiens
ttttttttttttttttttgagatggagtttcattcttccagcctgggtgacagagcgaggctccgtctcaaaaaaaaaaaaaaaaaaattgttttagcgctgggtttcccaaggtgggagagacagacccagcctggagctggcccctggcctgtgtgctgacttcttggggtcctcaaaccactgtatttttctgttgagcctgtacttggggagagatcagtagcatttgaggaagtaagagaaaagaatcatggtacctcagggtttctttccctttactcgctggcagccattgtctgtgggcacctcatgtttttccacactctactgggccgtggaggtaacgatcacccaggccagtctcctctgcctgggatgcgccctctgagaggaggcctagcagggcaggctccctctgggcatccctggatgcagcctctggacacatgcctcctttaaagtgtccgggtgcagctcaggttgagtggaggtagaaggagaaacagacatgtttaccacgcgttttccaaagctcctgatctttcccaagattgtaactgaaaactgctgtctcttgttttgttcgttttgggggtggtggtgctggctgggccatgcttgtgaagtgatgtgtgtctctgatttaacggattcactgttttctctgctaattgagagagcgttatttacattatttatttgttttgacacaagtgctttcagtgttttatcctagctaatggcttcttaaag

SEQ ID NO: 50483 - DNA, 636 bp, Homo Sapiens
tttttcaactcttgtgcacataaaattgagttgaagttcattgtgccttttttttctttatccaaattttgagttaaagcttcatatggtaactgcatcctgttcggacactatagtctaaatttttgaaactgtgtggtgttcgctaaaagtaggaataacaacgtaaaagctaattaaggtcacaaacttcggtgaaacccttaaaagtccaaatcttcttgatattgtgaaccgtaccccttccagtttagtttcttctggactttccttacttaactgacagttaccttttaaaatttgcacacattatgattaaaattgggcctctactgtgatgattcctatttcctctcatgttttaaagtgcaaactaacatttaagtgaacattagcatcaagtagtgcagacacttgtatgcatttccttgattcaatttgtgaccttaccagttttgaattggaattgcaccatttcgtagataaaggaaactaagtatattgctgcacttttaagttttcaaaacagtgtttaaaaattgcattgttatttttttttaaattcagtttaaaaagactaaaacgttctttcaaaagaggcatctaaatgtgttcctaattttgtatatgggctta

SEQ ID NO: 50484 - DNA, 542 bp, Homo Sapiens
ctggtgatgatattgatgaagatccctgcctcattcctgaagcaacacaaggaggtacctacaattttgatccaacagccaaccttcaaacaaaagaatttaatttttaaattcagttgagtgcagcatctttcccacattcaatatgaagcaccaccagatggctaccaaatgataagaacaacagcaacaaaaggctccaaaacacacatgcctctttgttttgatgcttctaaagcaagccatgtctcagtcactttgcagttgccaaaagtcactatcacatggactgtaaatgcatatgcatgatttcctaaactgttttagaactctccttaacaatctcaactaccctatttttccctgttccctggtgccacaggctgacaactgcagtctccagtttagaataaatattccatagtggtgacatgtcagctgcccactgatactcctttggaaaatggtgcgctgtggatcaagacactttggtatgatgcatatacaagttggaagactaaagaggtgcagtgtgatctgag

SEQ ID NO: 50485 - DNA, 500 bp, Homo Sapiens
ggaaaggtggtgtgtcccctgttccctattccatctccctgggacttcctgctcatcatagtacccagtgagcccagagatcctactagactgggtcagcaattctagagaaccttccggaatagtctgggaacatggtcaaggtggaaggggctcccctagagagggtgggggtgtagttacttcccagttggccagaaaactgggccttgcagacccccttagcattttttccctttttttccttccctgctttctacttctttggggagccccttgtgttttggagtctgactggagtctcgcatcctggggcctgctccatccatccctcctgggcgccagaccctccatccaagccctgtgtctttccatagtcagggtcaggccctgcatctattccaaggggcactcagtacacattccataaattagctgggtgtccctgcacgcccaccccatgaaactcgagcaggtctctggaagccatttgttaaaaa

SEQ ID NO: 50486 - DNA, 500 bp, Homo Sapiens
ggaaaggtggtgtgtcccctgttccctattccatctccctgggacttcctgctcatcatagtacccagtgagcccagagatcctactagactgggtcagcaattctagagaaccttccggaatagtctgggaacatggtcaaggtggaaggggctcccctagagagggtgggggtgtagttacttcccagttggccagaaaactgggccttgcagacccccttagcattttttcccttttttttccttccctgctttctacttctttggggagccccttgtgttttggagtctgactggagtctcgcatcctggggcctgctccatccatccctcctgggcgccagaccctccatccaagccctgtgtctttccatagtcagggtcaggccctgcatctattccaaggggcactcagtacacattccataaattagctgggtgtccctgcacgcccaccccatgaaactcgagcaggtctctggaagccatttgttaaaa

SEQ ID NO: 50487 - DNA, 339 bp, Homo Sapiens
cgcgtccgtcttgaatgagtgttttttaaaaataaagtattagaaaaacgtgtagtaaagatgtaaaattaaaaaatggaattctccattaactgtggattttactaaatagaattactggtgaagcagatttatccatcgagactatctggtatgcgttatgtatgtagtctgttgctgctgaaagatgtctgtgtgcctgtatcaacatgtgacttcatgtaaagtttctttgtgttcacagttcttagcaaatgcagttacaatccatagatagccagcagtggatgttactccaggaaaatgcaggattaaaattgtccttgtgtaaaaaaaaaa

SEQ ID NO: 50488 - DNA, 501 bp, Homo Sapiens
  misc_feature (10)..(10): n is a, c, g, or t
gggactcctnaagacccacaagtgacttctgtctacactacagatgaactgaattgatcatctaaaatacgtttatagcgttcattgtgccagttgctcatggttctgctagttggcccaggactagttgtgatctgcagactgaagccagagtaagtaagagaattcaaggcactaagacaaccaggaacagttttaccaaggcaagtggaagctgctaggctcagtggttgcatgcctatagatggggtaaatcatcctggtgcaaatatggtattcacaccataaatgtgtagtgcaagtttcctctgtggccaatcacagggctgcaagctgaagccccagtttagcttattctccatacataacttcaaggggactttctggtgaacttttccaagaagctccaagcacagatggttcaaatttgcagtttggctagactttgtgactggatgtacattaaattaaaaaaaaaaaaaaaaaaaaaagcggccgctt

SEQ ID NO: 50489 - DNA, 739 bp, Homo Sapiens
  misc_feature (5)..(5): n is a, c, g, or t
tgganacaatggcaatctgaaataaatggggcattaccttttgatcctcaatactgattcacaattgagttaaattagacaactgtaagagaaaaatttatgctttgtataatgtttggtattgaaactaatgaaattaccaagatgacaatgtcttttcttttgtttctaagtatcagtttgataactttatattattcctcagaagcattagttaaaagtctactaacctgcattttcctgtagtttagcttcgttgaattttttttgacactggaaatgttcaactgtagttttattaaggaagccaggcatgcaacagattttgtgcatgaaatgagacttcctttcagtgtaagagcttaaagcaagctcagtcatacatgacaaagtgtaattaacactgatgtttgtgttaaatttgcagcagagcttgagaaaagtacattgttctggaatttcatcattaacattttataatcttacactcacttcttgtctttttgtgggttcaagagccctctgacttgtgaagaatttgctgccctcttaagagcttgctgacttgttttcttgtgaaattttttgcacatctgaatatcgtggaagaaacaataaaactacaccatgaggaaaactaaaggtctttatttcaaatctggcattgtattaacatgtaattttatactatgtggtatttatacatttcctcagtagtgatatttggtaaagcagttca

SEQ ID NO: 50490 - DNA, 895 bp, Homo Sapiens
gctttggcttccctctgtagagctgctcccgccaccacctgctggggtcctgcctcagcccagtgcccagtatggggagaggaggacatttgggctcacctgtcaaggtggccctgggaccagagctggtcccagcatggggtgcaccgggtacacttaacgtgtctctataagccaagttgcttcaggaccttcaccactggcctctagaatggtccagaggggctggctgggtccctttgtcagactcctgccggcagctgccctgggggacatgtgtgcccatctggcatcctccagcccgtgcagtccgctcttcactgttccacggcctcccagtgcctcccagcattggacccatctccccctgcagtttgaggccagagaggtgagtggacctgacaagtgccagagtaaccgtgtagacagagcagtgtagacagcgctcagccccagccccaggtgtggacctcatgctggtgatggctcccctgggtggcctgccagcacagccagtgccatcagggagctgaaggggctgtgccccagctaactccagctcccccttcacgttgtcaccaagggcctgtgccgcccgcctcgccccctgctctgtggattcctttgggaagggctccctgggcaggacaagtacagagttttgactccgaaataagaaaagcaggcaggagcagaatcgagtgccagactgcaggacaagaaaagaaaagagcccgcgggagcacatttggcggcggggggggaaaaagagcgtgttaggaaaggggcctgggcccaaatggtgggtccaggcaccccgtttttttgacacgggggggaaagacgcggggccccatatagagggggcgtaaaatcacaagagcgggccccggaa

SEQ ID NO: 50491 - DNA, 482 bp, Homo Sapiens
attcattttgctgaattccagagtccttttggaaaactgactttagtctgctgggctgtattgacctctggcaggctcgaagcctcactgggtatgcagtcaacaggatgggcctggagatccgtgaactgcaggccacgtacccatgacgtaaacggcggcactggagcaagctggggcggggggtgggtaaaccctcactgccagcaggccccaagtggcttgtaaatcattctcctgtgacgtctgtgggcctgcgtggggacaacaggggcacatgacatctgcctgggccctgaccaataaaccctcagacccaggacccaggaccctgctgtagttggggagcaggagtacctttgggaggggaggactttatttaaacagtggttctagtgtgggaccaagagaggcaggagctgggtcttggggcagctttattcctgttggggcctagtttctcttccccacacagtttatct

SEQ ID NO: 50492 - DNA, 595 bp, Homo Sapiens
cccacgcgtccgggaggtgggcatttcctacattcctccttgtttgccgctgctgagattgcagtatttattgcaatgtaaatgtatcctgaaggtggggaggaatgtttaatctaccatgtccgtgtgtcatcttggtttgtgtttttccctgtttgtagcaagactctgatgataattctgtttctcatctgcccattcagtattttgttttccttccgtcaagttgtcttattttttcaatgactacctctccatcattgaggttctggtgaagctctctgcagctgtctcattccttcccaacgatagtaacaggaaatgactctttagcatcgatacctcaacatcaatttagggtagagattcctgcccctcttttgtcacagattaggaaattgagaactagggttaaccttgactatatttagaggtctttttgcctcttttccccttaacaaggatttcttatggtggtttcagtttcatttgcataaaggtattgagagggaacaaaaaacataaagctgagaatcttgagagagctcatctaccctgtctgttggtcagactcaaatgagagttaaaaaaaaaa

SEQ ID NO: 50493 - DNA, 534 bp, Homo Sapiens
ggcacgaggtggacccataaatgaccagactttttctaagaaaaatgttgctttaatgcatttcatgaatttttactcttatatcattgcttgctagtaatagcaaatctgcttttctgcatctgctttgcgtagctattgtaaggctttgaactaatgtatgtatttattgcttgaacttctgtgcataccttataaagcataatgtctgacaatttaaatggctcatgtattcttgcttctatcataagctgattatggggactatgatcttttgtatacagcaaattttaaactgtagcacaaacatctgtttatgtattggtggaatatacctgttttatttatcttttttgaggtaaactaatttttgatacttttcattactgtgtactatgttcatactttgaattctctgacgttagaagtcatggttgagaattgtaacagctgttattcgttctgtattcatggctttcactgctgaataaaataaaggaccaaacctaggaaaaaaaaaaaaaaaaaacactt

SEQ ID NO: 50494 - DNA, 568 bp, Homo Sapiens
ttttttttttatttttttgcacatcccttttcactttacagtacatttgactatagtgcacaacatgattccgagtcaaaacagtggcccattgggcactgagcttctgattggtgtagggcagtccaatcagtgctggtgtcactgggttaccccaaccatgtccggccaaaatggcactacccagtggtagtgaaccatctaattaaaaccaaaactcccccagggaaaatgctacactatcagagtcagtcttgagtcagatctttatttggtgctccatccagatatatttttagtgctttctctttacgaggtgagtatgttacacgatgtccagtcttctggagtcgactgctttcttttttcatcagttcatttctttgctcatctgtcaattccattaattcttctgttttatccctataaaatatgaccgcaccatcatcacagatataaagaggccagacattcagggtagaaactttaggattaatggaattgacagatgagcaaaaaaaaaaaaaaaaaaaaaaaaagcctacagccgcggccgctcccctcgttc

SEQ ID NO: 50495 - DNA, 690 bp, Homo Sapiens
catggtactgtagaggccaggctgaaatgtcatatctgaaggaagaaagcagcagctggacaatgtttctttgcaaagcaacactcgaaccaaaagatgcctcaatcccattttgatattcattttagtgaaaggatgcatcagacctgttccacatcatgcacatgggaaagggtggttatcattttccttctaacaagtaggtacagatattcggttactacacgtgcacctgtagcagtatttctagaaacatccctttttgttgagaacctcccttgaatgtctgtcacactcacacctgacgggatggttactggattagagagtagatttggcacatcttttcttagtcttttgattcaaattcaaaacttaacagcacaaaccaggtcagagttactttcggttagaatttattgccatttattcctttttataaatttctatagattatactgttatttttatgttattggcctagagctacacgtatatgggtttgtcctgagtccgttttcaaatgaccttgtgatagggaaatggttttgtccatgttcttggaaatacttgtgtatgtacagaaggaagggagggattatttttctacaaagtaatttatgatttctaattttctaatgtgccttggatatgtgccaaatgatggaaaagaaacagtaaactttatga

SEQ ID NO: 50496 - DNA, 1095 bp, Homo Sapiens
ggtccggaattttcgggatgtccagcattgatccttctgtttcacaactcctccactgggcagagctgggcatctggcagggctggctctgtcccctgggcctttggctccagtggcccctgtgcccagcagtccagctcttggaacctcgctgaatggcagcctcttgggggcctggagctctggcagcccagccgtgtgtggtgtcaggttcctctccccaccccagcttcaagcagaggcctcggggtgggggagctacaaagcacaacaatgtacatagtgtagaaacactaacagctgggagaggggagccagctgtccagccagcatgttcctgttgtacagcccggtctccctgcgcgctctgctccttcccatgtgcagacagatcagggaggaacctccaatgggtgggggacagtgagcttcggcctggccaaggtgggtgggtgggctctcagattcagctctgtgtaaagattctctagcgggctgcgctcccaagttcccctgctctgtgaaagtgaagaattagtacagctgtgttttttaaagccacctctctgtctccaccccatgggcccacacccgggtggggggaggaggaagccactgcatctgttggctcagggccccagcctgtgcgagcagggcgcctgggctgttgtgtctcctgtctgtgccgatctctattaaaggactccctcttggtggaaaattacaacgttccttgtaatcaccgtccccctgccgtggcgaccccttattcccccgcttttttccccccttatccccatgccattctacgctgattgcccggccatgcacagctgtccgccttaaactcaaccctttcacataaagcatcaatggacaaaactggttcacacctctcttgtcaagtttgaataaaccagtagatgttgtctgccctcctttgacgtcgacaggagttattacccctatatctaccaccctgcagttctagtagcgcatacataacactcttgatatcccacgcccccctcagcacccctttcagcccccatgtaggagcgcctctgttcactccccgcgagaccccacgtcatc

SEQ ID NO: 50497 - DNA, 715 bp, Homo Sapiens
  misc_feature (628)..(628): n is a, c, g, or t
ttttttttttttttttatgtttcatggcccagtacatcctagtaattattttaattagtttttgttctgacagcttgtcaggaagggcacagaatgggacagagataaaccagacagtcattttgatctgctctctacggtttttcaagtcagaggcaattgatgcttgtctaatgcatccacacactgcatgtctgactggcgatgccacgctcctaagtagttctgccatgaaacataaaagacaaaggaaaagccgttacacatcacacagagaacattttcgggtcccacagcggtggtggcaggaagctcactctcgcgtcagtattagagtgtgtgtgtgggtctcggggatctcggtggctcccatcttccttcattgttctgaacatcctgtattgtaaaccatggctggggtgctaaagtgcctgtgaatcccgatgtggaaaaagctggaggtgaaagctcagcataccatgtatttactttaaaaacagaaaaaaagacatgtatggatatgtctattttttttttattggcacattgtatttttgtgttgacttgtttttagaaatgatgtgtccacacacgtacccgtgtctcttctgcatttctgtgtcatggntctgtttcttaatcacgtgcggcggtgtctaagtggtgttaccagtgtacgcgcagtgaccttggatgacagtggctctttctcaca

SEQ ID NO: 50498 - DNA, 647 bp, Homo Sapiens
  misc_feature (487)..(487): n is a, c, g, or t
  misc_feature (547)..(547): n is a, c, g, or t
agtcaaagactcctggccaagtcctgccctcttaagtctccatgaacgctgcagggaaaacccagctgaggcctgggcctagactgtggtgaggtcactagattctactgctcttcccccacattaataccttttccttcctcagagagaaatctcccctaacctgaattgcagccccctccagtttgctttcctttggccttccagaccccaggaagttggccttcccttcctagtgctatggtttctgccattggccatgatttcagggagctggctgaggccggctgaggccacacctgtgccagtggggcttccctggtgctgcagcacttgtaaaccacacacacagcctctctccctggacatacgttagcacattggcattcagtattggtggcctggcatggtaggtactacccaatgaagagtgtactatatattttcattactataggccatacttatacagacgtgtatatatatntatataagatctacctatcttaggatggaaccttggggaaaaataaaattgaggggaagntaaaagtatgtaacacttccagttgtgagcccagattgtaaccagagagcagccaggagcttcctgtcagtaaccatgttttcaataaatactctttcat

SEQ ID NO: 50499 - DNA, 594 bp, Homo Sapiens
  misc_feature (578)..(578): n is a, c, g, or t
gcagatgcagcacgtcgcacacagacatggggaacttggcatgacgtcacaccgagatgcagcaacgacgtcacgggccatgtcgacgtcacacatattaatgtcacacagacgcggcgatggcatcacacagacggtgatgatgtcacacacagacacagtgacaacacacaccatgacaacgacacctatagatatggcaccaacatcacatgcacgcatgccctttcacacacactttctacccaattctcacctagtgtcacgttcccccgaccctggcacacgggccaaggtacccacaggatcccatcccctcccgcacagccctgggccccagcacctcccctcctccagcttcctggcctcccagccacttcctcacccccagtgcctggacccggaggtgagaacaggaagccattcacctccgctccttgagcgtgagtgtttccaggaccccctcggggccctgagccgggggtgagggtcacctgttgtcgggaggggagccactccttctcccccaactcccagccctgcctgtggcccgttgaaatgttggtggcacttaatanatattagtaaatcctt

SEQ ID NO: 50500 - DNA, 606 bp, Homo Sapiens
  misc_feature (464)..(464): n is a, c, g, or t
tttagtataacgtcaattcctggcagggagccaccttctcttccttctccccttccccctccagacacataaatgagactgttgttaaattatcctttttcctgggggaggagaatgctgtgctgtctccttccctttgattgaagccttccttactgttatcttgacaggtgacagaatgaatatcagctgtggaacttatagatatgtgggtccatatgtgtttacacatatccccatgtacacgtatggattcattgcttgcactttcatttatacacactgcaggccacatgtagagaaagcagtaggaacatttcaaggaaactctgtgcttcctgatactcctttcctagcaccgttccttggctccatagctctgcaatcccaattcaagcatgggaagtgatgacagtatgtaaagtgtcagtttcccttaccacacagaaactcttccaggccangatcttgaaatgcttctagtcctgcactgtctgctatggtagctaccagccagatgtggctcttgagccctggaagcgtggctagctagccccaatcaagataggccatatgtataaaatatatgctggcatccaaagactt

SEQ ID NO: 50501 - DNA, 629 bp, Homo Sapiens
ttggggagactgcccactcccccctccatgctggggttggatcctcctgtcttcctccttgtcccatgaaggccacaccccccagctctggggactcctaggtcacttgggaactacctgcatcttcagtccccttgaacttctgccctctgttcagggctgacacaagccccacaggctggggggctccggttccctgagggatgagccttcagcctccctttgtaatgctgctcctctccactgcccagcaccatgagttgggtgcagacacctagaaggagagacttcttggaacgctcatcccccgctatacctccccttcctcctgcatctccccttctttccttccccctcaggagagagaaaacttagtgcttccagcccttcttggagccttcatggtccaggggtaggggccccactggcctgagcatgccattttgaggggagggtagttgtgcctacttatcccctggcagaggggatgccaggaccatggacatgaggcttgcccatccctgccaacttacacagcctgtaccactgtccccccttccttggctactttgacatgtgcctgctcctggcatttcaataaaaacccggcttgggtctgaaaaaaaaaa

SEQ ID NO: 50502 - DNA, 675 bp, Homo Sapiens
  misc_feature (601)..(601): n is a, c, g, or t
gttaccattctgagtgtcctagttgggttcctccgactctaaacaagggacttgggttcagttagtgtacagcgggggctcacgtccactaaggaacatgtagaatgtaaccaccgggtgacagggaagctgcggtatttactacctagcccccatcttcactggttattccacttatttaaaatgtccagaataagcaaatctccatatagaggaagtagattagtggttgcttcgggatgggaggaatgggaagattgaggtctttcttttgcagtgataaaaatgtcctaaaattgactgtagcgatggtcacacaactctgaatatgcttaagaccattgaattacacactttacgttggtgaattgtatggtatgtaaattatagttcaataacatagttacaaaagataatcaaaagcatgaaagcactattgatgtggtttggatctgtgtcctcaccgagtctcatgttgaaatgtaagccccctggtgggaggcgatgggattatggggcagagtcctcacaaacggtttagcaccacccgctcagtgctgttctcctgatattgagtcctcatcacatctggttgcttcanagtgtgtggtgcctcccctctgtctccctcctgctctggccatataagatgtgcctgcttctccttcgccttct

SEQ ID NO: 50503 - DNA, 743 bp, Homo Sapiens
tcctccgactctaaacaagggacttgggttcagttagtgtacagcgggggctcacgtccactaaggaacatgtagaatgtaaccaccgggtgacagggaagctgcggtatttactacctagcccccatcttcactggttattccacttatttaaaatgtccagaataagcaaatctccatatagaggaagtagattagtggttgcttcgggatgggaggaatgggaagattgaggtctttcttttgcagtgataaaaatgtcctaaaattgactgtagcgatggtcacacaactctgaatatgcttaagaccattgaattacacactttacgttggtgaattgtatggtatgtaaattatagttcaataacatagttacaaaagataatcaaaagcatgaaagcactgttgatgtggtttggatctgtgtcctcaccgagtctcatgttgaaatgtaagccccctggtgggaggcgatgggattatggggcagagtcctcacaaacggtttagcaccacccgctcagtgctgttctcctgatattgagtcctcatcacatctggttgcttcaaagtgtgtggtgcctcccctctgtctccctcctgctctggccatataagatgtgcctgcttctccttcgccttctaacatgattgtaagtttcctgaggcctccctagaagcaaaagctgctgtgcttcctgtaccatctacaggaccgtgagccaattaaaacctctttt

SEQ ID NO: 50504 - DNA, 505 bp, Homo Sapiens
agaagttatgcttgatttattagcattatacatgtaaaataataattttatatgacatcctattataaatatgcataagcaggtatattcattatagatacctataatgaatgtatctgtatatgcatattgataaaaagttaaagcaagtcatattagtcttatcaaaaaacaaatatataatcattagaattaaaatgttagttttttaaaatagcatcattactttattacagtattctaattaggtaaactagttggaaaattaaatacaaaaactgtttatacatcactgtgttttgacttgacccatatttcgaaatgttacatgaaagttaatatggacacatcaatcactgcagtaaataactgatttagttctaatatagatttatataaatgttttagttttgggtaagggactaggatgatcaaaattctgagtggagaaatgtttcatatatgtcagtatttacaaatgtaatatgtatttttctgaatctgc

SEQ ID NO: 50505 - DNA, 962 bp, Homo Sapiens
tcatttaaaaataaagtccccgggttccttaatgcctccttcactgggccttcctagcaggatagaaagtccttgcccagagcaggacctggctgtcttttttttttttttttttcccgagaccaagtttcactctgttgcccaaggtagagtgcagtggcgtgatctctgctcattgcaactgccgcctcccgggttcaagcaattctcatgcatcagcctcccaagtacctgggactacaggcgtgagctaccatgcccggccatggacctggctgtctttatcatccccacaaacattttgaaactggaatatttgtcttcagaaaatggaaacaagactataaatgataagccctgtccctagcaccacctctcctgtgtgtggaatagaggcccctcgtgctaccaacacttaccctgtgtttaaaaagatcttgtaccaagccaacggcgttcctggctctcctgcccacaggatgaacattttcggcttccttaggagttttgccctaccgtattccaaagcgtgtgctggtttctcatattgtctgtaggctcactcagcccgcagtttatgtgtgtgcttttttctatgaaaaatgatgtattttgctacttcctgtgtacaaagttttattgtaaatgttttttgtgctttgcatgaacaggggccccgttgttgcaattgtttcagtaagaactgggtttgattttctaaaatgttccctgtaaacatatctttttatgaacacaatctgaaacaattttgtgaaataaaaactttggaaaacccaaaaaaaaaaaaaaaaaaggggcggccggccttctagagaaattcccctcggagggggccccaagctttaccgcggtaccccagcttttctctgtgaacaaaggggggtcccccaaaaagggagggccggaatttttaaacctaagggcccgggggcccgtccctt

SEQ ID NO: 50506 - DNA, 1134 bp, Homo Sapiens
tcccgggatcactttttgcaggcaacaaaatgtgcctgggagtgatggattttaatgtgctccagagtcctttcagaaggtggtcatttcccttggccgggcgcggtggctcacacctgtaatcccagcactttgggaggccaaggcaggcggatcacctgaggttaggagttcgagaccaccctggccaacatgcgaaaccccatctctacgaaaaatagaaatattagccgggcatggtgtcaggcacctgtaatcccagctacttgggaggctgaggcaggagaattgcttgaactcgggaggcagaggttgcagtgagccaagatcatgccatcccactctagcttgggcaatagagcaaggctccgtctcaagaaaagaaggtcatttcccaagactagcatagggagtatccatttaaaatacattcatcttcctcccatttccgtgctattaatcacttgttagagcaacatgacatgcccagcatcccacttcccgaaaatgtctactccttctactctgagctcttgttgcctagacctcagaaaacaccaattcaccacagtagaaccgggagcagggatagctcagcttctctgaatagcacactttgctcaggtcttaacttgagggcctctccggtactaacatcctgcgatagcttgtcccatgagcacagaagagcctcagtagagtcaagtcctgctgcagctgccccaccccaagtttctatcatttcctctttaaacaaaaaatatgttatcctacacattagtgtcaatccaatggttgtctcttatctgtctaaatagcaaaatcatgaaaatcagctgttttatttgcataggacaactaacctgtctgtgtaactttgtttttattttaactcttactagaaaatctaatcttaaaacatttgaattctaaacatgtaaaatgtgacagcctgcaattttgtagacagtgaagtaatkggctgctatttataaatgggacatctatcaaaataagtaactgtttataaaattcagtttttgtagggttttcaaggaaaatcacttggktgaatgttytcactcattaaacttgsmgagtgatcatatcagactgttttaatmcttttaaaaa

SEQ ID NO: 50507 - DNA, 634 bp, Homo Sapiens
cccgggatcgaccacctgcggaggctgcaccttggcgcttgccccacggaggaatgcaaggcctgcaccaggtgcggctgtgtcaccatgctcaagtcgcccaacagaaccacggcggtgaagcagtgggagcagcgctggatcaagaactgcctgtgcggtgggctctggtggcgggtgcccctcagctacccctgagcccagctgcccctcagctactcctcagctacccctcagctgcccctgagcccggctgctgcaagagccaccgctcgccctggactctcctcggcgcggttaacctcagcccgccctgcagggctgttgaaggccgtgggccggacgcctgcgtgaccagcagagcttctgaggaagcccctgcctttgtccagctgggcccgcagtccacacaccactctcccaggacccccagatccctggaccatctgcatccagaggaccgtccgtgacggccgggggtccaggcggaccttgtggtgacccggctcgggcgtctcctcggtttccttgcctcacccgcggagagcgctgaacctggacaagcagcggctgggaaggacaggtccaataaacgccctctgcgcccaaaaaaaaaaaaaaaaaaaaaaaaaaa

SEQ ID NO: 50508 - DNA, 601 bp, Homo Sapiens
acgcgtccgccgggaaaacagctccccggattaaacggataggtttacacatactgatccacccagctattcatcttctgtttgctgctttaattgggtgcggttaaaaggccacgtccctaggcgttcaccggctttcttgccatctgctgcatgaaaactgactttgccgaaaaaattaacaaagaagagcgaaaatgacagaccgcaaccgggataagaaaagtacttcaccttcaaattcagacacagaaatgaaatctgaacaactgcctccttgtgtgaaccctggcaatcctgtgttttcatgtatgttggatccaaagacactccagacagccacctcactatcaaaacctcaaatgattatgtataaaaccaattcaagtcattatggtgaatttctacctattccacagtttttcccctgcaattatactccaaaggagcaagtattttcaagccatatcagagcaactggattttatcaaaataacactctaaatactgcacctgacagaaccagaactcttgattttcctaatattcaacacactctatgaaaatatattcctttgtatattgaagagaaaatatactc

SEQ ID NO: 50509 - DNA, 568 bp, Homo Sapiens
tggctcactgcaacctccgcctcctgggttaaagtgattctctcagctcagtctcccaggtagctgggattacaggcatgtgccaccacaccccgttaatttttgtatttttagtagagacggggtttcaccatgttggccaggctggtctcaaattcttgatctcaagtgatctgtccgccccggcctcccagagtgctgggttgggattacaggcgtgagccaccgcgtccggctcaggacccagttttggctgctggttcccagcaggggactcgggggatatacagtggctgcaccaaattggaggtgtgggttcctccaacacaatttgcttctgcccgttgtcttcctgccagctgggtttggccaggatttctccgtgtgggggctacatgcgaccctctcccctcctccctgactttagaggctggtgctgtgtcgggaggaaggtcagggctcctgagcagcaataaaggaccaggaagaggcctgaggtgtatttgagactctggtcctttggccacagccctatgaggaaacggggtgtggggggagtttgggggtg

SEQ ID NO: 50510 - DNA, 679 bp, Homo Sapiens
aaaggatcgtttttttttgcttttttaaacttgaatttttttaatttacactttttagttttaattttcttgtatattttgctagctatgagcttttaaataaaattgaaagttctggaaaagtttgaaataatgacataaaaagaagccttctttttctgagacagcttgtctggtaagtggcttctctgtgaattgcctgtaacacatagtggcttctccgcccttgtaaggtgttcagtagagctaaataaatgtaatagccaaacccactctgttggtagcaattggcagccctatttcagtttattttttcttctgttttcttcttttttttttttaaacagtaaaccttaacagatgcgttcagcagactggtttgcagtgaattttcatttctttccttatcacccccttgttgtaaaaagcccagcacttgaattgttattactttaaatgttctgtatttgtatctgtttttattagccaattagtgggattttatgccagttgttaaaatgagcattgatgtacccattttttaaaaaagcaaggcacagcctttgcccaaaactgtcatcctaacgtttgtcattccagtttgagttaatgtgctgagcatttttttaaaagaagctttgtaataaaacatttttaaaaattgaaaaaaaaaaaaaaa

SEQ ID NO: 50511 - DNA, 805 bp, Homo Sapiens
  misc_feature (758)..(758): n is a, c, g, or t
cagcctcccaagtagctaggaccacaggtgcgtgtcaccatgcttggctaatttttttgcagaaacgaggcctcactatattgtccaggctgagtggctcttttattaaccagtcattacactgcggaacagccaacatagagtacttgctctcgccctgtgaattttctttcatgagggagtcaatatgtagtggaaagaagcatgtagcaaaaaagacaaccttgatctttaataaaaaagaagttggtttatttccaaaataaatcccctgacaaaaaacctggtgatgttaagtaattgactgtcttagagtccagcagaagaccttagacaaaaaaagcagaacccactggagtagaaaaggaagcatgtagcatatactcagtagtgaaatttaattttactgactgttaggtatctatgccaatttgttttcatacttcagttggttttggaatctgccttatacctaatatttaattatttattcacactcataagcatcaaatatttaatgccctcagtgggaaatttgtgtttaaactcaatggaatctaatatttctttatgtcgctagtccctgtaaaatgttaggtcacccaaggaaaggggagaaatagcaatggttgttcctaaggtattgcttgccctccatgtcttcctaaagagcagaacttggagtttctcctttatgtagagaagaagtaacttagggtgtatttgcaatgaaatattcatagatattgaaagcttgngtttacatgaaatatggttattattcaagaagtccctttttccaatt

SEQ ID NO: 50512 - DNA, 940 bp, Homo Sapiens
ctgaattagccaaaacacttaggaagaaatcacttaaatacctctggcttagaaattttttcatgcacactgttggaatgtatgctaattgaacatgcaattggggaagaaaaaatgtagaatgatttttgctatttctagtagaaagaaaatgtctgttttccaaagataatgttatacatcctattttgtaatttttttgaaaaaagttcaatgttcagttttccttagtttttaccttgttttctctataggtcatgatttctgtgaagcaaaaagatgccttttaccatgaattcttgagtttacatcaataatattgtatattaaggggatcagaagtaggaaggaaaaaataagagatagcagaggaagaagaaaaacatttcctcttataacttctgaagtaatttgtaaaaaagatttgtagagtcaatcatgtgtttaaattattttatcacaaacttaacatggaagatattcctttttaactttgtggtaacttctttgaagttatttagaaatatcctttggaacaattattttattgtctaataaatattgacttctcttgaattattttgcagactagtgagtctgtaacataagtattaatcacctccactcatattaaagtgatcattaagaatccagaagctggttctgcattggctcagttattctttaatggtaggtaatgtttacggggactaactaccctttgactggcttccggacagttccctattagttatactcccttttttagatgccggtccatccggtggtcggaacttttggttttcgggcttggtcaagtgcttgggggtcagccctttcttccccgattgattcggttgttttgcctgatctcttgatttcgtcccgaggatcttatacttcgctacttcgtatctccggttcttgttttatttttttg

SEQ ID NO: 50513 - DNA, 504 bp, Homo Sapiens
gcacgagggttttccctaccagacaagcaaagagtaaattaaaatagtagcccaggcttgcctggcagtggcagggaggtgtggctgccagggccttagaggttggcatcaggctgcccaccccagtcactgccagagcctcccacctgagtgttcctcccggcactggaagccagtggccgtccagaggaacgtgattgaattgctgtatatccatctggtggagcactgctgtgtgtctgttaaaaaagaaaccataggtttttagggatatgtaatgatatttagaaagggtttaagagacagtaaagcttggcagaataaaccgtgtatacagaatggatgtttgcttgcataaataaatttatataaatatgtctgggggataaaaataagtatatcacaatgctaagacaggcatatggggaatttaagcttttctttatacttgtccatagtttccaatttttaaatttgtaattttttatcagaaaaataaatgtg

SEQ ID NO: 50514 - DNA, 707 bp, Homo Sapiens
ggcctactgggcgcagtaccgcgccaatgaggaccagctgttccagcgcacggccgaggtgcactctcgggtgctcgctgccaacaatgtgcgccgcttctttggctttgtggcgctcaacaaggatgatgaggaactgattgccaacttcccagtggaaggcacgcagccacggccacagtggaatgccatcaccggcgtctacttgtaccgtgagaaccagggcctcccactctacagccgcctgcacaagtgggcccagggtctggcaggcaacggcgcggcccctgacaacgtggagatggccctgctcccctcctaaggaggtgcttcccatgctctttgtaaatggcactacttggtcccaaactgaaccccactgcttgctcacatccatatcagaaggggatttttaaaaaactgttatcttcttggccaggggaaaggaccacaaggcaatctggggtgtggacagacccagtagacaatggaagccccagccagcagggccaggtgacagtgaagctcaccagtgggctcctttatggtactctatgcagttaacatgtatctagctgcatagggacacccagcgcagcagtgcaccactgggaagtggcctccagtgcagcctctggccttattttatattctttaatttttggataaagtttttcttactaaaggaaacaaaaacacgggacggg

SEQ ID NO: 50515 - DNA, 871 bp, Homo Sapiens
  misc_feature (739)..(739): n is a, c, g, or t
  misc_feature (777)..(777): n is a, c, g, or t
tctggagaggcaggaggacaccgagttccccgtgttggcctccaggtcctgtgcttgcggagccgtccggcggctgggatcgagccccgacaatgggcaacgcgcaggagcggccgtcagagactatcgaccgcgagcggaaacgcctggtcgagacgctgcaggcggactcgggactgctgttggacgcgctgctggcgcggggcgtgctcaccgggccagagtacgaggcattggatgcactgcctgatgccgagcgcagggctaccgggaccgcagctatgaccctccatgcccaggccactggacgccggaggcacccggctcggggaccacatgccccgggttgcccagagcttcagaccctgacgaggccgggggccctgagggctccgaggcggtgcaatccgggaccccggaggagccagagccagagctggaagctgaggcctctaaagaggctgaaccggagccggagccagagccagagctggaacccgaggctgaagcagaaccagagccggaactggagccagaaccggacccagagcccgagcccgacttcgaggaaagggacgagtccgaagattcctgaaggccagagctctgacaggcggtgccccgcccatgctggataggacctgggatgctgctggagctgaatcggatgccaccaaggctcggtccagcccagtaccgctggaagtgaataaactccggagggtcggacgggacctgngctctctccacgattctggctgtttgcccagaaacttnaaggtgggtacctctgagtcccaggggacctgggcaggcccaaggcccaccacggagcatcatccaggtcctcagcccctaatcctggccctta

SEQ ID NO: 50516 - DNA, 540 bp, Homo Sapiens
tcttctttctctgctctaatggtttgggaattttgcattctctttctgttcttcttgtggctgcccttaaacttggattccgtgtccgtttgtgggattatccgcgtctataacttcgtgatgagttcctgatctccgtcttccaaaacttgggaagtcatccgagggtttgttccagattgttttgggtaattttaaaattttatttcacactaattttattctaggaatcgcttcttcatcttactgaagttttgatgcgacgttatagttatttaggcttaacgggaggttgcatgggttttgtggccgtttctggtgtcttcctggtgtgtttggatttgtgcttcgccacgtccgcacgtcacttctgagcccagtgcggtggcccctgagctcctgccggtcacgggctgtgtgttgtccccctcacaccagagacagtcgtttcttctcttaactcttaagccctcctcagtcactcggatgaactgattaaattctgtgcttttaatactaagcattaaaaaaaaaaaaaaa

SEQ ID NO: 50517 - DNA, 580 bp, Homo Sapiens
cgcgtccggacttaaaaactacatgtttgtgaatattttataatgtggaatgatcattgaaatatcaaggattctagtaattgtatttcctgaataaatgtatgtttatgaattttctaacttacattttgttgtgtcctctgccaacaatctggttttataattgttgtctaaagtttgctagtagtgtttcttcaaaggttattccaggtatggttaagtagtgagaaaaatcacttattaattttcaagaactttgagactaatttgtattgactcggttttttaaaataactggcaaatgctatgcttctacttttaaaatttgtggtaatacccagaatggatgtaaaataacatttttcaatagattacttcatttatcaatttaattctgattttaaggcttatttaaaataaatttgtatgagttatgtcctcgttctttggatttgaaaaaagttgatataactacacaatagataacgtttatgaaaggtatgtataaaaaaacataattcctggtggctgctgaaatgaaactttgaatttctatattttgctttgtctttcataaaat

SEQ ID NO: 50518 - DNA, 1082 bp, Homo Sapiens
tccagaggtgcgtggtcgtggcgcgagggatcctgaggctgctccagcagtgcgccgccgccgtctcctggggcggcttgggttagccgggagatcctgtgccttcaaaccctacgagtccatactttaaaacaaaatgaagaaagtaaggcttaaggaactagagagtcgcctgcaacaagtggatggatttgaaaagcccaagctacttctggaacagtatcctaccaggccgcacattgcagcatgtatgctctatacaatccataacacttatgatgacattgaaaataaagtcgttgcagatctaggatgtggttgtggagtacttagcatcggaactgcaatgttaggagcagggttgtgtgttggatttgacatagatgaagacgcattggaaatatttaataggaatgcagaagagtttgagttaacaaatattgacatggttcaatgtgatgtgtgcttattatctaacagaatgtccaagtcattcgatacagtaattatgaatcctccctttgggaccaaaaataataaagggacagatatggcttttctaaagactgctttggaaatggcaagaacagcagtatattccttacacaaatcctcaactagagaacatgttcaaaagaaagctgcagaatggaaaatcaagatagatattatagcagaacttcgatatgacctgccagcatcatacaagtttcacaaaaagaaatcagtaagtctcttgattttggctggtctacattcggtattgaaaagctttctgggccggatgtggtggttcatgcctgtratcccagctactcgggaggctgaggcaagagwatcgcttgaactcaggaggcaraggttgcagtgagctgagattgcsccactgaactccagcctgcgcgataagagtgaractcagtctcgagaaagakaaaaaaaggaagsyttgtgacagtaattattctagtgttaccacttyctgtgtaatwtccaagcagcttggggcacataatggctgtgggargccawcgtmatastatatctagtcttckyaatrttkggtmaaaaaaaaaawcaaa

SEQ ID NO: 50519 - DNA, 658 bp, Homo Sapiens
tgactatgtgcacttggatctccatatgtaatgtactatcagcatcttcacaaacacagtaaattttactacgcaagtaaaacttattttactaaacgatgattactccttctatattcatattcctaaacacatacagtttcttaatgtaattaagtttttaactaaaaaaaaagggaaatgcattattgaggcgataggattactgggtggctataaacacatctgctgcacagctgacatttatcttctacaatgagcaatgacaattttattttttaataatcagtatggactaatcctgatgatttttttttaacattttcaaatagggctgcatatggcttaaaattaatatatacatgtgtacctatataatattcttatttattaatggacttcctacatagctcatattgacgttagatttaaatgaaattccagaagggttttctataggtaagtcatacattggatttccatattacctatgattattgaagtatttatttctgtttttaagacttcagagcaattttgctggtcatttgttttctgtgttttatttttgaaatcgttctttgaggcattgtccttatttacatttttaaggtatgttaatcaaatcaatatttttaatgaaacaaaaaaaaaaagg

SEQ ID NO: 50520 - DNA, 553 bp, Homo Sapiens
aagtaagataccctccaacagcaaattcaatgacttaattggaaaacacacaagctggcatgatgtccggtgatttctgtaagaaatgcctgtaggagaaggtctgtgaagtgtggagggcagtgtcgacgctgcacagcatctgcagattcgcagcctcttctctgccggtgcctctgttcggttctgttacccaaaaacaaagaccaaagaaggccaatctctcatttgaccctgtctttttaatctgcctgttttaaaagttgcgtctgtagtagccgcttgctgtgaagacacatcttgacagtccaagtgattttgtgaccagtgatttgggtcctgttttccgctcttctaagaaaaaacaaaaagaccgtgagttattgcccagcaataatcatgttgttactgtgagttagcaacatgcctgacttcctgatagcattactgttttctagttttgtttattgtatattatgtgtggttttatttggtatttatttgtgttttgaggtcttgcaatgtttttgtgtttctgatgctaataactaaa

SEQ ID NO: 50521 - DNA, 806 bp, Homo Sapiens
gattcaaagttgaaggtttattgtcgttgggtttttcagatggtgacatgtaaactcaggatagcaaaccctaatgttcacacagtgctctgcctctgcatctcagttgggatagttgctccttttgagtgttttaatcatcgtataactaatcgtagtgccaagaagttcataatgtgttatgtagctaatgtcactgaaaaacagtcctaccattttaggtaagaccaaacagagtctctaacccaaggacttgttacacctgacaacctatagtatatttgctttttctcacaaaatgaaaccaattttgccgaaagctagctgggataataggatcatcacaagttgcagtttctataactaaaattagattgaratctctkctgacckagaacattttacttcaggcattcagcagatttcagaaagaattaccttattttaagttagtttctttgtkagtttactgtgtgtctcttattcaataaacaagcagaatttgtgtcctgccctatccatgtcttaaagatgagaagttggatccactgagtgagtttcattggggcgggggaaagaactgtaattaaacttgtttaatccttattttgtattgtagctattttttgtaaaagcaacttaaaatcttttaaaaatkttatagtgacattagagacaatggkcatacaaatkatcacataaacatggacttgaaaaattaggcttttcataaaacacatcacatgtcattgactgctttttagaaatacacttccaaggcagtrcatctgtattgctactgaaaa

SEQ ID NO: 50522 - DNA, 632 bp, Homo Sapiens
gggagagaactaggagaggaagcacaggacgtatgtctatgtgctcattgtcactgaagtgctggaagactgggaagattcagttaacattggaaggaagagggaatggtttaaaatagaagacgccataaaagtgctgcagtatcacaaacccgtgcaggcatcatattttgaaacattgaggcaaggctactcagccaacaatggcaccccagtcgtggccaccacatactcggtttctgctcagagctcgatgtcaggcatcagatgactgaagacttcctgtaagagaaatggaaattggaaactagactgaagtgcaaatcttccctctcaccctggctctttccacttctcacaggcctcctctttcaaataaggcatggtgggcagcaaagaaagggtgtattgataatgttgctgtttggtgttaagtgatggggctttttcttctgtttttattgagggtgggggttggggtgtgtaattttgtaagtacttttgtgcatgatctgtccctccctcttcccacccctgcagtcctctgaagagaggccaacagccttcccctgccttggattctgaagtgttcctgtttgtcttatcctggccctggccagacgttttctttg

SEQ ID NO: 50523 - DNA, 802 bp, Homo Sapiens
tctagcgaggtgacagcgtagaaccagggagctgcaggcccgtcaccaagccctctcccgacccaggctttgtggggcaggcacctggtaccaagggtaacccggctcctggtatggacggatgcgcaggatttaggataagctgtcacccagtccccataacaaaaccactgtccaacactggtatctgtgttcttttgtgctatgaatttggattcctaattgctattgttggttgctggggttttaaatgattgataagcttgtacagttaacttatagagggggagccatatttaacattctggatttcagagtagagatttctgtgttgtctcctagaaagcattacatgtagtttatttcagcatccttgttgggtggggccctggctctcttcccctttggtgggacctcccctttctttgggcttcagttcactcaggaagaaatgaggctgtcgccatctttatgtgcttccagtggaaatgtcacttgctacagacaatagtgcatgagagtctagagaagtagtgaccagaacagggcagagtaggtcccctccatggccctgaatcctcctctgctccagggctggcctctgcagagctgattaaacagtgttgtgactgtctcatgggaagagctggggcccagagggaccttgagtcagaaatgttgccagaaaaagtatctcctccaaccaaaacatctcaataaaaccattttagttgaaaaaaaaaaaaaaaactctcccgcgctgggatcccggccaataagggccctgaatcctttcggaggg

SEQ ID NO: 50524 - DNA, 1168 bp, Homo Sapiens
  misc_feature (30)..(30): n is a, c, g, or t
  misc_feature (1064)..(1064): n is a, c, g, or t
ggaaccttcagacaccggcgacccacgcgnccgctacctcaacactgatcttgcaagagtcaagatagagtcagcagatgcatgcctgattcttgccaacaagtactgcgctgacccggatgcggaggatgcctcgaatatcatgagagtaatctccataaagaactaccatccgaagataagaatcatcactcaaatgctgcagtatcacaacaaggcccatctgctaaacatcccgagctggaattggaaagaaggtgatgacgcaatctgcctcgcagagttgaagttgggcttcatagcccagagctgcctggctcaaggcctctccaccatgcttgccaacctcttctccatgaggtcattcataaagattgaggaagacacatggcagaaatactacttggaaggagtctcaaatgaaatgtacacagaatatctctccagtgccttcgtgggtctgtccttccctactgtttgtgagctgtgttttgtgaagctcaagctcctaatgatagccattgagtacaagtctgccaaccgagagagccgtatattaattaatcctggaaaccatcttaagatccaagaaggtactttaggatttttcatcgcaagtgatgccaaagaagttaaaagggcattttttttactgcaaggcctgtcatgatgacatcacagatcccaaaagaataaaaaaatgtggctgcaaacggcttgaagatgagcagccgtcaacactatcaccaaaaaaaagcaacggaatggaggcatgcggaactcacccaacacctcgcctaagctgatgaggcatgacccccttgtttattccctggccaatgatcagattgaacaacatggacttcaatgtgaagaaatacgacttctactggggaaggttcccctgggtgtcgaccccagggagataggagaaagtcatcccttgatcccaaacgaaacttccctgacccccccgaaagggcccagtttcagcggccgccttctttgcggccgctacacctcgtcttcaatcgccctccagaaacccggcaaccgctcccctngcccacaaaatactttcttacccgtccatcctactcccactagggtgatcgggatcttctacgcgcgactcttggccgcacacccgccgcactctcacacttcc

SEQ ID NO: 50525 - DNA, 707 bp, Homo Sapiens
tttttggtccagttcttgtggttctggagacagaaacattggatgaagccatccagattgtaaataacaacccatatggaaatggaactgccatcttcaccaccaatggagccactgctcggaaatatgcccacttggtggatgttggacaggtgggagtgaatgtccccattccagtgcctttgccaatgttctcattcaccggctctcgatcctccttcaggggagacaccaatttctatggcaaacagggcatccaattctacactcagttaaagaccattacttctcagtggaaagaagaagatgctactctttcctcacctgctgttgtcatgcctaccatgggccgttagaaacaagtttgtttaagactgactccatcctgagtaatctccctttatttttgaccagcttcatttgtcagctttgctcagatcagatcgatgggattggaatacattgtaactaaaatcttcctcaggactattaacccccgcaaagtttctatagggaactgcctagtgtaacaatgaaaccagatttctcacttgctcttcatacttctattttgaggtaactgttgtaactatgaaatgcttatctgaaagtagtgcttaaacctgatttctaaaaattatcccattttctgatgatttgaaggggagaaaagccagtgtatgtaaagaaaatgttccagccaggcg

SEQ ID NO: 50526 - DNA, 852 bp, Homo Sapiens
  misc_feature (13)..(13): n is a, c, g, or t
  misc_feature (23)..(23): n is a, c, g, or t
  misc_feature (38)..(38): n is a, c, g, or t
  misc_feature (42)..(42): n is a, c, g, or t
  misc_feature (80)..(80): n is a, c, g, or t
  misc_feature (87)..(87): n is a, c, g, or t
  misc_feature (730)..(730): n is a, c, g, or t
  misc_feature (762)..(762): n is a, c, g, or t
tggtggccaaagnctattacgtncttcaggagcgttgncagntttatgcctaggacaacacaactgcaggagcgcaaagnagaaganaagatgatcgtaaacttggaacttttcttcaaacaaacccaactggtaatgagattatgattggacctctgttaccagacatctctaaagtggatatgcacgatgactcattgaatacaacggcgaatttaattcggcataaacttaaagaggtaatttcatctgtgccaaagcctccagaggacaagccagaagatgtacatacaagtcatccattaaaacaaagaagaagaatatagagtgccagcagcaacttagtattttctaaaaagaacatttattatttatttttagcctgtcattttaattcttcaagagattttactgctggtattttttaatgcactcctctttgtaatttcattcaagccatttgtctaaagtcatttctttgttttttgggagatggagtcttgctctgttgcccaggctggaatgcagtggcgtgatctcggctcactgcaacctccacctcccgggttcaagcgattctcctgcctcagcctcctgagtatctgggattacaggcgtgcaccaccatgcctggctaagttttgtgttttttttagtagagatgggttttcaccatattggtcaggctggtctcgaactcctgaccttgtgatacacctgcctcagcctnccaagggatgagccaccgcgcctggcccattnttttttttttgaccatacttaagttgcagaactattcttgtcataacatatctctcatgtacagtaattatatgtaattaattgaagcaa

SEQ ID NO: 50527 - DNA, 695 bp, Homo Sapiens
gtatttgcctcgcaccatggcgcccaagggcaaagtgggcacgagagggaagaagcagatatttgaagagaacagagagactctgaagttctacctgcggatcatactgggggccaatgccatttactgccttgtgacgttggtcttcttttactcatctgcctcattttgggcctggttggccctgggctttagtctggcagtgtatggggccagctaccactctatgagctcgatggcacgagcagcgttctctgaggatggggccctgatggatggtggcatggacctcaacatggagcagggcatggcagagcaccttaaggatgtgatcctactgacagccatcgtgcaggtgctcagctgcttctctctctatgtctggtccttctggcttctggctccaggccgggccctttacctcctgtgggtgaatgtgctgggcccctggttcactgcagacagtggcaccccagcaccagagcacaatgagaaacggcagcgccgacaggagcggcggcagatgaagcggttatagccattgacattgtggccacaggccactggccctgggtggctctgtcagggtgcacagcccctcatgcctggagcaatgagggtctagtccaggggccaaaagcagtctgaggtattgggtatacttatactctatagggtcgttgaataaatggctt

SEQ ID NO: 50528 - DNA, 629 bp, Homo Sapiens
ggccggggggaggccaggcagggggatcgcctgaggtcagcagtttgagaccaggctggccaacatggtgaaaacccctctctactaaaggtataggaattggccgggcgtggtggtgtgtgcctgtggtcccagctattcgggaggctggggcaggagaatcgcttgaacccgggaggaggttgcagtgagcagagatcgagccactgcactccagcctggggggcagagggagactctgtctcagaaaaaaaaaaaaatgcaatttagttctctaggcttttccatttaatagttttatatcctcctgtttctaaatctggatgacagtgtaacactccagtaaggtgaattgtgaattgctgaaattcttcagatgtttaaaagagttttcagtattcctcatgttagaattaatgcagagaaaaattatatcctttgaactagttacatgttgtggacttctggcctgaggctcttggggattatgtgacatattgggaagggacacatttctgctctgtggctgttactagaaatctagccagcaaatcagactacgtttgtgagaagacaggaaggcacagattagggttgagccagccttcaacaggtttggctggcagtag

SEQ ID NO: 50529 - DNA, 702 bp, Homo Sapiens
cacgaggtggagaccaaagcagttgttaaaattctctttgctgggggccgggtgtggtggctcacacctgtaatctcggcactttggggggctgagacaggcggatcacctgaggccaggaattcaagaccagcctggccaacatggtgaaaccctatctccactaaaaatacaaaattagctgggtgtggtggcgcatgcctgtaatcccagctacttgggagactgaggcaagagaatcacttgaacccgggaggtggaggtggcagtgagccgagattgcgccattgcactccagcctgggcaaaaagagtgagactctgtctcaaaaaaaaaaacaaaacaaaaaaacctctttgctggtatatttgaagagcttgggatggatttgactaaatctgccccgaggagggtgaacaaggtgatctcagagatcactactgctcttggagttccttctcctaaagctaaggccagcctccatcacaaatgcccataaaatctggctcgtctttgatgaacaataaatatttgttgaacaaataaataactgccctgcattaaaaaaaaaaaaaaaaaaaaaaaaaggacgcggccgcaagcttattccctttagtgagggttaattttagcttggcactggccgtcgttttacaacgtcgtgactgggaaaacctggcgttaccaacttaatcgcttgca

SEQ ID NO: 50530 - DNA, 699 bp, Homo Sapiens
tttacgcgtccggaagatttaaaagaagaggaagaaggaaaagaggaagatgagatctaagaagatgatggaaaaaaagaggagccacagagtattgtttaaaactgccctatgtagtttcataatttggtaacatgtaccttcatgttgtaaagttaatagagataaatatttttatcaaaaattttataaacacagcctttctttagcattgatttaatttcagaacatcttcatattgattattagccataaagtttctaacatgaaacatttatctataaattttgtgattatagtagtggaatacatagaaaaaaatatgctttcaactttgtgagtgaatttcgtgttgtgtaagttatatgtcaaatctttgaattttaattttactcttttatacatgtgataatttcataaagtgagggatcccaaaaaaagagtttcatccaacattcttgttctgcaggttgcttttataaagaaggtgaactattttcatgtaatgttaagagttaaacttatctttcccaaatataactttattattagcttgggaaaaatgaaattgtattcccatttttaaaataaatacaaatgtttatttcagaagggcagttttgattatatgtgaatacacaaattttactggatttatcttaataaaaagactctgacgatgaaaaaaaaaaaaaaaaa

SEQ ID NO: 50531 - DNA, 480 bp, Homo Sapiens
aggagataagcaggagtagtaggttgctactaacagcaccaacacttaatcgtggaactagtctcccttggttaggtccctttttaattaaggacttcagcctatagtttggagctgttaagcagtatctatcaggtggcagtctaggtcctgcatatggcttaatcagtggcaaaggggtttgatttttctgccttgcgatatccagtaaaaaatctcttgggggaggagaggtaaaagattggtcagcacgacactggattgccagtctcacatcatctgcatcaacattaggtttcttagcatggctcgaataaatttttgcatcatccagaattgtagtcacataacggaaagcaaattccaacatttgatttataacccttggttcatactctgtgattcccatatccttcaggatctgtgccatcaccaaggcatctctcggagcgttcttgggaggcgccatcctgcttatct

SEQ ID NO: 50532 - DNA, 579 bp, Homo Sapiens
  misc_feature (548)..(548): n is a, c, g, or t
tctgattaatccttcaatgattgggcccaaaaatattcttattaccaccaacatggtttcgtcacagaacacagccaatgaagcaaacccactgaagagaaaacatgaagatgatgatgacaatgatattatgtaaggaatatagtctagtctagatgcatttcaaaaggaaagttggttttgagcccagtatactgaactagaatattctagatcttgttttaccttaaaagactgaaatgtagctgcagtatttttcgtcagttaaaactgttagatctctttagtaaacatacaaatgtgtttttcagtaggcttcaattacaaacagttaagtacttgtttcttaatagtttcattaatgttgagtcctaatatggcaattctgtttttgagacacttttctgccttctatcactgatagtagcatttaagtttcagattctacagcctagtcagcagatttatctttgacagcataatttctgatctacatttaaatactactttattttataaggtaatatagttacttactgtcactagcntaatttttttttttaccaaatctctcaatat

SEQ ID NO: 50533 - DNA, 621 bp, Homo Sapiens
ggggtggggctgcacccagtggattgggtcacccggcagacctagggaaggtgaggcgaggtggggagttggcagaatccccatacctcgcagatttgctgagtctgtcttgtgcagagggccagagaatggcttatgggggcccaggttggatggggaaaggctaatggggtcagaccccaccccgtctacccctccagtcagcccagcgcccatcctgcagctcagctgggagcatcattctcctgctttgtacatagggtgtggtcccctggcacgtggccaccatcatgtctaggcctatgctaggaggcaaatggccaggctctgcctgtgtttttctcaacactacttttctgatatgagggcagcacctgcctctgaatgggaaatcatgcaactactcagaatgtgtcctcctcatctaatgctcatctgtttaatggtgatgcctcgcgtacaggatctggttacctgtgcagttgtgaatacccagaggttgggcagatcagtgtctctagtcctacccagttttaaagttcatggtaagatttgacctcatctcccgcaaataaatgtattggtgatttggaaaaaaaaaaaaaaaaaaatggtggagcg

SEQ ID NO: 50534 - DNA, 987 bp, Homo Sapiens
caaaatggtggtgttcgggtatgaggctgggactaagccaagggattcaggtgtggtgccggtgggaactgaggaagcgcccaaggttttcaagatggcagcatctatgcatggtcagcccagtccttctctagaagatgcaaaactcagaagaccaatggtcatagaaatcatagaaaaaaattttgactatcttagaaaagaaatgacacaaaatatatatcaaatggcgacatttggaacaacagctggtttctctggaatattctcaaacttcctgttcagacgctgcttcaaggttaaacatgatgctttgaagacatatgcatcattggctacacttccatttttgtctactgttgttactgacaagctttttgtaattgatgctttgtattcagataatataagcaaggaaaactgtgttttcagaagctcactgattggcatagtttgtggtgttttctatcccagttctttggcttttactaaaaatggacgcctggcaaccaagtatcataccgttccactgccaccaaaaggaagggttttaatccattggatgacgctttgtcaaacacaaatgaaattaatggcgattcctctagtctttcagattatgtttggaatattaaatggtctataccattatgcagtatttgaagagacacttgagaaaactatacatgaagagtaaccaaaaaaatgaatggttgctaacttagcaaaatgaagtttctataaagaggactcaggcattgctgaaagagttaaaagtaactgtgaacaaataatttgttctgtgccttttgcctggtatatagcaaatactcaaaaaatattcaataattcaatcaataaatataagtttcatcttacacgtaagatacaggtcttatctcctgatkggtgtgtccattttgcctggtatataacagataataaatatccagtgtcaataaatgtaacaataaaagtttcatcttt

SEQ ID NO: 50535 - DNA, 697 bp, Homo Sapiens
  misc_feature (6)..(6): n is a, c, g, or t
cccagnacgcccggggcctgtggcgggtcactgtctgggcagatgctcacagcagcacgtggtgcccacagagttcaggaggctctggtaggggctgttttagaaaggaaaaaaaaaacacacacacacaaacattttttcaatgtagcaaaatcaaacttaaaaaaaaaaaagaagaaaagaagaagatgccgacagtgcggagtctagccttttgtaaacttcatattgcacactaggactataagccattgctagctcattttgaattttaacgtgtaatttttgttttattttctttctgtggggaaacaatgcttgatccaccaatgctctttttaatgttttataactatgtatgtgtatatatataaatatcaaataatatgtatgcacatatgtgtgtgtatatatctatatgtatatacatatatagatatatagagatatataggagaggttttgagacaaaaaaaatacagaacgtgaaacccgagctgaacagcctgtgctctgattacttgaatctggtctcctcggcacctggttattaagaactgaatatttttccacttgaatttagtgctattagaaatttaatatatgtgttttatttatttgatttttttttttttttgcatgactgatgcaaggtttgacattttcactcaataaaaactggaaaaaaaaaaaaaaa

SEQ ID NO: 50536 - DNA, 1093 bp, Homo Sapiens
aagcccccgtctcagggaatcagcagctgtctaatgacgggatgttggtgatcttagcggctggagacaggggcttatatgaggactgcagcagctgcttccaggcgatggggaagacctccttcttcctaggtgaagtgggcaatgcagccaagatgatgctgatcgtgaacatggtccaagggagcttcatggccactattgccgaggggctgaccctggcccaggtgacaggccagtcccagcagacactcttggacatcctcaatcagggacagttggccagcatcttcctggaccagaagtgccaaaatatcctgcaaggaaactttaagcctgatttctacctgaaatacattcagaaggatctccgcttagccattgcgctgggtgatgcggtcaaccatccgactcccatggcagctgcagcaaatgaggtgtacaaaagagccaaggcgctggaccagtccgacaacgatatgtccgccgtgtaccgagcctacatacactaagctgtcgacaccccgccctcacccctccaatcccccctctgaccccctcttcctcacatggggtcgggggcctgggagttcattctggaccagcccacctatctccatttccttttatacagactttgagacttgccatcagcacagcacacagcagcacccttcccctgaggcccggtgggggaggggaccagtgtcagccaggattggcggtgtgggaaaggctcttgaagctggggcactgggcccccccgaacgaaggttggcttgggttggttcccctctcaccacaccaccgcattgccctccccagctttagcgaacggagggttcttcacacccccacggaataacaagccctggccccgaaaaaaattggccgtgccctggacactcatttttttcctttcccgcaagctttgtggctctttttctccctaacacacccctctttttcttagcgtccatggggaacccctgaggaattgacactcttacaacctacagaaaggttgagagaagaaggccctttttctccccccaactagcgctctgccccccccccaagaagagtgcgcgac

SEQ ID NO: 50537 - DNA, 813 bp, Homo Sapiens
accgggggaggcgacgctaagttgctgatcgtggcggtcagtggtgtctctcacctcaaattaggaaaagctttttaacttgttcccctgcatcctggcatgtcccttcaagaaggaaaaggtgacatcagttgtgaccagctcagaggatggggctgtcccctgggctctagaaagaacattctgtgtcaccagcacaggctcttgctgggtgcctgtgccccctttctggttgaagggaagccagaccagtggagtggaagctcttgaagcactttcttttcatgtcggaggctgcgtgtgagccggtggtggcggcagctgtcggtgtttctcctgttctcataccgcccttcgtgtctgctgcatcttcctctaggagcatctgtgggctgacgtttctggcatggtggatgttttcatgttgttccgccgtctcagcatccaggtgacgtgctgtcccgcagtagctgctcgccacacaggctgttgaaactcagcacgagtgcttgagcctgccccagccccagccatagcccttgtgctcaggagctgctcctggagagtggctcccttgtgggaagtgagaaacacgtttcggagtcgcagggagctctgtctggcatcggtggcacagatggtgaacttgtttcaggaagtgtgagcacgggcctggctggcacccggtttacagggaggtgattgaggacgtcgttatgatttgatttgaccttggcacacactgcagagccacagggatgttgctgaatttcaatcaccgatcagcaaggatgaaccttctcaacttcctag

SEQ ID NO: 50538 - DNA, 435 bp, Homo Sapiens
  misc_feature (408)..(408): n is a, c, g, or t
aaggctggtctcgaactcctgggctcaagcagtttgcccgcctgagcctcccaaatttctgggattacaggtgtgaaaaccatgccccgctgccccttcttgacttagctatattttccttactaagagttagttccctagcccatcagaaagattcccaggctggctacttcgggatgacccttgcattttttattgaaatcatttctgaatcttttttccccactagcttttaagacataggaactatatcttgttcagctttgcacttccaattataaaaaaatgcctggcgtgtgttaggcactcagaaaatgtttgaactgaaccaatggtgtgtgtgtctctgcacactctaagttagtgtaaatcagaacagcttgttgttgctgcttgttttgatcaagnacaaagagtgattgataaatgtgctaa

SEQ ID NO: 50539 - DNA, 993 bp, Homo Sapiens
tggactggactgaacatccagaaagcttccctgcaatcttggggtttggctttagttttcttttccttgatttctcagtaggtgctagaatccagttcacacccttcactgtgcgtgcagacacactgacacactccgccacgagtgctccagagcccacgaggcttgcagatcgggggcataggaatttggaatccaagagctataatttttaaaaaaaaaatcttttattttaatacattgtaggaaatcttcataattggagaaagttctgcagcatggctttttacgtctgtaaataaataattttagaacagcctttttttcttccataaactactattgtgatctattttttccagccatgtcactaattgtgaattcctaccaactattgacagaatacagagttgattttttaataaaaagttatatataattatccctttaattaaagggagcaaaggggcgttccacatggacagaggcttggaccgaggcctggtcacagcagcgagcatccagggtttgcagggacgatgttacagactctgttttctgcctggcgtttcacttgtgtctgctcctagcctgtgctctgccagcagcacagacatctgctccatcagacctcttccattttgcacaggcagtgcaggaggtgaatgttcactttctgttctccagtgtcactggtctgtattccacgggatggaaagcgcatgggcctgtgtcccattgtagattttccttctagatttctgtgtacacacacttgattgatcctggatgaatgtcttttttaatacttccgaaaatttcatcatcttaaaaaaatggattccctaccaaataaactccaccaccccaagtgaaccccaggaacataatgccctgcccacaagggaatggtgtttaaaaaaagggttgcccctttcttccttgccgccaattgggtccccctttggggaatacctttgggggggggggagg

SEQ ID NO: 50540 - DNA, 754 bp, Homo Sapiens
gcgtccgcttgttcctcagcctcctgagtagctgatattacaggcatgtacaaccatgcccagctaatttttatatttttagtagagaaggggtttcaccatgttggccaggctggtctcgaactcttgacctcaagtgatctgcccacttcagcctcccaaagtgctgggattacaggcatgagccactgtgcctagccagtttgtaacatttctgctgtgtttgtgctgttgagcagagatattgtgggttctatgtagctcataggattattgcaatgatcaaatgaaataatgttttataattttaaagcaccatagaaagatttgttaagttctatgtatttttaatttttaattatgatttctttctcgactaacatatgtatgaggcttttttttcccatttcctagcgtgtatatttttaaattctgtgtttattgattcctgttttaattgaatttgaattgtggacagaaaataggtacatgttaagactgatctgttaatatttgttgagatttgctttatgacctagattataacctgtttttgtaaatgtttcatgattgcttgaaaagtatgcttgttttttagttgttggatgtccattagaccaaagttgttaattttgtagttcaaattttttccattttactattcttttgtcttctacttgatctctcagactctgagatgtgttgaaattttctattctagtgaacttaccaatttctccctggaattctgtca

SEQ ID NO: 50541 - DNA, 632 bp, Homo Sapiens
ggaaatgggagcacagtactgggaaatgggagcacagtactgggaaatgggggctcacagcactgcaaaatgggagcacagtattgggaaatgggagcacagtactgggaagtgggagcacagtactgagaagtgggagcacagtactgagaaatgggagtacactactgagaaatgggagcacagtactgggaaatgggcatacagtactgagaaatgggagcacacagtactgggaaatgggagcccacagtactgggaaaggggagttcacagtactgggaaataggagcacagtactcggaaatgggagcatagtactgggaaaccccagacctggattctgagtttttcagcctagcccagacttcttatcttagtagacaaaaagagtcaataccagagaaccagaggcatcctctgtattttaatgaactctgcattttaatctgtttagtagtcattttttaaaagataatcagttttccaaatatatctataagttactaaaaaaaaaaaaaaaaaactcgagggggggcccggtacccaattcgccctatagtgagtcgtattacaattcactggccgtcgttttacaacgtcgtgactgggctggcgtaatagcgaagagg

SEQ ID NO: 50542 - DNA, 747 bp, Homo Sapiens
cacgaggtgcttccagagacttccttggggttgcaacctggggaagccacatcccactggatccacacccgcccccacttctccatcttagaaaccccttctcttgactcccgttctgttcatgatttgcctctggtccagtttctcatctctggactgcaacggtcttcttgtgctagaactcaggctcagcctcgaattccacagacgaagtactttcttttgtctgcgccaagaggaatgtgttcagaagctgctgcctgagggcagggcctacctgggcacacagaagagcatatgggagggcaggggtttgggtgtgggtgcacacaaaacaagcaccatctgggattggcacactggcagagccagtgtgttggggtatgtgctgcacttcccagggagaaaacctgtcagaactttccatacgagtatatcagaacacacccttccaaggtatgtatgctctgttgttcctgtcctgtcttcactgagcgcagggctggaggcctcttagacattctccttggtcctcgttcagctgcccactgtagtatccacagtgcccgagttctcgctggttttggcaattaaacctccttcctactggtttagactacacttacaacaaggaaaatgcccctcgtgtgaccatagattgagatttataccacataccacacatagccacagaaacatcatcttgaattaaagagagttttgaacaaaaaaaaaaaaaaaaaaaaa

SEQ ID NO: 50543 - DNA, 745 bp, Homo Sapiens
  misc_feature (618)..(618): n is a, c, g, or t
  misc_feature (703)..(703): n is a, c, g, or t
gtaccccctgcagccgcccgctcttccctcccagccctgccaggcaggcctggatgctgatactaaatcaaaaccttaaagaggtgactggcagtctggggaggggagaagaggtctgcaacgaaaatctaattaagaacattgagatgttcacaaccaagttcagcttgcagcttccggggaaatgcaaccgacctctatgccatctctagctgggtaatcttcgaggccctgaaatgcaattttctgaacctctaagtcacttttattttatgtcatgtgataaagacacaagtagtcacgcactattggaaataggttgggagggaggtctttaagatcgcttttaaaatagtttccaggacttgtctaaaaatgatgacaaactttgaatccagagggcctgttggtcaatgtgttggaaaggacatttcaggccggcagagtaattggataattcacaggcatagaggtgacttttggaaaattcattctcctatccatgctgaaccaggcttccacgactgggttctacccaggccagtgggaagactctgggaaacttcaggccagccttgattggaagaacttccaggaggagccattgctgagatccangctcactgtgattcactgaaaatgtagcgaaagggctgtcactggatattttgctatcccaaactctcagcctctgtgaataagntgtttttttcatttacctctcaaaaaaaaaaaaaaaagggcg

SEQ ID NO: 50544 - DNA, 336 bp, Homo Sapiens
caaattgtgtagctggcaccacgatctaattttagaacattttcctgatcccaacttctgtagctgtttaaaaaatatttcaagattaatcaaagattgatactatatttagttgatgtgattctttggtctcctttaatctggaactgttccctgcctttttcttccttgcttgacatttgtatttttgaagcttctaggccagatatcttttagaatgccccatacaatgcatttctttaatcattatttatcatagttaaattcaggttaaacgtcttggccaggaaaaaggtagtctcaatgtaggagacattgaagaggcatttgagattt

SEQ ID NO: 50545 - DNA, 503 bp, Homo Sapiens
tggagacggggtttcactgtgttagccacgatggtctccatctcctggcctcgtgatctgcccacctcggcctcccaaagtgctgggattacaggcgtgagccaccgcgcctggccaaaatgcagacattttattagggggataaggagggcaaggtaaagcttatggaactgagtgttagtgactttggcatttgtgtagctgagcacagcaagggaggggttaatgcagatggcaagtgcaccaaggagaaggcaggaacactggagcctgcaataagggaggagaggggactggagagtgtggggaatgggaagaagtagtttactttggactaaagaatatattgggcgaagaatagagggggagcttgcaggaaccagcaatgagaaggccaggaaaagaaagagctgaaaatggagaaaaccagagttagaactgttggatacaggagaagaaacagcagctccactaccgaccccccccccaggtttgatgtcctt

SEQ ID NO: 50546 - DNA, 785 bp, Homo Sapiens
ggggggtgtgctgaccggggcgcagcttttctcgctgcataaggaggagctgcgggcggtgagccccgaggagggggcacgtgtgtacagccaggtcaccgtgcagcgctcgctgctggaggacaaagagaaagtgtcagagctggaggcagtgatggagaagcaaaagaagaaggtggaaggcgaggtggaaatggaggtcatttgacctgccaggcgcccttcgcaaagagtgacgaggccccgtgggagaacggactcctcagactctccccaatagcggaagtcgatcttctgaaggatggccaatctgctccggccctggtcttcccccatcccggtggacagacttaacgatccttgctgcagtccctccggagaggatctggactggctgggagtggggagggcgtggagacagtctacggaaagcgctagcagacccccgagagggtgcagtggagccctgagcattgtaatatgcggcccatcctataaacagccctccgtgctttagcggggtctatgccaggggctttgcaattctttgtcggccgcctcggcccttcaaaaaccttttcaaaccatttcctttgggccggcgggcccccgttgggtaagtgaaacctggggccaaagctgtttttcctaggaccatccctggtcatgaactagtagcttgggatttcccccccaaataaaaaaaacccctcgggggcaacccgaagcgtttcttgaagaaaaccccgaaggggggtttcgggaagggaattagcgggggttct

SEQ ID NO: 50547 - DNA, 749 bp, Homo Sapiens
  misc_feature (730)..(730): n is a, c, g, or t
ggtgcccggtccaaggttacagagcccgttggactcagaagtgaagctggaacactagccaatgccctcccatccgccaggtgacttctctgcagtcccctttaccatctgcccgggtcctttgggatacggctgactaggggtttgaagaacagcaattggcctttgttatgaatctttttgtggagataaacccagtagaagtatcacggttctgaccatgaaagtgtgttcaactctaatccagcacaattaggattccagatcatttgattctgtgtcgtctaaatatcacagaaagttaaaaacaaattagcctcaatggaattaatggcttaatatccataatttagttttaatgctaggaggaagggctcctgtgaatgtgttcttacaaatcaaataaagaaaatcaaatagaaaaaaaaaaaaaaaaaaaggacgcggccgcaagcttattccctttagtgagggttaattttagcttggcactggccgtcgttttacaacgtcgtgactgggaaaaccctggcgttacccaacttaatcgccttgcagcacatccccctttcgccagctggcgtaatagcgaagaggcccgcaccgatcgcccttcccaacagttgcgcagcctgaatggcgaatgggacgcgccctgtagcggcgcattaagcgcggcgggtgtggtggttacgcgcagcgtgaccgctacacttgccagcgccctagncgccgctcctttcgctttc

SEQ ID NO: 50548 - DNA, 719 bp, Homo Sapiens
ttcggatgtgtttttaataatgtcagctatgtgccccatcctccttcatgccctccctccctttcctaccactgctgagtggcctggaacttgtttaaagtgtttattccccatttctttgagggatcaggaaggaatcctgggtatgccattgacttcccttctaagtagacagcaaaaatggcgggggtcgcaggaatctgcactcaactgcccacctggctggcagggatctttgaataggtatcttgagcttggttctgggctctttccttgtgtactgacgaccagggccagctgttctagagtgggaattagaggctagagcggctgaaatggttgtttggtgatgacactggggtccttccatctctggggcccactctcttctgtcttcccatgggaagtgccactgggatccctctgccctgtcctcctgaatacaagctgactgacattgactgtgtctgtggaaaatgggagctcttgttgtggagagcatagtaaattttcagagaacttgaagcgaaaaggatttaaaaccgctgctctaaagaaaagaaaactggaggctgggcgcagtggctcacgcctataatcccagaggctgaggcatgtcgatctccctgagcttcggatttgtgatcgtcctgctctgttttatttactctactaaatacctaactaactaggttagtgacgatgcctctatcaatttg

SEQ ID NO: 50549 - DNA, 795 bp, Homo Sapiens
cgctgttcagcagtacgtgcgggactccaggtccaccagattctagaaggtagcaatgaagtgatgaggatactgatctctagaagcctgcttcaggagtagaacccacacttgttctggcctggtgttcagtgcgactgcagtcagtgttgagtggtgccatgtgggccgctctattccaaaggaatcatggattagacccaagggctgagctcctctagggcaggacctgcaccctgtgtgttggcaccagcatcgggtcttggactggggcagaatccccagtggaaccggaagagctggactgatgagaaacatcagaagaacacatactaccttgttttcctaatgccagaagggtgaccagtgaagattcaccgtcaaaccatgaaagtcctttcttggatccactttatcttgattagtctgcattttactagttcactggatccctcctctaggggcctggggactttcactgatgctcttcctgattctagagcaaaggtgtgggaaggggaaatggaggaatgccctcctgtctgtgtcgttctctgtgccacagctacagatgcagaaggtttctctggatagcacacctctgaatgtaaatcatgataaaatggatatttggaaacttactcctaagctgtgatttagggtgtatttctacttctggactgcctcaatatcaagggctgagacttttgaattttgaatattcgttgggtttcatgttaagaagcctgtggtctaggagtgcttattcagtgtttcttttcctgataaaacact

SEQ ID NO: 50550 - DNA, 341 bp, Homo Sapiens
tcgaccctgcttcggcctcccaaagtgctgggattacaggtgtaagtcactgctcctggatgcatgtcaagcacattggaaagttcttacaacaattctgatggaggattttctctcccatcaaccaaacaccacttaagattaacctgtggctcagtctacttaaataaatgccatatttattttacttatcatttagaatttgccattctcaggaacaaaactttttgtacattggaaatggaaaacattgcagtttggtcttaatttccacatgaatatcaagtgtaatttttaataaattatttggagaaaaatgtaaaaaaagtcgacgcggccgc

SEQ ID NO: 50551 - DNA, 611 bp, Homo Sapiens
ttctaaatctactccagagacccagtgccctcaacagtaaagacttttctttaataagagtacggtgccacttgcctcaaaagttactatggtgcttaagattgtcttgatctgacatatatcaccttctgggttatttactcattgtgccaggacctggcattttcatgtgcctttgaccaagtgttcagaatttgcttgactctaacctggagagcttcttaagtgatgccccttcatggagcttctatgacagtgaataaactattaattgaaggaaaatgttataattaatgtatctatttgctgcattgtatatggattaaatgataaaaaacaagtaatctaccctcagagccatgtatttgagaatgcttcaatcatattttcctatgtacttttttttataaacttagttttagactatgttgtaaaaatgggaaggttgtaaactatgttgtaaaaataggaaatgtggcttaaaatatatacattatattgtttcaggattttgtcagtgtttaaagaaccaatgttcatctttgtatttatatacatgatttaaattttgtctaaaattttaaataaaactgcagtgatttatccttaaa

SEQ ID NO: 50552 - DNA, 581 bp, Homo Sapiens
actgcggatatggctgtgttggctggatccctgttgggccccacgagtaggtcggcagcgttgctgggtggcaggtggctccagccccgggcctggctggggttcccagacgcctggggcctccccaccccgcagcaggcccggggcaaggctcgcgggaatgagtatcagccgagcaacatcaaacgcaagaacaagcacggctgggtccggcgcctgagcacgccggccggcgtgcaggtcatccttcgccgaatgctcaagggccgcaagtcgctgagccattgaggatcgcgacgcagtcggcgggaccctcatggaagcatcgccctcgcctcggaccttgcctggcgctatttttgcagggagctggggagcaggaacgcctcggacctgagtgctctccatattgtggggttgaagtctggatgggagcttgccaagtccctttttaggctttttaattaggaagcatttcgaacctgcgcaacagaccaaagaacagtacaaagaacatccgtgtacccagtaccctgactaccgactacctacaacccgtccctgccccatcctgagttctt

SEQ ID NO: 50553 - DNA, 640 bp, Homo Sapiens
tggcacgaggcacttgagtgtgaaattcagttgctgaaaaacttgctacatgagcgaattgttcagtattatggctgtttgagggatccccaggaaaaaacactttccatatttatggaatatatgccagggggttcaattaaggaccaattaaaagcatatggcgctcttactgagaatgtgactaggaaatacacccgtcagattctggagggtgtccattatttgcacagtaatatgattgtccatagagatatcaaaggcgcaaatatcctgcgagattcaacaggcaacgtcaaactaggagattttggggccagcaaacggcttcagaccatctgtctctcagggacaggaatgaagtctgtcacgggcacaccatactggatgagccctgaagtcatcagtggagaaggctatggaagaaaagcagacatctggagtgttgcatgtactgtggtagaaatgctaactgaaaagccgccttgggctgaatttgaagcaatggctgccatctttaaaatcgccactcagccaacaaacccaaagctgccacctcatgtctcagactatactcgagatttcctcaaacggatttttgtagaggccaaactgagaccttcagctgatgaactcttat

SEQ ID NO: 50554 - DNA, 331 bp, Homo Sapiens
ggggaggacgcgggaggcgagcggggagccgaggtcgtgctaggatcccgcgcccaggggccttcgtcgagggaggggcgtggcaggcggcagcaggagggcagcaggagctgtcaggctggcggttccgcgccgcggctccttctgcgctgcgcccgcaactctgggctgagaacttctcccgccggcccactcgccctcgccccgcgcactcggcgccaggcgactcccgcaccttgtacccggcccgccccgcctcctccttcggccgcaccactccccctgccggccgcgcttctctccgttacaaaggagggaaaatgagccgggc

SEQ ID NO: 50555 - DNA, 788 bp, Homo Sapiens
agagaaaggtgcagtggatgcattggctgcagctttagcccacatttctggtgcatcaagctttgaaccacgatctttgatcacctctgataaggggtttgtgaccatgactctggaaagcctagaggaaatacaggatgtcagctgtgcttggaaagaacttaacagaaagctgagtagtaatgcagtgtctcagattaccagaatgtgcctcctgaaagggaatatgggtgttgctttgatgttcctacaactgagtcagaaaggttacaggcagagtggcatgattccgactggatactctcagtgccagccaaattacctgaaattgaagaatattatgatggaaacacatcttctaattccagacagaggagtggctggtcaagtggtcgatcaggccggtcaggccggtcaggtggtcgatctggcggccggtcaggtagacagagtcgacaaggaagtcgctcaggaagtcgacaagatggtagaagacgaagtgggaatagaaatcgatcaagaagtgggggccacaaacggagttttgactgagtatttgatagttaatctaccagtgtgagcttgcctatttctgcctaatcatgtacattatccaccaaaaattaggtcatcatagttgaggtatgtgtctgctattttgcaaagaagttggtcgtatgtttttaacaaagtatttcacaagaatggaacaaatctacttatccagttatacctttgaataaaaaaacctccttttatgtctcttttcaaaaaaaaaacaacaaaag

SEQ ID NO: 50556 - DNA, 420 bp, Homo Sapiens
  misc_feature (398)..(398): n is a, c, g, or t
gcacgagaagaaattttaggagtaaaatgtagcagtagacatcaggctgctatccttttttacccttcaacccagtgggtgatgtttctgggttacagactcaacagatggagttttaactatttatgtttaatcaaggaggaaaagaagccataatttgtatttaatgtagtagactatagaaatgaaagaataaagtgataccaaaatttcgtatattcaaatcaatcttatagttttataacattttaaccctaacattttattgtattttgggttgcaattactcatggcagatgaaagccatggcttctttttctagaaaaataaatgcacacatactgccaatttcaccgacaagcttgaggagtttcatgaacttgccatcatctggtggnccctagtctgaattcttgatag

SEQ ID NO: 50557 - DNA, 411 bp, Homo Sapiens
gctcgaccgacagcttgaggagtttcatgaacttcgtatcatctggtggtccctagtctgaattcttgatagaaaataacctagtatgttcatgtatacatactgccaatttcaccgacagcttgaggagtttcatgaacttgccatcatctggtggtccctagtctgaattcttgatagaaaataacctagtatgttcatgtatacatatgtaactaacctgcacattgtgacatgtacactaaaacttaaagtataataataataaaataaaaaaaaaagaaaagaacctagtgtgttaaaccttaaatgcccttagaaataacctagaccagtgtttcttaaactgtggtcatgagatcagttgaatggattatgaccaacattgaaaaaaaaaaaaaaaaaagtcga

SEQ ID NO: 50558 - DNA, 577 bp, Homo Sapiens
gggacggggctgcactccaaccgtctgcacctgctcttcccccacccctgtgggacctcatcttcacgtgccatgtgtgctgaaggcccagggcccagcagggggcagtggcacctgttgacggaaaaggccgaggtgcttaccagtggaccttctggcccgcccctcccctgtcacttgtcgggcatccagggccccgacctgtgcctagccgccagggtgacagaaggcagaactgaagcggggtctgggccacgggccaggccactgccttttgtcctcagtgaccatacattcctgctctcggacttgaactctactgtaactgttttcttgaaatgaagctgtacaggacgattcactgccatgccagtcaggcgggcttgccatgttctgtgaatctcgagtgagcggtgccacccgcccccatacctccgccaccggccgctgtcggggatgccacagcctgccacggtcgcagccagacgtgagcttggcattgaagttgcaaagcggcccctggccgggctcgccgtcgctgtccagggccgtgtccggtgctgtggctgtaaagctg

SEQ ID NO: 50559 - DNA, 720 bp, Homo Sapiens
gagactacttttaattttcatttctgggaccttgatttatataaactatgttttcagttctttgttatttttcacatctctgaaactttgagcattttttataagccagcaatttattttacatagcattgtaaaatacacttctaggaaattttaggaaagatttaactgtttaaatctatttggcataaaccttgattttttttttccatttgacaaaaataatacaattccacagaactagatcagcagattctctgatttgtaatgtcattcacctgtgacattttaagtctctctggtgctaagaattggcactttatagcctggtgcctttacttttaatttgagagaacctactgctagtcccaggaaacacacttggaaataagtcagctattttttttgcccagtgatgctatagttgtcatattgtccaaagttcatattgttcaaagctgaggagcttgtcctgtgtatgtgaatgcacacatgtgcacttagttcaaatactaaaagtagcttttattaaatataatcagccaaaaacacacacaaaataaaaaaaacaaatataagtagtcagtttttcaatgttatcctactagttctacattctattttaatttttatacaatttccattttatagttaagaaccatcacttacttggattggatgtctttcattcctagcactaatagttggctttcttttttt

SEQ ID NO: 50560 - DNA, 787 bp, Homo Sapiens
ggtagggccgggcgataatggcggcgtcgaggctggagctaaacctggtgcggctgctatcccgctgcgaggcgatggcagcggagaaacgggacccggacgagtggcgcctggagaagtacgtgggagtcctagaggacatgttgcaggccctgaaggtccacgcgagcaaaccggcctctgaggtgatcaatgaatattcctggaaggtggattttctgaaggggatgctgcaagccgagaagctgacctcctcctcagagaaagcactggccaaccagttcctggcccctggccgtgtgccaaccacagcagagagcgagtgcccgccacaaagacggtgcatctgcagtcacgggcgcggtacaccagcgagatgcggagtgagctactaggcacggactctgcagagcctgagatggacgtaaggaagagaacaccctgtcacactcactgaaaatggcggaccagaacctggagaaactgaagacggagtcagagcgtctggagcagcacacgcagaagtcagtcaactggctgtctgggccatgctcattaatcgtctgttcatcttcattagcatgatcctcttcattcgaatcatgctaaatcaaataaagaaccccgccacttaaaaaaaaaaagaaaaaaaattgtggggggccggccgaaaagttttaaaccctcggtggggggggcccaggttggaacggcaggtccgaaaaaccggcgaggggggttccccaaaagcccgggccggtggaaacgggtggcccggtcaaggcgc

SEQ ID NO: 50561 - DNA, 560 bp, Homo Sapiens
ggggtgctgtggtggtgctgaacatggtggaggcctcgagggagattgccagcaccctgatggagagtgagatgatggagatcttgtcagtgctagctaagggtgaccacagccctgtcacaagggctgctgcagcctgcctggacaaagcagtggaatatgggcttatccaacccaaccaagatggagagtgagggggttgtccctgggcccaaggctcatgcacacgctacctattgtggcacggagagtaaggacggaagcagctttggctggtggtggctggcatgcccaatactcttgcccatcctcgcttgctgccctaggatgtcctctgttctgagtcagcggccacgttcagtcacacagccctgcttggccagcactgcctgcagcctcactcagaggggccctttttctgtactactgtagtcagctgggaatggggaaggtgcatcccaacacagcctgtggatcctggggcatctggaagggcgcacacatcagcagcctcaccagctgtgagcctgctatcaggcctgcccctccaataaaagtgt

SEQ ID NO: 50562 - DNA, 489 bp, Homo Sapiens
  misc_feature (482)..(482): n is a, c, g, or t
ggttgctgagtcattaggaatcacagaattcctacggaagaaagaaatacacccagacaaccttggacccaagcacctcagccgagacatggatggggagcagctagagggagctagcagcgacgaagagggaacgtgaggctgcggaggagggactggcctcagtgaaaaggcccagaagagaagccctgtccaacgataccactgaatctcttgctgccaacagcagaggccgggagaagcccaggcccttgcatgctttggccgctggtacaatagtgtctcaggaggaggacattgtcacagtgactgatgcagaggggcgtgcctgcggatgggcccgctagaaggagttcctctagaagctgtggagtcggtcgtcaccgtggagccagagccctcacagtgaagtggagtcagatcctagattcgtctgattttatccagagaaggtctatggcaagcaatgtatatttttctantgtcaat

SEQ ID NO: 50563 - DNA, 740 bp, Homo Sapiens
tttcagcctcatccagcagaaaactgagcttccggtcacagagaacgtgcagacgattcccccgccatatgtggtccgcaccatccttgtctacagccgtccaccttgccagccccagttctccttgacggagcccatgaagaaaatgttccagtgcccatatttcttctttgacgttgtttacatccacaatggcactgaggagaaggaggaggagatgagttggaaggatatgtttgccttcatgggcagcctggataccaagggtaccagctacaagtatgaggtggcactggctgggccagccctggagttgcacaactgcatggcgaaactgttggcccaccccctgcagcggccttgccagagccatgcttcctacagcctgctggaggaggaggatgaagccattgaggttgaggccactgtctgaaccatccctgtacatctgcaccttcttgtgcaaggaagtccttggcctaaagccttggttctcaaactgggttccttgggacctccggggtgggggggttccaggaggcacgtagggtaccttgcagggtcctaggagggaaacccaggattccaggagggatcccaggaactgtgggcacccattttctgtgtctcccagcccatttccactcctagtttgtcatggataattttttgttcttcccctgtgtgatttttgccatcaaaatacaaaatttgagactcgttaaccgaaaaaaaaaaaa

SEQ ID NO: 50564 - DNA, 739 bp, Homo Sapiens
ccagctctgctctaggactgcctcccactgcggcccctcacctgacttcagggtatggggagggagggagccagtgctccaaggccaggggcttgctcatgagagatgtcaggcttcctggaggcatcaggctttgagccctgctggggtccaactgacctgggaccaggtgtcgcgcagagatgtgcctcattctgtgcctccttctgtgcctcctaccatgttccctttaactgtgcctcagtgtgggttagggaacaatttgttattgtattaagtttattcagttaattcacttgaggaactaaccagtttttactttctgtctagaatgatgtacatgtagtagagtaagccataatgctcccaaagtgccttgttttctctgatacaaacatatttataaggacatattcctgtgggttcttgggtgtgtttgccacatcaagattttagggaaggggggtatatgtgtagtagggatgccgtttgaaaacaggcactcttcccctgaggatgggaaaggagctcttcagttggagatctaggcagtgggttaagccagacccctaaagtgaccctttcctcttctgccctattcttctcagaccctcagaaagacatccaatttttttaaatcccctgtagcttccaagcccggtctcatttgcttcctgcaggctcatcgtgtgataccacatttgtggcccactgacctgaaggtcctgtactgttaccc

SEQ ID NO: 50565 - DNA, 616 bp, Homo Sapiens
gagcgttcagagggtaaaggacggtagtgaaataggatgcatgatgatatagatgaaacgtgagatgtatgattggggggagggagcaaggttgaagataatctggggttgaaatgttctagtattcattctgtacatttttagttagacatcagatttgaaatattaatgtttacctttcaatgtgtggtatcagctggactcagtaacacccctttcttcagctggggatggggaatggattattggaaaatggaaagaagaaagtaactaaaagccttcctttcacagtttctggcatcactaccactactgattaaacaagaataagagaacattttatcatcatctgctttattcacataaatgaagttgtgatgaataaatctgcttttatgcagacacaaggaattaagtggcttcgtcattgtccttctacctcaaagataatttattccaaaagctaagataaatggaagactcttgaacttgtgaactgatgtgaaatgcagaatctcttttgagtctttgctgttgggaagatcgaaccatattgttcagcatgggtgaccaccagaaagtaatcttaagccatctagatgtcacaattgaaaca

SEQ ID NO: 50566 - DNA, 559 bp, Homo Sapiens
acccacgcgtccgcaatctcatcatcctgaagcctataatgaagaaaaagatctagaaactgagttgtggagctgactctaatcaaatgtgatgattggaattagaccatttggcctttgaactttcataggaaaaatgacccaacatttcttagcatgagctacctcatctctagaagctgggatggacttactattcttgtttatattttagatactgaaaggtgctatgcttctgttattattccaagactggagataggcagggctaaaaaggtattattatttttcctttaatgatggtgctaaaattcttcctataaaattccttaaaaataaagatggtttaatcactaccattgtgaaaacataactgttagacttcccgtttctgaaagaaagagcatcgttccaatgcttgttcactgttcctctgtcatactgtatctggaatgctttgtaatacttgcatgcttcttagaccagaacatgtaggtccccttgtgtctcaatactttttttttcttaattgcatttgttggctctattttaatttttt

SEQ ID NO: 50567 - DNA, 748 bp, Homo Sapiens
ccccgcgtccgaagctagaacctcaaaaaagctgtggttctcaaaggggcaaatgacttagatatcaaagcagagggaaatattagattccggtatatcgttcttcaagacacttgctctaagcggaatggaaatgtgggcaagactgtctttgaatatagaacacagaatgtggcacgcttgcccatcatagatcttgctcctgtggatgttggcggcacagaccaggaattcggcgttgaaattgggccagtttgttttgtgtaaagtaagccaagacacatcgacaatgagcaccaccatcaatgaccaccgccattcacaagaactttgactgtttgaagttgatcctgagactcttgaagtaatggctgatcctgcatcagcattgtatatatggtcttaagtgcctggcctccttatccttcagaatatttattttacttacaatcctcaagttttaattgattttaaatatttttcaatacaacagtttaggtttaagatgaccaatgacaatgaccacctttgcagaaagtaaactgattgaataaataaatctccgttttcttcaatttatttcagtgtaatgaaaaagttgcttagtatttatgaggaaattcttcttcctggcaggtagcttaaagagtggggtatatagagccacaacacatgtttattttgcttggctgcagttgaaaaaatagaaattagtgccctttttgtgacctctcattccaagattgtc

SEQ ID NO: 50568 - DNA, 603 bp, Homo Sapiens
ttgaatttaggtgacactatagaagagctatgacgtcgcatgcacgcgtacgtaagcttggatcctctagagcggccgcctactactactaaattcgcggccgcgtcgacaattcatcaaattgtgacaggtgcataattcaggattacatactgtgtcggaattgatgggttcttggtctcactgacttcaagaaagaagccacggaccctcatgaggtcattttcttctgaggaagtcattcttaaggactgttctgtccccaaccccagctggaacaaggacctaagactgctctttgaccagtttatgaagaaatgtgaagatggctcctggaaacgtttgccttcatataaacgtacacctactgaatggattcaagacttcaaaacccattttcttggtagaaacagccactttcccattaatatatctgagcatcaaatataaagctaagaacagattgaagtactagttactacctgaaaaaaagaaagaatataatgcaggattatggttctatagtcaccaattttatagaccagaaatcacaataaattttgcagaatggagagcaaaaaaaaaaaaaaaaaagtcgacgcc

SEQ ID NO: 50569 - DNA, 543 bp, Homo Sapiens
cgtccgtccctgtgccggtccctcacaaacctctccccctttgaaactcaagcacagctgcgaggagggcagcgaggagggacccctctctcatggttgtctctttcccccgctatgtcataggtagtggaggaagcgaaggaagtgaacgctgaatgtgacgcatttctgaagagctcagctgtcaccgggcatagcctggaagccccaagtctgttctgactttgcctggctgtctccttgacccgcctcctagatcattgtccttgatgtccaggctgggtcatttaaaatagagatgcaatcaggaaggttgggggacttgggactgtggctgaattgagaccttgctgatgtattcatgtcagcacctgagtcacagcccaggtgcccggaagcagcctcttcgcataggcagtgatttgcgattactttaaagctcaccttttttcttcccctctctgttcgctgctgtcagcataatgattgtgttccttccctatgggatccatctgttttgtaaacaataaagcgtctgaggga

SEQ ID NO: 50570 - DNA, 538 bp, Homo Sapiens
tttttttttttttttgtgaccatacatatattattgagtaatacatagagtaacaaagcagaaagaaagccaccttgtaagtagtttcttactacaatacagattctatctagtgaacaagaaacagtttgttttccaaatatgtatgtctgcaaagtattctgacttaagtaaagaatttgataaatggtatgtgatctggttctttaaacaaatttactgaagcaaaagcttcaaagctggaacaaccaaggagtttgattttcctttgaatcttgcaaaacctatcctctgagacaaaaagatctgatcataaagtctataaaaaagtctagaaagtataaaagtatagaactatgaaagtggatatattgatggcaacttttatggcttccatagaaagtgtagagaggatctctggtttgctttatcgaggtagtgtccagggttggaaggtcatcattctttattgtaagtgctacagatgacataagcaggttagctagggtgttgttattgcataataatgccactattt

SEQ ID NO: 50571 - DNA, 639 bp, Homo Sapiens
gggaaaaacagacagctgtgtcagtagaaaacttcattgcagaattgctgcctgacaaatggtttgacattggttgtttggtggttgaagatcctgtccatggcattcatctagaaacatttacacaagccacaccagtgcctttggaatttgtacagcaggctcaaagtctaactccccaggactataatctgaggtggtcaggccttttggtgacagtgggtgaagtcctggaaaagagtttactgaatgtcagccggactgattggcacatggcatttactgggatgtcccgtcggcagatgatctacagtgcagccagagcgatagcgggcatgtataaacagcgcctgccacccaggacagtgtgagaggagacctacctgggagactgagactttcccccacttttagcttgatgttaaagaagtggttgtaccttcctaaatcgaatagtctaaatgaatccagtagtttttatcattttcctgtagcctgcaatttttctttctctagaaaggcatcatgtcattccaggagacaaaaagaaacaaatcctttttatagtcataccatttcacctatcatagtactcaaaaaagaaaatatacaaaatctatttacagcacaatttaatat

SEQ ID NO: 50572 - DNA, 648 bp, Homo Sapiens
cacgcgtccgcttgtatagagtgtaacttattggggataaacacttcaacttttggcagaaatactttggattctccccaaggtcatttgtattcagagtaaatcagtggtccacccccataaaactgtaagacaagcctcctgtatgaagccagaagcacaagtgccttcagagggcagttgattccagtccagttgcctccctagcttgtgtgtggcctgcctccaccatagcagggactagggagggaggcagggaacgttttttcttttctacatcttcacaggttcggctgggggcagctgataggcctaaggccataccttactatttaagatactctgatcgcacaactgcagagacagggttccctcactgctagtcagcttcttttggaaactggacaggccattgccacctgcactttgaagaagtgagcaaagacgtggccacatttctaataagttgaaatggtctttctcccttcctcagagagcaaccagcttctttttttttaaaagtcctttctatctgttggatacaacagtgtgcttttggtgcacattttttagcaatagttgtgaattaatggcaaagaaaaaaaaaattatttaccagccctcagttgtgtttgcccgaggggcctt

SEQ ID NO: 50573 - DNA, 485 bp, Homo Sapiens
ctcaattattgcaaaaatgtaacaataaagttcctcaaaataagatctgttcctcatagctatactgtgtacacataagacgcatatagggttttactgaaatctatttttaactcttatgttagtagagaaattgtttcaaggattttgagtcataggtctgtaatttatagagatctctagaattcttattgtaattttcctacttctttgataaaagaaaaataagtcagattgttaactccaagattgaaaaaaaaaactcttgaaagaagattattagttgtaactaatttgggggttctgggcacagacatctaacctggtattgtaaggcagaggctcccattggaatggtagtggtccgggtcagttgttcatggtgtaagctttgcacagtgtattaacattgggagggtctggcttgaaaatttggccaccctcagcctctgaatgtttattaaaataaatttagtcttctttgc

SEQ ID NO: 50574 - DNA, 699 bp, Homo Sapiens
  misc_feature (558)..(558): n is a, c, g, or t
  misc_feature (661)..(661): n is a, c, g, or t
atacatttgtgttatctcttcagagcctgagggagaagagagtggctttgcccagtggaaaggctggggatttgagaatgatacagggggaaggagtcaagcagaaatgccaggaagaaccaggcaaagacatttggcgccagaagcatccacttaatttctgtgaagagtgcccctggtgtttcatcttggcctgttttgatgagaatgttatcttttgtgtctggataacgcgtcagcttcttaaagtacatataaagatattctgtcacctccccacatgcacacacttttaaaatctatttttattctcttgctaaagttgtaattatgtcaagaattttccagctctaactgccttcttagtacatgtctttctgcctttgaagcatatgagtttgccaaagtcattctcccctaatgacatattgtggacttacattaagtgggccaggcgcggtggctcacacctgtaatcccagcactttgcgaggcccaggcggctggattacctgaggtcaggagttcgagaccagactgatcaacatggcgaaactncatctctactaaagatacagttagccaggagtgctgggtggacgcctgcggtcccagctactttggaggttgaggcaggagaatggctcgcccagtagcaganggtgcagtgagctgggatcatgccattgcacttccgcc

SEQ ID NO: 50575 - DNA, 719 bp, Homo Sapiens
tgtggagggaagaggttacagggggaggagctgatgatagatcccacccagacttaagctgctggtgggtgggtgagctgggaagtaggactgtccagggaagggtggagagatgtagctaggggctggggagggggaggtggaagcgctattgagcatcctccacaccaaggttgatgaaggaagggatcccagcagggtttctgctctggggctggcaggttgcctggtattatgcccaaggccgctctgcctgggggaaagggcagccaggcagaggcccagtgtctggtaggctgctgaatttcctggaaggggtgattggatggaaagaggccagaaaccccagcctgagagactgctgtgcaccccacagtctgactgcacagagccgcctctgttggcaggaggcactgaggctccccttcctgtgtattgagaagcagtgtttgccaatatattttgctttcaattccaagaggagctctgggaaaacctgtggataaaaccaaatgccaaatgttggacgttgtttccttttccttttctctctctgattgttttaattgttctgtggtggttttaatggatttgagaccctggagcggcagctgcctttctgatttccagctgctttttgtgaataatttaaaaagaaaaaaaaaaaacaatctttacattttggagacaaacctgtgtgagttttttattggtacaaa

SEQ ID NO: 50576 - DNA, 554 bp, Homo Sapiens
cagttttttgccttttctactagaaaacaatgtaaagtgatttcacaatgtgaagagaaaaaaaaattgccactatgaccaaacgcacagtctgttctgcagcaacaacgggattcaatcaactcagtcgtgattcagccgtagaaatgcttttcctttatcttgtttgagcttttcctttctttcctgttttgatttgcaaaagaaaatgtcttttttgtgtgaacttgtgttgtactctgtagaaaattatggattttactttaatggtttaaaaaaaggcaaggagagcccttgtcgcttttcttacctaatcacagagtttgtgtagtgaatttaaaaagaaaaaaaaattgttataagtttggagcaagggagtatgtgtttcaaaggaatctccttcctttttttgtgtgtttttccttttgtcccaatggggaacctaaatctgttttaattgcacagacacatggacaaaaagtcattttgtatctgccaagtgtggtaccttcctttgtttatttgctattaaactgtttgagaagaaaaaaaaa

SEQ ID NO: 50577 - DNA, 577 bp, Homo Sapiens
ctcaaactgacagccagcgagactgggtgggaggccctggatctgttctccctgactgcgggaggagcagccactaggactttagcaggaagcccagctggtgatggcccttttgctcctggcagcctgaggcacagctgcctgtattgtcctcatctgttctgactgaaggatggaggtgctgaataaattaggcctcaggcctctaccaccagagagctggagaatgggtccacgtcattcaaggacctgaattttttatgctcaggagcattggaatcctcttcttccagggaggaattagcctgcaaggttaggacttgaagagggaaggtatttaataactgggcgaggatgggtgtggtggctcacacctgtaatcccagcattttgggaggctgaggtggccagatcccaaggtcagaagatcgagaccatcctggctaacatggtgaaaccccatctctactaaaaatacaaaaaaaattagccgggggtggtggcgggtacctgtagtcctagctacttgggaggctgaggcaggagaatggcgtgaacctgggaggtggagcttgca

SEQ ID NO: 50578 - DNA, 583 bp, Homo Sapiens
attgcttccgcgttccggttgcggatggtgagtgtgtcggggggcttggcggcttttctcctcagttttctggagtgctttggaggagaggactatggcagccagggacgccacttcaggcagcctgtcagaggagagcagtgctttggacctgccatcagcgtgtgacataagagattacgtcctgcagggacccagccaagaagccaacagcgaggctttcagttctttggaattccattcttttccttattcttctgatgtggatccagacaccagtaacttaaatatagaacaaaataactcctggaccgctgagaacttctggcttgaccctgctgtgaaaggccagtcagagaaggaagaggatgatggccttcggaaatccctggatagattctatgaaatgtttggccatccacagccaggctctgcaaactcactctctgcatctgtctgcaagtgcctgtctcagaaaatcactcaactaagaggccaggagagccaaaagtatgccctcttgcagcagaatgtaatgaaagacctgtaactggtgccgggtggtgtgcagggtagtaatgga

SEQ ID NO: 50579 - DNA, 898 bp, Homo Sapiens
tgacacagctcctctctggggaccctatctgcttgtctcgtccaggaagcgttagggctgatgggtgactcagcaaggcagtgtcagagctgggactgggcgtaggcctttgtcctcatccccagcactggcctccctgtggaagatgaacatatcccagccacctgtgtacaggggctcactttgtgtgctccttgttgcctgagaagaaaccttggggtgccagggtgggggcagaagcatgggctgggttccggttcatcctcctccaccctgccgtgtgtgtgggcacaagaggacatctaaccacctgctccttggaggaggcccccaggggtggtagaggctggaaggaagccacatcaggaggacgccactccggcccttcacccttgccaagtgagctgctcacagtgtggtcagggctgcgcgtgctggaggccctcctgcctgggccttgtggggcaaatattgggtccccaggctggaaagatggacagaggcccaatgggtgaaggctttgaagagcacacagaagcccctggccccccacgagagctggagagccatgtatatggcttcaaagccacctacggcagggacacactcgtgagcatgtgtggcctgcagttcaggtgatacatttaccagtgttcttgtttgtgtggtgccaggaaattgattttggaaaaagtgaaataacattaaaggtgaatgtgaggcttctacttttatccaaaaggagctatattagctaggctgtttctgatatccaatcattgggtttaacaataaaggcaatttgtttaatcagttaacggaaatttcttgggctatgaaaatgaaaagtcccagggggtatgggcattggccagcaggtgaaacaatttcaaccagg

SEQ ID NO: 50580 - DNA, 805 bp, Homo Sapiens
  misc_feature (627)..(627): n is a, c, g, or t
ggggcttccgcgttccggttgcggatggtgagtgtgtcggggggcttggcggcttttctcctcagttttctggagtgctttggaggagaggactatggcagccagggacgccacttcaggcagcctgtcagaggagagcagtgctttggacctgccatcagcgtgtgacataagagattacgtcctgcagggacccagccaagaagccaacagcgaggctttcagttctttggaattccattcttttccttattcttctgatgtggatccagcagatctctgagaatgcttcattgtcttaggcagaaaaacatcttacctaagcaaagctttcaggaggaacttcaaaggacagcttacctggcacagcaatgacaaggagctgtttcctggatgtctttttgttattgttgctgttaatctcaggtctctttctaatctccctcaaaatgaattcagaagcaggggaatatttggttcaacaaagagagagtggaatttttttttggtttgttcttttaaaacttcagaaaatagcaatgtgggcctgttatgtgtgatgagtaataaaaatagagaccttttaaaacacccaccccagaaataaggacaagcacgaacaaaaanacccttgtcggcccgccttcggccctcaaaaaacctttctaaaacctttcgttttgggggcccggggcccccgtaagggaaagggggaacatgggcccataagcttggttctcctaagggaaaatccctggggcactggaacaaaagggggctcttggagaattcctccccccccaac

SEQ ID NO: 50581 - DNA, 860 bp, Homo Sapiens
  misc_feature (765)..(765): n is a, c, g, or t
tctagcgaggtgacagcgtagaaccagagggatgccaatagtgaaaaggcaatgatgtcaagactgtaaagctaaggctgtttagtgaatagagtattccagtttacctagagtacaagttatgtgtgtaagtaaggccttgtcctaaaaaaaaaaaaaaaaatcagtctagtgaggaaaaaatgtaaataaacaaatgaatgagtacattttgcattctgagttatgcagaaagtgctttgcaacatagaggaaaaagccctaactgttgtggtggttgagagttgattggaaagcctcatggcgggctgagtcttgatggagcaggactttgcccagtggaaataagaagaaagcatatagaagttctccttatcctttggacttgcaatacacacaaaactttctggggctttctaaggaaattttatttcaagattctgctaggcaataactctccttccttaaattgaagggtaaggactctaagttctgctttttcttttctcactgaatttgcttaggtttttttttcgtttttgtttgttttttttttttttcacctttctcactggtattgatcactttctcttccttaataaaggctccattttgcttctctcccaaccctgggactttattaggaaaccactggatgcttgtatttaaaaattttacagaaaagcctccccggttctggtgctttttccccaaaaatcccccttttcggtttttcccaattaaaagccacccacaagccaaaanagaaacaaaatccttctttccacaaccgcggttggggatatacccgggggccctaataaaagggggggcccgcgtgagaatcccccctttcagaa

SEQ ID NO: 50582 - DNA, 267 bp, Homo Sapiens
ctccctgcctcccaggccctctgcgggggaaacaagatcacccagcatccttccccaccccagctgtgtatttatatagatggaaatatactttatattttgtatcatcgtgcctatagccgctgccaccgtgtataaatcctggtgtatgctccttatcctggacatgaatgtattgtacactgacgcgtccccactcctgtacagctgctttgtttctttgcaatgcattgtatggctttataaatgataaagttaaagaaaaaa

SEQ ID NO: 50583 - DNA, 506 bp, Homo Sapiens
aaactacagcaaaaaactgattttttaactaaaattgaatggcgtttatcttaatgaccagttattgaccaaagtgtactcagaagatgttattatgtcccaatctaaggaatcctttaatttggggattaattttacttacacatgccatttcagtttcagttgcctcattctattacatcattcttgtcaagtctaagctttatcatgtctgaattcttttaacactgaatctgtgatgtaaaaatgtatgatgtgccataaattttattcataataaactaagttatagcctattgtaatctgtaaaacatttcttgtaaattacctaatttattttttcatttatgtacagtatcttatgtaaatttgaaaaatgtttgccatggcgcattctgtaaacattcccgtattcttttccttaatgcttatttgcatgaaggtaacttgggttttgcttgtttgtattggataaccattaagccaacttcagtttctctgccttt

SEQ ID NO: 50584 - DNA, 487 bp, Homo Sapiens
  misc_feature (470)..(470): n is a, c, g, or t
cctggcgccatgaccccaggcccagtctgggccgtgactctgggtgagtcgtgtgactcaggaatgggggtagatccatgtcctccactgtcccccattagttctgtccccttcacaatgagaagtgttttctggcaggccctaggtaaagggtcgggggaggggggagccttgtagggaggcctctacacagaagaaagcagcccccatgtcccagccacttctgggtcccagccagcagcacggatgttactgtcctgctccttcccccagccccacgccctaccagagggggcaaagggcacgtcccatcactcactgccctgtctgaaatgtggcagccactgtgggccaggctcagggcagggcaggcgattccagtggggttgggccccctggcgcctgctgcttactgcagtttcatgcaggcctctgctccttgtctttcttacctgtaaaatgggtctcanatgctccgccctgcttg

SEQ ID NO: 50585 - DNA, 846 bp, Homo Sapiens
gattaactttggcatattccagtgtcagctttctttagctggaattgccaaatcatttgttgctcctgctgctctcatggtgccacgtttttttttttcaatgtttagtaatagtataatccatgttgtttgatatcaaaagtagaattacttttaatgtagtttttcttcattattgtcattgcgtgttcttaagttttacccctattagatggtaagaacaattaatgcagttttgcacaaatatttttacattctgatcattcagttctgtcattgtaatctttgttgttagaaacaaatgatgaaaacataggggttctgtaaacttttgtaatgctatgaattctgtttaaattttgggctgtctattttctgctgaaaccatgcaaaattgagcttgtggtggggctgggagggggttatgtattcatgggacctttaatttgtacagaacacagaacttatttctgtcagttatttaatacattgaaaatttagtgaaatgttcaaagagaatagatgtttcccaaaacaacaatctttatgttaaaaatagtcattaaaagatctgttgtatatatggtggatattctttaatttcaaacatttacctctgaaagtgtgtatcttttctttttatcttaccattaatttgacatctaggtggatgggttttcaacatcgtgcctgccgatatgcctacagaatcatctgtacagtgtccaagatggacccccgtgttagccataatttgattatgccttattctctttttgaaacaaaaaggggttcttcggacctaaggatacatggttggaaaaccgtcacgacctttaaggtatg

SEQ ID NO: 50586 - DNA, 635 bp, Homo Sapiens
cttacctggaaaactgtaacaatctccaggttgacctttctgtctccctctaaacacatcacattggctaaaattatcttttgttaataaggattatattacatataaaagtatttaaatattttaatgactcttacccttaggatagggtctgaactccttagcaggcttcatgatatattaaccttgttgacctctttggtctctctcagtacttctcaattcatactttgctcttcagccacagtaagttagttttagttccctgagtatgttatcagctctctggattctgggctttgctcatatttcctctattcaaaatactcttatacttcatgtctttcttgccacaccccccaccccttcccaccagcatatgtgtatgtatcacaattactcatccttcagatcagattcagtttaaatggcatttctttgggaagcatttcctgattctctacctcccaggctgggttgattgcatgtatagcaccttctactgtagtacccttttcatggcatttacttaccatagcctatttgttattgccctcaagctccattagggcaaattgttttttcattgttttaaagtcagcacctaaatctccctggccaaaaaaaaaaaaaaa

SEQ ID NO: 50587 - DNA, 577 bp, Homo Sapiens
aaacaagcagaattttaaaagctgcactatatagctgttttgtattatagtgtatatgatgtttgtgaaaatgccagatttaaaatgatgtatttatttttggtaaaaaataaaaaattctatgctatattgttgatcaagtgtaaatgtgaccttgtacagtttactaaaattactgatatttttcactacattgagacagttactgtgagaataggacacaaacaccagctattgcctgcatctgggaaattgctgaatcgcacagcagtcatgtcataatcagaaaattactgccaaataattgtaaaatttgtaaagtataaagtatataaagtagatactaaataccagacccttcaatattttgttgaagctattgactggacaattaaacattttcaaaaggtgtaaatttatttaaaattgtctcattttggtaaaaatttatgtgaacttttaaagctaaaatattaaaacttaatatgctatgtaaatatatacatatatacatttaatgatgtatttttttaaaacattggcttgcttttgttaaagtgcaagtgttacatatggc

SEQ ID NO: 50588 - DNA, 591 bp, Homo Sapiens
ccccgcgtccgaaacctttttcgcttggggtggtctctctcactctgccccctcctcacgcagctcttggcagtcaacagacgctggcggctggggctgcccatgccatcccagctccaagcttcccactccaggacttgtgtttgggtggggagacctgacctgggcatgttcctgtttcttcatcgttgagcttttctggcccggtctgaagctcaagtgaggagggggaggctgggtttttatcacttttaatgaatttggtgtgatttgttgtagatttttaaatttcccttttggagagaaaaaccaaaaaaactcgccccactggtaaaacatgggtcttggtcccagcccctgctcagcccctcccagtttttagcttgaatgagggtggggtctctgggaccctgcccctcatgccagaagcatcttgtgttgtatatgtgtgcgcgcgtgtgccctgagacccaggacagaagccacggtcctaagagccggttttatcctcgtcattctgcgtgtcctcccccacgccacctgtgtcggggctcagggtctcctgctttatatgagcccccttcctttcct

SEQ ID NO: 50589 - DNA, 485 bp, Homo Sapiens
atctgttctttaatttatttttgcatggcacttgcatctgtgaaaaaaaaaaaaaacacatctgtagtcttggccaaatgatacactttattttgtggaagtagagaatcaagagaattggttctaggaacctgggttcgttcatcattgttgtttatttttttaaaataaataaataaatatatatatagatgctctgcaacaaactctgtgacagtatccttcagtagagaaagtttcttacttgtgagtacactcttttagaacatttacgggtggcagcagctttgctttagagtttagaagataatagaaggaatgactattcatgtccaaagtgaatggttttgtgcagtgaacaacacatggcgaggtactaactgagaaactttttcatgctttatgcctacctcttgtagttgttgcagagcaaatataaattgtaataagatagctaggccttgcagaaacaaacagaaaaactt

SEQ ID NO: 50590 - DNA, 681 bp, Homo Sapiens
ccgggtcctataacaacttcttcaggatgtttgatagagacacgcggagggatgtgaccctggaggcctcgagagagagcagcaaaccgcgcgccagcctcaaaccccggaaggtgtgtacggggggtaagcggaggaaagacgagatcagtgtggacagtctggacttcaacaagaagatcctgcacacagcctggcaccccgtggacaatgtcattgccgtggctgccaccaataacttgtacatattccaggacaaaatcaactagagacgcgaacgtgaggaccaagtcttgtcttgcatagttaagccggacatttttctgtcagagaaaaggcatcattgtccgctccattaagaacagtgacgcacctgctacttcccttcacagacacaggagaaagccgcctccgctggaggcccggtgtggttccgcctcggcgaggcgcgagacaggcgctgctgctcacgtggagacgctctcgaagcagagttgacggacactgctcccaaaaggtcattactcagaataaatgtatttatttcagtccgagccttcctttccaatttatagaccaaaaaattaacatccaagagaaaagttattgtcagataccgctctttctccaactttccctctttctctgccatcacacttgggccttcactgcagcgtggtg

SEQ ID NO: 50591 - DNA, 624 bp, Homo Sapiens
  misc_feature (623)..(623): n is a, c, g, or t
ggagataaagacagcatttaaaactgtgttgtcagataagagaacacatccaaaatgcatgattcttacaaactaaaggaagttaatgtgcaaaaatctcaaccaaaactactatttttagtatacttgtttacgtaaatgctgattggaaatatttaaatgactatagatctgattctttcttttcctttggaaactgggattaatgtatgctctagatccatttattagaaatgcaaaaatactacaattttttgatggatgaaaatactcctgtaacacaaacagagaactggaggaactgaagaataactcactcatatagctctgcctcattctgtgtgtgtgtgcatgtgtgtgttagcagaggtattttactcagaaaataggtttcaaagaacattaatgactttcttttcccttttatgtctgcttaatcagtgttaaactgctatgggaaaagttttatagaactatataacctgaatgttggtctctttgtacacatcttttctatgactgcaaatcttcactttatgtatcatttttactgtcatattatttttgttcaataaaaactttgtgatgcaaaaaaaaaaaaaaaaaaaaaaaacatgtcggcnc

SEQ ID NO: 50592 - DNA, 501 bp, Homo Sapiens
gtgcccccccacacaaatgggcctcaggatctcaggccttccacgtcaggggtgaccttccggagccccctggtgacttccagggctcgctcagttagcatttcagtgccatctaccccacgacgaggtggggccacccagaaaccaaagcccccttggaaatgatactctttcatcagggttgcctatggggccacggcgacaggtatggccccttgccagggtaggaggacattcatcacccagggaaccccaggtattaaagaagcccctgtgggggcagacagacatagcaggggtgggcagtgcctccctttatcctgacaatctctagtcgattcttgcctttttctcccgattgcggatttgggggccacctctaagatgcctctctccagccctgtctcaaccatactccaaattagtgccaacccaggggcctggcacctcccacatcatccattgtcttgctgccaagtgcgaataaacggcgtgattgcc

SEQ ID NO: 50593 - DNA, 552 bp, Homo Sapiens
ccgatttactgtgaaatgtctaactttgccagtgcttcagcaagtttttttggggggtgatggggaggggtagtattggttttagaggtttcaaatctgtgaactttggagaggggacagttgttggctctggtatttactagttttgtagtaacgttttgctagcctgactgacttttcttactggtttttatgcccacggtccgaggggactgttcttcttgttgggggtgtctgcggaatatcgtctcgtcttgtttgtataggcagtcaatgtgtgtgacatgtgtgtcctttcagtccggaagcccactgtgtgacaatggcgtggggtgtggctgggaggtggggtgctgaagcttgaagagcatttctttgctgattcataacagtatttcccatcttttgcctgcaggcagggaaagtgtacagtatttattttgtttctgttttactttaaatttgtaagtctttaagtagcttacattgattattataggggaggacaagtgacttgtttaaagttgtatttagtattctttccaatttctg

SEQ ID NO: 50594 - DNA, 742 bp, Homo Sapiens
  misc_feature (726)..(726): n is a, c, g, or t
aaaaaaaaaccaacaagctacatgttagaaagcaagcctctctttcatccttccattcaattatggaagaagaaagagatgacatggaaaggagccacaggaggggagccccagctccagctctgctcctcctgctgtgtggcctctgcaaagtcactctccctctctggctttagtgcccaccacagtacaagaaggcgtggcttccaaccctgaactatcagaggaaagaaccagggcaaaggcaggcagcatgtgcaccaagctgttggactaccatactcactgtaactgagtaattacaagcggatttgcccatgaaatgaatgagccattcttaaacctcacatccctgtaagactcagaaactgcccatgtcagtgaatgccaaacaattagaagcaaataaagtgtctctatttttttcccatctcactagccattaacttccccacagtggggcaaggggccatgtggggtttcatggattgactctaccatctgcagacttcgctgaagagtcaaagttgaaacctggaagccaagacacagatacagttttttcttgtagaaagctttggccaaaatttcaaggatatttccccctacttgagactagggaagtaatatttaccaagcacctacgacgtgcccagctctgtgatagctcctttacaaactcatttaatcttcatctcatctttcaaggctaacattatcagatcntaaaaaaaaaaaaaaa

SEQ ID NO: 50595 - DNA, 624 bp, Homo Sapiens
atgcagcagtcagaagcccagatcaatacagcaaagcggctcctggagaaggggaaggaggcagtggtccaagagcccgagaggagctggttccagaccaaagaagagaggaagaaggagaaaattgccaaagctctgcaggaatttgacttggccttaagaggaaagaagaaaaggaagaagtttatgaaggatgccaaaaaaaagggggagatgacagcagaggaaaggtctcagtttgaaatcctcaaggcgcagatgtttgctgaacggctagcgaagaggaatcgcagagccaagcgggcccgagcaatgcccgaggaggagccagtgagaggtcctgccaagaagcaaaagcaggggaagaaatctgtatttgatgaagaactcaccaacacaagcaagaaggccctgaaacagtatcgagctggcccttcctttgaagaaaggaaacagttgggcttgccccaccagagacgaggaggaaactttaaatctaaatccagatacaagaggaggaagtagctgtcgtggcctgaagaaattcatgggggcagcccttaaatcccttccctgtgggaagtcatcctggctggtctgtcttttctccatttgtttaaaaaa

SEQ ID NO: 50596 - DNA, 652 bp, Homo Sapiens
ggaaaaaaattgttaatatagaatgaaaaattatctttacaggactgaattttaagcccatctaaactcttctgccttagctatcactaatgatattcctctctggattttgtggtgagaagggcactatgagttccttaatttaaggaaaaaatgtaaacttaatcaatgtaatcaatgccatgcaaaattcattgcaagtcaagggggatgggagagatgcaatgccatacggtgatacggacctttaagaaagtacaatctttcctgaaattcaaacactatcatacttcaaaaggtcaaaacccattccggaatttggcttttttaagactttttctctcctgctcactggcagctgtgtgtcttaacagcattctttcaagtcctggtgtactctgctgacagcactttaaaactttaacagcacaatgataacttgtactacatacttgatctgaattactacagaaaaataattatgttgcttgcttaatgattcccaggaaacttcgttgtaggcatatattttataagagtattatacagtgttaactatgcaagtaagttctaaaattacacaattatctgtgtaatgttttagtccaattactctgatttattcaactctgttctaaagttatctggaatt

SEQ ID NO: 50597 - DNA, 759 bp, Homo Sapiens
  misc_feature (10)..(10): n is a, c, g, or t
  misc_feature (698)..(698): n is a, c, g, or t
  misc_feature (725)..(725): n is a, c, g, or t
  misc_feature (729)..(729): n is a, c, g, or t
  misc_feature (752)..(752): n is a, c, g, or t
  misc_feature (759)..(759): n is a, c, g, or t
cctcacaagnctaccctgtgtatttaatttggtgactctttggttgaaatctgcctgaaactataaattctagtttttgaaccaataaatacggtggttaaaattttaaaaagacatttcaatacttaccactattctcacattgggagcagtgtataagtgattcagcctttcctttcttgttggactccttacccttcagacaaattccacatatagcatttggaatgacctttggctggaagggtagaagagggctataaattcatgccagaagagcttactatgggtttaaaaggaattctgttactttattgccctatttttacttttggtaacttgctaatgaggaccattttgaaagacaaaacttgacaggagtctgcctacaatgtaagactgcctactgaagaaagcattaatttcatcataaaatttggtaaacagcatgatctcgtaagattaaatgtagcattctatactccctacatgcacagtaagatttgtttaatgaatggaaggaaagactaaatacaatgtcaaatgtcactattaattggacaagaaaatccaagtagcaaatgaccattatgtgtaagacttactctaaaaagaccattttaaatagctcatatattaattttgtttaaaacctgctattttccaaaactgcaaaactagagctataaaatctaagntaaaaaatcagcttatcctcattggtntagnggtatttaaaaaaaaaatcagtnttaaacn

SEQ ID NO: 50598 - DNA, 707 bp, Homo Sapiens
tatgcaccggagtaaccaacttattttcattgccaaaaatgtgttatgaaatggttcctattttatttataaagatttgtgtgaccctagttataatgacttaaaattatggtcccaaacagcaattatttttgcaccaaactaaaaatatagtttaaaatggaagagtctaggagcaacccaagaaaagatcacctacttcatcatctttggtcaaaagcaaaccaaaaaacttaacagctatcacttaagtttgcttcctagcaattatttagcttccagtctagattacaggatatataaaactttctttctttctttcttaactatgacactggcaccaatgagagtcctgtgactgactttcacatttccaccattactcaattactggtaccataccacctctaatcccataaatcaaactgcaattcaacaataaagggcgtacagagatgactttgtcctgaaggaaaatgaatatccttgtaccctctatatagctaacttccaaatgtaagagaactatggggtaaccttttgtttctattcctatcaagatgagcctttaagagagggacttttattaagctcttgaccaagaagaatacacttgattcagagtttctgatgctcttactcagaactatatgtattgtctcaatattaaataaagtcaaatgtttccatacaaaaaaaaaaaaaaa

SEQ ID NO: 50599 - DNA, 828 bp, Homo Sapiens
  misc_feature (800)..(800): n is a, c, g, or t
aattaaacagaaggttaccattgtcagccagttggctatactgtggttagttctttcagaaattgtaaatatcttgtagcatattctgaaataatagagtaagttcttctcagagatgttaatatcatgtttttcatgttctaattagaatactttattacttacaaactcagaaatacgaacagaaatacagcagacgaacatatttattggtactgaaaagagacgtagtaaattaaatagaagaaatatatttataaagcttagtgaaacacaaaattagaatgttcatgtcaggcacaagggtttggattttgtgcaagctaatttggccacatttggcctggtgacagaactgttcataaggaagtaatatatagataaggtaggtagatatcagttgaatgccttatattgtatacattcctttcaaataaagaccttgagaaaacagcagagccaagtgaagatcacctaaagaactttgtggctaatttatacttcatgtagtagcagtgggtactgggcagggtctctttcccactctgatgatttgtgctcttatttttcctagatttacctcatctagggcatattcttttccctcttcctctttacctttcctggtcctgatccctctgtactcagttcccctaaattattggactacaaactaatatactagaaaagcatacacttattttattttgatgcagaaatgctatctatcagtatatatacataagaatgtatattacagtatatctatatatacttaacactggtactttcagtattcnccagttagcgtactaactctcctgtggg

SEQ ID NO: 50600 - DNA, 655 bp, Homo Sapiens
  misc_feature (632)..(632): n is a, c, g, or t
  misc_feature (635)..(635): n is a, c, g, or t
  misc_feature (642)..(642): n is a, c, g, or t
  misc_feature (653)..(654): n is a, c, g, or t
atccctcttccttctggctccgggggctgctgggggttgtcggggccgccgtggccgcagtcctcagcttctcactctacagggtcctggtgaagagccagtgaggcccctggtacccaagccccctcccctgacctgggtgtgcctcgctgctggggctctgcaggggcagcacagctggggtgcaggccaggctgccactccgggaacgcctttgcgccgggactttttgtttctgaaggcagtcgatctgcagcggggccttatgctgccatgcactgccctggctcctgccggacccccagggtgggccgtggcaggtggctgagcaggagctcccaagtgccggccaccgctgtcagggattgcccacccctgggcatcatgtgtgtggggccggggagcacaggtgtgggagctggtgaccccagacccagaattctcagggctctacccccctttcctggtcctaggtggccagtgggtatgaggagggctggaaggcagagctttgggccaaaagcaggcgttggggggtcccccctcaagtttggagccgtttccgtggttgtagcagaggaccggaggttgggttcctgattaaacttcactgtgtgttttctatctcgganaanaaaaaanaaaaaaaaaanng

SEQ ID NO: 50601 - DNA, 593 bp, Homo Sapiens
aaaggaagtcatatgaattttaaaacagggaatgttcaaaatggtccaaatcggttattattaaaataaatcctgaatacaattaaagacaattttatatatatatatatatatatatatatatatatatatatatggaattttaagaaaattaaattctctttcaaattagttttctaccaaatccaggatagataaaagcagagctggaatgattttgaaatctaaacttattttggctttgaataactttcaattcgattctcctaatacagaacatctgtttttggttgtggttatacgaagctgttatttcacagatagagggaaatggcagagaactgatcagaatccctttcgtggggtattttttttagaaaggaaaataaactaaggacaacattacattttccccaacccctcaatgtgtagactgagatcctgaatatcttgtcaaccattccagtttaacactttagtgttaggataattctaatcatttttttaattaaaagagaacatataaaagtatccagagttcttccagtttcatacagaactccaaataaattttcacagaatgaaaaatattt

SEQ ID NO: 50602 - DNA, 677 bp, Homo Sapiens
  misc_feature (4)..(4): n is a, c, g, or t
  misc_feature (13)..(13): n is a, c, g, or t
  misc_feature (16)..(16): n is a, c, g, or t
  misc_feature (21)..(21): n is a, c, g, or t
attnggccctcgnggnccagnaattcggaacgaggcaccattttttttccttgctgccctgtgtgtgaacaaatgtgactccatatttattacacagcaaggactgctgtgtgtgggtgtgttcctcagaccatctctactctttttggttaggacactaggttcttcccagcatatgagtgagaatattggtggtattttgggctcctctactgcacaagggccagtccccaagtctactctgattgattgtcatgggcacccacacagatcaggacaccctttgaatttttgtttgacatgaactatttaggtgttccaaaaccttgggatctcaatgtgcaaactccttggactccagacccctgtctggttggcactcccagcagtgtgtggtttcatcaggaaatccttgcagcaggggtttagatggttccttcaggaggtgggaagcctccatagcattgaaggccagcctgcatctcgcggtgtgtgtccacttctcccctcactttcccctcacccatccctttaaagtgattggctgtgaggagcacagagggtggcaattccatctgttatgggctcagaagacatagccgccatgttgatttcacattaaactgtgtaaaatgtggaaaagactcagcatgttggtcaaacaataaactgtccta

SEQ ID NO: 50603 - DNA, 757 bp, Homo Sapiens
ttgaatcctctgtaaaccaaggcattaatcttaataaaccaggatccatttaggtaccacttgatataaaaaggatatccataatgaatattttatactgcatcctttacattagccactaaatacgttattgcttgatgaagacctttcacagaatcctatggattgcagcatttcacttggctacttcatacccatgccttaaagaggggcagtttctcaaaagcagaaacatgccgccagttctcaagttttcctcctaactccatttgaatgtaagggcagctggcccccaatgtggggaggtccgaacattttctgaattcccattttcttgttcgcggctaaatgacagtttctgtcattacttagattccgatctttcccaaaggtgttgatttacaaagaggccagctaatagcagaaatcatgaccctgaaagagagatgaaattcaagctgtgagccaggcaggagctcagtatggcaaaggttcttgagaatcagccatttggtacaaaaaagatttttaaagcttttatgttataccatggagccatagaaaggctatggattgtttaagaactattttaaagtgttccaaaacccaaaaaaaaaaaaaaaaaaaaaaactcgagggggggccccggtacccaattcgccctatagggagtccgtttaccaaatcaattggcccgtgtttttacaacgttcggacctgggaaaaaccctggcggtacccaaacttaaatcgcctt

SEQ ID NO: 50604 - DNA, 641 bp, Homo Sapiens
agcgggaaatttcccactaaagtcagtccattttcaagttttggtcttcagagacaaaagaacgtcccagccacctgattttgatggtgaggtaactctaagttgaattcaggctagtgttgcagtatagctttggcatgttcatgagtgagcacccagaatgtgttgaaccaacccccacccctaactactgactatgactgcagtgggtttttatggggaaaaaaaagtgtgaagagcaaaaagaaaggaacagagattttttatcacctttattgtaagacagtccatttatgaattgagtataaacacatacaaagtaacaagagattcctaagaaacgcaaatccttgagtttcacgcacttcatgttcaaccatttgctgtaatccagaggcagcctgtgaatcattctcatgccctgtttttttttttttttccctataaggtccggggtttaaaagccatctttcccacttttcctggtaaataggggataatctatttaaaaattttaattttaagggctgttttaccattgtagatggatcataaggtgtcctggcggaatctcaatcatttttaacaagccaataaagttggatatttcaaaaaaacaaaaaaaacttctccagggtgtg

SEQ ID NO: 50605 - DNA, 515 bp, Homo Sapiens
  misc_feature (404)..(404): n is a, c, g, or t
actgaccgtcgatctacaataaatattagcattgaaacttccttttaattgacgagtagtaatatggatgtcttcattagctgccatgtcatttctattttactttcctaaatgtgaaagaaaagatgaaagaccatttcttggacatatcaaatgatttttaaggaatttctggtgattatttaaattttctagttaagctgtctaggtcagaattcatcattcaaaaatgctgctcaaacttgaagtgggtaggaatttctggggattttgattaagatgcagattctgactcattaaatctgagatgggcaagagtctgcatttctgacaagcacataggtgatgccagtgttcctgactacacattcagtagcagagttacagattatcccacattttgngggattttggagaatgatcttagtagaaaagataacaacagatgtttgcagtgatttgcctggatgtagttggtctgagatttaaaactatgataaatgaagccacgtcgg

SEQ ID NO: 50606 - DNA, 542 bp, Homo Sapiens
gccttctttccagtccatttccaggagttcaatcctgccctgtcaccacagagatcacccccagggcccccgggggctggccctgaccccccctcccctcctggtgctgacccctcccggggggctcctataggggggagatttgaccggcaggcttctgcggagggctgcttctacaacgctgactacctggcggcccgagcccggctggcaggtgaactggcaggccaggaagaggaggaagccctggaggggctggaggtgatggatgttttcctccggttctcagggctccacctctttcgggccgtagagccagggctggtgcagaagttctccctgcgagactgcagcccacggctcagtgaagaactctaccaccgctgccgcctcagcaacctggaggggctagggggccgtgcccagctggctatggctctctttgagcaggagcaggccaatagcacttagcccgcctgggggccctaacctcattacctttcctttgtctgcctcagccccaggaagggcaaggcaagatg

SEQ ID NO: 50607 - DNA, 776 bp, Homo Sapiens
ggcagattctgattgggagcaaccgaggcgggctctgaacctggccggtccagcttcgcgtcctctgctggtgtctctccttctctgaccgcggccgcagcccctgcactcgccttcctcactgctgggcagccttcccaccaccgcagcagcccctgaggccaggaggcagtgcagggcattctggacccggagggccagagaaacaggatttctggggtttggacttggggtgagtttgtaactgttgctgccacaccaccaggagcaccggctgcccctctgggtggcactaccaggtgccccacggtacccttgtcacactgttcacacctgcccggctgcccactctgggaccccgaggtaggagggtgctccctgagaccaaagcacaaaacagcatgcagggagctcctgcaagtgcccgtggtctcgtgccacaccaaggaagggccagcgggtggcctgtggccggaatgctcaacaactaggtgcctccggccggggcagtacccagcactgtgcactattttcagggccactcagggtggcgctgtggcccgggggggggccctgagccccagcccccagcctcctccctcagcctgggctacggcccacctcctggtgctggtgttttcatctggggagggtgctcgcgccgctcccgctgcaggcactgtccgcgatgagtgcgggtaggagccgtgaggttgcttctctgctgtgacaaacgaccctgttctgtcccgtgcacccaacaccaagaaaaaaac

SEQ ID NO: 50608 - DNA, 590 bp, Homo Sapiens
caatgattcagtaatggtaattttactattaaagaaagtgaaaggtttagtttgttagcatggctcagcatgtagctgtcaggtgtttttcacctaagggcaaaagaaaatgatagtaataattgcagatagtggtattgtattgtatttttgcacgtgtggtaagcataggcttgaagaggtgggtaggcaggtacatgtacttcctaaattggagataattatctttctgtaagttcgttatgcttgactgtttccatgttctcccaataatgattttatagttacttatcactttactcatggagaattaaaacgtaatgtttttcaactgtatctttctttaactggataatactgctatatgatatgcttactacagactgcattaattcacgaaacgaattctgttatgctgtaattgaactctcctcaccacaacttattaaaaaggcaccaatagtttcccattaagggtcagtgtggttattattaaacgtttctggtttagttccccaagctttgacattctttaactagacaaatcgtatatgattgacaagctttaggtaatttcttaatagtcgcta

SEQ ID NO: 50609 - DNA, 838 bp, Homo Sapiens
  misc_feature (3)..(3): n is a, c, g, or t
  misc_feature (791)..(791): n is a, c, g, or t
ctnctatagggaatttggccctcgaggccagaattcggcacgagcggcacgaggaataattaaaatggaaggccacagaaaaggggaaaagaggaaataatacagtaatcgttaatccagcaaaaagaaatgaaaagggaaaaccacatagaagggtaatcccggaaatgcttcatctggtggactgtgggagcagaggcattgccaggacttgggaaacagtcactgtgaaatgcgctgcgtatctcattcactcacttcagctaatgattccgacttggcagacgctaaactcatggaggttcggtttctcctgatacaaaccaaatggctacctggaagaatttctttcaagcaacagttatttttcttatcttcagggttaaaatgtataaaagttatgtgtaattaatctataatgccataaatgataatgcaaaacctaaataatatggtggccggaggggctgccttatatttgaaacatgctttctatcatgcattgactgtatgcattttgttaatgcacattctgtttgtttaaggtgtgtaagatacacacccttctagatgaaactatatgtgccacactttgcactactcataatgataacctcaagactatcagaagaaatatttaaatttccattttatgaagaaaggaaccaaattattatgctttttaaaacaaattaccagtttacataattaatcagggtgcattttaagttctaacttcgtttattgtataatgcatcatttgaaaataccaaggaggaaataccctttgnttttaatgatgcaagagtggacgtaatgctagttggcagtattttat

SEQ ID NO: 50610 - DNA, 611 bp, Homo Sapiens
ttggatttgtctatgtttattcacacagatatttttgttgtagtttcctttaaaggaataagcagctaataaagatgggttctatttatagtagtgaataaatatatttaaacatttaaaatttggtttctaaatttctatgtcttattctaatcactgatttgtaatgttatttattgtttcttttttcctacttaggtgaaatctattcttgaaagaagtaaagaggagctgtcccgaacagtgaagtgtcgtaatgcggccctgaaagagagtcagaagttgaaagaagacctcgaggctgtggaggacagggaaaacaagaaggtgggaaactttcagcgacaattggcagaagctaaagaagacaactgcaaagtcacaatcatgttggagaatgtgctggcttctcacagtaagatgcaaggtgctctggagaaagtacaaatagagcttgggcggagggattcagagattgcaggcctcaagaaagaaaggtacctgtggttttttttccctgtcattggtattgctggattgtactaaggagcagtgtcaagtcaataaatgaagtcactttatgtagcttcctttacaaaaaaaaaaaaaaa

SEQ ID NO: 50611 - DNA, 628 bp, Homo Sapiens
cgctaaagcaaaaacgatttccaccagcaacagaaaacttcctttatcatctagcagcagccgaacaaatgctgaaaatctgactgtgtgacagaacgtatcactgatgactgatagaaagccctctttcactctgattacccactcactacatgaagtcctgaaaataacagagaaactgttatatctttttaatgatttatttgcaagtattgagatttgacctgaaaaacaatgaaacacatgaacacacttccgattttctcctcgctgattagcttcctgcctgctgtcagtgctggacgaagtgctataactactttatgtaacattacagaacagctagaggtcctggggtaagagaaaaaaagcacatcacaacaaatgtgaaagccttcattattacacgttccagtttgtctcgctgtgtaggcataagctaatggtttattttcagaaagctgcctgaaacgttgctttgtattcttctaggaagaactttaattcctcctgaggaactctactttctgagccaaactgctaattttctgcggaactgtctagaagatcattcaagagaccctgcagttgcactttctcgtaaaagttaaaaaaaaaaaaaaaaaaa

SEQ ID NO: 50612 - DNA, 476 bp, Homo Sapiens
agcataccaaaatccaaggatgctcaagtcccttatataaaatggtatagcatttgcatataacctacacacatcctcccatatacttttaatcacctctggattacctataatacctaatataatgtaaatgctatgtaaatagttatactgcattggttttttaatttatattttttgttattttttaaaatatatttttaatccatggttggttaaatctgtagatatagagggccaactgtactgttagacacaagggtctcgaggcttgcagatagagactgaataaccctctccatgatgatcccttagagttcccccactgtgcctttttctttacatgtgcatgcaaacatgtgtctccacatacattttttttaacaaaaattgaattatgttgatatatgtcctgtaatttgtgttttaaacttaatatatcttaggcattttccctgtgtgtgtgtataatgcag

SEQ ID NO: 50613 - DNA, 820 bp, Homo Sapiens
ggaaaacagcaggagagggtggctcaggacttagggacagggtatagcttagatggtggaaagcaaaggagagcaggaagttgtaaatcactggctaatgagaaaaggagacagctaactctaggatgaagctgtgactaggctggagttgcttccttgaagatgggactccttgggtatcaagacctatgccacatcacactggggctagggaagtaggtgatgccagccctcaagtctgtcttcagccagggacttgagaagttatattgggcagtggctccaatctgtggaccagtatttcagctttccctgaagatcaggcagggtgccattcattgtctttctctcctagccccctcaggaaagaaggactatatttgtactgtaccctaggggttctggaagggaaaacatggaatcaggattctatagactgataggccctatccacaagggccatgactgggaaaaggtatgggagcagaaggagaattgggattttagggtgcagctacgctcaccctaaacttttggtggcctggggcatgtcttgaggcccagactgttaagcaggctctgctggcctgtttactcgtcaccacctctgcacctgctgtcttgagactccatccagccccaggcacgccacctgctcctgagcctccactatctccctgtgacgggtgaacttcgtgtactgtgtctcgggtccatatatgaattgtgagcagggttcatctattttaaacacagatgtttacaaaataaagatttatttcaaaccaaaaaaaaaaaaaaaaaactcgagggcatctat

SEQ ID NO: 50614 - DNA, 651 bp, Homo Sapiens
gctgaaattagtttttttttttaattctccaatttaaaacttttaattaaaaagtaaattttaatgtcgaaaatgcaaacttggggagggcagaaagatcacacacaaggctgtcacttcatacttgcaggattgcacagcagccgggcagaggcgctcctcacttcccagatggggcggcgggcagcagagacgcacctcacttcctagacagtgcggcagccaggcacaggcacacctcacttcccagacagttgggcggccaggcaagcgctcctcacttcccagatggggcggctcccgggaagcggggctcctcacttcccagacagggtggccaggcagaggtgctcctcacttcccagaacaattctttatgaatttgataaaggactgaagtgcaactgaaagctgctagtgatgatctggtaatatacaatttgtccagtagccagtttgtttttattgtgttttctaaccataagagatcattaaaggcaaagcctgtatgacgctgtacacacacaaaaaaatggtcaccgcaggccatactaccaatgaaatggtaggtaaacaaatcttctggtcaagagaaaaaaaaaagaaatagcactctgcatgctttgctctacaaaatgaatttccctagaa

SEQ ID NO: 50615 - DNA, 689 bp, Homo Sapiens
gagttcatgtcaaattgcaatcaggctatgaagaaatcgggagtgcacttttgactgtagatgttcgaagacacatttgtaaattttcaagcagcaatagagaaaaaaattcatgcatctcaacaaaggtggcagcagttgaaggaagagattgagctacttcaggacttaaaacaaaccttgtgctcttttcaagaaaatagagatcttatgtcaagttctacatcaatatcatccctgtcttattagggattaccgtttcctaagccaagagtcatgtcaaattgcaatcaggctcaaaaccagagaccaggctgtgaaatccacacatctttagaactagtcgtctcctcttggcctcagcagctcttccctgttcttactggttgacattttgatcactctttgcacactcttgtgtttttgctcactgtcacattcccagcacctagtatgctcagtaaatgttgtggaataagtgcataaaatgttcttaacctttgattctacttacagcccatgatagcctcttagatataataaatttggattatactactttaaaaaaaaacaatcggaacacaagtcagtaattagtagacacagcagatcgtaccaacggccggctaaagggcccgacactaaaataccatcgaccacaccacgagccaaacacacacaacgggcag

SEQ ID NO: 50616 - DNA, 929 bp, Homo Sapiens
ggtgcagagctggcctggccccccgaggaacacgcccgggccaccgtggagcgggatctccgcattggccggcgcttccgcgaacagcccctgctctttgagctgttaaagctggtagcagctgcacccccagccctgtgctactgttccgtgctgcttcgggggctgctggcctgcctcttgggccattgggaagcctctcgccaccctgacacgacccactccccctggcacctggaggcatcctgcaccttagtggctgtcatggctgagggaagcctcctgcctccggccctgggtaatatgcatgaagtatttagccaactggcacctttcgaggtgcgtctgctgctgctcagtgtctggggttttctccgggagcatgggcccttgcctcagaagttcatcttccaatcagagcggggtcgcttcattcgggacttctccagggagggtggaggtgagggtggaccccatctggctgtgctgcacagtgtcctccaccgcaacatcgaccgcctaggtcttttctctggccgtttccaggcaccttcaccgtccactctccttcgacaggggacgtagccttttcttgctctggaagcccaggaggttgagcagtgagagagggaagggactaacgtgctccggaagggtggaggtttctcttctaagtccttggtctagagagcgctgtcacttttttctctcccactattgtgggctacataaaatttgccaactgaacaacaaattacagcaaaaaaaaaaaaagtggaggacatctatgtcgcagacggggaacaaaagggtcattgacaggccactgcgccatacgatgttccggaaccacattttttgtgtccaaggggtgactctcccggcccccaattgtgaccgcaataattcaaaaaccaggtaccgctacg

SEQ ID NO: 50617 - DNA, 982 bp, Homo Sapiens
cccacgcgtccgctcaccgactctccacttgcccaaactgccaaaagctggtgattctgggacaggccttcactttggagccacgggatggggtgggggagccccatgggcctgggaaggagggtgctgtggagggggctgcagggctgaccagcaggcagcctcatctggtcgggggcgggggcggcaggagcagaagcggggtctccgtccttgggactgtcctggttggccacgggccctgaggatgcacggtgcctggggctcctgtgccggtgggcggggggcatgctggcctctgagcgatcaggcgaggccagcgagggtgtgcttgcaaattcaagcaataagaggggggttcctgggggcttccagcccaggctagaagcccccatggcttctggcagctggacatcagccccaggtattggggtgattttggtcatgacagtgtgcctgtcccactgttacacgcatgaatgggggttatggggtgggggtggggactcagggctggaccgacgtcctagtggacctgatgtgaaattcctgtcaaacaaacaccacttttcaatggtttggtaggagtatttcttgtattgaaagtttctaattttgctttttagaaaaatactaaaaataaaggttcaagctggcaaaaaaagatagaatgaagaaaaaaaagaaagggggggggcgcggctagagagatacacacagcagagggcgccaaaaaatcgacgcgcacagaaggttttgggacaagggggggcccccaaaagggaggacggacaatatacacagtaggacgggcgccgggcgttaaaagacggtcggagcggggaacaccggcagcgggcgactgtgggagagacccttactctgtgggtggcacacattgtggacacacccacgagaattcagccagggacaaagactacggtgatggcaacccgcaatctgtgcagaatggagggcatag

SEQ ID NO: 50618 - DNA, 659 bp, Homo Sapiens
tgtactttgacgtggagccgttcgtcttttacatcctgactgaggtggaccggcagggggcccacattgttggctacttctccaaggagaaggagtccccggatggaaacaatgtggcctgcatcctgaccttgcccccctaccaacgccgcggctacgggaagttcctcatcgctttcagttatgagctctccaagctggagagcacagtcggctccccggagaagccgctgtctgacctgggcaagctcagctaccgcagctactggtcctgggtgctgctggagatcctgcgggacttccggggcacactgtccatcaaggacctcagccagatgaccagtatcacccaaaatgacatcatcagtaccctgcaatccctcaatatggtcaagtactggaagggccagcacgtgatctgtgtcacacccaagctggtggaggagcacctcaaaagtgcccagtataagaaaccacccatcacagtggactccgtctgcctcaagtgggcaccccccaagcacaagcaagtcaagctctccaagaagtgagcagcctggcccctgctgtcggacctgagcctcctggctcccagcctgtaaatatgtatagacctgttttgtcatttttttaataaagtcagttctggtggccctgga

SEQ ID NO: 50619 - DNA, 799 bp, Homo Sapiens
agttttagttctgtgtaacacaagcactcactgaaattccagtttctaggattagtgtaggagcctaacgtgcttctactgttttaatgggttaatcctggattacttaacaatttatgtcaattgcactggtttaatttgttgctaaagaaataatgccctgggtttagtaacaaatacagctcaactattcttgaatatattttgaaaaaaaaatgtatgtaacttaccttttgtaaacgttccatttcttttttccctcatttttgactcttaaaggtgcaatttattactgaattgggatttctggcagcacagaactgctttttattttggggtctgtgagtttcttaggtattagcaatcttgcttataaaataagaacaccttttaattaatgagtgggtcattcctggtgcaattgtgatttttctttagccagaatgaatggcaaactctatttagagcaaagtaagtattagaaaaccctaggaactcttaatcaacgtttattacactttcattaaggcaaactacgtgaaagagccttggggaagttggcccatatcttactaagttgatcagatttctcgttgggctggaaatgtttcgctgttgtatattttaaagtaaattgcacctttgtaacatattgtattgacgaatgatcactaagattagctatatctatacagtcattagtttgacaagaaatagaatcctgtcagatgccaaagagtgggaatttttatgtttaatgattaaacaccattatttattgacaaaaaaaaaaaaaaaa

SEQ ID NO: 50620 - DNA, 499 bp, Homo Sapiens; identical to SEQ ID NO: 2992

SEQ ID NO: 50621 - DNA, 943 bp, Homo Sapiens
aagcaaacagaggtcctagtgacagctgaaaaattgtcttcaaatttacagcaccatttcagtttgtcatctgtttattcacattactttcctgacactggaattccagaagtgaccacctgtcattcccgaagtgccataactgtggattatattttctactctgcagaaaaggaagatgttgctgggcacccaggagctgaagttgctttggttggtggcttgaaacttctagctagactgtcacttcttacagaacaagacttatggactgttaatggacttccaaacgaaaataactcttcagatcatctgcctttattggcaaagttcagacttgagctctgactctctttgatcacatactaattttctttccaatttgtattgtttttcaaagaatgtaaagttcttaagtgtatgcatgtgtttatttttgcactgtggagattctgaagcggttatgttagatgctttgaaactccatatcagaagaaataactttataacaatttttttttaataatgaaaaatattttcgtgacaagtgagctctaaattctctttattgtcaaaagagatgtcaaggttttatattctaaatcctagtaaaattgaccagggattttaatataattgcatcttccctctgtctgttagttaacacatttccttcataatttggcagctcctgggcgggatccacaggctcttgaagttctggcacttaccagtgttctttcagaaggtgacttcattaggaagaccctctatgagtgctaattctttttctggaagcctgggtttccaagttccaccgcagttattgttgagggtggacactctaatgtgaagtattcttcaaaaaaaagctttctccaatatgcctacagagtgggcatggggatcacagggacaccaggagaaagaatgagaatgtcac

SEQ ID NO: 50622 - DNA, 574 bp, Homo Sapiens
ccggggacaaaagccttttacctttaattttcctggagaattatataaaggttttcttagaacaattttgccctgattactgaagcgtcaaataaagctggagtgaaaattttgttttgaaaaggtgctcaagctctgacatttttggttttcatagtcgtgaagtatttatcatttgcatgactaatggcacaggaaaaacctattcataagttttacaatcaagtatagaggggtcttcagctaacttagttatacataaatgctgaaaagattatcttgagctgggccttgggagaagaatttggccttcagaactgcaatatcactgagcctgcgatctatacaccaccccacattttgttggtttcacagtcttgtgcaagtaacctctggtcttacgtgtgtaactgagagaagagtgtgtgtttgtgtgtgcatgtgtgtttattgttcctaagaatttggcacaagtcagagataattgcctatactaagaatctatactgcagaatatagtgtatcaaaaacttttttcttttaaattattaaagtgtcttttatacttttatga

SEQ ID NO: 50623 - DNA, 475 bp, Homo Sapiens
ccagggattccaagtgctcgattctctggagaaccacaaatggagtgtgttatacctagactgtacttagatgttctgagatacggcactcggagtgctccccacaccctctacagctgagaacagggactccttcccacttgaccagcattctttggtttgggtgggatgagctctagagcccttgggcactgcaagggaaaactgtacatcacactggaggaagaattgaagcagacgtaaagggttaaatgaaatgttcattcatgactagagtgtagccattatggtacatgggtgctcccatcagactgctggtcatgcaggttcccaggacccacactcagcatgagtcaaatcttgatagagtggctataaaaatgtaaatcaaaagatggttaaatgtcggccaggcgcggtggctcacacctgtaatcccagcgcattgagattaatgttacaaaaaaacagagag

SEQ ID NO: 50624 - DNA, 858 bp, Homo Sapiens
  misc_feature (749)..(749): n is a, c, g, or t
  misc_feature (827)..(827): n is a, c, g, or t
gtgatgatggaagcagaaactggagttatgtgctctgaggatggaggaaggagccacgagccttcccacacctagaagctgaaaagagcaaggaaatgaactgatcctccctgctctgagagcctctgtaatgaatgcagccctgtgtacccattttagactttaagcttccagaactttcgaatagatttctgtttttttaagagccactaagtttgtggcaatctgttaaaccagctgttacctaagcccttgatcctatgtagtgcgcttcccaaaatgtacaccaccacctttagtagaattgggaagttttagcacatacccatggagggaatcaggaataaaggcagactggtctcccaaaggctcagactttgtttcagctcttttgagttctatcttgaaagtgcatccaaagtttcctaataaccatgttcttggcacaccaccacactccacccccacccaagtgaggaagcctagtccgactgaccaggaagtccactgcttctacaggaccggcccccctaccttatcttctgacctgatcaaaccattgttctcttttatatgaacatcttcttccttatttaaacatggagaaaacatgtattactattgccataggataaacttggcatttccaaaggagtaatgcccccatcttgtatgtaactccaactcataggacataagagagggccaattttatatgaagttgtattctcaaaatataaaaaaaacanaaacccacacaccaagggactaagatgatgttatttcacagcactagcttgcctcagtctttacgaagtacacaattnccaactataggacaagttcctcccctgtgct

SEQ ID NO: 50625 - DNA, 547 bp, Homo Sapiens
cgcagaagccccggacatggcagccccaccccatgccacgccccttcctacactgttccctggaccatacacaggctgaagcagaggaaatcccaaagcgggtgcccatccagcccaggtcccaggatccctgcacccatttctgtgacctggggccccagccgtgctgtgctgctcatcccagcagagggacctccctcgtccagcgacttccctttggccatagaaagaaatggtgagcatgagactgggcacagcctgagggcgtgggcagcttcccaccctccctgggccttggaatcccccaaggctggttttcttcctggagacccccatgggcaacttggcaggagagatggtgccgtaggaggtcgtggatggttgatgccaagagaggccctccacccgtggtgggcaaatgtccaggcctgggctggcagcccagggctgtttctgggtgctccctggccccagggtggcgtctggttaccatggctgtgtgtgtccatgtctgcaagcagttcttcaataaatggcctgcctcccc

SEQ ID NO: 50626 - DNA, 674 bp, Homo Sapiens
ggggcctttctctaccttatagcctggaacaggtgcaggctgaccatatctcgctgcacgatcccccaaagctccttgagacgtgcggtttccgctgatggaagctgaggtcctgcagcggctgcatgacaagctggaccccagccctttgagggacacagtggccagcgccctcatgtaccaccggaacgagagcctacagcccagcctgcagagcccgcaaacggagctgcggtcggacttccagtgcgttgtgggcttcgggggcattcactccacgccgtccactgtcctcagcgaccaggccaagtatctaaaccccttactgggagagtggaagcacttcactgcctccctggccccccgcatgtccaaccagggcatcgcggtgctcaacaacttcgtatacttgattggaggggacaacaatgtccaaggatttcgagcagagtcccgatgctggaggtatgacccacggcacaaccgctggttccagatccagtccctgcagcaggagcacgccgacctgtccgtgtgtgttgtaggcaggtacatctacgctgtggcgggccgtgactaccacaatgacctgaatgctgtggagcgctacgaccctgccaccaactcctgggcatacgtggccccactcaagagggaggtgtatgcccacgcag

SEQ ID NO: 50627 - DNA, 447 bp, Homo Sapiens
ggcggcagatgttagccaggtctgccctccccattcaagccccttctccactgtagcaaaataagcacccccaccccatctgccttcaggtcttcttcacagcctgcactgcccagtgggccactaggggcagtctctggaagggctggttcaaggctgtttgggtataggggtcaggtaccaatgaagaatcacgacttgtctcactcctttggaaattgttttctttcctgtgtaattacttcatacctctgtttttgagaaactgttccgtttgtcatctgtcatggtctccttccaccaaatcttcatctgggaatagcagcggtatccctccacccaagtatggccacctgtttgtcttcatatagaacaggggcttctggtctggtcatgtccctagagacttactagagactggctgaccatgaaaaaaaaaaaaaaaag

SEQ ID NO: 50628 - DNA, 568 bp, Homo Sapiens
ggaaagttcatctcttgtttccttcagtcaaagaaagtccattgtacataacaaaacagcccccaaacagcccagtgccgacaccattgttcctttcacactttcctttgttgcatgcagttgggttcaaatgccaaatagtgattagaagacgaccattctgatctgtgtgtgatctggtcactatgtgactgcctttacggtttctctccatgtgctatatgaatgaagaatgcataccagtgttttaaaaggtatttttatgtgtttttaaacacttttttaaatgagcctgacacctgtgtttcagcatttggagacatccccatgttattcttttaagtgtataattactgatacttttttgtttgtttgtttaactaagttgtgtttaacttatgtgcagtctttataatgtatgtatgttattacagtttcaactatcatattttctttgattacatttataatttgatcttgctctgattataatgccagtgaatgttgctgaactctttgtatatgcaaattgcaagatttaaaccattctgatgcaaggataaacctt

SEQ ID NO: 50629 - DNA, 651 bp, Homo Sapiens
tcactttaaacaagctccggtgatcctgaaatgctgaagatcgtgtaggtgggttgtggggtcagcagagctgccatctgcccacgtctggaaaacaacacacggtgagtcaccggttggccatgagatctccccacttaaaggtgctgtgagcttgtctctaagatatatacctcttccttttgtcttttgctgtaagctttgaccttttgcagatctgatgaaaatacaacctcttattgtatagtttgccttgattataagccatagtaaatcgagctgttcgcatttttgcaggccttgcattttctactgggaggttcatcaaaccttccacttagcaatagccctgactcaggcagaatgcctcataaattagccttcgaaagaaaagtgcacgctcagacagtgtgtggaggggcaggagcgtgatgcagacaaggacttagtcatgactgattttccttagccagtttgtaatggcttatggggaacattgtgagcttcctacctgacatgttggcagaagtagaatattaggatcctcaagcatctctaccgtaagtccaaagaatttaggtccctattgtcactttgttttgcaatgttttttataaaaatgcaattaaatacctcactattaaactgcca

SEQ ID NO: 50630 - DNA, 795 bp, Homo Sapiens
cttaaatatatttatatgtgtgtacatatattttcttttttaatattctggttaaatgagaggccatcgggcctctttttaagagtctaatgatgtgtatatctaatgcccattccagctggattgtaacactgcttggggaagataacttaaaaaaaagtagtaccgagattacagcagctagtgtcctaaatggaaaagaagtgaaactaaatgtcataggagaaatcctttcagttttgtgcagtggttcatttgctgttaaatctaccccattaccattccccttactccttgaaaataaagtgatcttcatgttacaaaaaaaaaaaaaaaaaaaaaaaaaaaaaaaaaaaaaacaaacaaaaaacaaaaacaaaaaaaaacgagagcaaagagcacccgcaggggagcgcagacagcagcaacgctgctacacaggagagcgagagatgagagacaaagtgtcgtagaggagtgttgaggcacaccagggacgcgaggcgagaggagcggcgacaagcgtgcggagaggatggcgagacagaagagcgagaagaagcggacacaaaaagagaaaaggaagagggagaggaaagaggggcggggaagagagggtaggaggggcgagaggaggagacagagagatacaagagagagagggaaagaggaaacgaaaggaggaggggaaggatgagtgggcacggcggtagacgacggagggggggaaggtggatagacaagaagaaagaggcggtaatcgagagcggggagaagaaagagggagagaaagag

SEQ ID NO: 50631 - DNA, 744 bp, Homo Sapiens
cgactcccagggtccgttgcggcgcggcggagcagccaatggcgagccccacagtctcgcgagagtgctcaggcgctcttcgtggctgccctcttagctgctagcggagctcctcagggggcggccgggagcctacaattcctagaaagaaaatacgccattccggaaacagaactgcagttaagaccctcgaaaagatctaagaaagtgtgcatcctaaaacacctgacgaatttcagaatgtgacaaagcgcagaggatgcattatttcaaaacaaaacagaaggctaaaatttgcaggaaaaagaaaatcagtaaaccgggaatcctcggactggattgtaagcaagatttgaatgaataagaagctgaaggtattaaggctgtgatatagaaggtacatatttcatcccacaagagaaaacaataataatcagaaattttcggtgaaaaaaacgcaaaactgtacaggaaaatcatcctccaagtaccagacataaaatgctgcaagcttttgaactaatggcgagagtgtaagaaaatgggctctacttcagtgatcctgtggcaggacgtggatcaagacttggaaccgcagaaaacgaaatcccatagtagcacaaagcttggctgttcagtgaataacatttaaataatcgtaaaatcaaatgttgtttatggtttttattgtttagggcatactaattatggttacaagtggagtgcaatgttatttacatgttt

SEQ ID NO: 50632 - DNA, 741 bp, Homo Sapiens
  misc_feature (729)..(729): n is a, c, g, or t
cgacacgcggaaggccgggtggagcccatccatgctgtggtgttgcctcgagggaagtcgctggaccagtgtgtggagaccctgcagaagcagaccagggttggcaaggctggcaccaacaagccccccaggtgccggggaagaggggccaggcctgggggccgcccagctcctcggaatgtgtttgacttcctcaatgaaaagctgcaaggtcaggctcctggggccctagaagccggggcggccccagcggggaggaggagcaaggacatgtaccatgccagcaagagtgccaagcgggccctgagcctgcggctcttccagactgaggagaagatcgagcgaacccagcgggacatcaggagcatccaggaggctctcgcccgcaacgctggccggcatagcgtggcgtcagcccagctgcaggagaagctggcaggagcccagcgccagctggggcagctccgggctcaggaagccggcctgcagcaggagcagaggaaggcagacacccacaagaagatgactgagttctagagaccccacaagcactatggacgaagcgtgggaccccagcacgggctgccctcaggaagaccagtgttgcccgaggaggggccggcctgctggcctggggcgtgcggacactgctgagtggagacagagctgcggggtcccatctggacacttacttgcccacctgccagtgtcttgggcatttcttggcangacattaagtga

SEQ ID NO: 50633 - DNA, 763 bp, Homo Sapiens
gacagcacaccagagagtagacacggtgcagtcaaatcgccattcttgccattagctcctcagactgaaacacagaaaaataagcaaagaaatgaagtggacggcagcaatgaaaaagcagcccttctcccagcccccttttcactaggagacacaaacattacaatagaagagcaattaaactcaataaatttatcttttcaggatgatccagattccagtaccagtacattaggaaacatgctagaattacctggaacttcatcatcatctacttcacaggaattgccatttgtaagcagtttttggtacaacttaaatatatacatatatgtatatatacaggccacttaaagggaaacttgtaacaaatttgtttttggttgcttatcagttcacagctgaaatcctattgctaatcataagctttgggcaaaattttactttgatttttaaatttatctctgttgtatgaatttggttgttttaagctttttccaaataactcttcattgagagtaggctaatgcttttaaaggcatttgattgagttcaggtttaatttctcaagttggaggtatacatatatgattaaaaaaaaaaaaagatgggttttggcctgccagcaccatgagtgcaggtgaaccaatttagtacttggagtcccgttgctatatgtgggagaatatttttttacttgatgaacttgatcttaccttaggtggaagggcttttgaacaccgtttaagtggcttaaaagaaa

SEQ ID NO: 50634 - DNA, 596 bp, Homo Sapiens
cagcccccctgcctcggttgcacctgcctccgagcctggctatgtcaactacaccaagctgtactatgtgctggagtccggagaggggacggagccggaggatgagttggaggacgacaagatctccctgcccttcgtggtgactgatcttcgtggccgcaacctgcggcccatgcgggagcggactgctgtccagggccagtacctgacagtggagcagctcacactagacttcgaatatgttatcaatgaggtcatccgccacgacgctacctggggccatcagttctgttctttcagcgactatgacatcgtcattctggaggtctgcccagaaaccaaccaggtcctcatcaacattggcctgctgctcctggccttcccgtcccccactgaggagggccagctccgaccaaagacctatcacaccagcctcaaggtggcatgggacctcaacacagggatcttcgagacagtcagtgtaggcgacctgactgaggtcaaagggcagaccagcggcagtgtctggagcttctaccggaagagctgcgtggacatggtcatgaagtggctggtgccggagagcaacggccgct

SEQ ID NO: 50635 - DNA, 337 bp, Homo Sapiens
cctcttgtgtgtgtgtgtgtgtgacagagagagagcgagagagagagcgcgagaggagagagagcgagaaagagagagagagagagcaagagagcgagctgtgagctgtgctgccgccgccgctgccctttgatcccgacattagtgttaggggctcggagacacagagcgcggccatagacaccgccgcaccggcactcatttatttatacctcccatcacacacgcgagcataggacacacacacactcacacctattagatccgtttccattgaagaatattacgctcggggacaagccaggtgcacgaccaaaaatttaaaaaaaaaaaaaaa

SEQ ID NO: 50636 - DNA, 960 bp, Homo Sapiens
  misc_feature (559)..(559): n is a, c, g, or t
  misc_feature (561)..(562): n is a, c, g, or t
  misc_feature (565)..(565): n is a, c, g, or t
  misc_feature (583)..(583): n is a, c, g, or t
  misc_feature (646)..(646): n is a, c, g, or t
gacgcgggtcctgtcactgcaggggagaggagccacatctggacgcccagccggggagcgtcggcagaggccgaagcacgagtcagactgcattctgctgtagctctgccccagtgccaggctggcctgccccttcttccagaggctatggctagttggcttgctcccccgcctccacccctgagatgtgctggataacttatttatggactgttggggatgagagcaggcagcaaatgccaaggtcagacttggtaatgtccttgacctcacgtgctgctgccttctctgcctcccacccagggcaacactaggattggtgggtttctggttctcaactcccggtccctgaatagtcacacgtatgtacagactgaggctctggggtgaggtccctatccagaatgcatctcttctgcttcccatccctgctgcctggatgctcctgatcacctaggcaggcctgtctccagttgtttcagagcttaatttgggtttctatctcttatttgtaatgccttcctggggtttggaaataaacttctggcccgggcgcggngnntcnctcctgggatctccgccntttgggaggccccggtgggccgggttcgcctgggttcccgcgttccgggcctcgctgccctcncgggggggtccccgtcccttgcttgcgttggttgtgtctttctgtgggcctcctcgcccggcccccttcttcccccggtccccctgcgctccccctgtttggttcgggcgtgtcggcgctcgccttttgcgtccttcctcgcccgtgctgtgcgctgggcctccggcccgtgcttcctggcctcgcgcgccgcctgtgcgccgcgcctctccgcgtgcccgtccctgcgcttccccttgcccccgtgcctccgttgctcctccgccctcctccgccgttgccccccctgcgcgctcccggcgcgctccgcctgc

SEQ ID NO: 50637 - DNA, 677 bp, Homo Sapiens
  misc_feature (628)..(628): n is a, c, g, or t
gcccttgggcacaaaaccctgcctgccctgtcccccactcccaccccccagggaattctaggtgaaaatgtgaagctcagggcacagcaagcgcatgacacgggtgtattacattcggtccgagtgtgtccttagtttccctgtgtgcaaaatggggctagtccaggctcttcccacctcactgggacaattgcaagggtcataggagaggtgggtatgataggtggtcatatgaggtggtgagtatgagaggtgggtgcctcacaaactcggggtatggtcctgacctgcatggcagatgagcagagcacttgggaacgagcataggaagtgccatcttcccgggcatctctgctcagtgttaaggtctagccacagacactgtgggacctgcctcttcctatggaatgggggcctgcatgggttgtgtcctggggcaggagtgagggatggctgggaagaatctccaggtctgtggcccttgtgttgagtgattattttgtgacactctcattcctggaccacctgccaggtttatctgttatacctgtggcattcttattatgtcagacaagttattatagttcattcaactctaacaaatgaacaaaagaaccaataaagtagngagggcattacagggtcttttggtggcagacgaaaacaaatacacaact

SEQ ID NO: 50638 - DNA, 597 bp, Homo Sapiens
  misc_feature (571)..(571): n is a, c, g, or t
ccggtgagggcggcaggcaggggttatccggccccactttctggatgacagacttgaggctctgagagctgaaaacacttgtccaaggtctcacgttaaggtcaagacactaactcaaatctttcaagccccgcctctcctcttggaggacagggcagcctgcagctgtgtccaggcccaggccccaccccataacaggtggcctcagccacacagttctccccaaggggagcagcccagggccaagccccgctgccttccccaggccacagtgcgtccagtctcctgtcctgccacgtgtcttttgcaaagctccttggatgtggagacagatgtctttactagagctgaaaggcccccttgacacatccaggccaacctcccatggaataggtaggcaagccaggactccgggaaggaggtgcagccaggatgctctggtggagctgccgatggggccctggtgtcagaactccccaaaggcctgtgcgtccaagtggagtcaggttttctattcctttctgtgtttgcaaattcagtgttaactaaataaaggtattttgtttttcanaaaaaaaaaaaaaaaaaaaaacgcgg

SEQ ID NO: 50639 - DNA, 603 bp, Homo Sapiens
ttttttttttttttttttaaaatccctatgatctctgtctcacctactttacagggttgctgtgaagatcgcatactacacacaggaatgctcatcagtttttaaattttatttaatttttatttatttttttttaaatgtaattttttcaaagagataaggtcttgctatgttacccagcctagtcttgaactcctggcctcaagtgatcctcctgccttggcctcccatgctgctgggattacaggtgtgaactaccatgcccagccagctcctaagtcttaaggctctgtgttagtgataaatgtggccatggtgtaggcagtgcaatgtcttcgagtgagagtgaaggtggtaactcattgcatggattctaaagttctgtttattctaatccaagttcttccacttaaaaacaatgttcttcctctcattgagtctcattcctcatctataggatgggaataagagcatgtacctggcaggttgttgtaaggattaaatggtgtaaaaaaatgtcaagtgcttgcaactttgaataccaaacttgagtgaaagctcaataaattgttacttaaaaaaaaaaaaaaaaaagcctcgtgc

SEQ ID NO: 50640 - DNA, 605 bp, Homo Sapiens
  misc_feature (543)..(547): n is a, c, g, or t
  misc_feature (549)..(550): n is a, c, g, or t
  misc_feature (555)..(555): n is a, c, g, or t
  misc_feature (599)..(599): n is a, c, g, or t
  misc_feature (602)..(602): n is a, c, g, or t
aggctgcactgtgtgtgaagtagccacctgccctgcctccctcctccccgttggcccctgtttggacttagtgcctgtctggcagcctgtggggtcaggagaagcacccccagggcagccctcttgactggcgcagtgggaagaggccttcagcccctctcccggagatggaatcgcggggcagggaggggcagggtgttctagaggtgagaagagggcctggtggagattccctgtcttctgagcccgagcccctcattaccagtgaaggacatgcttgaggggttcgggaagctcctcatctgaggcaactggtcctgggggtgctcaggcctgcctttttgggactcagatggcaggaggtccaccccgcagcctggtcctcggctctcccacaggtgggcaccccccactttggtgctaatagctctccaccaggtggtgtgagcgcgggggctgccagaagcgggaggggtcactgccggaagagcagctgccctccgacccctcactttgtgcctttagtaaacactgtgctttgtnnnnnannaaaanaaaaaaaaaaaaaaaaaaaaaaaaaaaaaaaaaaaaaaaaaaanaanaaa

SEQ ID NO: 50641 - DNA, 876 bp, Homo Sapiens
  misc_feature (196)..(196): n is a, c, g, or t
ggatccacggaccacatgttgagaaactgcagtcacccttagggccacaccgtccctctccccgctgtcccctctctgtagtgactggccctgaccttcaggagtgcactttccactctaccaggaagccctatgacatcctcaggctccccagacctgcagcttgcatggggcccctcgcttcttccgacaccgngccctccgtatggtcccctgctctgccctcgtgctttgctggcccctgcccgctactcccactctcagacacccaggggtggtgggccctaactggctggcccctcccagcgctgccctctgccgtccagatgctgcagtgtggccagatttaccttccagtaacatacttctagtcacccctcctcctgcgaagtgatctgcagtggctgtttgaccagaccacaaagttcacatctcctgagcttagtgtccgtggctgtccacctcccagccatacttgactgtccccaaactctccctgcagccacatgtttcccatgacctgtgggctctgcagatggacctctctccgctagagatgcccttctcccaaatggcttccctcctggaaggcccagcctgagtcctcgtctcctttccagtgcttctgccagaagcatccccatgatgttgtgaccgcacagcactttgtgtcttgctttgagcacttgccactctggctggtgctgctgcactgattgtgtactgtcttgctgcctttctagactgtgagctcctcgtgggcaggaccgctgtgttctctggtattcccacggcgcctagcacagtgccttgcacttgataggtgctaataaatgtctgtcaactgaaaaaaaaaacaaataacaacaaaaaaaa

SEQ ID NO: 50642 - DNA, 613 bp, Homo Sapiens
  misc_feature (25)..(25): n is a, c, g, or t
  misc_feature (35)..(37): n is a, c, g, or t
cccaaagtgaatgggattaccaggncatgagcccnnncgtgcccggcttttcacacccatttctttaaaaaggatcccgtagcaggcagaaaagccccttccatcctgctcctctgatactgtgcccccttggagatatttccgtcctccacccacgtgtctgtggctggaactgcccagcctgctcctggccccctggaagcctccccacagctggtaatctggacttaaggattgctgggccaccgcctctctgcctaccaccattccatatttaagtggagcccctacgtagaaaggccccggggctttattttagtctccttttcagggatgtcgtgggcgggggagggggttcttggtgctacagccctctccccacccctaaagggacgccgacgctgtttgctgccttcaccacatattagtgcttgaccctggcaggggaccccatggaaaagatggggaagagcaaaatacatggagacgacgcaccctccaggatgctcgctgggattcccacgcccaccactgtcccccaccccatggctgggaggggcctctgaacggaacagtgtccccacagagcgaataaagccaaggcttcttccca

SEQ ID NO: 50643 - DNA, 800 bp, Homo Sapiens
  misc_feature (1)..(1): n is a, c, g, or t
  misc_feature (695)..(695): n is a, c, g, or t
ntagaaaactaatgatgatacaattgattttgattatactgttctacttcatgaattatcaacacaggaaataattccctgtcgcattcacttggtctggtaccctggcaaacctcttaaagtgaagtaccactgtcaagagctacagacaccagaagaagcctccggaactgtagaaggatcagctgtagtaccaacagagcttagtaatttctaaaaagaaaaaatgatctttttccgacttctaaacaagtgactatactagcataaatcattcttctagtaaaacagctaaggtatagacattctaataatttgggaaaacctatgattacaagtaaaaactcagaaatgcaaagatgttggttttttgtttctcagtctactttagcttttaactctggaagcgcatgcacactgaactctgctcagtgctaaacagtcaccagcaggttcctcagggtttcagccctaaaatgtaaaacctggataatcagtgtatgttgcaccagaatcagcattttttttttaactgcaaaaaatgatggtctcatctctgaatttatatttctcattcttttgaacatactatagctaatatattttatgttgctaaattgcttctatctagcatgttaaacaaagataatatactttcgatgaaagtaaattataggaaaaaaaattgactgttntaaaaagaacttgattatgttttatgatttcaggcaagtattcattttttaacttgctacctacttttaaataattgtttacatttttaaataaaaaaaaaaaaa

SEQ ID NO: 50644 - DNA, 578 bp, Homo Sapiens
gctggtctcaaactcctgcactcaagtgatccacccacctcggcctcccaaagtgctgggattacaggtgtaagccaccgtgcctggcctacgtgttcaattttctatgaacaaaggctttagtccttgacccagggctaaagtggtctgtccaagctgttgttggtagagggagtatgataaaatgtttaaatctcatttggttaccttgagtcctggaacacgcagtaactgtcatgctatagtcatcatctgtatttggctgggaatacaaatgaagattgtggtgtattcaagcagtagggtttttgcttttgtttttgttttagtgccaacaaaacttttttttgtctgactacattaaagataagactgactatatttatacaacagaaactttgtaatagattttttcagctttgtgaaatcgaattttttttcatcagggctggttggatttcctttttaccctgtaatccaagcgttaatagtttgttagaagatgggttattgcatgtcactttttttttttgtaaaataaaaacataccttacaaaaaaaaaaaaaaaaaaaaaaaa

SEQ ID NO: 50645 - DNA, 624 bp, Homo Sapiens
gttatattattaatatagtagtttttttttgagtttgatgacattcttttgataatcttgagttggtttttttaacgtaagactagcctcactcactgtgagctggtaagattccacagaggagtcatctattttttttttcctcagtagcataataataattttagctagcttgccatctggggacccttcctaagtggtagataagaaacttaaaataggattgtactttaccatcatatttccccacccagcactgttactggcataaatatgtgagcaagtgactggtgagagagtgatgcctttggcagggtatctgatggtgagatcgactgagaactgagtggaagagaaggcgaagtatcagattgccaaaagggcttttattcttagctcagcccttcacgtatcctgcaaagagctgctcagcaaaaggtgcttattgaattacacctcataacaggcagaatttgaatgctgttcatcacaggagctatggagtgcatagttttatagagagtatctccccgcaggcaagatacatagaacaggtgcagaattacagcatatactcatttcgcctcttgttaaataaaagcaaagacagtctcatgcgatcct

SEQ ID NO: 50646 - DNA, 499 bp, Homo Sapiens
accctgaggtgctgggccctgggcttctaccctgcggagatcacgctgacctggcagcgggatggggaggaacagacccaggacacagagcttgtggagaccaggcctgcaggggatggaaccttccagaagtgggccgctgtggtggtgcctcctggagaggaacagagatacacatgccatgtgcagcacgaggggctgccccagcccctcatcctgagatgggagcagtctccccagcccaccatccccatcgtgggcatcgttgctggccttgttgtccttggagctgtggtcactggagctgtggtcgctgctgtgatgtggaggaagaagagctcagatagaaacagagggagctactctcaggctgcagtgtgagacagcttccttgtgtgggactgagaagcaagatatcaatgtagcagaattgcacttgtgcctcacgaacatacataaattttaaaaataaagaataaaaatatatctttttatagat

SEQ ID NO: 50647 - DNA, 702 bp, Homo Sapiens
cacgcgtcccccttaaagcccaatgggtgatgtcactgatagaacgaagtcgtgtaaaaagggtttggggctgtgcaagagtaaacactagagcttgagttgttatccagctggcaagcacggtcctctatgaagaatgtaatgtaaaaagggaaaagaatgtaaagctttttgtaccaaatgagagttggagcccagccaacaaatgcttttccctgtgtaaaagtctctctggaagggacattccatctccatggtgcactctgaggggcactgtcaactagagattggccccatccaggtgggaggaacccctttgggatggtgagtatccaatctgctgtgcatttgacaggatctctgaatggctaggtaatggatcccaagcaggctcacaaatttaaatgagggctttgtgtgcagaaagaggaataagtacagattattttcctaccactagatttttggggagagtcaccatggaatgttgacaattacttaaaatattttaagctcccttgctgaattcctgtcctgtccctgaggaatcagatggtcatacagccataggcacccacccgaaatttccctaggagttggagtaatgctagaattgaagaccttctgagtaaagggcttctctgccttctcagaggcaggagaatttgcactggttgtgttaaatgtataaaaagctatatg

SEQ ID NO: 50648 - DNA, 552 bp, Homo Sapiens
  misc_feature (460)..(460): n is a, c, g, or t
gttctagatcgcgagcggcgcccttttttttttttttttttttttttgacagtttcgctcttgtcacccaggctggagcgcagtggcacgatctcagctcactgcaacctccatctcccgggtttaagtgattctcctgcctcagcctcccaagtagctgcagaattaatcgttcttaaatgtgcatagatttttttaagtaaacatgttccctacatactttagcttactaacttccacaaacagcagaactgaaacaattacagcttaaataaaagtaacttaaacccaatcaacagatccattgcatacatactatatatatatataaaatatatatatataaaatatatatatataaaatatatatatataaaatatatatatatatatatatatataaaacatacaggaagttcacccaccttccctgcagtaactgggaacttccctcctattntggctcactactgtaggcagacctcactacttccagaaaacagccccccttcaccctggccagcaatttctcacccccatcttcctatgagc

SEQ ID NO: 50649 - DNA, 641 bp, Homo Sapiens
agagtacaggaatgcttctccctgtatgacaagcagcagagggggaagataaaagccaccgacctcatggtggccatgaggtgcctgggggccagcccgacgccaggggaggtgcagcggcacctgcagacccacgggatagacggaaatggagagctggatttctccacttttctgaccattatgcacatgcaaataaaacaagaagacccaaagaaagaaattcttctagccatgttgatggtggacaaggagaagaaaggttacgtcatggcgtccgacctgcggtcaaaactcacgagtctgggggagaagctcacccacaaggaagtggatgatctcttcagggaagcagatatcgaacccaatggcaaagtgaagtatgatgaatttatccacaagatcacccttcctggacgggactattgaaggaggagaatgggagagcctcccctgggcctgaaaacttggagcaattaattttttttaaaaagtgttcttttcacttgggagagatggcaaacacagtggcaagacaacattacccaactatagaagagaggctaactagcaacaataatagatgatttcagccatggtatgagtagatctttaataaaagatttgtattgattttatta

SEQ ID NO: 50650 - DNA, 1119 bp, Homo Sapiens
ccggaattcccgggatcacggcgggaaccggcagccggagcagtcccggagcagaagcagcagcagcagcagcagccctcgccgttcgcggagcagccgagccggccatggcgttgtcgatgccgctgaatgggctgaaggaggaggacaaagagcccctcatcgagctcttcgtcaaggctggcagtgatggtgaaagcataggaaactgccccttttcccagaggctcttcatgattctttggctcaaaggagttgtatttagtgtgacgactgttgacctgaaaaggaagccagcagacctgcagaacttggctcccgggacccacccaccatttataactttcaacagtgaagtcaaaacggatgtaaataagattgaggaatttcttgaagaagtcttatgccctcccaagtacttaaagctttcaccaaaacacccagaatcaaatactgctggaatggacatctttgccaaattctctgcatatatcaagaattcaaggccagaggctaatgaagcactggagaggggtctcctgaaaaccctgcagaaactggatgaatatctgaattctcctctccctgatgaaattgatgaaaatagtatggaggacataaagttttctacacgtaaatttctggatggcaatgaaatgacattagctgattgcaacctgctgcccaaactgcatattgtcaaggtggtggccaaaaaatatcgcaactttgatattccaaaagaaatgactggcatctggagatacctaactaatgcatacagtagggacgagttcaccaatacctgtcccagtgataaggaggttgaaatagcatatagtgatgtagccaaaagactcaccaagtaaaatcgcgtttgtaaaagagatgtcttcatktsttccctaagaatacgctttttsctaasaggstastscttcctgtagagsagaaattgtattttkgasgaasatksatttatttaagattakkttcaakkwtatayaakttataktakttatyttaaawawaamcccyaarcmktatawtttaaaaccyttamccggcbaccccccmaccgkgtsccccccttaawwtgggggacwcacmaaaattttc

SEQ ID NO: 50651 - DNA, 552 bp, Homo Sapiens
  misc_feature (477)..(477): n is a, c, g, or t
  misc_feature (479)..(483): n is a, c, g, or t
  misc_feature (485)..(485): n is a, c, g, or t
  misc_feature (487)..(492): n is a, c, g, or t
  misc_feature (494)..(496): n is a, c, g, or t
  misc_feature (498)..(500): n is a, c, g, or t
  misc_feature (503)..(503): n is a, c, g, or t
  misc_feature (505)..(507): n is a, c, g, or t
  misc_feature (509)..(510): n is a, c, g, or t
ctaaatttgaattggaatatgaatatggacttataatatgttttctcttaaaaaacatgttttctggccaggcacctgtaatcccaacactttgggaggctgaggcaggcagatcacttgaactcctgacctcatgatccacccaccttagcctcccaaagtgctgggattaggtgtgagccaccgcacctggccgatattttctttaatgaaatttataaatatgcttcttgaataatacacattttgggaaagggaaaaatgtctgttcaaaaagtaaaggtctcttttatagcttttccaaacttaattgctaaatttttctttgaggttctcctgaattatgtcttacaaactaaaagcaaaaatttttagcagaaattttggaatacattctatctagcacaatttgaatttttaattatcaagatttttgttaaagtttctctcctttaaaaattttagtacatttgtaantnnnnnanannnnnnannngnnnggngnnnannaaaaatttgggcggccgcaagcttattccctttagtgagggt

SEQ ID NO: 50652 - DNA, 963 bp, Homo Sapiens
  misc_feature (600)..(600): n is a, c, g, or t
  misc_feature (879)..(879): n is a, c, g, or t
tctacgcctacccatgttcttctccacgttctaccacgcctgcgaccagcccggggaggcggtgctgtgcatcctcagctacgacacgctgcagtactgcgacttcttgggctccggggcggccatctgggtcaccatcctgtgcatggcacggctcaagacagtcctgaaatacgtgctgtttcttctgggtacactggtcatcgccatgtccttgcagctggaccgcaggggcatgtggaacatgctggggccctgcctctttgccttcgtgatcatggcctccatgtgggcttaccgctgcgggcaccggcgccagtgctaccccacctcgtggcagcgctgggccttctacctcctgcccggcgtctctatggcctctgtgggcatcgccatctacacctccatgatgactagcgacaactactactacacccacagcatctggcacatcctgctggccgggagcgcagccttgctgctgccgccacctgaccagcccgccgagccctgggcctgctcgcagaaattcccctgccactatcagatctgcaagaacgatcgggaggaactgtacgcagtgacgtgacactggcctgnggacagctgctgctctgatgacctcttcagccaggagctgtatcgagggggaggcgcctggtccagccctggacagattgatttccagctgaataaattggcctagataccctcttacttcctccctactgaaggagaaggccaccccctccctcacacgcacctctcctcgccagctggctgctcgctgctgagatccctctgcagatcccagctgctgtctgcagtggccccctggggcctggggcttggttactgggagaccacagtgcctgtgcnaagggtggggctgtgtgctctgctggcctgtgggttggctaaaaatggggaaaaggactcccttatgttccctgttccccgggc

SEQ ID NO: 50653 - DNA, 628 bp, Homo Sapiens
cttgtgagcaggacgaagggcccctagacggcaggcacggtccagagtccagccccttgaacgaggtggtgtctgaagcctttgtccgcttcttcgtggagattgtgggacactactctttgttcctgacgtcgggcgagcgtgaggagagaaccctgcagcgggaggccttccgcaaagctgtctcctccaagagcctccgccacttcctggaggtcttcatggagactcagatgtttcggggcttcatccaggagcgggagctgcgccggcaggatgccaaaggtctgtttgaggtccgagcccaagagtatctggaaacactccccagtggagagcacagcggtgtcaataagttcctgaagggactaggcaataaaatgaaatttctccacaagaaataactctcagcctcaagggaaaacttcctcctagtgcagccctattctttaaaaacagttcctggtggcctttctgaaaggctgggtcccaggttgtcacggtgcggaactggaggccgcggtggcttctggccgaggctgggctcttccctggatgaggacctgggagccgcctgggaggacagccccagaaagggagcccgagaccaggcgtgtcgccgacatgc

SEQ ID NO: 50654 - DNA, 645 bp, Homo Sapiens
tgatgtcgctatcatgaggcatcataaaaatatgtattttacaaggtgaaggcatttcaagtagatatagttcttgatgaagcaggaagaacatggatctgggatttggaagacctggcttctagctgctactaaccaactctgtgactctgggaaagggggactcagttcttacttctgtaacatgaggacaccggactatttgaattcagaacttagaaaattggaagggaccttaaagccctctaagaaagagttcgggaatgttctccattgctgtcagttttcctccaaaaataacctggcttggaagttattggtccagtgggaatttgattccccatagaaactggagaaaaggtaatgcaagtagagaggaacagctgtatttctgcttgagtaataaacccactaacagattctggtacgaattgtggagacataaagagaatgagtgtatgtactctaagtgtaccagtttcttcactctctcctggcagaagatgcaacacttttagtgattctgggattctgggatgtgttcctattaattctaatacagatgaagaagatgtggtagaggaaaagatggtagcagaaggagtgaataaagaggcaaaacagcccgctaaaaaaaaaaaaaaa

SEQ ID NO: 50655 - DNA, 501 bp, Homo Sapiens
actgggagaggaagagagcaggacaaggcagacagaaggtcaggtcaggaactggtgctgtactgggtacacagtaggcgcccaggacaagtgggttgcaagacaggaagaaaggaaaaggaagggcagagtgctggtttctccaggttgggttgggggcactgctgtcccccctccagctaggacccagcccatccccagatgcctgagcctttgtccaaagtgaggtcactcgagaattcatggacacggcccccagtcagggggcatcttgcaagacctttagtgccacaaataagcatcgagcacctccccattcacacccccattcctcctggctccttatcccccatggtgtttattatttatttccctccccatgcccctggggaccccaaggccccagcttccctctgcacccccagcctatcccagaggccttgcaggtgaccagcagtgtcattgtatttatatacagagcttatgactttaatttttcaa

SEQ ID NO: 50656 - DNA, 631 bp, Homo Sapiens
gattatttcaggatagagaaatggaagtaaaacaggcttattttctcactagagaccatagtcagtatctgacgtagaaacgagctggcatttctgaactgctttcatggttgagaccaatgtgtaagttaggagagttttgttgacctgttccaagttgctagggtagctttatttctgtatggtcacattatggtgacctggtaattattttggcagtgatgatggtagaacttgtgcatcaggatttcctgctacaaggccaaaagcctgattgtggaacttttttttctgctaccaccattttactacatattagtgttttcagattgtttgaccctggggtgggtcatgaaatccatttaatgggtcatgttacaaaaaaacaaaagccacaatggaaaaatccatatttatttgtataaatagtattcctatttataaaataggagtaaacttctatttcaattatgtataggtaggtgtatactgttgttgcaatgtgaaaaatttttatgtggttcacataaatgtttgaactgatactgctatatgtgatgttaacacaataccacttagtaactgtaacaatgtggtgggtagatagctcccttaaaagaaaaaaaaacaa

SEQ ID NO: 50657 - DNA, 556 bp, Homo Sapiens
  misc_feature (472)..(472): n is a, c, g, or t
  misc_feature (508)..(508): n is a, c, g, or t
  misc_feature (539)..(539): n is a, c, g, or t
ccggcgcctgggcaacgatggcagcagggatgctgcaaaggaggcgctctataggcggaatctggtagagagtgagctgcagcggctccgcaggtgaggagcccatggggcgggcagcccccagaaagcgggcagcaggccccgataccgggaagagccgacacagccacgaaccagacaagcagacaatcagcggacaatcggttctggactcacccctcatccgggcccccagccccgccagagcctccgtggctgccggtgttgggaaccatgcctgccagccagtatgtgcccctcacccaggcctggctgggccctggagagtcctgtttgcacagcccaggggtgtccggcctctggcccgccccggagcagggagggtggctggggccaagccccgagggcccctgcaagcactttacttcctgttcctccccagccttaaccccaaagccctcctgcaccccanagaagccactgaggctgaccgagccacactgtctcnccaggggcgtcgacctggcccagctgggtcnccagggccagcacatgg

SEQ ID NO: 50658 - DNA, 574 bp, Homo Sapiens
acatacttatatagaggggtttatgtaaccatgactttgtaattttgagaattcctcccagtgatggtcagtattcttttggaatgtaaaccgatttaatgccaaaccaccttaacctttgtttctcagtgttccttaacagcctgccttttattaatctcaggcttttttatgaacactctcatttcagtagaatttggaaaactaagcgtggttggaatttctttgaattctgttagtaatgcccaaaagaaaagtctcaagcagtccccctatccagtcatttttatggagtttcatgttgtccactatagctggacactgaaccttttgcctaatttattataaaggcctgaccctctattgtcccatcttcacccccattccagagcagaggagtctctgtggaccatgaattgcactgtctccctcctcatttctaaatgaaaggtattagatataaatttttttgaaaggttagttgtttgagatgctaagcaggataataaatttagattttaaaatgttccctgtaaaagtcagcccatgacaaggaaatttacaaaatactaga

SEQ ID NO: 50659 - DNA, 555 bp, Homo Sapiens
aaccataaaaatatagcaaatgtatgtatgagcaaactaatgctaaaaatgtctaattttcttggctagtctttcaaggaccagattcatgagtgttatttgaagggaaaaagtgaaatacttggaattattttgagtgatgtgctcctgagcttgttcttaaaatctaccagtggtagcttttggaaagaatgtgtttcataccgatgtgcaggcctcactggaagagcttcaagaggagtttgtgaaactcaaagtctaatggttttgattagaaacttccaggcaaatactccagagaaacttgggtgtaaaatgactaaacagatgaaaaggctttatccactattccatttgctccttacaccttaaaaagcttttttattttttaatgttttgatatatctagctttggggagaaagcagtgcaagagtgttattaaaagcagcttgtgttttcttgcacctttcacaccacccaggaaagaaaagttcaggcttaacagtgacatggctatcacatcatctgaataaattttttccttctaaaattaa

SEQ ID NO: 50660 - DNA, 537 bp, Homo Sapiens
ttttttttttttttttttgtgtgtgtgtgtgaaacgtagtctgcaactctgcctcccggcaattatacatgtgtcaggatgtcaaaaagcaattctcctgcctcagcctcctgagtagctgggactacaggttcctaccaccacacccggccaatttttgtatttttagtagagatggggtttcaccgtatcggcgaggatgatctctatctcttgacctcgtgatctgcccgcctcggcctcccaaagtgctgggattacaggcgtgtgccactgcgctcggcctcagattccatatttgaacaccagctgattgagagaaggggaatgagaagagctggatgagtttaaataactttcattgttcagattcctgaacaggagttgggataatggccatcttttctttcctatcctttcttcccccctcactgtgaaaaataacagtccaccccaagtcatacactggacccagtgcctgcggggacaggactgtgggtttcttggtcacacctgtgttggtgctcaatgcagtgt

SEQ ID NO: 50661 - DNA, 540 bp, Homo Sapiens
ccaaaatgtgcaggatcccacagtggtcagcgccaaccctgagcacaggatctaaaactatagatgatatggccaccctggccacagctggaaccaagctggtggcccaagagagagcctcttcttggaattgcatgtcagtttctcatacgcagtttcttcctatttttcccatttcccgttttaaagctagtggcatacctcacagtcaaataaccaagtggtcagtgtctcgacaatgtgcagtaacgaggtgagggctgcaagggtgaggggctcagtcaccttaacaaggcaggagacctcccacaaaaggctgatgtgtcgtccccagggccagctggacaagggcatgcagcgcaggggtagggggatggaaatattttctctcccgtaaactctgacttcatgtgagcaggcatggggtctccctgagagctgataaacgggaaaaccaaaaccaataatattcctaataataatactagaatgttagaataatcatgtgtttttcactgaccgctgttgctctgcttttgt

SEQ ID NO: 50662 - DNA, 607 bp, Homo Sapiens
cttcagatagggtcccactcccagaagaagctgctggggtgggggtgggaggctgcctaagcctgtctgtgcttcagaggcccctccagtccctggctgtggggtaactgggggtatgagctgtggccacaggtgagcaaggcagggaactgcaatccagccctggccgcgggaggggccatctctggccaatgctgctgtgccttcaaggactgacaagttacgtaggggcagaggtcgccagctagccagtgtctcctccatctggggggcgtctgtccacttgtcaccttaggttttcactcatttgtcaccttggggttttgctctgtgtgtttcatatccaacggcaatacttgcagggggacagagtcctctaaatactccaatcctgcggtttttacaaacataaagggggagaccccaagtggaggaccctgggcctggagctccctcccaaactttgtccagcatccagcctgttccctgggctcactggggagggagttgtcttcatagcacacccagagccagggatccctttgtagttttttgacaacggagcatttctcttctgtacaggacccaataaaaacttccttatgat

SEQ ID NO: 50663 - DNA, 610 bp, Homo Sapiens
  misc_feature (577)..(577): n is a, c, g, or t
agaaatctttctacacaaacatacattcagtattttgcaagtaggtttctttcaaggcatttttgccctaagaatacattatctaatgataaactgtaagttgtcagtacatttctcaattagaacatagttttcaaactctcctgcagagaatttgttttctagatttgttggtagagaacaaatttttattcttcacatttttatgctgccacatatatagcaaccagaatgttttttataatcctccagtagaggatttttctaatcattgacagaaacaaggtttattcatttcatttttaatagtactcttaaagtaaccaggatctttttcttaaaccagaaaaaattagtcacttttaatctgttttcattgcatgtcagtgtattgagggggaaagtctggaaatttgctatattgggcatgaaggacatgagtttaacatacgcttctaattccagattcttttgtgatcgacatttgatttctaactatctaaaaatagtatgtcaaatatgttttactcatatagcatcattttttaaattaacttctctaaactttcaaccttgnttttaaaaattgctatttaaaaaaaaaaaaaaa

SEQ ID NO: 50664 - DNA, 569 bp, Homo Sapiens
agaatggcttcaacattcctcaagtcaccccatgcccagaagtaggagagtacttgaagatgtctctggaagacctgcattccttggactccaggagaatccaaggctgtgcacgaagactgctttgtgatgcatatatgtgcatgtaccagagtccaacaatgagtttgtacaaataactggggtcatcgggaaaggcaaagaaactgaaggcagagtcctaacgttgcatcttattcgagctggcagttctgttcacgtccattgccggcaatggatgtctttgtggtgatgatccttcagaaaaggatgcctctgtttaaaaacaaattgcttttgtgtccctgaagtatttaataagaagcattttgcactctagaaagtatgtttgtgttggttttttaagaagtctaaatgaagttattaatacctgaagctttaagttaagtgcattgatcatatgatatttttggaagcatacaattttaattgtggaagtttaaagcctcttttagtccattgagaatgtaaataaatgtgtcttctttatggaccaagaaaaaaaaaaa

SEQ ID NO: 50665 - DNA, 602 bp, Homo Sapiens
gttctcctcgtgccgctcctaggatgtgcgggcagtgtgctggcgcctcacagccagccgggctgcccattcacgcagagctctctgagcgggaggtggaagaaaggatggctctggttgccacagagctgggacttcatgttcttctagagagggccacaagagggccacaggggtggccgggagttgtcagctgatgcctgctgagaggcaggaattgtgccagtgagtgacagtcatgagggagtgtctcttcttggggaggaaagaaggtagagcctttctgtctgaatgaaaggccaaggctacagtacagggccccgccccagccagggtgttaatgcccacgtagtggaggcctctggcagatcctgcattccaaggtcactggactgtacgtttttatggttgtgggaagggtgggtggctttagaattaagggccttgtaggctttggcaggtaagagggcccaaggtaagaacgagagccaacgggcacaagcattctatatataagtggctcattaggtgtttattttgttctatttaagaatttgttttattaaatttatatacaaatcttaaaaaaaaaaaaaaaaaaa

SEQ ID NO: 50666 - DNA, 595 bp, Homo Sapiens
ccattatggccggggggtttagggctagccctgcctccatctcccttgggtaaaatgaagggtgtggggtaaaagatgcataaggccttttctagctctgacagcctagaagtccaatcaccctgtaataaatatgtgttgaatgaagaaatgggtgaatgagcttgtcaatgtgattttaaaaaattgactacctggaggaatgattaggaatctaaatgaagccagccctcggtatctgcaggtttctcatccatggattcaaccaactgcaaatggaaaatacgattttttttaaaaaaaggatggttacatccgtattggacatgtacagacttttttcttgtcattattctctgaacaatacaagaactctttatgtagcatttacatttattaggtattataagtaatctagagattatttaattaaaatatacaggaggatgtgtgtcagttatatgcaaattctgtaccattttgtatcagggaattgagcatcttcggatgttggtatctgcagggatcctggaaccaaacccctgcagatactaagggctgacgatctaggtaagactggatttaacagttgtaa

SEQ ID NO: 50667 - DNA, 825 bp, Homo Sapiens
tctagcgaggtgacagcgtagaaccaggaagatcacagtgaaggataatctgatgaaggaacattgacaaatggacagcctagaatgcaccgttaccgtggaaaacgactgcacatcttgcttcccatcttggatcgggtgataggatttcatattcttggaccaaacgccggtgaggttacccaaggatttgcagctgcaatgaaatgtgggctcacaaaacagctacttgatgacaccattggaattcaccccacatgtggggaggtgttcacgactttggaaatcacaaagtcgtcaggactagacatcactcagaaaggctgctgaggctaggcctgctgctgtttagttctccttgtcatattctcatttctctcaaagataagaatgctctcggataaaatgagcctgtgctcatgacagctgctctgttactcagggaccagtgcagggctgtcttacgacacttagatgagaaagtagacaaggaaagaggacagcagtgggcatctgccttgtggtcttgctgacagcgagaagcagtgggactgcttccttgacgccttagcttggagccccgttatgaggtgagccaaggctgactctcgcaagccaggactgagcttccctcggaaagacctttgagtggcaccattcacctaagttagcttttctggtcgctattgtttttatcccctttgcttttgtgtttctgtgaaaatatattttcagttaaagaatgctaaaaaagaaaaaaaaaaaaaaaactcttcaagcgctgggatccggccaataaagggcctgatccctttcgaggggggg

SEQ ID NO: 50668 - DNA, 890 bp, Homo Sapiens
aggtactatagtaatttttagacatggtacccattgatatgcatttaaaccttttactgctgtgttatgttgataacatatataaatattagataatgctaatgcttctgctgctgtcttttctgtaatattctctttcatgctgaatttactatgaccatttataagcagtgcagttaactacagatagcatttcaggacaaaatagatgactcaaaccatttattgcttaaaaaatagcttacgccatgctatgctataagcagcttttatgcacattgacaaatgaagagtaagcttcagcttgctaaaggaaactgtggaacctttgtaactttggtgatatggaaaattatttacaaaccgtcaaagaatatgaggaagttgctgtatgacatagtgctggcactgatattatccatcatctctttttggacacttctgtaaatgtgattggattgtttgaaagaagatttaaagtttcaaagtttttgttctgtttttgctttgcatttggagaaaatattgaaagcagggtatgttgtttcattcaccttgaaaaaaccatgagtaaatggggatatagaatctctgaatagctcgctaaaagattccaggcagggacatgaattttgttccatctatcaataatttccagaagaacacttttttaagagtccatagcaaaaagcaaaaaaaaaaattctaacccaaagttaaataacctttgtaaagcatttcggagagctctaaaaagatgtttagaagttcccccggtcccttccaaatccacgatcaggctctttctaggggggtaccgaaccacccaatggtctcattattcaagccttacatgttgccgcaacaagggcgctccactttggccgcga

SEQ ID NO: 50669 - DNA, 840 bp, Homo Sapiens
gcatgtttctgatttccagtgaggttatgcatgtattcttaacatttattggcctttcaggaactttctgtgagttacctgttacattcctttgctgaatatttaatcgtttgttttttcatatttatttatagggattattttaaaattctgcatatgaatcctttctgttgtttagcaaatatctttgcccagtggatgacttaccttttaactttgttcctgatgtcttttgttgagcaaaagtctttcattttaatgttatcagattatcggtattttattcaatggtttgtgctttttgaatcattttaaggagatccttccctacaaatcaataagaaaaatacaaacaacacaataaaaataaaagtgtttataaaaacagacataacaggcagttcacagaggcaaaaacaccagtggcctatagacttaagaaatctcattagtaatcaataaaatgcaaaataaatctatactatgatatatacatttagtacttagaatgctggcatatatttaaaggcctgacaatgccaagtattggtgaacatacgaaacaataagaactctatgtaacctcagcactttgggaggccgaggccagcagatcacctgaggtcaggagttcgagaccaggctggccaatgtggaaaaacccgtctctactaaaaatacttaaaaatttagcgaagttggatgggacacactttgtaatcgcagtgctcaggagggtgagcatgagaatttttgaaaccagaggtggggttggcgtgaccaagacaggcatggattcagatccagctggtgaagaacgaagaattggtttaaaaaata

SEQ ID NO: 50670 - DNA, 999 bp, Homo Sapiens
gaacttgcaccgaagcatcactcgagaccccaaacctccaggcctgaggcccagccagcgcccaatggatgacaaaaagaagaaacggagtcccaagccctgcctggcccagccagcccaggccccaggcacactacggagggtccctgtgcctaccagccacagcggctccttggccctaggacttcctcatctgccatcccccaagcagcgggccaagttcaagagagtaggcaaagagaagtgccgcccagtcctggctggaggtggaagcggctctgcaggcacgcccctgcagcactccttcctgaccgaggtgactgatgtctatgagatggaggggggactcctgaacctgctcaatgatttccactctggccggctgcaggccttcgggaaggaatgctcctttgagcagctggagcacgttcgggagatgcaggagaagctagcccggctgcacttcagcctggatgtgtgtggggaggaggaggacgatgaagaggaagaggatggggtcactgaggggctgccagaggagcagaagaagacaatggctgaccgtaacctggaccagctgcttagcaatctggaagacctcagtaattctatccagaagctgcacctggccgagaacgccgagcctgaggagcagtccgctgcgtaggcgtcccacgcaggcccacactgcccctctcattctcttcaaactgtgactttttacagactcgggcgggtgttctgcggccccccaggtgctatggggggaggggggcgtttgaatggaattaaacccgaaagaaaagcaaaaaaaaaaaaaaaaaaactcgagggcatcttatatcggggggccggaaaaaaaaaggtaaatgaaaatgggcccatggggccataacctggttttccctgaacccaaccttttttttggaaaaaagagtggggaaaaatcttgcccgggtcctccccccaatagagggaagatccgcaaattaaaatttt

SEQ ID NO: 50671 - DNA, 869 bp, Homo Sapiens
aaccggaccgaaggagtagaaagaaatctgttctttcagcatgaaatacatttagtctcctcaaagggactgcaggtgttgacatgagttggaaagggaaccctgggatacgtggcgtcccctctattggaacagtctggggactgaaggcatttgtccctggatttattggagacggcccagctcctccctctgaaggtggtcacattctgttgactctccatactcagcctctcctccagaaacagatctgttccagaacattccagcactttctatctggcctccttgtccccacactacgcccccccaccctcgccagggcttcctctagtgacactgttagagctaatctctgagacagggaaggcattactcacttaaaacccaggctgagtcctggccacctgctggattgtgacataggaggtggaatccactgaactgctacttctgcacaggctccttctcctggggctgtacccaggcccagccctgatggctcaccctgtcaggcaccagctgttccctcctgggctctcacccaccagcacatcctccttcctagcatcacattaccctgcgtgtttccccagaaaaaagcacttcccattcttgaaccttgcctaccctgggctgagctgacggcaatagatttagtgacagtgactcccaggaagggggtcccggtgaactttgcgcctttaataagaacaaaaggtgggaaatggtggacctaggaaaaactggtgaaattctaaaaaagaatggaatttagtttcctaaccccttgaaaaaaaaaaaaaaaccccgcttttctttgtacaaagttgggctttttaaaaaaaagccctggccttataccaaaa

SEQ ID NO: 50672 - DNA, 571 bp, Homo Sapiens
gcacgagcttgactggttggacattgcatcaaatacacgccccatgtatcctttctgtcgtaaagttaagaacgctcttgcatttgatgtggaatatagatgatattactatctgctattctgcctttgttctgaaacaattgctttgtcagctaatttcattcaatatttgttttttagacgatctctataagttattaatttaacctgaaaccaaagtggtctccatttaaagttacttaatccctttgtaccacctatttctagttaaatatatgttgctatgcaaataggtaaagtgcttccttgccatgatggtaatggattggaactatgaaggctctcagtgtattggcttctgtaaagatgaggcgtctcctcagaaacaaaacttttcacatttctgcttactagacctgggttgatgtacatggtaagtctcaaacagatgcaagctatgtgcaaaaagtaactttagccaaatggaaatagctggatgctttgagaattacttggttgaagtaagaaaactgtaccatcctctatcctgtgtgccataataaaatagtaa

SEQ ID NO: 50673 - DNA, 783 bp, Homo Sapiens
  misc_feature (597)..(603): n is a, c, g, or t
  misc_feature (605)..(625): n is a, c, g, or t
ggtctctttgaacatcataaacacactttggtgttggtaacagtattttaagcatttttgttcacttttaaggactatttgtttagtgcatcttacaaactataaatcttaattggtatattttgaaatggtcgtgtaaatttttgccttatatatcatgaaaatagtcataacttaatttcttttcctgaaattcactgtaaaacattcaggggtcctaccatttctgttcaggaaatcttgtagtttattgttgttatttaacagtattaagtggatttttgtatatttcattttaactttatttgtgaatagtgattgtggcatgtttggggtgttattttaatatttcacgatactaaaattttaattttaaaaaattctggaagaaacagattcatgtgtaatggtgaatattggaccactactgcttttcacatttgtaaattggttttatgttaaaccttgtagcctaacaaactgctgttctttctaactgacagacatgtattaatattgtactttgaaggttataaatatgtggaaattccttcattttgttttgaaatttataataacaaaatctccatgttgccnnnnnnnannnnnnnnnnnnnnnnnnnnnccatgtcggccgccctcggcccctcgaggaagctttcttagaccatttcgttttggcggcgcggggcccagttaggtaaagtgaaacaatgggtcaatagcttgtttttccttagggaagatccctgggtcaatgaaacatagtggccttgggaattt

SEQ ID NO: 50674 - DNA, 532 bp, Homo Sapiens
agtttgctgtatagtgaggatcaggagatctgatcctgattgcagaaccttccctgattacagaatcttgggattgttgagaggattacatgtaaagtaccaggacagtgcatggcacatgtaagtatttgctttaataataattatggttctgttagtcctgataatctcatgttttatctacacatttacacctacttctaaaagcagtggatatatttctttttggaattgtgtaaaaaaaaaataataattaataccgttggtttctctcctcattttccagaagcagcagttaccactagaactgaattccgaaattatgacttctggcttgtcttaacaatctagaaaggtttcaaatatattgatcatatttatttatgagggaatttccaggagctataattttagctagcagttcaaaccaaatttataaataagcaaatcttttcactgaatattcagtctgctaacagcttttgtatcattcctcctttgtctcagacttaaaaaaaaaaatctattacat

SEQ ID NO: 50675 - DNA, 583 bp, Homo Sapiens
tcgtgcatcccagccaccaccctgagatatgcggctcttccctcgggcccagatgcagacggtgccgaacgctggccactggatccacgctgaccgcccacaggacttcatagctgccatccgaggcttcctggtctaagagttgctggcaagaagatggccgggcgtggtggctcatgcctgtaattccagcactttgggaggctaaggcgggaggatgacttgaggccaggagttggagaccagcctggccaacatggtgaaaccctgtctctactaaaaatacaaaaattagcctggcgtggtggtgcacacctgtaatcccagctactctggaggctgaggcaggagaatcacttgaaccctggaggcagaggttgcaatgagccgagatcacaccactacactccagcctaggcaacagagcaagactctgtctcaaaaaaaacaaaacaaaaaggaggcacaaaaccccaggcttcaagtctctgcagcctgctccacatttgggcacagaaggactcagacaggcactgtgtgggcacgaggttttacaggggtggtcagacctcaggctttaatg

SEQ ID NO: 50676 - DNA, 488 bp, Homo Sapiens
agagctatgatcaggccatttctgcaagcaatgtatgaccccacctgagcaaccacaaataggctctctgtgaaactacaaaggaagttatgtgtggcatccatgttggtttcgtctgtctgtaatgtgaattccagtatttgtttagtatttccagttgtctcctgctagcaatatgtacagtaacgcgtcaggcttgtgacatttgaataaggaaaaacagagttcctgttaagtgaataactttagcttttacaggggattatgatcaaaagtgattttagtacatcttaaatgatatcttatttctacatggaaagaagttatagaatcttcatagagttctatgagaaaaaatatacttgctatctataaaaaagagaaaaaagaaaaaaaatgagaaaaaagtaagaaaaaaaaaaatcctgtcctaggcttttactcttgatcttcaaaggcacgcagggtttaatggttccttgggttat

SEQ ID NO: 50677 - DNA, 671 bp, Homo Sapiens
  misc_feature (5)..(5): n is a, c, g, or t
  misc_feature (19)..(19): n is a, c, g, or t
  misc_feature (39)..(39): n is a, c, g, or t
  misc_feature (576)..(576): n is a, c, g, or t
  misc_feature (579)..(579): n is a, c, g, or t
  misc_feature (590)..(590): n is a, c, g, or t
  misc_feature (594)..(594): n is a, c, g, or t
  misc_feature (624)..(624): n is a, c, g, or t
  misc_feature (626)..(626): n is a, c, g, or t
  misc_feature (667)..(668): n is a, c, g, or t
cgagnatcgcgccactgcnctccagcctgggcaacaagnagcgaaactctgtctcaaaaataaaaaattccctttaacaccttcaaggtcaaatgcctgcctttgtgaacagttaataaactgacattttcagacatttgccattcagaagggagcattgtagcctgctgtagaccattccagcaaatgtcagaatgcagggcaagatgtgtgtcgactatgttttttatgtttaagttacttacttatttcttcaggtaagtgtgtaccaaataacaatactgaaaagccctccccttgccaggccgaggaaataaagcttaagtgaaacagctcttgggggaaaaatgccactttacaaatacttttctaacaaaatagcattataatgaagtttttacttaattccattatttatatgttgacgtgaatgtaagtggttaaaaagtattcatgtgggacatctcattactttgtagctgtggctttattaaccagtgaatgctgtggcccttagcgaaatgcgttgtcttctgcgtgatgtggaattcgcgcctgtattttaaaagatggtgnggnttctcccttgnttgnattttaataaacaactgctctaattgatgngnttagacattataaagctttacctttaaaatattttcagggnnctg

SEQ ID NO: 50678 - DNA, 785 bp, Homo Sapiens
  misc_feature (11)..(11): n is a, c, g, or t
  misc_feature (48)..(48): n is a, c, g, or t
  misc_feature (61)..(61): n is a, c, g, or t
atggcccagtnccagtgggtggtacgggtgggccggccactcacaggnccgcacacaccanattcgagtccaccttcagttcttgggccatcccattctcaacgaccccatctacaactcagttgcctggggtccttctcgaggccggggcggctacattcccaagacaaacgaggagttgctacgggacctggtagcagagcaccaggccaaacagagcctggatgtgctagatctctgtgagggtgacctgtccccaggactcacagactctacggccccctcctcagagttgggcaaggacgacctggaagagttggctgcagctgcccagaagatggaggaagtagctgaggcagcccctcaggagttggacacaatagccttggcatcagagaaggcagttgaaacagatgtcatgaatcaagagacagacccactctgtgcagagtgccggctggtgcgacaggatcccttgccccaagaccttgtgatgttcctacatgccctacgctataaagggccaggctttgagtacttttcaccaatgcctgcctgggcacaggatgactggcaaaaggactgagggtgtggccaatggagggattgcttcttgggttgtgacaaggatgggctatagggcaagggctgaccccatgggctagtacttggggtttctataggaatgaggacgggcttctaaagagacctgctcatacttgctacctccttccagtgggaatttggagactttttggtttgtaaatatatccctttttctaaca

SEQ ID NO: 50679 - DNA, 638 bp, Homo Sapiens
ctcatgctgttcagatagcgctgatggccctgaagatgatggagctctctgatgaagttatgtctccccatggagaacctatcaagatgcgaatggactgcactctggatcagttttgctggcgtcgttggagttaaaatgccccgttactgtcttttggaaacaatgtcactctggctaacaaatttgagtcctgcagtgtaccacgaaaaatcaatgtcagcccaacaacttacagattactcaaagactgtcctggtttcgtgtttacccctcgatcaagggaggaacttccaccaaacttccctagtgaaatccccggaatctgccattttctggatgcttaccaacaaggaacaaactcaaaaccatgcttccaaaagaaagatgtggaagatggcaatgccaattttttaggcaaagcatcaggaatagattagcaacctatatacctatttataagtcttggggttgactcattgaagatgtgtagagcctctgaaagcactttagggatgtagatggctaacaagcagtattaaaatttcacggagccaagtcacaatctttctcctgtttaccatgacaaaatgtatgttctcacttcagtacttcagtcttcaaaaaaactcaaacca

SEQ ID NO: 50680 - DNA, 329 bp, Homo Sapiens
gcgtcgacattctatcctgccagtgctttagaataacttgcattttaaagtacatttgcacattttacatataatgctatatggttgtgtttgggctttgtgtacagatgacttttgttattaagtggaaaaggcctgaaatatgctgttctatgttaagtaaattgatataacctaagaaaagatcttgttgccaattcagaaaccataaccttaaatagcatgcctgggtctcctctgtatctggtttaacatctgcattgaatattggtattttccaataatctccaactagcttatttattttgaaaaaaaaaaaaaagtcgacg

SEQ ID NO: 50681 - DNA, 549 bp, Homo Sapiens
tgatgtcccccaggctgaggggaagctaggctctggggcccccagtgctttgcccctctgtctgccctgtcctggggtgatggacaaacagatgaccacaggcaggagaatctgagattggaagcctctaggctgagccctctgggcctggccccacatccctcacctctgcagcctgggctgcctgcctccatctcctgttcattctcagctggcctgccaggagccaatggggagcctggcgggaggcgggggtgcctagagctttcaagaagtgagagcaccaacctgaggagtggacagggaccaggaagtgggggaagggaggccaggaagaggtggatacaggagacacttctcatctcatctcagaccctagaggggtccacagatggggacacaagacccagccagcccactggatggcccgggcaagtaacaacctctctgtgcttcatctgagggcacggtgagagttaccgtcggcctcccagggcctaacacgagtttcatgtgagtggacaggtgtgagctaataaagtgctttgc

SEQ ID NO: 50682 - DNA, 462 bp, Homo Sapiens
aaatgagagttcgggcagatgtgagccctggggaagaggcagcgggaaggtgggagctgagcaggctgtggggacatcccgggcggaggcttgctggaggccagggtggctggaacacagggagccaaggggcaagaggtctgggatgtggctggatgggcatgaagagccttctgggtacctagaggtgctgggaaggagtttggatttaatcttggctgtcctgtgacagggattcggaggccatgggggagggttgagcagggagacaggagacaggcaagaggcgctgtgagaagcgtgggctgagtgacctgctccttggtgagtgagaagtcctagaactgagcaccatggcatgcacctgtagttccagcaacttgggatgctgaggtaggaggatcactttagcccaggaggttgaaactagcctgggcaacatagcaagacctcatctcaaaa

SEQ ID NO: 50683 - DNA, 664 bp, Homo Sapiens
  misc_feature (637)..(637): n is a, c, g, or t
  misc_feature (639)..(639): n is a, c, g, or t
tgactcttacccagttcacccttcccagaatgtatccaaaccttgagaatgcaggagctctgtgagctccaccgtcagcaccattcagctgcatcccttgtgcacagaactgtttgccagcgttgggtgggacacccgtggcggctgctccctcagacctcccttctgtggactgacctctcacctccgcctgttgttcctgcaccacatcagataagcatgtgaaggagggccaactggcagctgcgggacccttggcttgtcccccaccgacaagtcccacctgctgggtgaggacgagactgtttccatctcaggcatgtatcccaccaagtgcctccctcacagccatgcccagaagcctcacacctcgtcaccaccaccaccccccaccccatcctgaggcactgcctggcagataaccctggttggccacagaagctattaatacacgacagcatgtggggaaggacttatggtgggccaggtggacctcatcctgcttcttcctccctctggtttaaagagatatataaactaatttcacataatttgtgtgtgcaggtgattggtttttacataagtcctatttataccttttatatgttacagaaataaaagttaatttatataaaananaaaaaaaaaaaaaaaaaaaaaaagg

SEQ ID NO: 50684 - DNA, 904 bp, Homo Sapiens
  misc_feature (876)..(876): n is a, c, g, or t
  misc_feature (878)..(878): n is a, c, g, or t
  misc_feature (881)..(881): n is a, c, g, or t
  misc_feature (885)..(904): n is a, c, g, or t
cctgggtggcatttcggacgaggtccaataattgccccttcaaatgtttcatctaaaggtgacagcttgtgggcagaaccatgcacaggaagtgcctgccagtgggtgttaggagatgtaggtggagtctgtgatagccaaccaaaagctatccccttctcgcccagaaaagccacgtgctttgctggacgctacttgaaatctgaactctgcacctacatatgtagtaaaattagacacttttgtcactttaatttttagattatctcaagttttcactagatttcaatgtgccacttgtgctatgagtctttaagaagctttaaaaaataaatgcacacctgtagccttttaccattcagacaggtagattatatttacctgtcatgagggaccatgtatggttgacagttgcaggtttgattaaatccactatattgcacaaattttgctggaaataatttcctgccctgccaagagctctatggtagtttgataataaactactaccccagtattcttaggaactgtgttactaagtcttttctgcctgatttgtactttatttccatagacccctcagatatgtgaggaatcaagccataaatgtgcatttgctggacattatgtaccatgtcatctctatgactacagatttcaaggataatttttacatctaacaatttcactgtaacagtgaccgataatgtgagaaatgtgctttttacagtgctgctggtgggtagacaagtgcttgctgcagttgtttctgaatctagccagatgctggagtcgtgaagctgtaagctccgcgggagcagggaccatctctctttcttgcactacaggcactcaataaatacttggtggctgtgnanaanaaannnnnnnnnnnnnnnnnnnn

SEQ ID NO: 50685 - DNA, 760 bp, Homo Sapiens
ggctggtaccggtccggaattctcgggatatcgtaaaatgttattagttacttaacccatatgatttatcttagaaccacagaacctcaggagctaaaatgaacattttataataacaaaccgggtccaaaataaatgacttacatagatttataaggtaattaatgacagagctgagtcaaggattcatgtttcttgatgcctagtttagtagtctttgatgcaacagacatcaagtacatattatatctagaagtaatgtattaaagataatcttttggcttaaatcattttagaatgtgtaacatccttgtaatacaagtcattacccatttcaactagagaagaagatatatagaaatatcaaatgttaacaaggtaataggccattgcttttgtgtaattcaacaatttgataatgatttttgttcttttgccctagttattgataaaattcttaaagtgaacattgcctactgcctatttctaggtgctgttccctttaataagtatatttttgaacatcatttcgtttaacccctgtttttaacccaatttagaaatctatctacttgaattatgttcatttctcttccctatgtatatcttctcgagtaaccaaattgagaattatttctcatcttgactagaaacggacactctatctcttcataatgaaggtgtccacacctctgtcgccttacattaaagaattggcccttgtcccattctcgtttacagaaaaacacacaacaaacaa

SEQ ID NO: 50686 - DNA, 597 bp, Homo Sapiens
cacacacacacacacacacacacacacacacacactcactcactcccctacacctcagacatacttgaaactcagaaacagcactgagtctccccatgccaattcttgcctgctgtcttcgacttgggtcagagaaggtgagcagacccggcagcagcctgtcccggggctcaggaagaggcaggcccatcccctggccccaagcacccagcacaacagagggtggcgggcagtgagggcctggcgttgcctgggccccacttctcagccccagctgctgggcctccaaggttgggctgaggatggagttttggctctgggtttgccctgactcctgctggaagacgctgccctggtttttcaccctctagtggccttggacattgagtatttgtagaaatgcagattacattgcaaatggaaacctttgccaggaagacacatgcattttgcttttaattctttgagacatttgattttgtcttagggactgacctttcagcatcaaagaaatacatatctactgtatccgccaaagtttgtgatgcctgcatagacgcttacttgtaaaaaaaaaaaaaaattcaaaaaaaattc

SEQ ID NO: 50687 - DNA, 740 bp, Homo Sapiens
tgggaagggagcagccaggggcagacaaaaccctcagaaaagtccacgagggaagagaaggaacggtggatccgttccaaatatgaggagaagctctttctggccccactaccctgcactgagctgtccctgggccagcagctgctgcgggccaccgctgatgaggacctgcagacagccatcctgctgctggcacatggctcctgtgaggaggtgaacgagacctgtggggagggagacggctgcacggcgctccatctggcctgccgcaaggggaatgtggtcctggcgcastcctgatctggtacggggtggacgtcatggcccgagatgcccacgggaacacagcgctgacctacgcccggcaggcctccagccaggagtgcatcaacgtgcttctgcagtacggctgccccgacgagtgtgtgtagtatctgttttatttgactgcagtctccttggtgcaaaaacaaaatgggaaaaataaggataactcagaatttcaaaaggaaatcacaaattcagctaatattagcattttcagtacttttcgtaaactaagtaaatacacaaaaatgttgatttttctgaccataagacgtattttatgtccttctgccaaggtggatttgttagtctcaggccctcctggccacattgcccaagtcacacaggcttctgtattatgtatttagataaaatgtgtgaaacatatttgaaataaagttcataaatatgca

SEQ ID NO: 50688 - DNA, 470 bp, Homo Sapiens
gcacgagcaaaatgagtggtgttcaagaattggtttgtagcacaatatttcaactatgtcctttaaaaagtttctccacagacactacccaaagcagtgcttcactacagtggcagacagacctgaaaattttcatctgaagcagcagagtgaactgcagaggcaggtcaccaaccagtgtggaggctaaaagcgggcctctttggggattccaggtggaagtgttggacatctgtagtattcctggtctcgaatcatcctgatattcttcattttgttattcacattggactaggagatagaatctcactatgttgaccaggctggtcttgaactcttggcacccaagcgatccttttgcctggaatcccaaagtgtcagatttactgaagaatatttcattgtaattactttttatactttataggtcaagagctctgttttaaatacaaaatttattgaatatactt

SEQ ID NO: 50689 - DNA, 308 bp, Homo Sapiens
aattcgcggccgcgtcgactggaatgttaaaaccaagaaaatcattgctgccttttcaagagttgagactttagctttacttttctatgagtctttatttatcaaaggtattctcaggaggtaatgatgaacctgaaactgttccagcctgtgctgaaatactcccacaccatgttgttggaatagatgtaagcactcttcgtaaatccatgccagaaagttcttcccatttgaagtttttgccatcagattaagaggaggaaattcccatctgttcagaggcaacagtgaccaaaaaaaaaaaaaaa

SEQ ID NO: 50690 - DNA, 605 bp, Homo Sapiens
cccacatctgcttcttcatatttcttgatcctgccctggatctacagttacacttttctggaaacttctctgggatcaaagactaggggtttgctctaggaccttatggccctgcctcctttctggcctctcacaggacattttcttcccatagatagaaacagagggagctactctcaggctgcaggtaagatgaaggaggctgatccctgagattgttgggatattgtggtcaggagcctatgagggagctcacccaccccacagttcctctagccacatctgtgggctctgaccaggtcctatttttgttctaccccaatcactgacagtgcccagggctctggggtgtctctcacagctaataaaggtgacactccagggcaggggccctgatgtgagtggggtgttgggggggaacagaggggactcagctgtgctattgggtttctttgacttggatgtcttgagcatgaaatgggctatttagagtgttacctctcactgtgactgatacgaatttgttcatgaatattttctctatagtgtgagacagcttccttgtgtgcgactgagaagcaagatatcaatgtagcagaattgac

SEQ ID NO: 50691 - DNA, 999 bp, Homo Sapiens
cccgccgctccagaccccggaggagggcagcgcgaccctccccatcttgttamtggtactcagcmactggggacactgactgaatgttcgcmcctaacttacccggaaaamacgagaactagttcgatgtcgtttcaacmttacmaaactctgcggaaacttaggaaattatctttagtgtctagataggggaattgttagatggacttgaagtctctcacctcctgttgtacgcmtcmcggaagcaamamcaggagtccaamgggatcmcaaammagagcccaamcagtatcctataaagtmttmagagagggatcccctccaggctggggagaaamaggacaaamtaaaaaaamagggmmtggamtmmtccctaaacagaccacgtttttmtmcgctmttccccttcccactccctgaaatctagactaaaamtmttttaagataactgcgaggtataaagaacgtmtagagcmtaagaggcmmgttgcmagattctactcctcaggcctcaaatgtgagcgcmccaaamattctagagctgaacctggcgggcaaggcccccgatcacgtgataccgccccccaactccgggcggaagaggccagcgacasgcctgcacgaagcgagtgggcgggcgctcgtgcccggctaaaagatggctgctggcgcctggcagccaccgcctgggaggttactgtaaggcccgcagctcccgccagctcccgcggactgctgccgcctccttaccatgaagccagtaagtcgtcgcacgctggactggatttattcagtgttgctgcttgccatcgttttaatctcctggggctgcatcatctatgcttcgatggtgtctgcmagaggacagctaaggaagaaataaccagamaaaatctttggggacgaatgaaaatttgtaactcttctggatttaattatctgaaaatacagttctttccctcatgcttatgtagatataaaattaaattmttatgsaaa

SEQ ID NO: 50692 - DNA, 489 bp, Homo Sapiens
taaacccattggtccaaggactatcaactggtgacgtggtcccgggatcagaccttgagaatgtggcgggtggattcccagatgcagaggctttgtgcaaatgacatattagatggtgttgatgagttcattgagagtatttcccttctgccggaacctgagaagaccctgcacactgaagatacagatcaccagcacactgcaagccatggggaggaagaagccctaaaagaagatccccctagaaatctcctggaagagaggaaatcagatcaactggggctgcctcagaccttgcagcaggaattctccctgatcaatgtgcaaatccggaatgtcaatgtggagatggatgcggcagacaggagctgcacagtgtctgtgcactgcagcaaccatcgtgtcaagatgctggtgaagttccctgcacagtacccaaacaacgccgccccttccttccagtttattaaccccacaaccatcacatcc

SEQ ID NO: 50693 - DNA, 606 bp, Homo Sapiens
ttcccacagcctgcgcttgcctccctgcctcatctctattctcattccactatgccccaagccctggtggtctggccctttctttttccccctatcctcagggacctgtgctgctctgccctcatgtcccacttgtttgtttagttgaggcactttataatttttctcttgtcttgtgttcctttctgctttatttccctgctgtgtcctgtccttagcagctcaaccccatcctttgccagcycctcctatcccgtgggcactggccaagctttagggaggctcctggtctgggaagtaaagagtaaacctggggcagtgggtcaggccagtagttacactcttaggtcactgtagtctgtgtaaccttcactgcatccttgccccattcagcccggcctttcatgatgcaggagagcagggatcccgcagtacatggcgccagcactggagttggtgagcatgtgctctctcttgagattaggagcttccttactgctcctctgggtgatccaagtgtagtgggaccccctactagggtcaggaagtggacactaacatctgtgcaggtgttgacttgaaaaataaagtgttgattggctagaa

SEQ ID NO: 50694 - DNA, 909 bp, Homo Sapiens
tcttccagaatttaccaaatcagagaatgtcattccttagagcacagactgcatactctgatttggtatatgttgtcggtggctatgatgggcaaaacagacttagcagcgtagaatgttatgattccttttcaaatcgatggactgaagttgctccccttaaggaagccgtgagttctcctgcagtgactagctgtgtaggcaaactgtttgtgattggtggaggacctgatgataatacttgttctgataaggttcaatcttatgatccagaaaccaattcttggctacttcgtgcagctatcccaattgccaaaaggtgtataacagctgtatccctaaacaacctgatctatgttgccggtggactgaccaaggcaatatactgttacgatccagttgaagattactggatgcacgtacagaatacattcagccgtcaggaaaactgtggtatgtctgcgtgtaatggtaaaatatatatcctggggcggaagacgggaaaatggagaagccaccgacactattctctgttatgatcctggaacaagtatcatcacaggggtagctgccatggccaggccagggtcctatcatggctggggtgactattcgtagataccatgagaaatgctttacactctgaagacgggatacttccccggaaaaagccacactgactcccgaatgggagggtttaaaaaatctcccgcgggggacttccccctcatttcctttgtgcccaaatgccaaaaaccacgaaaaaaaaactcatttggggggcctttcctgcccacaaatatcaaatcccttcgaacttatgagtggcggctcttttctaaaaattgggaagaaaaaaattttttttccctaagcggactcgggggggttgacaccttgagcctctag

SEQ ID NO: 50695 - DNA, 450 bp, Homo Sapiens
cctttactcagcagggtatacactacttgctgcatgaagtaatttggaaaaataagatttgggctgaaatctttttcacagcagggtaagctaagttagaaatggccaatgtatgcttttactctggtttggttaataggatcctagtgtaagtattcccaagtttacataagccaggtgactgtagattttccatgtagaaagaacccaagcatattcagtcatggcctctagcgggtagatgggcattgggccattgataacttacatttgatatggatacacattatttgactgagaaactcacaatgcacagactccactcactgaccagccccaccctggccaattctgctaagttcttcagaacagctgagtgacaaaggtcttttctggcgtgagaattgtttacagcaggaagctggagcccaaatctgccctctgtgttac

SEQ ID NO: 50696 - DNA, 1522 bp, Homo Sapiens
ctctttcccttcggtgtgccactgaagatcctggtgtcgccatgggccgccgccccgcccgttgttaccggtattgtaagaacaagccgtacccaaagtctcgcttctgccgaggtgtccctggtaagtagtggaagagcccctgcactggttggctctgcggactccgcgtccgtctgtgacaccccctgcacacttacccaatccttttagatgccaagattcgcatttttgacctggggcggaaaaaggcaaaagtggatgagtttccgctttgtggccacatggtgtcagatgaatatgagcagctgtcctctgaagccctggaggctgcccgaatttgtgccaataagtacatggtaaaaagttgtggcaaagatggcttccatatccgggtgcggctccaccccttccacgtcatccgcatcaacaagatgttgtcctgtgctggggctgacaggtgagcttggtctgggccttttaaggagttggagtctctacattattaggcttgcattattttatcagagcatagaggtggccccagtgactcagccactatggctactagaaaagccaggctggcaagtgactttcagtggtcactcaggaccccttcctgcagatacaaacaaagcatgagtaagtcttagcaagctcttccccacaggttaggggaaacactggtgatgggagtagctcttcttgcttttagctgaatgacaaccatcttgccagcaggtagctgaagctggcagaggagcccagtggcgccttttcagtggttcttgggatgctccgcagccaattaagccgactgagttcctttcctcatggggacccagtgtgcgatggctgcacacagcagcttccttggtagtgtacgcagcctgttggttgtatgggttgctctaagggaccttggagacaggcctttcaggtggatgttcatgtttctgaccttgcactaccccaatgtaggctccaaacaggcatgcgaggtgcctttggaaagccccagggcactgtggccagggttcacattggccaagttatcatgtccatccgcaccaagctgcagaacaaggagcatgtgattgaggccctgcgcagggccaagttcaagtttcctggccgccagaaggtatgtagtgctgcagcccccttctcccacctttgccccaggcctcctgactcagttctttccattgctccttagatccacatctcaaagaagtggggcttcaccaagttcaatgctgatgaatttgaagacatggtggctgaaaagcggctcatcccagatggctgtggggtcaagtacatccccagtcgtggccctctggacaagtggcgggccctgcactcatgagggcttccaatgtgctgcccccctcttaatactcaccaataaattctacttcctgtccaaaaaaaaaaaaaaaaaaaaaaaaaaaaaaaaaaaaaaaaaaaaaaaaaaaaaaaaaaaaaaaaaaaaaaaaaaaaaaaaaaaaaaaaaaaa

SEQ ID NO: 50697 - DNA, 908 bp, Homo Sapiens
  misc_feature (14)..(14): n is a, c, g, or t
  misc_feature (17)..(17): n is a, c, g, or t
  misc_feature (734)..(734): n is a, c, g, or t
  misc_feature (748)..(749): n is a, c, g, or t
  misc_feature (761)..(761): n is a, c, g, or t
  misc_feature (767)..(767): n is a, c, g, or t
  misc_feature (854)..(854): n is a, c, g, or t
  misc_feature (857)..(857): n is a, c, g, or t
agtcaacaagtggnagnaagctgtactcgaccccactgctggccatccctacctgcatgggtttcggtgttcaccaggacaaatacaggttcttggtgttacccagcctggggaggagccttcagtcggccctggatgtcagcccaaagcatgtgctgtcagagaggtctgtgctgcaggtggcctgccggctgctggatgccctggagttcctccatgagaatgagtatgttcatggaaatgtgacagctgaaaatatctttgtggatccagaggaccagagtcaggtgactttggcaggctatggcttcgccttccgctattgcccaagtggcaaacacgtggcctacgtggaaggcagcaggagccctcacgagggggaccttgagttcattagcatggacctgcacaagggatgcgggccctcccgccgcagcgacctccagagcctgggctactgcatgctgaagtggctctacgggtttctgccatggacaaattgccttcccaacactgaggacatcatgaagcaaaaacagaagtttgttgataagccggggcccttcgtgggaccctgcggtcactggatcaggccctcagagaccctgcagaagtacctgaaggtggtgatggccctcacgtatgaggagaagccgccctacgccatgctgaggaacaacctagaagctttgctgcaggatctgcgtgtgtctccatatgaccccattggcctnccgatggtgccctnnagtggatccagnactttncatttgcagtgtgcaaacagaaaaaaaaatgaagtaatgtgactcaaggcctgctgttaatcacagataagcttctagacaagcccntgnatgtgcattcctgccactggtttcaggatactcatcagtccctgatagcct

SEQ ID NO: 50698 - DNA, 754 bp, Homo Sapiens
aagttgccttgggattcattttaatgtaagctggactttgtcatgccagaaacaaggctcggtcaccgtcagcagtttgcagttttccacctcctcccagttcctccgtgtggttgacccagatatctccgttatgcagccgcctccgggggaccacctccctccctttgagtcagccacagacagcctacttgacggccccgctggcccccacattccactgaactgtgcggatgccacagtgaccccctctcaggcacagcatgacctcctgaagtcgagcctgcttgctttgaacctaccagttaaaatctcctcaaaatgtttggataccgcccattggcccctcacagccacgagctccctgaccagtgtgcgtgtgtgtgtgtgtgtgtgtctgtgtgtgtgcttgggacgggtggggaggtcacctttgggtgtgcggtgtgcccccaggacctgtaagtaataaaatctttatttccatcttggatctttcctcatcatcaaagggatcctctccgtcttaaggatcacagattaaaagagttcaatgctaaaaagaaaacagaaaaagaacaaacgaagacgacaacaaacagggggggcgcgaccagaggagataccccacgggaggcgccagaacagagcgcggaaacacaggaacatcatggacgaacaaggggggccccaagaaggcgaacgcgataacacacacggaccacaggtggcagagtgaacacgccgcgcaaat

SEQ ID NO: 50699 - DNA, 626 bp, Homo Sapiens
agcctcccgagtagccaggactacaagcacccgccaccacacctggctaatttttttgtatttttattagagacagtgttttaccgtgttagccaggatggtctcgatctcctgacttcgtgatctactcacctcggcctcccaaagtgctgggattacgggcaagtttttattagagatggggtttcatcatgttggtcaggctggtcttcaactcctgacctcaggtgatccacccgcctcagcctcccaaagtgctgggattacaggcatgagccaccgcgcccggcctgaactctcagttctaacgcagggattcaggaattgggctttcagactccttctgcagtgtcacagtccagactttttttaaatgaaggacaccccgcagtggctcacagtgggtcccagggctagcaggagcgtgctggggagccggctctgtctttgttcgcagtgggtcccggtgctggcaggagtgtgctggtgagccggctctgtctttgtaaatccttcaggggtcctacggctgactccaccggacagcccgtcctgggccgtgttaagcaccttttgtagaaatcgtatttttattaaaacatcaaatctgtgttccaaaaaaaaaa

SEQ ID NO: 50700 - DNA, 604 bp, Homo Sapiens
  misc_feature (551)..(551): n is a, c, g, or t
gagaatggtttcccaggccagatgggaattcgtggccttccgggcattaaggggccccctggtgctcttggtttgaggggacctaaaggtgacttgggagaaaagggggagcgtggccctccaggaagaggtcccaacggtttgcctggagctataggtctcccaggtgacccaggccctgccagctatggcagaaatggccgagacggtgagcgaggccccccaggggtggcaggaattcctggagtgcctggacccccgggacctcctgggcttcccggtttctgtgagccagcctcctgcaccatgcaggctggtcagcgagcatttaacaaagggcctgacccttgaaaggcttactgctgcatggctgtctgcatgaaccacgcctggtgaaggagcctgggtgagaaacaccatccaaagctggggcaaagatgattaccttcagcatgattacaatgtattaccttcagtatgattacagaagtcctacttgacaatcacatatagaagaacggtgctattcagtaagttctctttcctttccncttggagggaagacagcagagtcatcagttaaaaaaaaaaaaaaaaaaatgcg

SEQ ID NO: 50701 - DNA, 916 bp, Homo Sapiens
  misc_feature (670)..(670): n is a, c, g, or t
  misc_feature (729)..(729): n is a, c, g, or t
gctcatgtacttcaacctgggctccctgccctggcaggggctcaaagcagccaccaagcgccagaagtatgaacggatcagcgagaagaagatgtcaacgcccatcgaggtcctctgcaaaggctatccctccgaattctcaacatacctcaacttctgccgctccctgcggtttgacgacaagcccgactactcttacctacgtcagctcttccgcaacctcttccaccggcagggcttctcctatgactacgtctttgactggaacatgctgaaattcggggcttcctcgagccaggctcagccccgtgacagccccatgacagcgaagggacctttctgtccccgcccctgtccctgtgctgggcccacgtactcacccacgtactggtgcccggctcccctgggcacccagagccccccagataggccggtggaggaggtggaggagctgtccccccaaaactactggcctgtggtctggactccagggccccatttctgatgtcgccaggtgtgcctgagcccatcggggcaggctgaggaagtgtttcttgggaggatgggatgaccccctgttcccaagagatggcagcacagtggaggccatggtggaaaaggcctgcatggggtccttgagggccaggacagcctgagggagggatggtgngcactgcccacaagggcctggtgggaacgggtccaggacagactcatagctagaccgtnggcggctctgtgttgaccagactcattaaacactctctgttcaaaaaaaaaacaataaaaaaaaaaaagggggggcaaagatcccggggcactaccgacccttgtaaaggcccagggggtaaagagcggcgcgaacggaggagtctgctggaccctggggcggaccccagaccgaaggtgcacccga

SEQ ID NO: 50702 - DNA, 579 bp, Homo Sapiens
gcacgagcaagagccctgcttcagatacttacatagtttttggggaagccaagatcgaagatttatcccagcaagcacaactagcagctgctgagaaattcaaagttcaaggtgaagctgtctcaaacattcaagaaaacacacagactccaactgtacaagaggagagtgaagaggaagaggtcgatgaaacaggtgtagaagttaaggacatagaattggtcatgtcacaagcaaatgtgtcgagagcaaaggcagtccgagccctgaagaacaacagtaatgatattgtaaatgcgattatggtaagtgttcaagcctttgttccttgactccctctgccctgaccaattatgagtgactttattttgtcttgctaaatatcagccaattaaggaacctcattccagagcctcttctgagttgccgtataggttttagtggcctaaattctcctgatttgcctgtaagagttttagtgacctgaattctcctgatttgcctataagaaccgctaattatcttttctctgttacaggaattaacaatgtaaccatatggaagcaactttttttggtg

SEQ ID NO: 50703 - DNA, 344 bp, Homo Sapiens
tatttttaacatgtttatagatactacttgggggagggcagctaatgaaaccttcaagctctatgcagtccacagacgtgagctctgtagagttcgcagaggtgggtaagtacccagccagcacacccagttgaattcagccaggatttattgagttggcatcacggacgctgacagcctccaagtgaaaacccttctcttgaatatgtacaggtttcccatccacataccaagctgatgaggatcccatcgttcttccccagtcctgaggagcccccctcgccatctgcaccttccatagccaaatcagggtcattggactcagaacctttagtgtccccaaa

SEQ ID NO: 50704 - DNA, 835 bp, Homo Sapiens
ctcaaccagggctgctggcgccagtgcgcgtggtcattccccgaggctccatcctggacccgtcgcccgaggcggcggtggtgggcggcaacgtgctcacgtcgcagcgcgtggtggatgtcatcctgggggcctttggggcctgcgccgcctcccagggctgcatgaacaacgtgaccctgggcaacgcccacatgggctactacgagacggtggcgggcggcgcgggcgcgggtcccagctggcacgggcgcagcggtgtgcacagccacatgaccaacacacgcatcaccgaccctgagatcctggagagccggtacccggtcatcctgcgccgcttcgagctgcggcggggctcggggggcagaggccgcttccgaggcggcgacgggtcacccgcgagctgctctttcgtgaggaggcgctgctgtcagtgctgaccgagcgccgcgccttccggccatacgggctccacgggggcgagcctggcgcccgcggctaaacctgctgatccgcaaaaacggcggacggtgaatctgggcggaagacgtcggtgaccgtgtaccccggggatgtgttctgtctccacacgcccggggcggtggctatggggacccggaggaacccgcccacgcggggtcgccccgcaagcactggctttcccgagcacggagcgtctatgagtatcgcgggcccaggaggcgtgtgaggatccgaataagatgcttagtctccggttcggggacgcagtaaaaaaaaaaaaaaaaaacgggcataatgggggggaaaaaaggaatggatggcaaggtccgaccgtttggaaagggaaggcgcc

SEQ ID NO: 50705 - DNA, 590 bp, Homo Sapiens
tttctttggagagcttctatcctactggaaacccaggttgggccccatgtggattgatcggcagtgggaatcagctagggctgctgtaactgagttcgcagacccagtggcatagacagcaaagaggtactgccacgtggctttggagaccagaagtctgagaggaaggtgctggcagggctggttccttctgaggctgcaatggaaaacctgtcctggtctctctcctggcatctgctggttatctttggtgttccctgtagacagctgccccctccctgtatcttcatgtcgtcttccttctctgtgtccttctcttcacgtagtctttttaggacgctggtcgtgttgccttagggcccccatgtcagtgccgtcatctagactgatgatgcccgcagtgatcctgtctccagataaggtcatgtcctgaggtgttctgggttaggactttgacgtttgaatggtggggggtggtggacacaattcagcccctgacagcagcttttctctcccctccctgacgctgtcgcagctgcagtgacatgtacgagaaagtgctgtgcaccagctgtgccatgttcgagacc

SEQ ID NO: 50706 - DNA, 768 bp, Homo Sapiens
cttcttagaacctttaatatactagactatattactaaccttcaagaagaataggcatgtaaataaagcatttcccaaactttcttggtcttggaggtctttttttcagacattctcataagactaatattctttaaaacttcactttatggataaggaaactgatacccaaacaactatgggatttgagtttcctattagacagtccagggacttttttattacaccacactttctctaagacttttgtgctgcttgctaattttactcctatagtaaaattgtgagagatatttttttctgtctttgaatgaagaattttttttctgtcaccatagaaattatattacctatctaataattgcccatattacatataaaatcttcatccctttaaggtttagcatttagttctctttattatagtggatctttattgttcatttatgtatgaaacctgtgctagggattatagaagatacaaatttgaataaaatatttgatctaggagctcttatctaaaatgccataaccatttgcttaattataaaatgaaagaaggctataaaatgatacatagtaaaaattttaacagctatgagagtttaaaggaaaaggatacaaattatgactgcattgaaaaatagcactttgaagctgagcatggtgatgcatgcctttagtcccagctactcaggaggctgagatgggaggactacttgagcctgggaggtcgaggctgtagtgaggcatgattgcaccactgca

SEQ ID NO: 50707 - DNA, 513 bp, Homo Sapiens
ttttttttttttttttttagcctctaactagtcacatttactcttaagaaatgaaaggttttccaggagagaactgtgtacaaataaggtgactggagatgtgacctgatgtgtcacgaggcccttcggggcggcaggcgctatcgtgggcgtggtccttgcaccgtcccatcggccttgccttccagctccgtggcacggtttcctggtctttgggccagtgtgtaccttggagtgacttcctttctcaacttccactgcagtgtgtgtgccttctgctctgagagctgccttgtgacccgtgtgatagaaagcagggagtgagggtccccgcggacctggcccttccctccttcctcccccagaaagaggagttagagcaggggtgcgagagccgttcgctgtgggtttgtctttgaacaaacattaaggtgtcttgtttttgttctgggctgggggttggctgtagtcttaggtaactgaaagttcctactctcccttaaggcctcgtgc

SEQ ID NO: 50708 - DNA, 682 bp, Homo Sapiens
ggtaagtgggtctgtcctctcaggtgattctgcttccagttaattttctccctctcattctgttagtatatctagtctgtcagacacaagagcagtgtccttggcataaagtgaaatgacaagccaggttgatgaggatgccctcgtttgccatgccagtgaatgtgtttctgcatcagagggaagactgatgtggaacgcagkggctgtcagccttcaattaataccttaattaatctgaccagttttcaaatgtctggagccttatcaccagctgtttcttcctcaaggaatacataaccaccacttacaagctggctgttgaaatgagagcggtttcttacagtctacccggcgttgtggcacatgcctactggaggctgaggtgggaggatctcttgaactgcaggggcttaaggctgtagtgagccaggatcgcacccctgcactccagcctagacaatggagcaaggtggacggatctcaaaaaaagccacttgggctgaatctagtgagactgcagaatttatgccagcctgacctgtcactgtcatttcttccctgcagactctgtttgctggctacacggacaacctggtgcgagtgtggcaggtgaccattggcacacgctagaagtttatggcagagctttacaaataaaaaaaaaactggcttttctgac

SEQ ID NO: 50709 - DNA, 697 bp, Homo Sapiens
ataccgtagagattattttcaggtgccattttatagtatagcagcagggcttttactctgtgtatgcacagatgcagtctggggcatggtttgtgtgctggactttctcatggccatcatcagtatgcttatggatttgatgacaggcatagcctgggcatatcacctcattggtaaagggctagagcctttcttttttatggcacttctttttttgagatagggtcttactctgtcaccctggctagagtacactggtacaatcacggctcaatgtaggcttaacctcctgggctcaggtgtatgtcactatgcccggctactttttgtattttttggtagagacggcttcgccacgttgcccaggctgcaagcgatatgcctaggctcaagcgatctgcccacctcaacttccggaagtgctgagattacaggtgtgagccactgcacccagcctttgttttattttttattttttgagaggtatgattctttctagagattttttctcatggctactattagatcaggaatgggtgattggagattattagattctaggttaacttctaccactttaccctaatacataaaactttttcctaaataaatgatggaaggaataatacttggttacctggcattatttttcagtaagaaaaaagctttactaaccactacatttatggaaatttgt

SEQ ID NO: 50710 - DNA, 458 bp, Homo Sapiens
gcacgagattaatgggaggtatggggggtttagcttgagatgggacttggtcttagagctagttctaaaggttgtttacttttctagggaggagtctgctactagtcttatcagctcttaaaaacagaaactcatctgtccaagttcgtggcagaaaggtaagtttttacaaattagtgctcagcaaaagaatgccctgcgttcccaaagtaaaagaatgacaagctgtaccttaaaccaaaacacttcgtaatctcatccaattgcaaaaagagttattagccaaccaggtattcccagtagtgacagtggatataactgtgtagtcattcacctctgcttatatgaatactttacaacctcttttgccttttgcaggaacgtccttgtgaagacctttatctgagccactgtacttcgttatcactgccatgcagtttacatgagctgttctgcag

SEQ ID NO: 50711 - DNA, 366 bp, Homo Sapiens
atcaatgaacaaactgaaaatgtctttggatattatttctgtttattttttgcctcaaaattattaaatgacatgaaataagtgctcaagaagaaaaataaacaattcttcatttcctgttctctagttttccgtattacctggaaaaaagaaaatttgttggtcactttaaagataatataaacagctgaacatggtgcacaccccgactccccaccccactcccatgcctgtaatcctagcgctttgggatggcaagatggatcacttgagtctaggagtttgaggctgtgatgaactatgattgcaccactgcactccagcctaggcaacagggcgagatcctgtctcaaaaaaaaaaaaaaa

SEQ ID NO: 50712 - DNA, 413 bp, Homo Sapiens
ggtttcttggccatctacatagttttctgggcagcgccaagcagggaggtgtctccagttgtgagtcctcggacaggctgctgcatgggtgcacatactcacgttattggtggaagttttaagtcccaaactgaagggaaggaggcctaggtggcacaatcagggaggaatatacatctgagaagttttgggaagacatcacctggcaaggctgcctgaaccacagtaatttagtcttcctctatccagatcactgagagttgtgtgctggtcttctctcaaaccctggatgtgttacctgcttctccctaagtgctctaacctcgctgaactatgagcctgaagggtgggtcgatgccagaccttaggtggaggccaaagacagtacagaataaacagcttcttcctaaatt

SEQ ID NO: 50713 - DNA, 464 bp, Homo Sapiens
  misc_feature (427)..(427): n is a, c, g, or t
  misc_feature (430)..(432): n is a, c, g, or t
  misc_feature (436)..(437): n is a, c, g, or t
ccaagctctaatacgactcactatagggaaagctggtacgcctgcaggtaccggtccggaattcccgggtcgacccacgcgtccgtgctcatgggaagaacagagattgctcctgcatgcaactaattcaataaaactgtcttgtgagctgatcgcttggagggtcctctttttatgttgagttgctgcttcccggcatgccttcattttgctatggggggcgggcaggggggatggaaaataagtagaaacaaaaaagcagtggctaagatggtatagggactgtcataccagtgaagaataaaagggtgaagaataaaagggatatgatgacaaggttgatccacttcaagaattgcttgctttcaggaagagagatgtgtttcaacaagccaactaaaatatatttctgccaaaaaaaaaaaanaannnaaannaaaaaaaaaaaaaaaaaaagggcggcc

SEQ ID NO: 50714 - DNA, 538 bp, Homo Sapiens
  misc_feature (530)..(531): n is a, c, g, or t
ggggactcggactctggcttctgctgctgatgcaaggaatcccctgggctcccgtccactccactgctgaccagcccattcgcctgtgctgagtcttcctgcaggcctttccttgcctctgtgggaccctgtgggggtccatccggctggagaagaaaagcctctcatgctaacgttgcagaccccagagggtgagagaaagggggacttcattcagtcttgaaacctgtgtgctcagcccccaaggcatcaggaattcttcctgcccagagaatcaaggcagcttcatttttttcgtaccttggtcagtggttctcaacctttttgttatcaaggcactttttgttgtacatatgtcctgttgccccctgcatttttatctgccaaactgtactgatggagtaaccattgacttttcccttcctaaattaaggaagacgtctatgatggagtgtacaataaaatcagtgtcccaatgattcgtatgatgtcatcaacaaccaaaaaaaaaaaaaaaaaaaaaaaaaaannccatgtc

SEQ ID NO: 50715 - DNA, 757 bp, Homo Sapiens
  misc_feature (672)..(672): n is a, c, g, or t
aagatggcggcagcggcgctggggagggcgaggcggaggcggcaaaacgggcggtcgagcagaacgtgtagccgcgtcccctccagtccgctccgggcagctgctgatgcaaggaatcccctgggctcccgtccactccactgctgaccagcccattcgcctgtgctgagtcttcctgcaggcctttccttgcctctgtgggaccctgtgggggtccatccggctggagaagaaaagcctctcatgctaacgttgcagaccccagagggtcctgtgtgggtgtggagatggccaatgagaatcacggcagcccccgggaggaagcgtccctgctgagtcactccccaggtacctccaatcagagccagccctgttctccaaagccaatccgcctggttcaggacctcccagaggagctggtgcatgcaggctgggagaagtgctggagccggagggagaatcgtccctactacttcaaccgattcaccaaccagtccctgtgggagatgcccgtgctggggcagcacgatgtgatttcggaccctttggggctgaatgcgaccccactgccccaagactcaagcttggtggaaactcccccggctgagaaaagcccagaaagcggagctctcggaaggcagccaagcggcatggtgtgaagagcccagattngaatccagtgaccccacaggcagtggtgccagctccccagtatccagaacccacgctgagattgggtactccctgagatacagcg

SEQ ID NO: 50716 - DNA, 500 bp, Homo Sapiens
  misc_feature (472)..(472): n is a, c, g, or t
  misc_feature (475)..(478): n is a, c, g, or t
gggggattacaggcatgcaccaccatgcctggctaattttttgtatttttagtagagacggggctttgccatgttggccaggctggtctcgaactcctgaccttgagtaatccacccgccccggcctcccaaagtgctgggattacaggtgtgagccactgagcccggccacagtgcagtatttctaaccagtgatcagggtaaagaggatgcgtgtccaccatcccagccctgatcagcctgtctgtgcatcccccatcccagccagggcttggagcagccttgctcaccactgtgtcccctgcattgtaacacatccaggcacaagaatagccgcccagtgactgccaagtgagtgaaccagcctgcttggagcctgcctctttcccaaactgctcattatcctgttaccccacccagcccacgtgtccaaatacactccagatgcaaaataaaaagctctacgaaaaanaannnnaaaaaaaaaaaaaaaaacatgt

SEQ ID NO: 50717 - DNA, 599 bp, Homo Sapiens
aaaatatatataaaaaaaatttctaagtgatgaatgcttagggtattgctgcttatttcttactgtactgtggtgtcaacatttctaagtgtccataggacttctttgggcctgaatatattatcagtttttataaaagcatttgtgtaatctcaaaatgtgtttttattctaccagttctatttgttaactcaattttttcattattttattcaaatccatattttctctgactttcatttactttagagttcttaatctgggggtccatggcctgcctaggagtctttagcatgtaggggtttaggagttgcagacccctagggatcgaacaaagctgggtatgtgcttgaaggaattttgctgggacaaggatctgtagtatttactatatttttaaatgcctctgtgacaccaaagcagttcagaacactcatttacctgatctaatcatagtttgatgtttgtgtgttatatctctatgtattcctgtttcacttttaatttctgtatgtgtattgtcgctatgttgtgcagtttttctcaagtcatttttgagaaataggcagggtatgaattatcaataaataagtatcatg

SEQ ID NO: 50718 - DNA, 458 bp, Homo Sapiens
tcggcacagggcaaggacagaaacacacacaaggtctggaggattcctgtgagacagccatacatccctatcacttcaaaataagtgaggacattcttgtttgagaggtaagaggagcattttttaaagacaacagcggcagatttcagcaccctcagcattcagaacatgtgtttaaaccaggaaaaattgtaaattgtatgataattgtccctgtgtatttaaacaacacgccatgggctgaccttttccttcatccttttgggagtattaaagcacctctaagatggatgagtcagtcaactgcagatctgaaactgctgattttgggaaaacacttaatggcttcctggccttaccagaggggttgggaactagctggggacagccaggccacccttcagttagggtcacttctctgttattttaaacatttgactactctttaatttatgacc

SEQ ID NO: 50719 - DNA, 685 bp, Homo Sapiens
cagccgggctgaggctgagagcacgtaccagatcaagtatgtggagctgcagacgctggctaggaagcacagggatgacctgcggcatacaaagactcagatctccaagatgaaccggaacatcagccagctccaggctgagattgagggcctccaaggccagggggcttccctggaggccaccatcccagatgctgagcatcgtggggagctggctgttaaggatgccaatgccaagctctccaagctggaggccactctgcaacgtgtgagtaccaggagctgatgaaagtcaagctggcctggaaatggaggtcgccacctacagaaagctgcgggagagctaggagagccagctggagtctgggatgcagaacatgagtatccatacgaagaccaccagcggctatgcaggtgatctgagctcggcctatctgggcctcacaactcgtgacctcagctatggcctgggctccagctttggctctggcacaggcttcagctccttcaggtgcaccagctccaccagggccgtggttgtgaagaagatcgagacccgcgatgggaagctggtgtctgagtcctctgacttcctgcccaagtgaacaactgtggcagctcctcctagtctgccctcccgtggctgccacagactccaggagggaggctgctgtgtgggggaacc

SEQ ID NO: 50720 - DNA, 317 bp, Homo Sapiens
gggcattggggcacagaagccctatgatgacgatgccgagtacatgaaacacacacgtctcttccggtgaggccagggccctgaccctcccctcagtcctggcactgctgcttatgacctctggcctcaccttgacccttgattcccaggtgctccaacgagaagggctactttgcagtgactgagaaatgctccgacttttgccaagatgacctggcagatgatgacatcatgttgctagacaatggccaagaggtctacatgtgggtggggacccagactagccaggtggagatcaagctgagcctgaaggcctg

SEQ ID NO: 50721 - DNA, 856 bp, Homo Sapiens
ggtggcaaagtctatattccttaactgaaataaatggtattgtctctagtgttggatttgacatttaaacctgtctgccaaacttgaaccacagtcatgtctaagcactagtttaaaataaatcaggattttaagacttgagcttgttcattatctaatgtgtgtcaggtaagactcattcttcacccttgagaaatctcctttctgagttatattatcagatgttgaacgttcagtgtgattgatatgtttcccctcatctacttcatttttggttgttgaatattagtattaaccattggaacagcgtaccctgtaagtaacatttgaagcatttaaagagaaatctgtggaattattgtgggtggtctataatccttaagtgcaacgaatattgttagtagacttaataaataacccatctgtatacctcactactttttaaatgtctgtggttacttttgacaataaaaattccaaataccaaaaaccataaaaaaacaccaggaaaaccgaaaaaacaaaccacagccccaccaaataattacctttgtctggcccccccttcgggcccacttaaagagagctttttcttaaaaccctttctattttgggacgccgcgggcccccccggtagggtaaaggggaaacactgggatcctaaagctggtttctccctaaaaaaaaaaacccgcgggacgatgggacaaaagggggctttgggggatttcctccacccactttatacaaaaaactcccccgcggggggtgaaaaccctaaagacggttttgtcaaacaaaaaatcctcacaaagtgggaactctttcgcgagggtccacaataaaccggggggaa

SEQ ID NO: 50722 - DNA, 623 bp, Homo Sapiens
  misc_feature (623)..(623): n is a, c, g, or t
ggaggggaagagaagggggcatgtggtatcctggagcattgtgtatagaactggattttcagacctgctgaggaccgtaaggcctgatggaacacagaactgaactgaggttcatggattttccaggactgtttcaaacatgcccattactaacggcaaaagggggattccctgatggaaccataatacccttggaaatactgtatggttttgttttgttttgttggtttttaaagatttttgtttgtttattgaattcatttcactgtagctctaaaatctgcttgtattccaagcatataaaattttcccccttagtgaattagttttaaaatgatattgttatatacatactatgaaatatgtataactttaacttctgttttaccagcatacccacacaaataacaagaatactacttatgaaatgtgcactttatcctcattccataaatgttggtgcataccttatgtaagggagcagttcaataatccatgaaagaacttaaggcatttgttggtttatcagactcggaatctattttctcattgctctgaatacgtcatcactctaggttttacagatttattcctttgttacttctctaattcttcctttgtgn

SEQ ID NO: 50723 - DNA, 819 bp, Homo Sapiens
ggcagagagagagatgctttcccaagaggaaatgcatatgtaccttgatttaagcaaaactgataacagaaaattgaacttaatgaaagaaaaaagtctggatatggttactcactttacatagagtaagatttttaaaactaattttgcttagtagttaattttacaaaaatgaagagaaacaccctttaagtgtactcgtaatttaaaacacctttgaaatgtaattgtccaaatgtaatgctgctatgtatattatttgggttccagatttttccctttaaaattctcaaaacactcagtgtccttacaactgcagctaaaatggttaatcattctggcaagaaggtgacagtgtgtatattggaaaggcagacattcacatttgaaaatattttgcattattgttagctaaaatcaacctctccttgaatgtagatacaatatatggttttgcagtcaattctgaatggaaaaaaagaatcaagtctgaaatttatgtgaaatgtggcttcagatcatttgaacgatatgtagaaatctagatgaacatatcattagaggtgaaagcaaaatttgaaagcctaatgagatgaagcaacattatctctctctaatctgccaacatattccctagattgtgttgccactgtattgattctgagtaattttggcttgtttatgcgtgatttaaatgcatgtggctgaatgcagtaatttttcaagttatttgagtagtaagagaatcccccccttttcactgtcctccccgaaatggaccttttaaaagaaaaaaaaattcaaccttccaaaaatggc

SEQ ID NO: 50724 - DNA, 475 bp, Homo Sapiens
aagtcggtaccggcactctagtacagatgatgcttcaggagaagcacagtgaagatcagcatcctaccattctaaagaaatcctcagagccagagcatcaagaagctctccaaccagttaacctttctgaattggaatccattgtaactgaaaggccacaattcagcagacaaaaagatttccagcagcaacaggttctggagttaaaaccaatggaacagaaagatttcatcaaattcatagaatttaatgctaagaaaatgtggccccagcgttgccaacatgataacgatacaactcaggaatcatctgcaagcaaccaggcatccagccctgaaaatgacgttccagactcgatcttgtcaccccagggccaaaatggagataagtggcaatatctgcatcatgaactctcatcaaaaataaagctcccactccctcagcttgtggagcctcaggtttccacaaatatggg

SEQ ID NO: 50725 - DNA, 732 bp, Homo Sapiens
attttataaaatatgtatttaaagctttttcttattttttgtattaattggtaagtgaaaactctgttaaagatcacaccacaatgttttcaagaaacatctgaaaagataaaacaaagaacaaataacttataatacttacttaaattgacactttttgaaatgccagtctgaaaataattaagatatctctgctttgtatgagtttcttttatgaaacttgataccacgggagtccagtaatattggccacaaaagccagagaaagtaccaagcccagctttgttatcatagccacttcctgccctgcttctgttatttttagtgttttttcagatataaatcggggtccaggaaatcctcaccagaatctggcactgcagccaaaggcgatacttccagagttctagtaggctgctatggaatttctggcatgaaaattcttgacccctcacactttaccccctgtacagcacaggcataccatggagatattacaggatcagttccagaccaccataataaagtggatatcgcaataaagtgagtcacacaaaatttttggtttctcagtgcatataaaagttatgtttacactctttagtagtctattaagtgtataatagctttatgtccaaaaaatgtacatgttttattttaaaaatactttattgctaaaaattgctaatgatcataatctttttgcattgatgttgatggctgctgaatgat

SEQ ID NO: 50726 - DNA, 1092 bp, Homo Sapiens
  misc_feature (636)..(636): n is a, c, g, or t
gagaacgtgtacagaagcaaattttcttcaaaatagttgtgggaagagcttatatgtgaaagcttatgactggttttgagggagaacttactggagaaaatggactctatgttaagtatggttttcagatagaattctttccttttttaatgaggaaaaaaaatccacattaatattgaaactgcacctgtaatcccagcactttgggaggctgaggacagaggattgcttgagcccaggagttcgagagcagcctgggcagcaaagtgagaccccatctctactaaaaatttaaatgtatttattaaaactgttctctagaagctttggactgaatcccaaaagtgtttataagttcaaaagcaaaagtatttgtaatttcaacaacaaaaaatgtatttctttatgtaatcttgaaattattaaaagtccttttagcttctagcacatatttgtacaaagagtttaaggaatggtggctggtttggtttgttttttaaaaatgtttactgacgaggccgggcgtggtggctcacccctgcaatcccagcactttgggaggccgaggcaggcagatcacaaggtcaggagttcaagatcagcctggccagtatggtgaaaccctgtctctactanaaatagaaaaattagccatgcgaagtagcaggtgcctgtagttcccgctactccgggaggctgaggcaagagaattgcttgaatcccaggaggcaaagggttgcagttgagccaaagatagcccccctctgtactccagccctgggtgggaccgagccgaaaattctgttttcacaaaaaaaaaaccaatcgggcaccgttgggctccccgccttgtaatccccagccccctcttgggaggaccaaggggggcgcgggatcttatcaccgcctcataccccctccaaacttgctcctcctcaccctacaccctatacccccgccaccacctccgaaaatccctcccccctctctcttcacccgctcacgcagccaccccaacacaccgtgattattttcctgcaccaaaccaccacctcccaccctctaatacgcatccgcccccctatctccccc

SEQ ID NO: 50727 - DNA, 499 bp, Homo Sapiens
gcggccgcggctgtaggcttttttttattcttagagctgaatattacttgattacaaatcagattgcttaagggtgtggaatagcaggctagttttaataccaacttgttaacataaaatcatatatgttttagaccattcttatttagttacaattttagaaagttaacaaagtaagcaggtacttatcgaagtgcatcttttcagtctaaatgtttgtctgtgtgtctaggtgctggtgagtccacatggacacatgagtgcccatggggcaggagtctgctataaagtcagaaggtgagatcctagagagttacacccagccccattttaatttgcatgaaaagccaaggttcttttaagcactcaaattatttaatggttaaaacacaagaaaggcacatctgttcatttaaatagttgtaaaaaactaatcagcaaaaataaatagataataaagccaaaaaaaaaaaaagcctacagccgcggcccctcgtgc

SEQ ID NO: 50728 - DNA, 638 bp, Homo Sapiens
  misc_feature (510)..(510): n is a, c, g, or t
ttgaatttaggtgacactatagaagagctatgacgtcgcatgcacgcgtacgtaagcttggatcctctagagcggccgcctactactactaaattcgcggccgcgtcgacacgaggcaatcaaacggtacagggccaccacttcgaatttttcttacgctcttgttgaaagagcttttctaaataagaattcgatttttgtacacacacgtaaaaggaaaataggaccaagatgagttggttatgaccatgtcagttttgtcaccgtggccacctggccagtggtgactgagacatcactgaaattgcctcctaatttccaagacgttaaaggtgtcttagaatcgattagacacagcatttaccttacacattgttaaattttcagctttacctttaaatatcattttggggagattatttatcccaggcctgcatcccaagtcatttaaatttttacaaaggacactaggactttctgaagacccagcctatgcctgagacccatggngtcttggaggcggaggatataacactgaagaccagcgacaggctaccctctgagtggggtgtgtgcacaagcctttcagggggcacattcacaaagacctgtggggtccctttaaaagcaaaaaaaaa

SEQ ID NO: 50729 - DNA, 636 bp, Homo Sapiens
  misc_feature (8)..(8): n is a, c, g, or t
  misc_feature (582)..(582): n is a, c, g, or t
  misc_feature (593)..(593): n is a, c, g, or t
  misc_feature (624)..(624): n is a, c, g, or t
  misc_feature (628)..(628): n is a, c, g, or t
  misc_feature (632)..(632): n is a, c, g, or t
tctcaagnaaaattaaacttgaaaaacggggtaaaattcttcaactattgcctcaagttaagttttgtcctattgtcctgagaaaggagatttagacttgtctgcctaacacaggtattttttagggcatcgtactatcccagagaaagtgttgagataccatggcagaaatataaaacctaagctttgaaccccagtagacttcttcttctgccattaagtctctctttatctgatattctaaggatttcttcaaactacttaataatttgtcaccattaactttaatatccagttttaatctgcactgtaatatcctgctttgagaagaaagaatgcctcataaattagagaagtacaaaacaaaatgttttggaaggtgatcctggctcctttggctctcataattgttttatagctgaaaataaaaagtcaggaaactggcccggtgcggtggctcatgcctgtaatcccagcactttgggaggctgaggtgggtggatcacctgaagtcaggagttcgagaccagcctggccaacatggtgaaaccctgtctctactaaaaatacaaaaaaaattanctgggtgtggnggcacatgcctgtaatcccagccactggggnaggntgangcgc

SEQ ID NO: 50730 - DNA, 420 bp, Homo Sapiens
gctttgcagacttcacctctgtaagttgagtcctccgcctccgggccaccccactcccttccgcttgcagcttccctgggatttttgtctccttttaaaggcaaacctcccagcttctttagcctcttggtacctcacactctctgtccctcgcgttatttattctacactgccacttctgtaagaaaaacagtttctcaataaaaaaaaaaagagccgcagtttggatgctctatcataagggcacgttttcttccagcagggaggcgggacctatctgtccttcacggtagattcattgtattatttctgacgcaccgaggctgttgtgttcactggtttttggaagccaagatgtcaaacacttccgaagtatgaaaagaagattgcgaaagttacattagggttctgctgtcccca

SEQ ID NO: 50731 - DNA, 812 bp, Homo Sapiens
  misc_feature (65)..(65): n is a, c, g, or t
tttgggggggaccctttcaaggaagtgacccattccgtggctctgccactgacgacttcttcagnaaacagacaaagaatgacccatttacctcggatccattcacgaaaaacccttccttaccttcgaagctcgacccctttgaatccagtgatcccttttcatcctccagtgtctcctcaaaaggatcagatccctttggaaccttagatcccttcggaagtgggtccttcaatagtgctgaaggctttgccgacttcagccagatgtccaagcccccaccttctggccctttcacctcctccttgggaggggcaggattctcagatgacccctttaaaagtaaacaggacactcctgctctgcctccgaagaaacctgctcctccacggcctaaaccgcccagcggtaaaagtacacctgtaagccagcttggttccgcagactttcccgaggcccccgatccattccagccactcggggctgacagcggcgacccgttccaaagtaaaaaggggtttggggacccgtttagtggaaaagacccatttgtcccctcctctgcagctaaaccttctaaggcctctgcctcgggctttgcagacttcacctctgtaagttgagtcctccgcctccgggccaccccactcccttccgcttgcagcttccctgggatttttgtctccttttaaaggcaaacctcccagcttctttagcctcttggtacctcacactctctgtccctcgcgttatttattctacactgccacttctgtaagaaaaacagtttctcaataaaaaaaaaagagccg

SEQ ID NO: 50732 - DNA, 744 bp, Homo Sapiens
  misc_feature (19)..(19): n is a, c, g, or t
  misc_feature (696)..(696): n is a, c, g, or t
ttttgttagcacacctagnacttgctgtaactgtactcatgtcccagtatgtacgttctttctatgaaagagaaaacactaatcttaaattatatccagcaatgtttctggtatcctttaagaaaagttaagactattatttccttcccttccctgtgcagcattcaaaatcacccctagaaaaagtgagtgttttaatgagacttcctaggaagggatgcactgtaaaacaaaagtattcttgtaactcagttttgtgaaaggtaaaaaactactatgttttaagtacactttagaaagtctcttcaaaacaaacagtcctgtatttgaactctgttcatagtttttttttgaacagtttagacaaaactgctggaaattaaaccaatttcctgcattaagctgagacaagtatatatacagccctatacagtttcatagcttttcctcccccatttatgtgtattggtgacagtgggtataaaacagcctgaaagtgtatgcatgtaccataacatctagacttaatatattgtggagtattcaataaccattatgtagaaggtagataagaattaaaagggtttaatttcctagaaagaaaatggaaaaatggtcatttttaaaaaataaagtttattagatcataatgttgtctgaatttaccacctttgtcagaagtcaactcaaagcttncaatgtagtcagtctataattccttaatcaaagtcagcaatttatgga

SEQ ID NO: 50733 - DNA, 854 bp, Homo Sapiens
  misc_feature (722)..(722): n is a, c, g, or t
  misc_feature (759)..(759): n is a, c, g, or t
  misc_feature (822)..(822): n is a, c, g, or t
  misc_feature (840)..(840): n is a, c, g, or t
ttttgtcacctttttcctcattagaaggaaagtagaaagccttactttaggatttttaaaaaaaaaatccatctcaccccatattggtcttaaataagtatagactaattaacctaagctacctttaacaacgtagaatttagatgggttcatatatgtgagaaaaacctgaatataggacaggggtcccacttttttccccacctctgtcgcccaggctagagtatagtggtgtgatcttggcccactgcaacctctgcttcctaggttcaagtgattctcctgcctcagcctcccaagtagctgggattgtaagagtatgccaccacgcccagctactttttgtatttttagtagagacagggtttcatcatgttggccaggatggtctcttaactcctgccctcaagtgatccaccagagaggagatcctcggcctccccaagtgctggattataggcatgagccaccgtgcccagcctactttctaattaattaaaaaaaaaaaaaaaaaaaaaaaaaaaaacttcccaaatgagctgatagaaaaatgacgtgaggctgctttgccttcaataatacctagttttcagctgttccaactcgtttccaaatagaaattagctggaacacactacagtaatctcaaggaagggaaaattaggccttaaaagataccaagaagtcagcatggtacccaattgaaaccttttgaccttagngggaattcattctatttgcactaaaagccttaactgntggattcagagtccttttaactgggagttctatagaactttactttttccctaggcccagagnggagaagggtttcttaanagcggttcatggga

SEQ ID NO: 50734 - DNA, 882 bp, Homo Sapiens
tcgttttgttgaattggtacatcaacagaaaactccaaatttttccacacttctttgctatgatcgagttttctctgacataatttacacagttgcaagctgtactgaaaatgaagccagtcgatacggaaggtttctttgctgcatgttagagactgtgaccaggtggcatagtgatagagccacatatgaaaaggaatgtggaaactatccaggattccttaccatattacgggcaactggatttgatggtggaaataaggctgatcaattagactatgaaaattttcgacatgttgtacataaatggcattacaaactaaccaaggcatcggtacattgccttgaaacaggcgaatatactcacatcaggaatatcttgattgtgctaacaaaaatacttccttggtacccaaaagttttgaatctgggtcaagctttggaaagaagagtacacaaaatctgccaagaagaaaaagagaagaggccagatctatatgcattggctatgggctactctgggcagttgaaaagtagaaagtcatacatgatacctgaaaatgagtttcatcacaaagacccccctccgaggaatgcagttgccagtgtgcaaaatgggcctggtggtgggccttcttcatcatcaataggaagtgcatctaaatcggatgaaagcagtactgaggagactgataaatcaagggagagatctcagtgtggtgtgaaagctgttaataaagcttctagtaccacacctaaagggaattcaagcaatggaaatagtggctctaacagcaacaaagctgttaaagaaaatgacaaagaaaaagggaaagagaaagaaaaagagaaaaaaggaaagacctcagctactactccaga

SEQ ID NO: 50735 - DNA, 879 bp, Homo Sapiens
  misc_feature (861)..(861): n is a, c, g, or t
tgcttctaagcctccagcttccactgcctttgatttcagatccaaattcctctgattctataattcagcctccaaatgcttctgattctggaatctagacttttccctaaagattcctctggttctgaatcttataacctcaactccctaattccagaccccagcctcctaaatctattctgggcttcccaccccactgaacttacccaattccttctttcagtcttaagttttcccattctagacccctaccctctaggctgtgctgctcctggacttcatgcctctccattctcattgcctacaatctctgtgccccagaaccccctccacttcccaccccagccctccagacatgcacttaccttgactttaccccacatgtttggggcacctggggctccctcaccccttgggtggtttgcaatctgaagacttctccagccacacaggcacatgcacaggcacggtgctgtctgcatattgccaggtggggagagaagccaggacccctcagctgtctgccaccatctatgtgcctcccttaccccccagctttctttctacagatggtgctactcttggtctcccacaggaaaaggcctccccccttcttagccccatttaccccgtttgtggaaggcactgctcgctctgttttgtcagagagtggcctatccagattggtgctatgggggggtctgaaccctccctcctccctctggaggtgatgtgggccctcaatggagggaattggtgctgggctagggaaaaggggaaggactaaactggccacactgggctctgaaactcaccaatctcttatacaccataaagacctccccctgggtaaggcccccnactacaatgggctccggt

SEQ ID NO: 50736 - DNA, 580 bp, Homo Sapiens
ttgcccaggctggtcgcgaactactgagctcaagcaattctccctccttggcctcaccaaagtgctgggactacaggcatgagccactgagcccagccaggctttttctaattctatgctttattctataaattcctctgcttctaagcctcacagcttccaactgcctttgatttcagatccaaattcctctgattctataattcagcctccaaatgcttctgattctggaatctagacttttccctaaagattcctctggttctgaatcttataacctcaactccctaattccagaccccagcctcctaaatctattctgggcttcccaccccactgaacttacccaattccttctttcagtcttaagttttcccattctagacccctaccctctaggctgtgctgctcctggacttcatgcctctccattctcattgcctacaatctctgtgccccagaaccccctccacttcccaccccagccctccagacatgcacttaccttgactttaccccacatgtttggggcacctggggctccctcaccccttgggtggtttgcaatctgaagacttct

SEQ ID NO: 50737 - DNA, 806 bp, Homo Sapiens
gcctgagatcgtggagctcagcgagccgctgcaggttgttcgatatggtgaggggggccactaccatgcccacgtggacagtgggcctgtgtacccagaraccatctgctcccataccaagctggtagccaacgagtctgtacccttcgagacctcctgccgctacatgacagtgctgttttatttgaacaacgtcactggtgggggcgagactgttttccctgtagcagataacagaacctacgatgaaatgagtctgattcaggatgacgtggacctccgtgacacacggaggcactgtgacaagggaaacctgcgtgtcaagccccaacagggcacagcagtcttctggtacaactacctgcctgatgggcaaggttgggtgggtgacgtagacgactactcgctgcacgggggctgcctggtcacgcgcggcaccaagtggattgccaacaactggattaatgtggaccccagccgagcgcggcaagcgctgttccaacaggagatggcccgccttgcccgagaagggggcaccgactcacagcccgagtgggctctggaccgggcctaccgcgatgcgcgcgtggaactctgagggaagagttagccccggttcccagccgcgggtcgccagttgcccaagatcaggggtccggctgtccttctgtcctgctgcagactaaaggtctggccaatgtcttgccccaccccgccagccgcgatacggcgcagttcctatattcatgttatttattgtgtactgactccatctgccccgtcaaataaaaaaccacaaggttcga

SEQ ID NO: 50738 - DNA, 631 bp, Homo Sapiens
cagtacccgggaattcggccatggcccaagtgctcttggtggcccagcttggccagcacacactttcctcctgcagcaccccctgctgaaggggtcccccattgttttgcttccccagcgcccaggatgagcggtttaccatcgagcttacccgggcccggctcctgtcaagcactttagttagctgttggtgtcatgtttggataccagtgttttatatttatacatagagaggattttctaatatagcctattatatataaatagatctatctatatgcacatacatacatatatacacacacccagccgatctcccgctcccagactgctctcgtatgtggggaatgggatgaatccccatctgtgcctcgaccatcaaagccggagctccagggctggagggggggcagccatgtgtcctgacccccaccatccccagagcctgggttttccagggaaaggctttgtgcaattgcctggtcttttttttttttttttttctccatgtgcctccctgtccccaaatctctgcaccaaagctcattgcaggcaatgttggaaaagaactgcatttgaacgaaagagaaaacggcgcctgtggttttgcttcaggccactttgaggggtt

SEQ ID NO: 50739 - DNA, 571 bp, Homo Sapiens
ctctgaagactcacccgtgtctccacacttcttcaccccttgctagctgtgtaaagttaaccactgtgactctcagtttcctcgtctgccaaacggagtaaataatagtgcctttctaggatggatgccaatgttgtttggattcaacataaagcagatgcagagggtgtaacgcggtgcctgatacatgaaagttaagcatgagctcttgggtttttgtttcccagatttcttctctcttggtggctctttaatgaatagtgacagtccatacccaggcagccatagccactgccactgccacagccaaagctcaggctatgtgatgaacctgttttctctgccttctgcccctgctcccagccatcccggcagaggtgcccactcaggcctcctaccggagcccctctcccaccgcttgaatgcagaggcgtttcttctgctgacagcctgaagacaggccatttttcttctcctcccatataatggcctttactctcctaccactccaccccctttcccagccttaatgactttaacatacacacagttatttaaaaaaaaaaaaaaa

SEQ ID NO: 50740 - DNA, 525 bp, Homo Sapiens
  misc_feature (492)..(520): n is a, c, g, or t
  misc_feature (522)..(522): n is a, c, g, or t
gggatgcctggctattttttgtatttttagtagaggtggggtttcaccatgttggccaggctggtctcgaactcctgacctcaggtgattcacccacctcggcctcccaaagtgctgggattacaggtgtgagccacggcgcccagcctcatgagggtctattctttacattcaccatggtctgatggttgctacatgtttgtctatgattttttttttctattatcaggtgtcttggccggttcatgccccacgatgaaagggccagaggttttcatatgagtaaaagaaaaaagcagaaatgtgaaacctacaattaggctaaacaaaaatcaactggaaaagtacaggctgaggggagaagagttggctacatgtttatgttaggggaggagggagtacattttagctatgtattcaaacagctaatagtttaatgttgctgcttataaacttaattttaggctgcattaataaaagtgtagtctaccnnnnnnnnnnnnnnnnnnnnnnnnnnnnncntgt

SEQ ID NO: 50741 - DNA, 697 bp, Homo Sapiens
cctgcaacctggggggacattcctttgtaaaacctgggctggaagtcaaagccgtcggttacagaggagactgacagaggaattccagaatgtaaggatcatcaaacctgaagccagcaggaaagagtcatcagaagtgtacttcttggccacacagtaccacggaaggaagggcactgtgaagcagtgaggatttcttgtgccattttcataatggtcattagctccttttaagctagaaacgtagcctgagctcctgaagagttcctgggagatttgagctgattttggagatggagcaggacaagtggggagtctctctctctctttctctctctctctttttaaccaaaaagagatgacaaaactaagttcaggggccatggaaaatgaaaaagtccgctatattgtgatttgggaagagaaagttatcaagagaaagaggtgaggatggaaggatggagaaaaacagactgtgggaaggatcagaaggaatccgccgaggcagggatgggtgtgcccatgtgtgccttgacgggacttcatcttatagactgttaaactgtcacacacaaacaggctttccacccctgctctgagagcaccacgcacagatttccagttcttagtgtggctgtttaaagtaaaaaatctgggggctgggtgaggccactcatgcctgtaaacccagggcttt

SEQ ID NO: 50742 - DNA, 727 bp, Homo Sapiens
taaatcactgtcaattgcagagctgcctgtgatcttcttaggttatagccaagtcagcaacataattcctctaaataaaattacattgtgctcacacagtgctggattattacatttaattgaagacaaagcatgcttgctcctagtactagcagcaagcttttcctcccctcagctggtaatgatggtaggagacagagatgaagttgcctatgtatgtcatatcaattcaatagctgcctggggtcaaacacctaggggttgtacattccattactgtaaatgattgagagctggtttgtggtatggttggctttgcctaagcatttttgaagatgaacagcatgtgcagccaaagaactaatttgctaattaaggtggaacaatcattctgaatgaaatataatcagagtactccgcagtttgttaagaagtattggggaggaggggaatgtgtctcacaataaaatgagttggaattgttgagttaaaaaaaaaaaaaaaaaacgcgggcggccgcaagcttattccctttagtgagggttaattttagcttggcactggccgtcgttttacaacgtcgtgactgggaaaccctggcgttacccaacttaatcgccttgcagcacatccccctttcgccagctggcgtaatagcgaagaggcccgcaccgatcgcccttcccaacagttgcgcagcctgaatggcgaatgggacgcgccctgt

SEQ ID NO: 50743 - DNA, 1031 bp, Homo Sapiens
  misc_feature (878)..(878): n is a, c, g, or t
gctgttcaagactgaccgggtgctggggacagcccagctgaagctggatgcactggagatagcatgtgaggtccgggagatccttgaggtgagaggtggacattcatccgcatgctccggtatggccatgctactcgttaacattattaaaacacttcctgccttgagccctctatgagcctgtctgttgacccagcccctcccctcagagcctcagacctccctactgcccagccctaaatacttgcagtaccccactccattatgatcaactggtatctcagccataccatgggctcatattttagaaaccactcttggccaggcatggtggctcatgcctgtaatcccagcactttgggaggctgaggcgggcagatcacgaggtcaggagatcgagaccatcctggctaacatggtgaaaccctgtttctactaaaatacaaaaaaattagccaggcatggtggcgggcgcctgtagtcccagctactcgggaggctgaggcaggagaatggcgtaagtaaacccaggaggcggagcttgcagtgagcccagattgcaccactgcactccaacctggacaacagagcgagactctatctcagaaaaaaaaaaaaccaaaaaaaaaaaccagtcttgttctcccttgtcctggccctgggcctctagtcacttcctgcttccaccaacagtttctccttacccccacccaaggtcctggatggtcgccggcccacaggggggcgactgggagtaatggcccggattcggaagccactgacagccccacaatttggagacgacaacagaaaaggtggctggtcatttgaaccctggggccggcagctggggcccacaccgggttgctgggccccanagggaaaggccccttccctgggcctgccccctggaaagggaaatcaggggaacaaaaaaaagccccggccccctgtaaaaaccctccaggggggtttgcagctttggaacccaaaaagccttttggaaaccgaaaaaaaaccccgggggccct

SEQ ID NO: 50744 - DNA, 739 bp, Homo Sapiens
ccccgcgtccgctgtttcctgcccttaagaggaaggactcacatatcctaccttccatcagccttgaaggagacaagtgccctctctctcacacccggtggccttcccttcccctttcccagagcctccaagaaggcccctggcctggcctgatgcccaccatcagcagcaataggcaccaaaacctttctccttcctatccctccccacctcccgaaagggctggggacagcaggtgtgtccttgttagttccatccagctcagctttggctggggagctaatttcactggagccaggctaagcattagggtaagtatttgtcctgtcttgggcagtttcctcactgaaaaatgagggcagagttctaagccctcctctaattctaaaattctaattaaaacgtcgcgagactagtggtgcatgcctgtgatcccagctactcgggaggctgaggcaggagaatcgcttgaacctgggaagtggaggttgccgtgagccgagatcgtgtcattgcactccagcctggcaacaagagggaaactccgtctcaaaagagaagaaaaaaaaaatcaccagactaatatttaccttgagaatccttcttcatcttcttgtaatgaccttcggtgacaacatatctgttttagaagaaaacgcaattaagattatctatgacaacaaccaccgtctccaaatctgtattgattccttttattcattataagtctcatctacct

SEQ ID NO: 50745 - DNA, 746 bp, Homo Sapiens
tacagactatggcagctggcagatggtaacgggctgtggcagtattcaggagcgggctgtcctgcacacagactcctctctccctttcagcttcccggatgagctccctaacagttgtctgcttgcagccctgagtgatcgagagactcggctgcaggaggtgcgctcagccttcttggctgcgtacagcagcacagtggggcttcgggcagtagcccccagtccttccggtgccatcgggggcctgctggagcaatttgcccgtggtgttggactccggagcatcagcagcaatgccttgtgaagaagccagcccatgacattttcctgctcctctctcagctgagcccttagcagagaatcaaagccatgcctggccgaaggggtacttccaggtcaggggaaatttcagtcccccatctccatcatgaacatggcagccccaaagctgagcaaggccaaagacagggttttccaacccccagcctcttgactggtgaccaccaccccttcttgtcactgtctcccacccaccccatctttgctgggattcccatcaactctcagaactgtgtggggtttccctggggccttgtggaagccatgacttcacaaagaccctacctgtcagttcttgtttctggggaggagggatcacctgcactgagaatgaggcagtttgacacagatcacaaaataaaatcaaagtctttttgaataaaaaacaaacaaaaaaaaaaaaaggg

SEQ ID NO: 50746 - DNA, 1043 bp, Homo Sapiens
atgggtggtctgggctcagggtatggaaccggccttctttcagccaacagacattcactcatggtggggacccatcgtgaagatggcgtggccctgagaggcagccattctcttctgccaaaccaggttccggttccacagcttcctgtccagtctgcgacttcccctgacctgaacccaccccaggacccttacagaggcatgccaccaggactacaggggcagagtgtctcctctggcagctctgagatcaaatccgatgacgagggtgatgagaacctgcaagacacgaaatcttcggaggacaagaaattagatgacgacaagaaggatatcaaatcaattactagcaataatgacgatgaggacctgacaccagagcagaaggcagagcgtgagaaggagcggaggatggccaacaatgcccgagagcgtctgcgggtccgtgacatcaacgaggctttcaaagagctcggccgcatggtgcagctccacctcaagagtgacaagccccagaccaagctcctgatcctccaccaggcggtggccgtcatcctcagtctggagcagcaagtccgagaaaggaatctgaatccgaaagctgcgtgtctgaaaagaagggaggaagagaaggtgtcctcggagcctccccctctctccttggccggcccacaccctggaatgggagacgcatcgaatcacatgggacagatgtaaaagggtccaagttgccacattgcttcattaaaacaagagaccacttccttaacagctgtattatcttaaacccacataaacacttctccttaacccccatttttgtaatataaramaagtctgagtagttatgaatcgcagacgcaagaggtttcagcattcccawtatcaaaaamaraaaamaaaaaaarraagaaaaagtgcamttgrgggmggctttctttacatwymttcagatgtgcaascgtatgtccagstgagccmgcccgagctgacggcatyttccccctgggamaagattkkcctaaatytttggaaaaaaaaaa

SEQ ID NO: 50747 - DNA, 908 bp, Homo Sapiens
gcccttccggggtagtgtcggtagggtttcacagtgcaatctctgccccacgagaatagaagtttccacagatgcagcagttctctcagtcccggctgtgacgttggtggcctgagctaggaggaaaaagagcagttttcactcagttttggttccctgcccgaggtgctgacccaattcgctgccaaaagagtgtcaatcagaatatacaaatcccgtatggttgtgtcatcctctcttaatcatttttactaattctaataatcagctctagcttgcttcataattttcatggctttgcttgatctgttgatgctttctctcatcaagactttgcagcattttagccaggcagtatttactcattattaggaaaatcaagatgtggctgaagatcagaggctcagttagcaacctgtgttgtagcagtgatgtcagtccattgattgtctttagagagttaatgttacaaaaaagaattcttaataatcagacaaacatgatctgctgaggacacatgcgcttttgtagaatttaacatctggtgtttttctgaaaaaatatatatacatatattgctttatttgaaacaaattaaaattatgctggcatttggaacaacacacaccaagaaacagcagacaacaaagcaacgaacaaacagcaagacaacgaaggaccacagaagaaacagcaccgagaagcgagaagaagaagagctcacagccaaagacaaaacaaagaaagaaaggggcggggggcagaataaaactcgccggggggcacgctaagaagccaccgcgtgggtaagaaagggcgcccacagaaaggaattaacacgcaacggggccgtctaaacaacggaggagaacacaccgtggcatagaggaaacccccttggtgggaaa

SEQ ID NO: 50748 - DNA, 921 bp, Homo Sapiens
  misc_feature (36)..(36): n is a, c, g, or t
  misc_feature (749)..(749): n is a, c, g, or t
  misc_feature (835)..(835): n is a, c, g, or t
  misc_feature (858)..(858): n is a, c, g, or t
  misc_feature (890)..(890): n is a, c, g, or t
aattagatgactttttggatctaaatcacaaatatntgggaaagatatctctcaaagaagcaaggacagtagttacaagttatactggcagttattgaagatacttaagatccaagaacttcttgcttttatgctagaaatcattatgatagtgctggacactgaagcaaataccatactgcttatacttggtcttccagttttttgtaaatttaattttatattttttgaagatgatagcaatatgctaaaaaaatgcttgtcccctatatgaatattctgttacgcttgaaaaatattttctccagcgttggttactgaccaccccaccctcccaccacacacacacacacacacacacacacacacacacaaagtggagaaaaatgtatactcaacaatgtcattttgtgactttggaaacaagttatgttttgtgtttttgtctcattgtgttattgtctgactaaatctaaaaccaaacccatgttgaaactagtacttttccctttaaaaacaaaccaaaaaaaaaacaaaaaaaaactttttaattaaagaacctagtttgctatgcttaaaattaccaagaattttttatttctttgtcatagacacaatttctcttctgtatgccactagttacatttctaaattctgagcggtctcagttaggcctgtatgtgtgtacatgtccaagtaaagctggaaaatgtcagtcttgacacagctgtgtcttagtatgagaaacngaagactgaagaataaaaactaaggaacaagaatgagtctcttttttggtggctaagtagaatctttcctaaaaccattgtcatanaagcagttaaaggcaataaattnttaaaagggacatatcactgattcattcctanaagcatgtaacaaaaagtttttgttctgttc

SEQ ID NO: 50749 - DNA, 615 bp, Homo Sapiens
  misc_feature (569)..(569): n is a, c, g, or t
gcggccgcggggaggaggatgggggctaaccagttagtggtgctcaacgtgtacgacatgtattggatgaacgaatatacctcatccattggaattggagtttttcattcaggaattgaagtctatggcagagagaagctgttgttttagggagcacggacttcctagaagatgatatagaaaaaattgtagaagaactgggaaaagaatacaaaggcaatgcttatcatttaatgcataaaaactgcaatcatttttcttcagctttatcagagattctttgtgggaaagagattcctcgctggatcaatcgacttgcctacttcagctcctgtataccctttctacagagttgcctcccgaaggagtggctcacgcccgcagccctgcagtctagtgtcagccaagaactccaggatgaactggaggaagcagaggatgctgccgcatccgcttccgtggcaagcactgcagcaggctccagacccgggcgccacactaaactataaatgtctccaaagtcacacattcagaactgtctctggcagtcgaatatcactagagaaaangtaacagagaagcatcctttagatattttgtatgcaaagatggctc

SEQ ID NO: 50750 - DNA, 757 bp, Homo Sapiens
  misc_feature (715)..(715): n is a, c, g, or t
  misc_feature (727)..(727): n is a, c, g, or t
agaatgtttatacattatttctaccgagaattaaaacttcagattgttcaacatgagagaaaggctcagcaacgtgaaataacgcaaatggcttcctctttccttttttggaccatctcagtctttatttgtgtaattcattttgaggaaaaaacaactccatgtatttattcaagtgcattaaagtctacaatggaaaaaaagcagtgaagcattagatgctggtaaaagctagaggagacacaatgagcttagtacctccaacttcctttctttcctaccatgtaaccctgctttgggaatatggatgtaaagaagtaacttgtgtctcatgaaaatcagtacaatcacacaaggaggatgaaacgccggaacaaaaatgaggtgtgtagaacagggtcccacaggtttggggacattgagatcacttgtcttgtggtggggaggctgctgaggggtagcaggtccatctccagcagctggtccaacagtcgtatcctggtgaatgtctgttcagctcttctgtgagaatatgattttttccatatgtatatagtaaaatatgttactataaattacatgtactttataagtattggtttgggtgttccttccaagaaggactatagttagtaataaatgcctataataacatatttatttttatacatttatttctaatgaaaaaaacttttaaattatatcgcttttgtgngagtgcatatancatagagtatttatacaatatatgttacta

SEQ ID NO: 50751 - DNA, 507 bp, Homo Sapiens
tttgccctcagagtttcaagaagtttttaaccgaagtgtcatgattattgcagcaacaaatagacctgatgtgttagatactgctttgttacgacctggaagattagataagatcatctatatcccacctccagatcacaagggcaggctttctattttaaaagtctgtacaaaaaccatgccaatagggcctgatgtctccttagaaaacctcgcagcagaaacctgttttttttctggagctgatcttagaaacctctgcacagaagctgctttgctggctctgcaagaaaatggactagacgcaactacagtgaaacaagagcactttctaaaatcacttaagactgtaaaaccgtcgttaagttgcaaggacttggctttatatgaaaacttatttaagaaagaaggattttctaacgtggaaggtatttaaaaatcaccttaaactcttgttcagttcacattaattgaaatgtgaacttgcctgtcgtttgcaacttcaca

SEQ ID NO: 50752 - DNA, 867 bp, Homo Sapiens
ggggcaccttcatgttcaagcaaagttgctccaagaaatagttcgctctttctctggcacaacctgccagcccattcaacatatgttacggcgtatttgtgttcaattgtgtgaccttgcctcaccaactgcacttctgattatgagaactgtgttggatttgattgtagaagacttgcaaaggtattttcattttgcattaaaaattttttcctcaaattatttttgacacatatattttttcccttacaatttggaaactagggtttggaatgcccagataacatatatacatgtaaatatacacatatacctacatatgcacacatatgaatatatgaatacttgtagacttttaaaattagaaagctttatttcatcatttcatgtgcaagatatcttgaaggtcttgatttgggattttcaaatggtgaatcctaaagaagtactctgatttaagaaaatatattattagaaacctgaatttataaaatttttgcagtcattgtaaaattccagagaatttgtcattatacccaaggaattaaatgttttatgcaaaatttgtgttagttgatgtgtattgagaaattaatactagttaaacaaacagcagaggaagagcgcccaaacaaaacatttggccgcctcggccagtcgatctagactcgagcaagttatgcttgcggcccaattcagctcattgggcattcgccctaagtgatcgtttcaatcactggcgccttaacagtctgatgggaacctgagtaccaattacctctgggatcccttgcacgggtaacaaagcggcgcgctccagagcacgatggaggtagggcaatcaaaagaattaaagcttaaaacgga

SEQ ID NO: 50753 - DNA, 656 bp, Homo Sapiens
ttaggtgacactatagaagagctatgacgtcgcatgcacgcgtacgtaagcttggatcctctagagcggccgcctactactactaaattcgcggccgcgtcgactgccattttgtttttattcagttcaacttccttgccgctctgtagtttccagaggagtaaagtaaaaattatgagttctgagaaagcaaatttgcttgccataactccatttgagggtgactgcgattttgttagcataagattgaagctaatctcctaaagagtatatctgattctgcgtcttaatcatttttcacaagaaaaaaaaatcgggacatataggtatatgtagagtaacataaagccaccaattgtagaactgatgtgatgtgaattgtactgagggttggcatgaatgcttttctttttcacgtgtaacattaggttcagacatatatgtgtgcagtgcattgctgtaatgtgtgcacatggtaagaacacatatgtctcaataccatgctgtatcgctcaatagcctgacagatgtatatgggtgaattcattcattgccctctctggtgattagtagcactttgaaaatgatgtcgtaatttggcaaactaaatcctggtcggggagcagtacttgaagtttttgaagaaatgacaccga

SEQ ID NO: 50754 - DNA, 889 bp, Homo Sapiens
  misc_feature (629)..(629): n is a, c, g, or t
  misc_feature (829)..(838): n is a, c, g, or t
tttaagtaagttcggcggcaaagggcccatccggggctggaaatcccgctggttcttctacgacgaaaggaaatgtcagctgtattactcgcggaccgctcaggatgccaatcccttggacagcatcgacctctccagtgcagtgtttgactgtaaggcggacgctgaggaggggatcttcgaaatcaagactcccagccgggttattaccctgaaggccgccaccaagcaagcgatgctgtactggctgcagcagctgcagatgaagcgctgatgaacatcgccttcaatgacatgaaccccttccgcatgaaacagctgcggcagctgcgcatggtccaccgggagcggctggaggctgagctgcgggagctggagcagcttaaggcagagtacctggagaggcgggcatcccggcgcagagctgtgtccgagggctgtgccagcgaggacgaggtggagggggaagcctgacttggccacctcccctccccacagccttcctcacccttggctggcagacccactggaggtcaggcacggaccagtggcccagccctgggtgtcccatcaccatgtgaccttggacatgtcccttcccctctctggccctcagtttccccactggngacattgtgtgctgcaaaagccattggttgggctacttcttcataggcacttacttacccagggatgccaccctttcgtcacctcttccacagagcactttggcatgtaaacaagcaagagcactgccctctatagggtaacctggaacattctctaggttatatcaatataaaaacatggaaaagggggggaaaaaaannnnnnnnnnactcagcggaaaggccgccgccacggccgcctttgctgtcccccggcttta

SEQ ID NO: 50755 - DNA, 610 bp, Homo Sapiens
ccgggcaagacagaatttttgcagaataaatggagttacctgctttcagccccaggtcgtagctattgtctgccctgctgatatgtgataataatttgtgatcctgttgtcttaaaatggggtcactcatctccagtagaattaagtccacagtgaagttgtccccccatccccagagataaacatatatgaatgaactcacgtggtaacaactactgctgcctgggatcatgagagacctgaactgaactgataggaagtgaaaggtggctgaggtaatgagaatagacccatctgcagaggatcataaaaccagcaaagacaagatcttgtctaagatgccttcacaaactttgtccatgagaactctaaggacttctccagacctgttggctgctgctgtgatctctgcccaagaggagcctctgaccaacatccaaagggcttctggacccactggactcctctggaggtaccttggtctcccgatccatggctgtggttttttactccgtttatcactgcctgtgtgtagaatgataattgcacaattgatagtgtgaagacctcttgataaatggtgaatctgagcatatgtatttggctgaca

SEQ ID NO: 50756 - DNA, 612 bp, Homo Sapiens
cagattaaaatcaggtcctaagtcaacttggaagagctaaaagcatgttttaatattaaaagtcttgcatacctagtgcacagtttggagacgcaaggatagatctgtttactctagttgaacattttctatacaattgaaagcaacctataatagataaatccatcattgcatttaaacaatgaatttccttattctcaaaggacaaatacgtctggattatgtggtaaattgctactcagctatggtgaaatatttatactattctaggcacaacactaggaactaggtgattctgaaacaaaaggaatattttctgttgttgctttaattaccaaggttatttttttttaatctcaacactgacaaaatgaaaccaaatatctcttcctcaccatttctcaaggaggctgcctgttggaatttgttttgaaattttgacatgatccctaaaatcaacattgggattaaaaaaaaaaaaaacttcttatttacctcctaagggaaggttgcccttatgccacatataataccaaattgcttttttatgggctgccataacctgaagggaaaaaatttgcgctttcggggagggagggaaaaattaatgaa

SEQ ID NO: 50757 - DNA, 533 bp, Homo Sapiens
ttttttttttttttcccaatagaaaaaaggctataaaaattttattccaagagtgattaaattgtataatgttgtatatgtgaatttaacacttttgtttacatgttaaacaaatgtgtatatattagactacattaaatatgcaattctttcttccagttaaatactgttgctccctaaaacccttacattgtacaccattgggaatgattgttcatcatactacttttccattagtgaggctacagttatgttttaaatgtgcgattacagagatggcatctgaacataaactgatggctcgaaaatgaaaatggaaatgtagcagccatatactgctaactttggatctgttcctgaattcaaaactactaggagaaaagtgtcctttataaaaaaggaccttattaatgcctaaaaaacatcatattctctaggaaagcttgtgtctgtttccttagggaaaatgtttgccttttaaaaactgtgatcctttaggatgatcatgactttccctttccttatggaaatgc

SEQ ID NO: 50758 - DNA, 585 bp, Homo Sapiens
  misc_feature (575)..(576): n is a, c, g, or t
atgattcttttcttctggaaatcttctagtgaataatttttaaaagcttcttttaaactgctcagtaaaacattgccatacattaactctccatttctgcattaacttcatttgctggaaagaaattattttgttaatgaaccaaacccagccattaagttatgtgaattcaccttctctagacacattgaggtatggcagagaagacacatattccctggcctagagtgggctgacaatattgctgcctcccctaaattgactcaatcttgagaaccacatactgcagtgacagttgatcatggatcagaaatattcctttttctcctagaggaaatccctcatggcattatcattccctaaggacaatgagatgtccctccgctcaaatcctaaagccccctgatgaaagatttggctctgatttgctgccaacttattggtaagtgctgaatgagttactgtgctttggcatagcttctacatcacagcaagtgacttctcagaggggaaaagccaagctccagacaaggagtgctgttagcccaagggggaagagctaatagatacatagnngccgtagca

SEQ ID NO: 50759 - DNA, 861 bp, Homo Sapiens
gggtatttttatttaatggtagtgagagaaaagggggtttcggtggaccatcatattcttgagactgaagttcattctgtttcattagggattagactaaaatggacaaacagtgggggaaatccattttccagaagcagctctgcctgtacgtcccagtcaaccacatggatggtctttgtgaaagttttaacttcctgcagagttaccgagtgctcagcgattgagctttgaccacacccgtgtttgttcctagtctgttcccagccataagcgtgtccacaagccctctgtggcttgtgtggcctgatgtccatggccaccaagggcctctcaccatacgcttctccactcaacctttggagagacacggaccaccaaaggctgtgattttttttcatcctactttatagttcaaacaaacaggttgggtgccgtagctcaaacctgtggatcccagacttttgggaaggtgagctgggaacaatcggtctaggcttcgagtttttgaccagcccgtgcaaaaaacgagacctcggggtttaaataattgttgaaaaaagagcctataagaaagtggaatggaagattaacaggaaactgacaaggcctgacaatttggctcaacattccggattctgaatcggaggcttatgtaaataaaaaccttatcagtactattttgcaatttgagcgaaggcctgaaaagtacttgtgagtttagctccccacttaagttttttgagctcgctagtgtgtcccgtacgagttaacaacatgcccttgatatagactagcacaggggaatgggaggtgagtcggcctgtgcttttagatatcgcgacgactcaggagcactct

SEQ ID NO: 50760 - DNA, 1065 bp, Homo Sapiens
  misc_feature (707)..(707): n is a, c, g, or t
  misc_feature (758)..(758): n is a, c, g, or t
tttaattcctatggatgccgtagcaaataacaaaaacttggatggcgtaaagtaacagatgtttactcttttccagtattggagaccaggaatctgagatcaaggtgtgggcaggggtgcgctccccctggaggttctaggagaggatccttcctgcctcttccagctcctggtggctccaggtgtccctgggcttgtggccacatcactacattctctgcctccatctccacgtgaccttttcctctgtgtctgtgtctcctcttctgtctcttagaaggacactggtcattggatttaaaggccacctgggtaatttatagtgatctaatctcaagaatctttccttaattacatgcaaatactctttatccaaattagtttgcattcacaaattctggagcttagtacttggacatatattttggggggttgatggttggaggggcttttattcaactcagtacatcttaataaggaattaatgccccccaacttgccttacaagtcatatattaaaaacaatgttggcctggcacagtggctcatgcctgtaatctcaacactttgggaagccaagggaggaggatcacttgagcccaggagttggagaccagcctggataacaaagggagacccagtttctacaaaatatttaaaaattagccacgccatgatggtgcatgcctgtgggtctagctattcangaaactgaaggtgggaggatcactggaaccctggaagttcaagacagccantgagctatgctcaaaccactgcactccatcctggcaacagaactggaactctggtctcaaaaaacctaacccttaaaacttcaaaattaaaaaaaaaaaaaaaagggcgggccgcctcctaaaatattccctccgaggggggccacagagtttaccgcgtaacccagagttttttttgtgcaacaaaaggggggcccctatataggggaaggccccatatttattaacccatgggcgcccttggtgcggtcttctttttataaacaccctccctggaaactctggggaaataaacctctctactctc

SEQ ID NO: 50761 - DNA, 400 bp, Homo Sapiens
tgagtcaattttccagacatctttaattagcaatatgtttaagtagttacaagccttccttcttttcttgtgacagtttgggttgaattctatcgtttgcagcctgtcactgtaaggcacaaacatgataccaagatgcgatagtagatttaagccagttgtttttaagtttgtgtttaaggagaaactaacaatgaaaacggcctcgttgacggaggaaaagttggaatgcagcctctggtgctgtttgagcgatccctctccccggggcctggcgcgcgctgctgtgttctggaagggctcattgtacagtcaaggcggcaggaatcctcttcatctttctcaccaatatgttttgtggactctgacgagccaaatctgacatcagttctggaacatc

SEQ ID NO: 50762 - DNA, 686 bp, Homo Sapiens
tggcagtttgtgtcctctcagctgtttaacttatgtaatggatgtttgcacctgaaaacactataaaaatccagtggttgtttaaaaagtccatttgtcactaattccattcaggttctccaaccttcttcttgaatatcattgtcaccatttttactgttagaataaagaggtgacaccataaagtcctgctgataatgagagtagttcaggacagctgtgattgaaatatggtcgctatttacagtttttcagggaaaagttatacttttctatgttaataaagagctgaagtggtctacagttaatgtgacatgtagggatgatgatatttttaaaatacattttgttgctaaaaagtttttaggccagtgcaaattatgcagtagaacttgtgttgcaaaaggaattataacccatactttaaaaatgcttaatccctcatattcaatttcatcaagccttgtatacttctgcttaaatgtaattcaatccttggttgttatggcaaacagaaacccaaaaaaagacagactctggtactaatggtaacagagccactttatcatttggtcaaaatttggcattatgattagctttgtagaactgacctgtttatttggcaatgctgttaaaggatcatttcggtttcagacttcaaagttgattaataaatttaatcttaa

SEQ ID NO: 50763 - DNA, 519 bp, Homo Sapiens
atatatgtgtaaatagagatatttatatattcacagacaaacacgtgtatgcacatttcacaatggaggaagaagggatatggtgtgcactgaggtaaagtgagcagggatacagaagagagctggagcctcacagtctgattctctcattgtacataacctttagggtctttgtttccctgagttctctggtatggggcactgttggcttgggctggtaccctgttattctctgtgatgaagggattcactggaggtaaaaacgtaatcatttccaaaggttgagaataaatgactttgaggaaagggtgttcattatccgttgcttctatattataatcagttgaactacaatacggttatctattgattttttttaatttttctgacaaattattgacaccaaattgaataattcatgacctgcatgcttcagcttctttctccctggtttccaggtgctattccctcaagaaatgcaaattaaatatgtcggtcttaataaatcaggagggaagc

SEQ ID NO: 50764 - DNA, 513 bp, Homo Sapiens
aataccttcattttatgtaaaaatacaccgagatatcaaggcaggaaatattttgctaaatacagaaggacatgcaaaacttgcagattttggggtagcaggtcaacttacagtaagtaaaaatattacttgtattgataattttcatttctgtcctgagaagcagttccttttatttacctatttttaaaatataatacttgacttaattgtattagtaaaaaatcacagaatctgccaataggttacaaaagagctagttagtgggttattttagatcttttcctggggttcaggtcacatagcttaactttgttcaacttttataaagatgaaaagtaaagcaagaaatgatagattactctagtgcactacatcaacatatttataaaaggaagaaaaattaagaggaagaaaaattaagtccaaactgctttccttgactaagacataacatcatctcattcaacttccaggtagtacttggcagttactgtactgaaaacactctgt

SEQ ID NO: 50765 - DNA, 597 bp, Homo Sapiens
attgaggcccgccgcgtctgcgtcactttccgggagctgtcggctgagtttggccctggagggaggcagcaagagctgggccaggaactgctgcggatcgacctctccttccagggaagacccgtgtgaaccgcctccttggctccagacttgactgatcccgggattgaaatgaggagcacagaacagggcctcctgcaactcacggggtttcaagagaagatggctgacccctgatgctgtgagcagtgtgagccctgcccaggagcaggttttgatgggaacgtacctccaggcagcccccttccacctggaccgtggccacacttttttggttatttagtttgtcacagtcttggggacatgggatcatttgagcttaaaaaatactgggggccgatcacagtggttcacacctgtaatcctaacactcctgggaggcctgaggatgtccgtctccaccttatgcccaggagtttttgactcagtctgttcatcaccgtttaaaactccggctttacaaaacactacaagatattagctcgtgtgtgtggtagtctcacacgcccgctcttcctcagctccctttgtgaggct

SEQ ID NO: 50766 - DNA, 711 bp, Homo Sapiens
gtccgatagacaccaggaagcaactagcagagaatttggtagtcataggtggcacttctatgttgccaggatttctccacagattgcttgcagaaataaggtatttggtagaaaaaccaaaatataaaaaagcacttggcactaagacatttcgaattcatactccacctgcaaaagctaattgtgtggcctggttgggaggggctatttttggagcattacaagatatacttgggagccgttctgtttcaaaggaatattataatcagacgggccgtatacctgattggtgttctctcaataacccacctttggaaatgatgtttgatgtcgggaaaactcaaccacctctgatgaagagagcattttccactgagaaatagaagtttgattaaaaatcaaccttgcttcatatcaaatatttaaccaattataagcaaattgtacaaagtatgtaggatgttttgttatagaggactatagtggaagtgaaagcattctgtgtttactctttgcattaatatataattcttttgactttgtttctcttgtgtagtggtaaaatggtagctggctgccttattgcagatttgcctgtatttatatccaataaaagtatagtaagagcaaaaaaacaacaccacctgcccacacaggacccacaaccaccaacaggggccgctcgaaaaaccacgggcgcacaaaaccacc

SEQ ID NO: 50767 - DNA, 1521 bp, Homo Sapiens
  misc_feature (54)..(54): n is a, c, g, or t
  misc_feature (1049)..(1049): n is a, c, g, or t
  misc_feature (1390)..(1390): n is a, c, g, or t
gcgccggccggtgttatatgagagcggacccgcccaacgctggctggaaccggnccggaattcctttccaagaaggggctcacatctcctcccttacctcttccctggcaacacacataacagaacaaggaagtcaaggctgggacatttaatctgatactgttttgttatcttcccaagagagaaacagtggggatattacttccttggacaaagctgactacagaccaacaatcaaagagaatattcctgcctctctcatggaacaaaatgtaatttgcccaaaggatacttactctgatttgaaaagcagagataaagatgtgacaatagttcctagtactggagaaccaactactctaagcagtgagacacatatacccgaggaaaaaagtttgctaaatcttagcacaaatgcagattcccagagctcttctgattttgaagttccctcaactccagaagctgagttacctaaacgagagcatttacaatatttatatgagaagctggcaactggtgagagtatagcagtcaaaaaaagaaaatgctcactcttagatacctaagaattcacagcgtttcaacctagagcaaccactaaaaaacctgcacacagatgacagtcaatattacaatagagaaaatacagtacttaacaatgttcaaataaccctgcttgggtgtgcccggcctcaacctccgcaatgcccaacccctttgtcggtgcggccaaccggccttgaacccccaggcagtttcgtacccccccactctgggccaacacacactcgaaaatgagcccctcccccctctacccccccccccctcgctcccaccacaacatccaccgccttagccccctcctcccccaccacccacccccccgccacaaggggcacgctcacaggttgccacacgcaacgcaccccaaacacacatgcttgtgcttagtacgcacacagaacgaggtcagaccttcccccccacaccccgaaaattccccccgcgccgccacagtgtctgcctgccggccacttaaacccaanacccgccccccgggggatctcgcctcgggcgaatacctgtcaacaccttccccactaccccccccgcggcaagataaacccccccgcaccaatatctaaacaccgccttctcccgctcactgtaataccgcccccccccccctctacgcctcactacctacgccccccccgccctttccgggtaacccccatacgaacgggataaaaccacccccgccccccatcgcatgcccacgagtcccccgccccccacccctcttcgcgtctttatgaaaattcccgcgatccccccctatccttccctcacaaccccccgaccccctccgccccccccctccgcngccgccccgccctgaccacccaaaaatcgtgccgggccgtcgcataaaatcgcagatccacggaacgtgagcagcccccaccggggaaatattatctcccatatttcttgccgcttcaatacgccggacat

SEQ ID NO: 50768 - DNA, 996 bp, Homo Sapiens
  misc_feature (793)..(793): n is a, c, g, or t
  misc_feature (913)..(913): n is a, c, g, or t
  misc_feature (937)..(937): n is a, c, g, or t
gcctgggtggcgaattcagacgagggtgagtggggcccacatcccatccagggcaggaacgtgagccatggggaggctaagagcagacccagggtcacacagtgatgaggctgggatgtgagtggggcccacatcgtggagctgtggtggggcctgcagtcatgaatggcaagtggtccctgatgtgcagtgtctcattagttgcactgcagttaactgtggctcctgcagggcaccctgcccagaatgcccagaagagaaccatgcatacctgcactgcatttgagagccatgagctggaggctgtggttcgtgccagcaaggagcctactgtctggtgtgctgtaggcatctggagagggagagggcctgggtaggagctgggaggaagataattttcaactatggggcttcagtactgcagcgccccgagccaggctctgtgcttctgcctttaaggcctgttctcagcacaatgtctcaaaaataggtcatatcctgccactcccgtcgcagagccctttaatggttccaaaccctaagtccacacatagcccctggctctggcatctctccagccccactggccccgagctgcttgactcaccggcttcctatttgatgcacccaggcccccttgtggccaactccctccccttctcactgaggcagaagcactgaggtgggctggacatgggtgccctccacgtccctcatatccccaggcacactctggcctcaggttttgccctggccatgtcatctacctggagtgggccctcccctttctcangccttgaatcaaaagccacttttgttaggcgaagaatttccccagaccactcatcacattaaaaaaatatttttgaaaaaaaaaaaaaaaaaaaacttcgaggcatccttatgtccgggntgcgggagaaaagaagggaattgnaaaatggccacatggggtccataaccttggttttcctggaaccccagccttttccttgt

SEQ ID NO: 50769 - DNA, 669 bp, Homo Sapiens
gtccaagagcaacgtggtggacgacatggtgcagagcaacccagtgctctatacgcccggcgaagagcctgaccactgcgtggtcatcaagtatgtgccgtacgtgggtgacagcaagcgcgcgctggatgagtatacctcggagctgatgctgggcggaaccaacacactggtgctgcacaacacgtgtgaggactcgctgctggccgcacccatcatgctggacctagcgctgctgaccgagctgtgccagcgcgtgagcttctgcactgacatggaccccgagccgcagaccttccaccccgtgctgtccctgctcagcttcctcttcaaggcgccactagtgccgcccggcagcccggtggtcaatgcgcttttccgccagcgcagctgcatcgagaacatcctcagggcctgcgtggggctcccgccacagaaccacatgctcctggaacacaaaatggagcgcccagggcccagcctcaagcgagttggacccgtggctgccacctaccctatgttgaacaagaaaggaccggtacccgctgccaccaatggctgcaccggtgatgccaatgggcatctgcaagaggagcccccaatgcccaccacctgaggccccggtcacacagtttctcggctcttcctccccgctgccccccacgaccc

SEQ ID NO: 50770 - DNA, 628 bp, Homo Sapiens
  misc_feature (505)..(505): n is a, c, g, or t
  misc_feature (511)..(511): n is a, c, g, or t
  misc_feature (571)..(571): n is a, c, g, or t
  misc_feature (590)..(590): n is a, c, g, or t
aggaaaacttttttttattttttacattttttggtgtccgtttgtattgaataatttgctacatttgtaaaatgtaagaggtatataatatatgtatatttctaacgtaaaaaacataatttttttcttttcaagattttttcttaaaaagatgagagaaacatattttttcaggaaaaacaaactttaaaaaaaaaagaggagaaataaaaccttttctcccctttccccatcctctatctatccctctttcccaggaacaaatcaaaaggtggattatcttctgaagaatggaaactgttagtccagaatgatgtctttttctcaatgcagtgagttatagattctctagttttctccctagggatgggaagggggcattgaggcaagcctggagaggagcccggggagcagggtcatgaacttttttctttagtgaaggaggaatacaatcaagggttttgtattcagaatgttgtgcaatattttggaatgggacattggngtgttnagagattttagtttaaaaacaaaacaaaaagattgatcaaatctgtacagtttctattgntccagatttttttaagttngtattaaaagcatgatacataataaaaaaaaaaaaaaa

SEQ ID NO: 50771 - DNA, 791 bp, Homo Sapiens
agtatagtagaaattatagtagtttggattaatagatttaaggaggtatggtcaataatctcaaatgcctctcaagtgtgtttttgtattataagattttctaaataaaagtttctaaataaaacctaataatatttattttttaagagatagagtcttctattttgggagtggcgggtccggcagagagggatcttgctgtgttgctcatgctggagtgcagtggctattcacacatgtaatgatagtatactgcaactatgaactctagcaatgtttccagctcagcctcccacatagctgggactacaggtacatgtcaccatacctggtcataattattatttttaatgggaagcaatcgggagtcttcacttcttaatctgtctctgacattgttagctaatgtcaagtgacttcttccccaggtcatgttacctgtcagtactcaatcatcatgtacacagtaagaaattgttttatcttttcactctgaaatgcagggatagaaggaaggcatcaaaaaattaacaatggattatttcatcacaatgttaagtgcaaggtgtcggtacagcaagataatcctagatatttatttgaccttggaatgccgttaggcatatatctacttaaaaattgatgtggctgggcatggtggctcacacctgtagtcccagcactttgggaggctgaggcaggcacataacttgagctacaagttcgagaccagcctgggcaatgtgacaagaccctgtcttttcactaaaagtaccaaaaaaaaaaaaaaa

SEQ ID NO: 50772 - DNA, 605 bp, Homo Sapiens
gtccgctttgctatccttggaacacacaacattacagtggaatcttctgtgaaagatgccaatggtatagtatggaagactggtcccagaactaccatatttgtaaaatccctggaagacccttattcccagcaaattcgcttacaacagcagcaagcccagcagccattacagcagcagcagcaacgcaatgcctacacacggttttaaccatggaatgaatgcactgcagactctcaagagatcaatcaaattgccagaaacagtttggtttttcatatggaataagtattaaagttacagtgtagttcatttattcattgatttttgtaatgtaatattctggaaaaaattttgttttcttaaaaattttgtctgacagctgggcgtggttgctcacgcctgtaatcccagcactttgggaggctgaggtgggcggctcacgaggagatcaagaccatcctggctaacacagtgaaaccccgtctccactaaaaaatacaaaaaaattagccgagcatggtggcaggcgcctgtagtcccagctacttgggaggctgaggcaggagaatggtgtgaacctgggaggcggagcttgcagtgag

SEQ ID NO: 50773 - DNA, 558 bp, Homo Sapiens
agttaatttcagagccatacaaaaataagccacaaccagcttcagaattaattcccaatcccccattccaccagggctgggagcccattcccagtgcttcccaaggccctcggggacatctaccgccaacccagctgcttctggcaggggctccaagccccagcgtggggaagggccctggagaagccctcatcctcatgggaaccacactgcagtgggtggggaaggttgttgtcagcaccgcccccggctcctccaggtcctgctggctcctcgggggcagggttccctggacctcccagttctgcgccttggggccagccagtactcagagaggaggaccttctcaaccacgtacagaacacgggttttcatggctgcctttggtttggttttctgagaagataggattggattggattttgcagagggtgagaacttctctgtgcctgctcagaggcgccctagggaagggccatgtttgagttttgctttgtatgttgttttgcaagtatctgcctggtactttgatttaaaataaaaacaattttcataaaa

SEQ ID NO: 50774 - DNA, 761 bp, Homo Sapiens
  misc_feature (4)..(4): n is a, c, g, or t
  misc_feature (8)..(8): n is a, c, g, or t
  misc_feature (751)..(751): n is a, c, g, or t
  misc_feature (754)..(754): n is a, c, g, or t
atgnatcngttcgttgccgtccggtccggaattcccgggtcgacccacgcgtccggatgaaaccattttttgtacaatgtaaagatcatctgagcaagatgagcattttgtaaaaatgaaaatgtgactcacataaaatcaggaacttgacacagtgttgcattaataactttagggtgcagacatgctgtgtgaatctcacaatgcgtcgtagatgtcgcgtgttggaagggagcaggaggaaggactgatactggcaaatcagtagagtgaggtgatccttagcaacgtgccaggacacttcctgtgtgcctgcagttgtcagggaccatttgggatcccgaatctcattctctaaaactgctttcttgaaacatgttacttccttagtataatcaatgtatactcccttactggcctgaaacgttgtatagctacttattcagatactgaagaccaacggactgaaaaaaagaacaaacattagctattttatgctgcaagaaccaggacacacaattcgccaatcatcccaccatataaccttcgattgtgcttctcaactccaccccataatttctcccagagaccatctatcaccttttccccaaagaagaaacaaaaccagttgcaccttaaaccatggatattttttcctcaggggctttaaatagtttcctatgcaaccgtgtcttgtagcacaaataaaattctacaaaaagttgcagtaaatttcatttggatatttttnaanaaaaaaa

SEQ ID NO: 50775 - DNA, 564 bp, Homo Sapiens
atgaggtcagagtgggaggtgcggccagatcattctgggtattataggccatggtcaagagtttgtattttatttcacataaaatatattttggggaggtattggagagttttcagcaagagaatgacctatctttgggggttgaatcacaagcctaccgataatgtaaactgccacagtcagttcctgccctgacagaccaagctctcttccttgatggtgggcaaatttggggttgctccctattttaaaaccattgccacccgtagtccccactgtagaatttccttaggtggccatattatatactacgtgaactctggcttccttggttttatacctcatgggctgagttgttaagattcctactcttttccggcattggggttgggggtgttagggaacagggtctcactctgtcacctaggctgaagagcagaggtgtgatcacagctcactgtaaccttgaactgctgggctcaagcagtcctcccgcctcagccttccaaggagctgggattacaggtgtgcaccatgacccagctaattaaaaaaaaaaaaaaa

SEQ ID NO: 50776 - DNA, 571 bp, Homo Sapiens
ggtttttagaagtgattttcattcattcacccatccattcattcatgtgtttgttcaacacatttttattgagcgtccttgtggacgtggcacagttccgagtgcagtgaataaatgtctccccctccttgagcttatattctatttttatttttgatgtgtcatagttacttctgttaatcagttcagtagaagtgctgagatactctgtgacaaaacagatcccatcgacatcatttttacaaataagaccagatgtcctttagccttgtcaacaggcttgggccatggtgaacaatgtctgcctctgaagtgctcagcagaccgtgtgaaagaagaaggtccgggtgtttggaaacaatggctgagtggcggtagtggtgcattgtgacctcattattctgcttttggtttctcgccttgtaatatgaataaggcacatgaggatttagtgtgtgtcataagataagtgactgtcacgttaagcttaatgtctctgtttctgtaactttcttccctgtttttcgtaattctttcctttgtctttcctgcaaaagttaaactgtgatta

SEQ ID NO: 50777 - DNA, 581 bp, Homo Sapiens
ctggctagtttaattccctggcgcagatacgcataggaccaacagggtcaccaagcagacagggagcccgcgagaatcattcaaaacatccccagccacagagatggatccagtttcctggtcatccccttagcagttcacaagttcctggcaaatgttccaaagcaaaaagcgattgcaattagcatccagttcctgcagcctggtgctctgccctgcacgtcagggttggcatccacccagatccagatggaagggaaacttctctcttctcctttgcctcctcttccctcaccagagcagggcgcttctcttggggtggtgagaaggatcttcgagaaatcgtgttcagtatttcaagctctatttctgtggcacatgtcttttgagaggcatcttcacctcttctgtgatgacttggtatgttgtttggtagagagatcttgattttcggaggatcttgcatttttctagggaatattttgtagttgtgtgtgtgtgtttttgccttggtccccattatgggatgcattaggactggcctatgcatcgaaaatctttttgtttgtaaacgtttaaaa

SEQ ID NO: 50778 - DNA, 622 bp, Homo Sapiens
ctggaagaaagttgtgtcaattttactcacattttaaaagtatattttgacttgtggtttaaatatgggagtaaattcagcctttcttcttttcatctcagtcataacccaaaagctacgggagaaaaagcagaagtgtaatctctgtatctgacaaaattaggagacagctgcaaccctaatgagagggctgccacaggcagaggaaatgaagcactggtgcaggagatttcagagtgagagtgctcaaggctgcaggtgcaagacagcactggtaaggactcttagctgaggttcgggatataccccgaggcgcggaaccatagatataacagtggtaacagtgcgtgggcaggtaggaggtaggatgtttcctagaccatttggggtctgaggagaaacaggctggggcctcgagaaggagtcactcagacaagccatatttttagaaagtagtctactgatgggagcaacagttatggcatgctgggggaagagaagggacttttccttgtgaagagccctacagctgcccctatttactgacttgggagaagtaaagtcagaaagaacgaacagctgtggggggaaaaaattctcagttgtcaaaaaaaaaaaaaaa

SEQ ID NO: 50779 - DNA, 974 bp, Homo Sapiens
tgatgtgcctgaatctataatgctggagatgaaagccaacttctctttgcctgaaaaatgcgactatatggatgaggtgacatatggggagctggagaaggaggaagctcagcccattgtcactaagtacaaggaggaggcaaggaagcttctgcccccctccgagaagcggacaaatcgccgaaacaaccgaaacaagcgtaaccggcagaaccgaagccggggccaaggctatgtgggcgggcagcgccgaggctacgacaaccgggcctacgggcagcagtactgggggcagcctggaaacagagggggttaccgtaatttctatgatcgatacaggggagactatgatcgattttacgggcgagattatgagtacaacagatacagagactattacagacaatacaatcgggattggcagagttactactaccaccacccccaggacagagaccgatactacaggaattactacgggtaccaagggtatcggtgaagcccctgccatggtcacctgtcagccatgaagctgaatctctgggggtgccaggcacccccgcaaaacacaaccaaggaaaacaggggctgtcggggtggggctgagctgccggggaggggtggtgggggggggagggtggctccaagcagggggtgggggaaggcggaaggggaaaccaaacaacaaaactgttccatttttgtaaacgtttggctggaccaggacttatgccttattcctattaaacatttcaacctaaaaacaaagagagagaccaaaccacaacaccaaacaaacacggaacaaaaacaagaagggcgcgccaaatactccgcgggcgcagagcacccttagtaaggggcccaggagtgaaaagaaaacgcgcgacaagcgagggagaagcgttttgagaccctcgggggagagacacccagaacgcgataaaagatggtaccgggcggggtagacaacg

SEQ ID NO: 50780 - DNA, 536 bp, Homo Sapiens
tgaactcctgacctcaagtgagctgcctacctggcctcccaaagctctgggattataggtgtgagccactgtgccaggcctgaggttgggagaaattttgtccatttctttagaaccaaaattggcaaccagagagtatttggatgttacacaaaatatttagtttccctttctagcctaaattgggttgtttatagcacccgtctctccatttgagaaaaatggttaggatgctggtgcagggatgaggccttattaaaacagagaaggtacccaaatggtggttcaaacacaggctggctaataagctgtgaggtgacttaccaaaaaacaacaacaacaaaaacccttgaacttctgctttcaacttctactttatgctagattatttggtccaatcttcctggtctaacacctggctacatataacaacaaacatctgcttgaatgtgttggaaaggtgatgattaattgccaggctgatatattaaataaaatggaaatctcaaaagttaaaaaaaaaaaaaaaaaaggac

SEQ ID NO: 50781 - DNA, 991 bp, Homo Sapiens
ttctctactgccgccaaataaacattagggaaatgggatcattaacaccactgagaaaggagtttacagggagcgcaatagtaactgtctgcttgtggtagtagaaagcttgtgccaggctgcatgaatagaaattaatgttaaactcctgttagacgagtaatatgtagatttttattgaaacagaccacagcttattaaaaagtactcagtgcaatggtatatacatatatacagatagaaaaaaatataactgtgatctttttgtcttacgccattactggaaacacccaaacgtgaactggagttccctctgaacaaaaccattgtcaaatcttcaacatatgacctccaaatctaggtgccaagtgccctgtgacagttgtttacacacctgaaaaatgtatcctggaagctgtaatcttgggcctgggctatgtgttgaaacaagcaaaagagacacatcgtgaccaaccaagctggtggaggaaaagcacaaaattcaactccaacctgcagttaggatcccaaagagatgttgacatttatagccaaaaagaaaaagtacatatatatatatatatatatatatatatatatatatatatatatatatatatctgaatcagatcgaagcagccaacgtccagcttcactcaagaagggacagggaataaacaacattctctaactgtgtcatgttgtctcagtttttgaatctcaacccaggactggatcccccttcatcagaaacgttttttaatggcgccaacaactcaattttgggcccaaaatctccatttctgcactggccccgaaaacccccagaaaatgacccgggaggttaatgggagaaaaatttttctgggcaagcttcaaaaaatgaaagggttatttttcccaaatccgaaaggagctttaaaaataaaattggcttcttgcccccggaaccggcttggcaaatttttttaatggaaagggaaaaagcctt

SEQ ID NO: 50782 - DNA, 464 bp, Homo Sapiens
  misc_feature (304)..(304): n is a, c, g, or t
cgagtagttggggttacaggcatgcgctaccacacctggctagttttttattgttgttgttttttgtatttttagtggtgacggggtttgctctgttggccaggctggtctcaaactcctgacctcaggtgatccccacttcagcctcccaaagtgctgggatgacaggcatgagcctctgcacctggcctcgtgtttttttttttagttagccattttatacgtgtttactgaacacctgtcctgtgcccatattctaagtgccttacctgcattaaactcatgtaaccttcacaacccgcgngtggaaaattatttaggatcaattaactggttaaaaaaaacttgggggggggcccggcacccaataccccttatagtgagtttattacgggccctactggccgttgttttaaaacagggttggtgggaaaaaaccctgcgtccaccaacttaattggctt

SEQ ID NO: 50783 - DNA, 628 bp, Homo Sapiens
gttttaccgtgttgcccaggctggtctttaactcctgggctcaaacaatctgcctgcctcagcctcccaagggattacaggcatgagcaactgcccagcccaggattattgtatgtatttttgctaggggattccctggaatgctgcttagttcaagatatttgtccatttcctctgaagaagctagggtgtacaggtgaggaaatatgacaggattattttcttttttaaaaatctcttgtaaaaagacataagggtctgctaaagaaagttgacagactcttgttttctggaggttaaccttgtctctggtccaaattagagtcaggcatttaggatgaggtctgatgatggttcatagaattttgtccacaatctgttatgaaccctggactggtgagccttgttatctgtggccaacctagggaattttaatcttatggaattgaaaaaacaaggaacaatgtttgtgagggatttattaatttcttcccagatttttctttttctcccctgttgtctctcatagtttttccagccctcctagtcacaatccccagaggcagctacttcaattcttctggctacctagttttactttactctgttgtttaaaaaaaaaaaaaaa

SEQ ID NO: 50784 - DNA, 709 bp, Homo Sapiens
  misc_feature (406)..(406): n is a, c, g, or t
  misc_feature (445)..(445): n is a, c, g, or t
gtaagaccaagctaatgaattagttgtaacatttatttcttattactatttataatggtaatttatgttgattattgaaacatttgcaaaatttaaatgtgcttagagaaaacagaaaccacttttgactttgtgcatgctatttagcagttctacatttcaagtgattgttattagacattatgattcactccatcttaaataaccaattaatccattgattcaacgttttattttatgcttgccatgtatgcaccaggccctgttctaggcatttgagatacagatctgtctcctgctctcatgtactgtagtggagaaaactgaaaataagccagtaaacaaataaatatacactttgtgatagctgataattcctatttttgtatttcataccagcactttnttccttatgcataagtagatgtaaaaagtatctggactntatggcatttttctagcctatttaatatgtatgaatgtaatgccagggggatagaatgacaatggcaatacagtggctaagagatatgtttgacaaagaaaaaggagatgacactttgggaggccaatgcgggcgggtcacttgaggccgggagttcgagaaccagcctgccaacgtgaagaaaaatacaaattaatatacacaggagttgcttggaccccggagccggggttgcagtgagccggggtcgcgcactgactccgc

SEQ ID NO: 50785 - DNA, 560 bp, Homo Sapiens
  misc_feature (30)..(30): n is a, c, g, or t
  misc_feature (51)..(51): n is a, c, g, or t
  misc_feature (104)..(104): n is a, c, g, or t
  misc_feature (116)..(116): n is a, c, g, or t
  misc_feature (367)..(367): n is a, c, g, or t
ctacaccttctaccatgaggcttccaaggnaaagatccttcaaataactgnaatcccagctacttgggaggctgaggcaggagaatcgcttgaacccgggaagnggaggttgcagngagcacgatcgtgccattgcactccagcctgagcaacaagagtgaaactctgtctcaaagaaaaaacaacaacaacaaaactgtgattctccatctaactttttacaattatcctttcacaattcaagaaagtgtgaatgcaagtcattactaacagtatctcagtaaaagtagtccaggagcaaatattttctttttaactgggttcccagctagttccattcccttgaattcagtggcaaagtcactgncaataaaaggtttttactcttcttcctttttgaattgtaacttgcttactgaattcaggaattgggtgatcaaaagataactgcttattatagtaagataaccttggaacagaactgtgattaaaaacctgaataataaaaaacacacaagacccattaaaacctattcctcacttttaaaaaaaaaaaaaaa

SEQ ID NO: 50786 - DNA, 725 bp, Homo Sapiens
  misc_feature (554)..(554): n is a, c, g, or t
  misc_feature (617)..(617): n is a, c, g, or t
  misc_feature (645)..(646): n is a, c, g, or t
  misc_feature (659)..(659): n is a, c, g, or t
  misc_feature (677)..(677): n is a, c, g, or t
  misc_feature (711)..(711): n is a, c, g, or t
  misc_feature (714)..(714): n is a, c, g, or t
  misc_feature (723)..(723): n is a, c, g, or t
cgttttttttttttttttaatgtagggagtagggggcagtattaaaaaaaaaattctactgattgaactttttctcccagccccagagggtccatggtcattatgatggccctaaagcctggctctgacccctgcttctgagccaggtcagagcaaggcctggggtggaggcttctggggaaattttgtgttgttgctttattaaaggatagttttgctgaaatcactctatcccttgggtcatatacactgcatcacactttttataggagaggggctatagaagcctcccctacccttggaggtgacgtagtattgtaagaaaatagtgggggcagagcttcgcctggccaaatatatatgtgttctaattgtgctttacacaaattaattatattgtttgaaggtatcaaagatgaatatttatgaaattatacattaatgaaacactttcaaatgcctttcccgtccccacactgaacacagatacactcactttccaagctaaagtactggaatcatggcaatttcttccaatcagtgccagctccatnattgatgagtttcacttccgttatttcatttgagtgtagtgaataatgtggatgttgccctcnttaccaaaaaaaaaaaaaaaaaaaaatnnaattaaacctgangggccaaaagccaaaccnttgcccaattggttttaaaaaaaccccaaaaatncangtgggttanaa

SEQ ID NO: 50787 - DNA, 791 bp, Homo Sapiens
  misc_feature (1)..(1): n is a, c, g, or t
ncctagacctacgaggatccagactgcagctggtccttgctggactgttcctgtccatgtgcctggtcatggtgctggggaacctgctcatcatccggccatgagccctgactcccacctccacacctccatgtacttcttcctctccaacctgtccttgcctgacatcggtttcacctccaccacggtcccccagatgactgtggacatccagtctcgcagcagagtcatctcctatgcaggctgcctggctcggaagtctctctttgccatttttggaggcacggaagagagacatgctcctgagtgtgatggcctatgaccggttcgtagccatctgtcaccctctatatcattcagccatcatgaacctgtgtttctgtggcttcctagttttgctgtcttatttttttctcagtcttttagactcccagctgtacaacttgattgccttactaatgacctgcttcaaggaggtggacattcctaatttcttctgtgacctttctcaactcccccatcttgccgttgtgacaccttcatcaataacataatcatgtatttccctactgccatatttggttttcttcccatctcggggacccttttctcttactataaaattgtttcctccattctgagggtttcatcatcaggtgggaagtataaagccttctccacctgtgggtctcacctgtcagttgtttgctgattttatggaagaggtgttggagggtacctcagttcagatgtgtcatctttccccagaaagggggcagtggctgcagtga

SEQ ID NO: 50788 - DNA, 650 bp, Homo Sapiens
  misc_feature (637)..(637): n is a, c, g, or t
ggttatttgataatgcatggaaccaccattttggattcaataaaccaattacataaaagcaatgatgctacgctcttcatattccagataccaactgcctaccaaggactaatgagatggtatatttcttccacatcagggcaagctgaaaatatattgattcagcgttactgttacgtaaatgaatttccatcttctcatatgtgttatttttgaaagaatgaatacactctctgtcttaaatccgctcttaacaaatgatctcttctcagaatactacatctgtattgagagtacagacagcccattggtcactgcaccttttgcaagacagcgaaacggatgcatcaaattacattgatacatcatcaccatcaatcttttgcactgatttttagacttaatcttcttatttgaaaataaactcatttttaaataaaataaaaaatattttagggaaagctctataaaattaaaattacagaattatatgctttttaaaatttatgcaaaaatgtgcagacaaatgtattctgtattggtttatgtatcactttgcccttgtatattttgagattattaagatttgttgacttttttggtttgatatttatcatctgttacatttttccttttnaattattaaatgc

SEQ ID NO: 50789 - DNA, 493 bp, Homo Sapiens
atatttggctgtacttgtcctcttcagcagtataataagccccttaaggctgaagtaaccttattcctattgtttagtagctaatagcatgcttttgatatgcttatgatcactactaataatttaatatttgaattgtatggaagtacaattcagtatcattttacatatggtatattgtgatgctgtatcatattttatgttacggtttataagaaaagctcctaggtataaaatgctacatagcaggaacttggtttttcaatgttattatttcctactgtttttgacgtaacggcaataaaatttgtttgaaccaaaatggactaacaattatttgtacaactcagtattgtctaaatatcatattgttaaatctaggtttcttgaattctccatcaagcctggtcatgtcatgtagcatttggtgtctcatcatgcccaacagatattttgtgggaggatggagttgatcttcctcatgttaaaagat

SEQ ID NO: 50790 - DNA, 456 bp, Homo Sapiens
  misc_feature (287)..(287): n is a, c, g, or t
aacagcttcagcagatccttcagacttttcaacagcctccaaaaccacagtctcctgcccttgacaatgctgtgatggctcaggttcaggctatcacagctcagttaaagacaactcctacacaaccatctgaacaaaaagctgctttccccccacctgaacagaaaactgcatttgacaaggtatatttctctcacataacccaccccaccatttatatcactcaacttgagttatggaaattatcacttctgtatcccttctgtggattgttcattatgtcgttntgtaatttgagagattttccccctcaacaagaaaacatcgattattttccctggttttaaatgtgatatgtgctcagtgcaaaaatttccagggtttgaagctgaatttactagtgtaaaattaaaaaagtgaaaaaaaacaaaaaaaacaaaaacaaaaagggggggc

SEQ ID NO: 50791 - DNA, 709 bp, Homo Sapiens
actccaaactccgtcccagctgtaccacagttgcccagctctgatgcttttgctgctgtggctcagctgtttcagacaactcaaggccaacagcttcagcagatccttcagacttttcaacagcctccaaaaccacagtctcctgcccttgacaatgctgtgatggctcaggttcaggctatcacagctcagttaaagacaactcctacacaaccatctgaacaaaaagctgctttccccccacctgaacagaaaactgcatttgacaagaagttgcttgatagatttgactatgatgatgagccagaagctgtggaagaatcaaagaaagaggataccactgccgtcaccacgacagcacctgctgccgcagtaccccctgcacccaccgccaccgtgcctgctgctgctgcacccgctgctgcctctcctcctcctccacaggcaccatttggctttcctggagatggcatgcagcagccagcatacacacagcatcaaaatatggatcagtttcagccacgaatgatgggaatacaacaggatccaatgcaccatcaggttccacttcctcctaatggacaaatgccaggatttggacttcttcctacacctccatttcctcccatggctcagcctgtgattcctccaactccaccagtgcagcagcctttccaagcttcttttcaggcacaaaatgaaccactta

SEQ ID NO: 50792 - DNA, 590 bp, Homo Sapiens
ttgaatttaggtgacactatagaagagctatgacgtcgcatgcacgcgtacgtaagcttggatcctctagagcggccgcctactactactaaattcgcggccgcgtcgacctatcacctgggcttcaaggctttatcattatctgaaattatctcatttatttatttgtttattcatttattgtctatgtccactcctgtagaatgtaatctccatggcagcagggactttgtataacaatctagttcattgccatatgcctagggactataacatagaagctgttcaattaattgttaatcaatgaataactgtaataagatacttgagaatggttgtctttttgttaggaaaagactaagtactataatcgcaatgtctacataattttaaaaatattcactcctgagtaataaattatttgtggttaaaaaaaaaaaaaaaaaaagtcgacgcggccgcgaatttagtagtagtagtcgacccgggaattccggaccggtacctgcaggcgtaccagctttccctatagtgagtcgtattagagcttggcgtaatcatggtcatagctgtttcctgtgtgaaaatgt

SEQ ID NO: 50793 - DNA, 897 bp, Homo Sapiens
  misc_feature (763)..(769): n is a, c, g, or t
  misc_feature (772)..(775): n is a, c, g, or t
  misc_feature (777)..(777): n is a, c, g, or t
  misc_feature (779)..(782): n is a, c, g, or t
  misc_feature (784)..(784): n is a, c, g, or t
  misc_feature (794)..(794): n is a, c, g, or t
tttggggatattgcatccttccgcgccccttgctccgctggagagagatcaaccttttgcagtggaaggggagagtcccccagcctttgtttcatcagacggctgctgtagtacagggattcaggccagggcccgcatggccggacttcttggttcaaatcctgcactgccactcaacggatgtgtgagcttgggctagtgactgaacctcccagcctaggtgactctgtgcctcggtgtcctcatctgtgagaaccgacctaagaagtgtctgtctgataaagctgttgtgatgagttagtgaattcgtacacatagaacctttagaactgtctttgacatgtagtaagtcagctgtgtagatggtgggtttctccagtgtcaggtccctgcccacagcaggaagatgacctgtgctagaagatgggggctagggtgttggggaagacttcagggacttgggagagaaaaggagaaatattcagagatgagaaaagtagaagaaaaaccagcttttaaaagggggaggagagagaatgagaaaaataactactagaaagggaaggaaaagatgaatagccttttaggtacttcgggacctgctctgagacctcttgcctgacgcccttggtttttgatagaattctagagaaggggtgagcccttttgtctgcctggacacatcctgtgggctttcctctttctgaaactcaggtcaaggtgttcactgcatctccagattgctgtggtgccatgggaagannnnnnnccnnnnantnnnngnttacattggntttctggtcctcttcacctacaaacgtttttcaaagatatgataagattttttaaaaggccccccataatctttatatttttgggttggggaataatggactg

SEQ ID NO: 50794 - DNA, 609 bp, Homo Sapiens
agggtaatatgcctgggaaggtcatccagtcttatattagttgggtgggtccaagaccccagggcttctccctgcttcctaaggagtatttttttccctaggccagtaaagatttgttcacaccttcacagtaattggcatgtaatagacatttgatcagtagttggtatatgaaagaatagagtcctcagatgtataactcccctgaaagtgaacacaaaattgcatgtaggtgcacaatgcattttttgggcagagagggctttttatttatttatttgtttttaaattgtaagaggaatttatgatgaaaaaagtccaagaaccctgcactagtctatgctgccctagggctatctggaataattaattttcaaatattgaggcacttaagagacaaagaactaccttgtttccttggacagtaaaatgaaatgggtagaaacaaggaaggccttcttgatgaagacgtttgctgaataaaaatacttcgtattttatgtgaattgataatcatttgcatttgcctgttccaaatgcacaagttacaaagtgaaagctagttttcttcactccagctcttctcagtgtggccttagtcctttgtaa

SEQ ID NO: 50795 - DNA, 592 bp, Homo Sapiens
  misc_feature (17)..(17): n is a, c, g, or t
cacgagggcatcgcttngagctttgggagttcaaggctgcagtgagctatgattgctgcactccagcctgatagacagagcgagacctggtctccaatccccccaaaaaagactttataaggaattatacttcaatgtttatcttatactttctggtttcttttttttttcatttaattctttgttctgtttttctcagcgaactgtatgagatacagatccactgatctttttctagatagctctccagttgtcccaaaatcttttaagtctatttgtaactcactgatagttgtatgctactttttcatatattaaattctcatttgtatatgggcccatttttctggatttttgtattctgtctcttgattcctgcttgttcgtgatccattattctctcttttttctttttttttacagtgtccctagttaatctcacttttttcatatgatcttcagaatcatgttgttttgttccagaagcaaaaaaaaaaaaaaaaaaggacgcggccgcaagcttattccctttagtgagggttaattttagcttggcactggccgtcgttttaaacgtcgtgactgggaaaac

SEQ ID NO: 50796 - DNA, 463 bp, Homo Sapiens
tatgtgagcgtctgttctaggatctccattctgtcccattgttctaccatccaccatgtcaatgctaccctgtcacaatgactgagactttttccttactgtattctcacgtagagcccagtagaataattacagggcttggagtcccatttcttcagggaatataggtggttggaattctgacaccagataaatcaagtatgctggaaaaagaattcctattttaggcaaaagctttattggaagtttgcggcatcctttccgcattgttcattgctgttcaaagtgttgctgctgtggtgctataaatgctcccagcagctctcaggttttctttccttccagctagcctccccctaacttcccactccagccaaaaaaagatgcactgtataagtctctgatgagggataaaaatcctttaaagtgtattattaatcttgagctttcagcaaaaaaaaaa

SEQ ID NO: 50797 - DNA, 561 bp, Homo Sapiens
gacattttacaggttaatgactgttggagaggagaataaaatcaaaactgcaagaacccatttttgtcttcataagcattgcattttaaaatacgagggcttgaagacttctcagaagagacactcactactggagttaaagttatatgaagtccctgagcccttaatcatccaagactggacctaagcagtcctcttcgtttgtagtctctttcaatatctgcttatcaaggacaacgagaatatcttagtctactaattaatcttttttatcaccatagtctaccaagaaagaaagctgataagataataaagatgattcattcctcagagtaggaaaaaaaaaaaaaaaagtcgacgcggccgcgaatttagtagtagtagtcgacccgggaattccggaccggtacctgcaggcgtaccaactttccctatagtgagtcgtattaaagtttggcgtaatatggccattcttgtttcctggggaaattggtttccggttacaatttcccacaacattccgaccccggagcataaagtgtaaaacctggggggcctaat

SEQ ID NO: 50798 - DNA, 672 bp, Homo Sapiens
tgaatttaggtgacactatagaagagctatgacgtcgcatgcacgcgtacgtaagcttggatcctctagagcggccgcctactactactaaattcgcggccgcgtcgacactttttgtgctttaaatcatacattatacactgctttatttgctttacatatattatcagatttctcatattagcccataataaggtagacattactatcctgattttacattgaagaaactaaaatattcagaggttaagtaaattactcaaggtcacacaggtaagattaaagtttaggtttcaaattcaggtatgtttgctacaaaaccttgtcactgtgttagactgcctctaaagtgagtaaggtaaatgaaataaatgctttgtatgtttaaaattttgttataaaggaaaggaaataatgaattaatgaaatgttcaaattacagactttaaagtaaatacagatttcgttttatactagtcataaggtaattcagtgttagtagttaataccattaaatataatgtgataatcagctagcgaaaaaaaaaaaaaaaaaagtcgacgcggccgcgaatttagtagtagtagtcgacccgggaattccggaccggtacctgcaggcgtaccagctttccctataatgggtcgagttagagcatggcgtaatcatgg

SEQ ID NO: 50799 - DNA, 462 bp, Homo Sapiens
ttgaatttaggtgacactatagaagagctatgacgtcgcatgcacgcgtacgtaagcttggatcctctagagcggccgcctactactactaaattcgcggccgcgtcgaccacttttgtttaagtctaatcactaacttccctttcttattcattgtagttacggcagtcccagtcctactgcacagacacagagtgtcttcaggaatgtaagtaccactgagacaggaggaaggatggcattgggggcagaattagaggccagatgcctgtgaatatttgtcagaatttattcttacattgcctattctagtggttaccaaaaaaaaaaaaaagtcgacgcggccgcgaatttagtagtagtagtcgacccgggaattccggaccggtacctgcaggcgtaccagctttccctatagtgagtcgtattagagcttggcgtaatcatggtcatagctgtttc

SEQ ID NO: 50800 - DNA, 454 bp, Homo Sapiens
gcggccgcacatattcaccctcagcgtgcctttcccgacccccttagaggtggaaattgcccatgggtccctggctccagatgccgaaccccaccaaagggtggttgggaaggatctcacagtgagcggcaggatcctggccgtccgctggaaagctgaagactgttgcctgctccgaatttcccttatcaactttctcgaccatctttctctggtggtgcggaccctgcagcactttgggcccccagtttcccgctaagcctggcctgggaaaatggggcgaggtctaaccttgcgtctcctcctaggcagtgcatccatcctccctagggcagggaattcccacagttgctactttcccgggagggcctcatggtcggcctgtactgcctttgtgtgctcaggggtcccttgttttctctggttcttaaatgtttgttaccacagaaaataa

SEQ ID NO: 50801 - DNA, 466 bp, Homo Sapiens
ctctataagagctatgacgtcgcatgcacgcgtacgtaagcttggatcctctagagcggccgcctactactactaaattcgcggccgcgtcgacattctcgttacttaagaccattaacttttccatctaataaaattattagaagcatagatttgtgtttcagcatatgacaaacatcaggcagatagatgtctgatagcagtcagtgcttgtaggtattctagttgatagtaatgacaaatcttttaaaaagtagatgattaactacagtgatgaagatacacagaaagacgatgagaaacagcatgagcagatagaaaaggaaagaaatagaaaaaaaaaaagtcgacgcggccgcgaatttagtagtagtagtcgacccgggaatttcggaccgggacctgcaggcgtaccagcttttcctatagtgaggcggattagagcttggcggtatcatggtcatag

SEQ ID NO: 50802 - DNA, 579 bp, Homo Sapiens
  misc_feature (558)..(558): n is a, c, g, or t
  misc_feature (575)..(575): n is a, c, g, or t
  misc_feature (577)..(577): n is a, c, g, or t
  misc_feature (579)..(579): n is a, c, g, or t
ggggtttgaaatctactttatcttatgtgaatatagccactgcagccttcttaagcttagtgtttgcacagtatacctctttctattaatttactttgtgcttctgtgcctatttaaagtagtttctttaaacaacatatacttgagacttgcatttttatctgttctctctgtatcttttaataagtttaacattaaatgtaattattaataggtttctaatttacatgtttcctgtttagataagattattttataattgtattttaatttattggctctttagctatactgttttaataatttttttaagttggatgttctagtgattacaatatacattcttaatttttcagtctacctagagttgatgtgccacttcacataaaatgtagaaatcttgtaagtatgtacatccatttatcatacctgtcttttatgctgtagttgtcatacatattaaatctacatatttaaatattgtaagtcctgtcataagttacaatttctgctttaataatgatatgtattttaaagaaattaagaggaaaaaataanatcttttgtatttatcncntn

SEQ ID NO: 50803 - DNA, 552 bp, Homo Sapiens
tggccgggggtggacattgaaaagaaactgaacagaggggacaagatggagatgttaccagacaccacaggcaagggagccctcatgtttgccaagaggagggagagaatggatcagatcacagcccaaaaagaagaggacaaggtaggtggaacgccaagcagagaacaagatgctgcccagaccgatggcctgagaaccacgacttcttaccaaagaaaggaggaagagtcggtaagaacgcagagctctgtgagcaaaagctacatcgaggtgagtcatggtcttggccatgttccccaacagaatggcttcagtggggcatctgagacagcaaacatccagaggatggtccccatgaatagaacggccaaacccttcccagggtctgtgaatcagccagctacccccttctcgccaacccgaaacatgacgagtcccattgctgactttcctgcacctccaccttactctgcagtcactcctccccctgacgccttctccagaggggtttcaagtccgattgctggcccagcacagcccccctccatg

SEQ ID NO: 50804 - DNA, 438 bp, Homo Sapiens
  misc_feature (375)..(383): n is a, c, g, or t
  misc_feature (385)..(402): n is a, c, g, or t
  misc_feature (404)..(429): n is a, c, g, or t
gggacggggtttcaccatgttggccaggatgatctcgatcccttgacctcatgatccgcccacctcggcctcccaaagtgctgggattacaggcgtgagtcactgcacccggccacatcacctcccatgttctatcttacgtattcagaacttgttcatcttgtaactgaaagcgtgtaccctttgaccaacactgtttttcctgtcttaacaggatctacagatcaaggacaggggaggggatagtggaggaaaacggagttagtctgtttctaaatgaggggacagtatgtttcttggggcctgaggacagcttaataaagtagacaaatgaagaaaaacaacaatttgcattaaaaaatatccaattcttannnnnnnnnannnnnnnnnnnnnnnnnntnnnnnnnnnnnnnnnnnnnnnnnnnnaaaacatgt

SEQ ID NO: 50805 - DNA, 582 bp, Homo Sapiens
cttccccaacctgccagctttcctcttatcctgaccacagttcaccaccatcccttttccccaatctcagctgcctggtcagcacctctttcgaacattctgagccccaactttgcagtaaggtggtagaaaatggaaatccagagagctgcaaaaagatttttttttaatgtaatgaatggggagtagttttgtgaacacactcgtattcacctcttctttcctctgggaggcctgcctgccttcccctcccccccaaccttgatccctgtctgctggaaaaggcgcgattgcttctcttcctcttctgcccaagaccaagactctaggtctgatatcctttttagccacacacacacaccccccacacacgaagtcttcttaatcttcttgaatttaccagttactctggacacttcttgccataaccccatttcacagacaaaggcttaggagggaaaaagaaccaaactgtttctgtgtttgtcatgttaatgatgtccatccccacacacccagttcccatccctgatgcttcttgtgcctgtatcttgaaccttcagaatgaaaaaaaaaaaaaaa

SEQ ID NO: 50806 - DNA, 461 bp, Homo Sapiens
gtccggtggttgtggcctgtaatcccagctactcgggaggctgaggcaggagactcgcttgaacccaggaggtggaggttgtggtgagctgagatcacgccattgcactccagcctaggcgacagagtgagactccatctcaaaaaaaaaaaaaagagaaacatagcaggccttttttaccaggctttttgtgttttgtttgtttgtttggagcatgttaagatttttttaagatttttaaaattttagttatatccaccctatttcaggttatttttgttggtgtcaagtatgtataggacatgtgaatggttctttttaatttttttttaagaggaaatttggaagataaactccttgatatatatatatatatatattttttttttttctttagcagcttgttatcactggaatcaaagggaaaaagtgatctcttcttgcattggttgtatttgtat

SEQ ID NO: 50807 - DNA, 573 bp, Homo Sapiens
ccggtgaagtgtaattgaacagtttttgtcgtcaaaagttttaaaatcttggtcttcatttccagatatcatctcttcttttgatcactgttcctgattgtgacattgtgcaagtgttaaattgtgtgccttttgttcctgaagaaagaggtatggtaaagattgaaatactggagtatatagtctattaagtagtaagttggtatgttttaatattggactaaataaagtaaaatataggttaagtatcccaaatccaaaaatccagaatgcaaaattttttgagtgctgacatgatggtcaaaggaaatgctctttggaacattttggattttgaatttttggatttgagatgctcaactggtataatgcaaatactctaaaatcctaaaaaagaaaaagaaaaaaagaatgaaacccttctgttcccaagcatttcaaataagagacactcaacctgtagttttacatatacatgagttttcataagttatataagttatagttttattttattttttggctaaataaaatacttaaacatgagttttcattttaatctaagcaaaaaaa

SEQ ID NO: 50808 - DNA, 470 bp, Homo Sapiens
aattcgcggccgcgtcgacattcagtaaaaaacaagatgttgagaatctttgagtaatattctacaaatccaattatttacattaaaaaatactaaaaataaaaaaaatctgtaatgatgtttgttactctaaaccctgaacctactgatgtttaaactttagagtgtttttagtacagtaggaatattttaggttaaggcattattcttcccaagtcatctagaaaatcttcatcatttattctctacttgacaactaatttttttttttttttttaatattttagtctttaaggacacttgtattaggatctgttgcctccttataaaagttaagtggccaggcacggtggctgacacctgtaatcccagcactttgtgagactgaagcaggaggatcgcttgagcccaggagtttcagaccagcctgggcaacattgtgggactcttctctaccaaaaaaaaaaaag

SEQ ID NO: 50809 - DNA, 522 bp, Homo Sapiens
gaacccgttgttgctcagacacccgatgtggaaatttttcttctccctcagttcaaatgagataaagatcctcctctcctcacagtgaacatgaggtcacagtgtccatgtaactaactcctggttaagaggatatggatagaaggcacatgttcaacttctggcttctgtccttgaaaagtgtgatgattccatcctttgctgtcttccttcccgctgactggaatgtggacttggtagtgagctaccttggactatgtggatgaagacaaagataaaaggaaccaaggactctgatgattctgtagagaagaggaaccgtagctgctcaaacgttcatgtgaaagaagaataaactatcagatttaagccactgctattttgggtctttgtgataaacagtgtttaccatatcctaattcgctattccttccatttctaggtcaaccattttgaattaaatatagggctctaacttgcaaaaaaataaaaaaaaataataaattaaaacaaatccgggta

SEQ ID NO: 50810 - DNA, 391 bp, Homo Sapiens
ctactactactaaattcgcggtcgcgtcttctgatttttgtctgaaaagctttgcttgtataggggaggaaaatcgtggtgattctttaaggcctgtaggcgaccttttccagaagtttattgtggatcaaggagagaggggatctccgtaatttgaagtgaataggttctctggaagtttcttgttttgtttttgagacttgagcatttctataatgtgaaggggagagtccggaagaggcagatattttccaagtatttacatgagcaaccacaagagtactttaggttgctggatgcgatacagttgtggtgtggtcacagctggatgtacccagaggtgcggtacagtacagagtagcagaagttctgccattagcattttggagaa

SEQ ID NO: 50811 - DNA, 495 bp, Homo Sapiens
  misc_feature (482)..(482): n is a, c, g, or t
aattcgcggccgcgtcgactacggctgcgagaagacgacagaagggttccccatgagatgcacgtgccccagggaacggccgctctggctgtgggatgagaggcatgtggagcaggcatggttcccatgcttagcctggagtcaaggccagactagatcagcctaagcccagccacgccatgggtgcaggagtgaagagcaaatgctaactgtccatggaattgactttcaaaggggcgtgtcatgtgcctcatcccagcaacagggaaggcattctctatcagtcagttggtaaatgattattgacaaacaatgtgctgggaaggtggagtgatttgagtagatttggcctctattctcatggagcttccttctagaggggaaggcagatgatggatggataaatataaatgatctaatagttggtgcagcagtcattaaaatgatgacaaaaaaaaaaaaaaaaaaagcggccgctcgangtcgcgcggcgcg

SEQ ID NO: 50812 - DNA, 876 bp, Homo Sapiens
gtacaagttaaaaatgtttaatgggaaaaaattaaaactgaatttaataaaaattgtatttctgaaaaagaagctacattttattttgtaaagaataaaaatggtcacttctggggaagtttacctcattaggaactcaaagttgctaagatgctgcttccgttgtctgtagaccttctggtccatataaccatttatgtgtagtcagtcttaaatggaaggcttagggacactttataagacaagatcctctaggtgctagtcacttcttaaaaaaaaaaaaaaatgtaagggctgggcgccgtggctcgcgcctgtgatcccagcactttgggaggccgaggcgggtgaatcactaggtcaggagtttgagaaccagcctggccaacgtgatgaagctctgtctctgttaaaaatacaaaaattagctgggtgtgttgggtgtacacctgtaatcctagctgctcaggaggctggggcaggagaatggcttgaatccgggaggcacgggttgcagtgagccgagatcgcgccactgcactctagcctgggcaacagagtgagactccatcttaaaaaaaaaattcttttaacatgttggttggctctagcctaagaatggtgggccacacctgtaaatcccagcactttgggaaggctgaggaagggcggatcacctgaggtcagggggtttcgaaacccaaccctggccaacatggggaaacctcgtcctttgctaaaaataccaaaaattagcgggcatgggggagggagccgtaaatcctaacaacccgcgacctgacaaggcaacctggctgaccgcgatgggaatgcgtgaggcaaaaatcacatgaacccagcgggaaaaagaaccac

SEQ ID NO: 50813 - DNA, 488 bp, Homo Sapiens
cccaaactcagtcccaaacacattctcacccccggcagcaggctgcaggcctccagctacacacacggccctgggcaactctcagtctggccacccattcgatgctgccagccccaagggtgtgggaggggggtctcagagtgtcccagggtactggccacacatgcccgacaccagggtcataaggtcctctcagcagagccactgcagcaccaaaggcatttctggaaggaggcaaggacgcgtcatctagatgtcaagccccagcatgcgattctgtcacagttcaccccaccttcaccccgagacggaagacggaagagcttcgcacacaggcgggaagaggtcaggaccagtccagcctcactggcttcagaactggcctgggggctaccttgacccacaggaagggaagaggaacgtgctctgggcagggcaaggcaggacctgcagcacccacagaccagcagtaaaggacccccggaact

SEQ ID NO: 50814 - DNA, 570 bp, Homo Sapiens
acctcctcatgtgattccttcattttgtaagtgaccgattccaccctatacaatcacatggccaatgaatgacagtcagaattagaacctagtcccctgattcccaaccatgtcttataccagactgtttcccctaatcgataggaaactactcctaaagggcagaaactgcctctctttgtttttgtcccccaacctcccctccacacatacacctctgtaatctgatgctttaagctcagattaaagcatcagcaagctttaatctgacacatggccgtaggcttgagttagcagttggtcccttctttcttccagactctcataagagtaccctatcaggtctggacagacttccgtttatgcctcagattcaaaatacccaggaaaaagaagaagaaatacaaaacaacaaaaagaaaatcaagaaaaaaataagatatccaggaaatattttgttagttttctattctggtgacaaatgcaaacttaaggaaacaagttgcacagtgttaactaatgtttaacattcctttccatagtgtttatgtgggccttttatcaattcat

SEQ ID NO: 50815 - DNA, 859 bp, Homo Sapiens
cattcaattttaggctccattgactaatatggtgtgctttggaagtactgtatatcctcacatggaagccaaatgttaaattatttgaaggacacaccactgtacagaaagtagtgtttcaaatataaatcgaagaacaaagagtgctccaaaaaataggtcattcttttattttcataaagtatctaaactgtactaacattcagtgtgtgtttcattctaaattgcagctgaaataaatttattgcgatagcagaaatatcttattattcatcctcagaaataaaggattgaagggatagagattatatgataaatttatagaagactttcagaattgtgaatgcatttggtttagtgttatgaaatgacaatagaaaaaagtctcgacttcaattaaaagttacacaaacaaacaaatctacaggcatgtctttatataccatcaggtctaagttttcaaagaaaatggtagatataactgcagataactcattacagtcataatctctgcccatgtgtattgagagggggcagttgtgcacgaaaaaagaatttatgtggccattttaataaattcagtttaaaatagacttgtgtatatgcatgaatcatcagagatgaaactggtttgagagactcatgtgaaccttacgaaaattacaacagcagttttaagtatgaaaagatgctcacagaagagaattatggccagtgtatccaatggtaagtatggcttgtatgggcctcttttgtttattagaatggggggggggtgaaatttggccaaacattgggaaaaatttttttggggaaaaaaaaaaaaatggggggccgaagaaaataggggggcggaaat

SEQ ID NO: 50816 - DNA, 403 bp, Homo Sapiens
agaaaggttgtggttgagaatcacaacatgtaagttttaatcttggatgccatttgggctgttgtagaccactgaatgtctggttatgccttcctttaaaatttttcaggctaaaattttatgaatcagaattttgggggcttggtagtgattcccctggtctccaggtggaggtggaatagccttctttgcatttaggcgtccatcattactagatccttccactctaagaagaggatgtcagctattctcgtagcctgtgagggcccatgagtctgtatttgatgagcacaggatacttgcattccaggaatcttccaggggctatattgtcctattctttccattaaaaaaaaattattaaaagtttggctataagaaatagtgttacctgagaatgaat

SEQ ID NO: 50817 - DNA, 623 bp, Homo Sapiens
aatgatattagacaaaaagcaacttcaagtggttttcttatttgagttcaaaatgggtcataacgcagcagagataacttgaaacatgaacagcgcatttggcccaggaactactaacgaacatacagggcagctgtgattcaagaagttttgcaaagcagactagagccttgaatatgaggaacacagtggccagccattggatgcttcacttcttgaagcatcttgacagctttttgcaggtgaaatgcttccacaccagcaggatgcagaaaaatgctttccaagagtttgttgaatccagaagcatggatgtttatgctgcaggaataaacaaatttatttctcgttggcaaaaaagtgttgattgtaatggttcctattttgattaataaagatgtgtttgagcctagttataatgatttaaaattaatggtccaaaaatgcaattacttttgcaccaccaccaacacacacacacacctacacattctggatttgaattccatgttgattatatgcacttggaatatttcttttccatctgtggattgttctgtcacttattttctttaataaatgggtttctgaacctctgttgtattgacaaaaaaaaaaaaaaa

SEQ ID NO: 50818 - DNA, 637 bp, Homo Sapiens
attgggatgattttcaaataatgtgtatatttaatgtggtcattaaaaacatgaaatcaatggcatttcttacaagcaataatatcttgcaggtaaaatgtgattttaagaagtgtttctttaaaaattagttcatgtaattagtatggacacttaagttcgtggtagaaaatagccaattcattcgttcattcaacaaataatggagtgtttacgatgtcgccttggcaacaagggggtaggtgaacagcagtaaacaaaagcggcaaaaatccttgctttcaagcgcctgtcagccagccactgcttcgtgccctgtgcactacctaccttgcttctcaaatcagttgggttattttagggagaataagtattttagccaaggccactcagcgcttaagtgatagaagcagattccaactcaagtctgcatggctttaaaccctgtgttctttcctcaaattaccataattgttgggctaaatgaaactttctcactttgtctcactgacagagctatcattacctgggccctctctcttcccacctgcctcagcactggcttgaggactcaagtccgggaactgttggtggaaatagaaggcatttcagtggatgcctcagcccaggctggtgt

SEQ ID NO: 50819 - DNA, 577 bp, Homo Sapiens
aggatccccccccaaatgatccacttgagattataacatgcgttcttgacttatcaatgtctaatgtaaattagtattttttcctcttcccagacaatgctaaaacagtttattggatattttagttatttctgtatttaaaacttcacaagacacagtactgttgatgttcattttgatggcccacatatatgccactatcattgtgttttatccttctgtgactttctagggtcatttcccttccacctgaagtacccctactattatttcctttagaggaggtctgctgatcatctcagttgtgtttgtctgaaaatatttgtatttaatttttattcttaaaaaatattttttctgagtatggaattctaggttgtcagctcgtttctttcaacacattaatgatgtaactccactgttatgtgcatccatattttctgctgttttttgaaataaatattttcctctgactgcgtttaagtgtttctctgtcttcaattttcttcaattttactatagtttatctggatgtatatgcctttttatacgtcttattgggaattgattagactta

SEQ ID NO: 50820 - DNA, 737 bp, Homo Sapiens
ttttcaaaggcagaagagaagaaagttttggaaagcaaaaaacttacaacacataccattaaagaaaggcaagagagttgttagctaaactgatctgtctgcatgatagacagtttaaaaattcatcccagttccatatgctggtaacttacaggagatatacctgtattatagaaagacaatctgagatacagctgtaaccaaggtgatgacaattgtctctgctgtgtggttcaaagaacattcccttaggtgttgacatcagtgaactcagttcttggatgtaaacataaaggcttcatcctgacagtaagctatgaggattacatgctacattgcttcttaaagtttcatcaactgtattccatcattctgctttagctttcatctctaccaatagctacttgtggtacaataaattatttttaagaagtaaaactctggggctggacgctgtggctcacacctgtaatctcagcactttgggaggccgaggcggggagatcacctgaggtgaggagttcgagaccagcctggccaacatggtgaaaccatgtctctactaaaaatacaaaaaattagccaggcgtggtgacagtggcacctgtaatcccagctacttgggaggctgaggcagaagtttgaacccaggaaacaggttacagtaggccaaaattgcgccactgcactccagcctaggcgacaacagcaagactgtgtccaaaaaaaaaaaaaaa

SEQ ID NO: 50821 - DNA, 909 bp, Homo Sapiens
acaagtttgtacaaaaaagcaggctggtaccggtccggaattcccgggatgcattctgttttatacattaaagaattcacactggtgagaaaccctacaaatgtgctcaatgtgaggcagccttcagcaggaagtcagaactcattatacatcagataattcatactggggagaaaccgtatgaatgtacagaatgtgggaaaacattctctcgcaagtkacaactcatcatacatcagagaacccacactggagagaaaccctataaatgtaccaaatgtggaaaatccttctgtcagcagtcacatctcattggacatcagakaattcacacgggagaacaaccttatgtatgttctgaatgtgggaaagccttctctcagaagtctcacctcccagggcattggtgaattcatacaggagagaaaccttacatatgtgctgaatgtggaaaggccttttctcagaagtcagaccttgttgtacatcagataattcatactggagagaaacctgatcgatgtactgtatgtgggaaggccttcatccagaagtcccaactcactgtacatcagagaattcatacactaatgaaatcataagaatggtctgaacacagaaaagccttcagggtcagttcaagccttaatagatagtgcaacaaccaatggatttgatgattttggggactacatctttgttgataaaattttacaagtgaagtcatgttcctaatgtatttcattctttatcaaagataatagagaagtcaatacgtaaatgatggacattttcactatggcatataaaagtttttaaattgagaaatgaatgattagcataacagaacgaattgcatgtacatctcttttgaagttatgtgctcctgattatactacataacaatca

SEQ ID NO: 50822 - DNA, 517 bp, Homo Sapiens
agccccgtccctcacctcgagttgtctcgccttcctggaccaaaccaatgtacatcttacacatattgattgatgtctcatgtctccctaaaatgtataaaaccaagctgtgccctgaccaccttggacacatgtggtcaggacttcctgaggctgtgtcacgggcgtgtgtcctcaaccttggcaaaataaactttctaaattggttgagacctgtctcggatactttgggttcacataaggaaacaggaagcagagatctggtgtctatttctttttccaagcacaatgtaagcacagttctaggctgtgtttgtcttgtgagtccttcctggctcccctcaggcactggctttctctcctctctcctgccttctctttctggatccaccctccaaatgttggagttccttagggtttgattcttggaactcttctgtgtttatgtgttctccctagatagcatcatccgtaagtgacttaaatagcactcataatgcttaaaaaaaaaaaaaaa

SEQ ID NO: 50823 - DNA, 953 bp, Homo Sapiens
  misc_feature (697)..(697): n is a, c, g, or t
  misc_feature (713)..(713): n is a, c, g, or t
  misc_feature (829)..(829): n is a, c, g, or t
  misc_feature (843)..(843): n is a, c, g, or t
  misc_feature (873)..(873): n is a, c, g, or t
  misc_feature (875)..(880): n is a, c, g, or t
  misc_feature (882)..(884): n is a, c, g, or t
  misc_feature (888)..(891): n is a, c, g, or t
  misc_feature (893)..(895): n is a, c, g, or t
  misc_feature (897)..(897): n is a, c, g, or t
  misc_feature (903)..(903): n is a, c, g, or t
  misc_feature (953)..(953): n is a, c, g, or t
aaaacagcgggtacggtccggattcccgggatctccaacccttgggccaggctgcccatgtggggccaggaggcagctcagagtgggaggcagagagagaagtgtgttcagagggcacctgtatctggatgtaatgtggtcctgagactctggctgggaagtgcttccagggtatcatatgtgttatgcagctacttcctctccccagccttaccctgtaggaattctagtgactatgttgccaccatcttggagctccatgccctcatagtgtaatggcaccagcagatctgcctgtgcacagacttcctgtactacctcactcctgaggggagatgcttctgcgggcctgcgacctggtgctcaactttagacaccatcatcctggagcggcactgcaccctcactagccagggtgttgacgtcctcaaggccaaggccacattcaagactttggacttcattgatgcacttgtgccgagcaagcttatctgatcttctgggatctctactaggatgctggcagcccagccagctggtctggccctggacgtgccttcaggggctgggtatgcttcatgacctgtgttttgatcctggttggagtaaaacattccatgggaactcgggctgtgagaaatgtcctaaccacctgactgcagaaacatccttatcacatcctgctgggcaaaggccncacagcctgacttcangaacatccttatcatcttctactgagcagcaagctatactgtccagagccctcctcccagcgctatgattacccagcctgtgagcggcagtgggcactgacactaagctggttccnccctcgcaggtttngctagtataaacctgtgtgctgtgaaaaanannnnnnannnaaannnnannnanaaaaanaaaaaaaaaaaaaaaaaaaaaagcgggctagatctcaggccactactccn

SEQ ID NO: 50824 - DNA, 601 bp, Homo Sapiens
tttctacttatgaaaaataccactctagtttagatctagaaaaccatccttaatcctatctaccttaaaaaatggtggaaatatctttttaataaataaaatggccctttgtttatcttttttctagactaggatggcaaatacaagacactaatgctgctccccttcccttccaatactatgaaatcctctctaaaaatatcctcaaaatctttcttggtatagtgccctaggcagccattactaacgctgattggaattgactccgaaggtaaaacctatttggcacttttgctctaggcagtgttcaatttttttgtcagttttgtttagtttttggggtgttcctatgcctgagtgggattcttcttttggaaattggaaatagttgcatagtggtttttaacatgaattaaataggtgataattcacagagccccctttcccaacaaaataaacaaaaggtaggttagacggactattgggattaggatgttgttttaagctaggaggtggcagaccgcacaacctatgggccaaatccatcttggagctaagaatgatttttatatttttagatggtagcaaaaaaaaaaaaaaa

SEQ ID NO: 50825 - DNA, 656 bp, Homo Sapiens
cccgcgtccggcactagagatttttctgtttttgaaaatagttcgtgctcttcggtttttgttattgaactgtttcatgtattttttaaagacatttgaggggaggaggattattatgaatgggaaaaaaagattttggttgagactaaattactcatcgtcaaaataatgtcaaaatagttttggggatcaccactatattttgttttgatttttaacctttcaacattttcctaatgatttgcagagataactgcacaattttgcatatcaatgatactggttcttactcccaccagtgtttcataatactaacaagatggtctctcctagcaagattatgtgtttaatgcttgctttggggtaaaataaaagtacgaaaaaggtggaagtcaaatcagtattctgtaattgttagaatttattttttaagaacttacaactcagaaaagattgctagactcaccaaaataataaatgttctttattttacaggtagtgattattagtgcttcatccccatttaaaaaaacacagtactaatgggtaacacatatggaggtttgctgccatatatattgcatcaaaatatcattaattaatataaaaatattaaaatcattcctgtccattccacttgtaaatgggaattcatg

SEQ ID NO: 50826 - DNA, 706 bp, Homo Sapiens
ctagtaggttaggacagtcctgcctgcagacaccttgggctttactgagggactcaactgagaaaatgaggaatgttgcagctcatgattcttagaagaagaaagtgaagcttgtttaaaatatgatttaaaaaatctgtagaacactgtaaactacacaggctatgagggaatagcctggttgggccagcttggaaatcgggcacaggcaggaaggggcctgtctggtttgggccgtgtccacagagagcacttcttaggtcctgcctggagagaaggaatggctgggctatattttcttccagactcattatttttcttctgtttgacttttctctgaatttcccttgatttgtataaattttctcaataattagtgacagtgtctactgattgtaaaatgaagcttgaaggccaggcgcagtggctcatgcctgtaatcctagaattttgggaggccaaggtgggtggatcacaaggagttcgagaccagcctggccaaggttgtgaaaccgcgtctctactaaaaatacaaaaaaattagccgggcatggtggcacgtgcctgtagtcccagctactcaggaagctgaggcaacagaatcacttgaacctgggaggtgggaggttgcagtgagcccgagatcacgccactgcactccagcctgggcgagagagtgagactccgtctcaaaaaaaaaaaaaaa

SEQ ID NO: 50827 - DNA, 412 bp, Homo Sapiens
gctcgacgttgagttgagaatttgtttcccccacccgtattgtttttggtgtttttttgttttgttttattcgttttgttttgttttaacatctctgtttccttcccctttctgttgttgctccttcctcctcccactccaactaccacacaaatcctgacaggagcctttctgcccctctagggaaggggcccgtgtgaggaactcttactggacgcccccttccctgttgctgtgctgatcttacacatcagtttccacggatcccatgtgaatcagttgtcttcctcatttactctgagcaagggtggcagcagcaatagcagaagacgtagatgcagtgactcattttgcatgatgtctgcaagagagccgggcctcccgtgtgctgtggctctcgttcaggcattgc

SEQ ID NO: 50828 - DNA, 546 bp, Homo Sapiens
  misc_feature (127)..(127): n is a, c, g, or t
  misc_feature (179)..(179): n is a, c, g, or t
gcaaattatttgcctttttttttcttttagagttaagctttataaataatctgtagaatcaattgaagtttaaagcttaaggatcactcttaaaacgtctacaaaatcttgtatatttttaagtgtnccaatttgtaacatattttgtaagtgtatatttttcttagaaaagtgctgtnaagtgtctgtatgtgagagttttcctttttctgcaccactaggtgctaataaaaggatatttacttcaaagtttctggttttagaaaccacaatacaaagaaaaaaaatacacttttgttggaaattttgtaacacaaaacatgttgtgaaagagtgtagtgatcttgtgcaaaaaaaatgaacatttgtgagcttcttgctgttttatagattttcttgtaaattattcttgtaacacttctggttttgttgttcttgttgcgaaggtttcaaatatttgtgactgaatgtacggtgaaactgtcataatgttacctagctgagttttgttattgtttatgaaataaataaaaagaaaagtttaaa

SEQ ID NO: 50829 - DNA, 577 bp, Homo Sapiens
  misc_feature (147)..(147): n is a, c, g, or t
gggctcgtttgtgcaaatagactcagaagagctcctttaaaaggagtgaccatttcctgatttagattctgagggggtttttggttttttttactgttgttcactatcatgagcttaccatgtgcttttttcttttttttttcttgngatgtagtctcgctctgtcgtccaggctggagtccaatgctgcgatcttggatcactgcaacctctgcctgctgggtttaagcgattctcatgcctcagcctcctgagtggctgggattgcaggcgcgcaccgccgcacacggctgatttttgtatttttagtggagacggggtttcactatgttggccaggctggtctggaactcctgacctcaggtgatctgcccgccttggcctcccagagtgctgagagtacaggcgtgagccactgcatccagctcttagcatgtgcttttaaagtaaaaaccacgaggagaaggtactcattacttcataacttgtgtctcacccaccttgctgtcttcacatccccactttctgtatgcacattggaaggtgaatttgttcagctcacattaatttataggaa

SEQ ID NO: 50830 - DNA, 803 bp, Homo Sapiens
agaggtaatcctggaatgcctttgaagacagatgcttctatagaggttctttgacctaaatagttcagcatttgtatttttattctggtatttaatcagattcctaatcatagcccgtaagaaggaatgttactttaatattggactttgctcatgtgctcgtgtccgcattttttttttcttaaaatcatagccatatggtaaattttctattttgttatggttctcttttattgatgggcatgcagtgggtgttacttggaaatggccaatttttattaaaatatttctggaagaaaatttaatctggcaatatagactaatactcgtttcacatatgtgttatttgttgagtgctgtgtgtgagatgggtgaaggttttgtttacacgtgtgaaacaaacttttgtgtgattgtcattactaattgaagggcaaccaggttgtaaaattcagcgtatttattttcttaacagtattcatctttaggactgtcgtttgaggatagcataggaatatttggtttgcattactgagaaactctaggtttgctgtgatggttaagaccacagtgaagttggtattaccagtttggttccagttcctcaaatatttgaaaattggcagcatctcctttacataaacttaatgtaactgaatcacatggcttttttgtagggttaagtaactttggtaacacttttggccagatcctgatataggagaatacactatactttgtactatatagcatgtgtggtgaaagaagttatcgatccttgaaaaaatctctgtactcagtca

SEQ ID NO: 50831 - DNA, 1023 bp, Homo Sapiens
ctggtaccgggtccgtgaattctccgggataaaaattcaacaaaagtccatttgtcctgctactcctttggtgacacacaggtagtgtcaactggaacatcagtaggtatttgatataacctttttgttagcagaaaattagtcactgcttaggttttaagtctgccaaactgggactaagtatgctttaaataggtatagattcttcggtttcttagaattctagatccatgatgtactttaattttttaatgactgtatatttagttttaaccactacttaaagtaatctaagcaaagaattcctattgctctccatcagttcaagataaaaaaacaaaaacaaaacaaaacgaaacctatgttaaaatttgacccgtcaaaattactcagtattgagctgcctaaagccgttttccagaaagagacttgcctgactatagaagaattcccctttgatcatagggtcagtgaataatcaggaaagtaaaagataagaccaaaaaaaaaaaaaaagctttttatttcaatttcaatttagagtttctgttcttattataaattagctacaagtaagactataatggtcatttgaatatggggcaacaggggggcactccagagacagaaagtaccatggcctttaaagcggggtaaaaaacctttccagccaaattttccttgaattcccttaagttggcacgtttttaggtttttttaaaatataaccaaattgggaagcccaaacagggaaaataatttttttttttctccggcccaatttatggaaattggtgtaaccggacatttaaaattgtggaaaattgggggacctttcggatttctaattccgcgcggagaaagacaaatcttatattcttccaaaattttctctcaaaacattgaacttttgaggaaaaagataaacggtgaactgcccagctcttgaggtacccaaggtgcatccccaatcccgtgaaaatttttcggagggtagttcggcgggaaatttttcgcccaaaa

SEQ ID NO: 50832 - DNA, 599 bp, Homo Sapiens
  misc_feature (516)..(516): n is a, c, g, or t
ggcggtccctccatcgccttctgtggctggttgtgggccttagttttctgcagctctacctggcctgcttactctcccacgtgccatgcagttcctgggggttgctgtatttgtagcccctggcctgggcactcaagggcagcagataccctgtttgcctccctgagtgcagaggtcctgagcccaccctagttgggctgactcaactggaaatttggttgtgacagtggcgtggggagagggctgggtgattgtattctgtgtactgcccagcccaggcctcttcatctggggactttttggcctaaccctggaagcctggaaagttgcccacttttctctttcaggttaagccagcaatttcagggccaaccgagctgtaaacatgttagtaatgaggacaactagcatttgtacagggcttcacagtttacaaagcgctttctcatacattatcacatttgatcctcccagggccctgccaggttgttttgcatatgtgcattttaatttcanaaagtcttccttccaagcgtgtatgatgaaatgagtaaattgattaattggcgtaaaaaaaaaaaaaaaaaaaaaaaacgcgg

SEQ ID NO: 50833 - DNA, 437 bp, Homo Sapiens
gaaagatttttttacatgataaatgggggaggagaaagactgaaatgaaaatgttgaagaccctgatttgaaattgagtgtaaaggtctagtcactgtaagttttagagtagctttagagacaaagctagtatcccacttggtgagatcaagtaacttgtggtttaaaatttaaagtaaccagtggccattttaacttcactaatttctcttggaggagctaatttttaattgctcatgattgtaaaacatacttccggatggtaagggagatgttaagatgatttgtcttgaagaatggtaaactttttctttgtttattgcctgtcataaaaagagggaaagtaaaaaaaaaaaggttcataatcttaaatcagtccaaaaatttgaattttctgtatttctgtttaattcaatgcgttaatctttagcattggt

SEQ ID NO: 50834 - DNA, 572 bp, Homo Sapiens
attttaaacttctggaaatatgtgtgtttgtgaagatccaaatccaattcagcaacctccatcaggcagaaaccttctgcaatcctcacatgagaactggttcacagtgtacacagcatggagccattagtgacgttatccaaaggatgagacaagacaaaagttactgtctaataaaaggaaaattaggaacaggaatgctctttaaactcaggaagatcttttggggtgtcaaactggacagcacagaatcattagaaaaattagcttggcgtgagaagagacattgaggtcttctctgtaaaatttacttagatacttgtgaataggactgaaatttatattttgggcactctttacctcagattcagagttcttaggattatttaaaattcatttgctggatgttttcaagtataaacaataagaaaactgcaacttcaacttaaaaggcactgctgtatttgcaccctatattttgacctgtcgttaggtactgttgaatatttttatctgtaagcatttatgaagtgcaaaataaacatgttattatatagaaaaaaaaaaaaaaa

SEQ ID NO: 50835 - DNA, 557 bp, Homo Sapiens
cagagtaaactcagtactgcaatccatagcaatattttgcatatattattttttcttttaaatttttttcttgatcagatttatcatattcattgaatattattttattgcacttggctcctggcttccccccatcctgtgctctgaagtcagagtattatttgtggctctatgaaatgtccattgcttgtatacggtataaatttaattatctttgtagtttttctcacagtatagactgaaaaggtttggttaattttgcaataacagaccactgcatatttcacaattaagtgttttcaacagtattaaggcaagatttacagtaacacttttaaagtgccagatgtacattgacagaaattttcttagtcaatcctagattgatcatgatttgtgatttctatgcaggccttggtatgatagccttttaattgctgtacaatttcttattatatatttttaaactccctcgggtataacaatattctaaactttgacactgacagctttggtcaacccttcttaatccaagtattcttccaccaacgctatga

SEQ ID NO: 50836 - DNA, 599 bp, Homo Sapiens
  misc_feature (338)..(338): n is a, c, g, or t
agtcatcttacaatagagacagccagtttactccccactttctagcctccgactcttgaaagcttccaagaaacacatccagaggtcacatattgggcaaccgaaggctcatgtgaaaaagccttagagccacaaaaaccttgcgcctcagtcattaatgtaatttggggcagattttatgaagcaaactaaagcctttgaattttttttttttcagttttaacgtgagtataattacttccactcctttttccactttccagtctctccgagttgcgtccctaaaggatcctgctgcaagaaatgagtgaatgaatgaagatattaagaattaaagnactgatgttaatgagagcatgggtgatgtggtttggattgcttgaggccaggagattgaaactagcctgggcaacatagtgagacaaaccttgtttcaaaaaaaataatatatatatatacacatacacacactaagtgaggtggtgtgtgcttgtagtcctagcggcttggaaggctgagatgggaggattgtgcccaggtgacagagcgagacccagtctgtattaaaaaaaaaaaaaaaaaaaaaattggcgggccgc

SEQ ID NO: 50837 - DNA, 547 bp, Homo Sapiens
gcacgagtatgtctctgggattaatctccaagctgctgattacatcgtgcacgtttgatactgtcactttcatgatgttaaccaatatcacgaaaatgaaaatttcatcaggaaaagcaactcagtcccaagagtttttcagtgagctcattctttaacaaatcgctcctgtgcaggcattgacagctgtgtcatgacagctgcctgaccatagtaaggtgtcatcaattataaaatgcattccagttttcagagatgttttgaaagagatgatggaagattcagaggtagagaatagataccaaatctatagactattatatcccttaataaaatgctaggaaaaaacagaaatcaaaattataatagaaaataattttaagccaagatatttgaaaacccttaccgatcaaaagtactcttcaagaagcattatttggctctgggtgtctgaggtgggagggactgcttgaggccaggagttcaacaccactttgggcaatataatgagatctcacctctactaaaaaaaaaaaaaaaaaaaact

SEQ ID NO: 50838 - DNA, 720 bp, Homo Sapiens
ttttttttttttttttttgacagagcgtgactccgtctcaaaaacaaagcacaaaagaaccacagatagaaggagcagctactctcctttggtgctgagatagagtgccaaaggaagaggctcccactcactcatcctcagggctgagatctggccttcttggaaagggaacaacggtgctcactgagtggccgagaatttgctgtggtatgtcaccagacgaacttgcatggtatttgtactcccatgtgctggggaggtatttcatgggagacttcacacaacagaaccgtttgagagagtctctggagcaggctgctggccaccgagtactttaggatgctgggcactgcaggagcatgctgaggggatgcaccttctctcctacagcgtctccccaggaccctgtactgaccatgctgcatgccctctgcctctactaaatggctccaaacagctgcaatttcacaaccaaagttttttacttgaaacagcatgttactccttgctaatctaattgagtgtgtattaatcggctacactggtcacacatttgattgggtaagacctaaagtaggctctgcttaacagtgagtccgttcatgtgacctataaaatctctctcagagactcctttccagtccatctttgtcagctgtcttgtctagagctttcaactagctcatagcctccagataacaaggtcctcgtgccgaattc

SEQ ID NO: 50839 - DNA, 868 bp, Homo Sapiens
tatattatttttaattttttaattgttttttaaccaagtaggaattgggtgtatggataagaggccaatctgcttctgtaggctatagaagaaaaccagtgtattttatggtcataatttgtccccctattattttggagatttaaatttaagtaaagtagccatcagtattttaattgaaaaatactaaagccacataactgagtaggatgtcgtatgatactttcaacaaattccctaatgctgcctaagcatatggatgttttaattctttgctgttataaacagatatctaatacgccagaattactgatggtaaaattgaagttgtgtaacttgtgaatttttttatcaatgttttaaatattatttaaatcttaaaatcatttaaagacttatgttgccactgggtggcagccatggcttctcccactaagcaacagaagtgaccaaatataattaagacaaattttcatctctattacatctgcttttaaaacattttagttcatattctattatttttctaactcagtactccttggttgagggtaattattagtagttaagtttttaatggaaataaaaatcatgtatgcttatctttgtgtaaatcaaatgaatttaatgaggaaacttacatgtcgtaggatgatagtagtaacatcatcttaatttaacataaaaaaaaaaaagggggggctaaagattcctcggggccagttagcgtccagttttttgcaatggccaaggggcgaataaagaagggcgcgcttccacgcgaggaacgactgggttggaagccccttcgggggcaggcaccccggatagcggaataataaggtggaacgttggcgatgtcttatac

SEQ ID NO: 50840 - DNA, 932 bp, Homo Sapiens
gattgacagcctttttatggttggtgttactatttatttcctgcctctaaacttctcgtggtccttataaacttgtcaggatgtgtgttgcgttgaattctgcatgtcctttttttgcccaccctcaggttaagctggtactaacttatccccagaggaaacagggtttatgagcactgacagatgtcttccctgggcaaaaaaaaaaaaaaatagtatakgkrggsgcacacacatacacatttatatttatatttcttaaagcttttaatccctttcattccctgatatctcagagatttcaaatcattgaacactgaagtatattttycaggccagatgaaaaattgtattaaaaccctattcckggtcaggcgcagkggctcacgcctataatcccagcactttggggggccgaagtaagcagatcacctggggtcgggrgttcaagacaaacctggccaacatggtgaaacctgtctctactaamactacaaaaaaattagcctgatgtggtgttgtgtgcctgtagtcccagctacttaggwggctgaggtgggagaattgcttgaacctgggaggcggaggttgcagtgagccaaaattacgccactgcactccagcctgggcaacagagcgagacagtctcaaaaacaacaacaacaacaaaaaccctwttccttgcctttgtaggwgtcaaataaatgaacttcttttttcttttttttattattatactttaagttctggggtacacgtgcagaatgtgcaggtttgttacataggtatgcacgtgccatggkggtttgctgcacccatcaayctgtcacytactttaggtatttcccyaatgttatcctryccctagccctccatcccctgamaggycctggtgtgtgatgttcccctccctatgtacatgtgttctyatt

SEQ ID NO: 50841 - DNA, 582 bp, Homo Sapiens
gtgcaaagacttctgctggaactttctgtggctgtgacctggtgagctggctaattgaagtcggccttgcctccgaccgtggtgaagctgtgatatacggagacaggctggtacaagggggagtcatccaacatattaccaacgagtatgaattccgggatgagtacttgttttacagatttcttcaaaagagtcctgaacagagtcctcctgctattaatgcaaacactctccaacaggaaagatataaagaaattgagcattcatccccaccctcacattcccctaagacctaaattatgcaggggagaaccctacatggaatcatattctagccgcgtattcattagtttttagctgggtgaccttgggcaagttaacagaggcaacctctctgagcctcagttgtctcttctgtaaaatgtgaaaagatgtgctcccaccacatgcgcagggtctgtgattttacatgtatgtaaaacacataggaagctgacttaggaaaaagagaaaaccaaattaaagttctgataatgaatataatatagtcatcctttagtatccaaggggattggttccagg

SEQ ID NO: 50842 - DNA, 923 bp, Homo Sapiens
cttttttcctcttactgcatttgggggatttatcattctatgtctaccttttcttgagtacagctttgatatgcacctgtgttacgtggtgatgggaagtcacgggcgtgctctttctagttaattgatgccacatcttccttgtcttttcagcttgggaaaaaggcggcggtggaggaaggcatggaatgcccacagtggtcagttcaaagaacaaacgtgcaattaaaaaactgtagtcagccaggcacggtggttcacacctgtaatcccagcactttgaaaggccaaggcgggcagattgcttgagctaaggagttcgagaccagcctgagcaacatgatgaaaccccgtctctacaaaaagtacaaaaattagccaggcgtggtggtatgccctggtagtcccagctgctcgggaggctgaggcaggaggatcacctgattctaagaattcgagactgcagtgagccgtgatcttgccactgtagtccaggctgggctacggagagaccctgcctccaaaaaaaaaaaaaaaaaaaaaaaaaggggggggggtaaaaattttcccgagtggggggccaagtttggtttacccggttttttgtgtaccagggggtccctaagaggagcggattttaaagcaaggccgggccgccgttacacccgtcggggctgggaaaacctggctcgctgggaccttgggaagggaccctacttctgggcggtgcccttattggcaacctccaatggggtttagggctaaggcacaataaactctacggtattcgcggtaacaccggaatctgcgtggaagttgtcggattgttagaattacggcgccgtacacactctcccaccacacaacaaacacacgccgacacgcattatacacaactactacccgaccaacaccgcactcgt

SEQ ID NO: 50843 - DNA, 606 bp, Homo Sapiens
  misc_feature (5)..(5): n is a, c, g, or t
  misc_feature (37)..(37): n is a, c, g, or t
  misc_feature (185)..(185): n is a, c, g, or t
cgcgncccagtaattcggcacgagtggcttttctgtnaatttctgcagctttttcttattctccaaaaaccagaaagtggtaatatttgttagtgatcaaatcaaagatgatatttaaaaacacatgttgacaggaggacctagaggcattatgagtattagaaagtctgcaaattaggttgttngctttgtggtgaggtgtgaaacaggatatgcatttttgaaaatgtatctttggatttgctgaactgggctcaaatgtggtcaaattgagagagcttatgatgccagttttactgcattctttttagttgtgttccccaaaatcctgccccatgacctttaccagaacaagtaaacacatcctaaaaacaaagttatgttccagtatggttttaaaagtcttcccttttggttatttggaaaatagtgcaaacgtgcggtctagtggttatggccaaaggcagagcaaagggagtgcggccttagccagccccagccagctgccattgctcccacgctctgtgtggtcttgacccaatgcccagaaaagcaaggttccccactttctacctctttatttttaaaagtaaaaaaaaaaaaaaa

SEQ ID NO: 50844 - DNA, 655 bp, Homo Sapiens
tgttggagccagggtttcaccatgttggccagaatgatgtcgatctcctgaactcgtgatccgcccgcctcagcctcccaaagtagcctacattgcctctactttgaagggacaaagttgtcctggtttttttttcccttttattatttcattataactatcctaaaacttacatacattgcctatgtttggcattccataacataataattataataatcccccaatgtcagaaatgtatgtgtgagttcccatgtttattggcaatttataagctttttaatattgtactattttaaactaaaatgtagaaagaatattatgtttatatacagtcagataaattattaactgttgtaatttaagctgaaaatgaaactattttagtatcagtatagaagaaaagtatagtttctaatcatctataattttaaaatgcaaagcctataaaactttcaagatgttttgcctgtttgtttttaagatttataataattttctatctttagcaagtagctatttttaagccaggtaacttctttatttgaactgtattatactctcagaccctcatcctgcctagaaatgaataagtaataaataattactctgtattatttacttcttttattttatagtaaaatattcatttgga

SEQ ID NO: 50845 - DNA, 613 bp, Homo Sapiens
ttacattagttttacaaattaacctttccttgctctaaaaatcagagaactaagaaggctttgaaaagaataaagtccttaaaaagaaaccaagaacagtatataaaagattatttatttagaacagaatacttagagggtgagaactaatatcatttggattttttattaggtcatagggaggttctgtccatgcaaagtgatgtagtattttgaattcctgcaataatcacagatcaaaattgaggttaaatattgttgttttctttttcacccaggcctgggactggcaggctgcatggctttgtggctgaggctggaagcagagcctatcaaagtcccctctcttgcaaaaaaaaaagaaattcttttctgtttttgaagaaaggttaaggttgatatctcagcaaagctacttgaaggaagtgattggtcttgacccagcacttgtaatgcagtacttacaaaatcatccagattctggctttttggatttcgtgggacttgtgtcagagtggttttcaaaagagggccttcattccaactgtgtggatgacactgatgttactcaatttttctagggtttttgaggaacagcgatcctgctctgggc

SEQ ID NO: 50846 - DNA, 622 bp, Homo Sapiens
ggtcagagtggaaatgtaaaaatactaattagagaataatgtgaatacaacaggaatcctgttggtattctatttatattgtaagcagcagttcaattgttttgtaaaagtaatttcaattttaatcactgaactaaagaaatgggcaaggctgacttccgtaatataggttctacctaaccatctctaacaccgctgtcaaggaggaccagtgttaaggtacattactaacaaccacacaaatttttaaaagaaaagaacactcttagcagcctatggtactttgaaatgaaatattgcctctcattctcacttgtgttgccattccaaaagtatgaatttgctgaggtttatattctgggtattatataaccattggttctgtttggcataaccctattaaatggtgcgcagagctgaattacctacagaaactttctggtttaattagcataaattggtataaatattagtgagcccatacttctgtgatataattaaaccaacttaatgattctcacataaggtgtcaatttattttactaatgcattcataatctatgctttgtagcaacatttttcaaatgtttaaaatgctaaatcttctcaattttccaatctt

SEQ ID NO: 50847 - DNA, 713 bp, Homo Sapiens
  misc_feature (597)..(597): n is a, c, g, or t
  misc_feature (664)..(664): n is a, c, g, or t
ctttttatgaaaaaagtagaattttttaaagagcagagaaaagcacaatgaagacagaaagatcacctgtatattcttattgaccaaagatgatctatttggggtaaatccttttttttttttttgagacgggagttttgctattgttgcccaggctggagtgcaatggcacgatctcggcttaccgcaacctctgcctcccaggtttaaacaattctcctgcctcagcctcctgagtagctgggattacaggcatgcaccaccacgcccggctaattttgtatttttaatagagacagggtttctccatgttgaggctgggcttaactccagacctcaggtgatctgactgcctcggcctcccaaagtgctgggattacaggcaggatccacgtgcccggccggtaaatccttttaatagaggagtttcaatatttctcctctgccatagtattagaaagaaaagaatcattattgacatctttacgacattgagtttttctcttgtacctggtgtgtctttatttcagtaggtattcttttatgtgctttagtaagtctttatatttttagcataaaagtgtacacatttcttgntttacttatttctagatacttaatggcttttgtttataatatgattgggatattttttctggtgggnaattgattactattactatgtactaaactggtggtttttgtctaaggat

SEQ ID NO: 50848 - DNA, 678 bp, Homo Sapiens
gcatttctgtataatgtgaagaagcaactgtatttgaattaaaaatcactgctaaagaatatatttgagtcatacagtttctaagggtacaacctgtgaagtcagacttcctgagttcagatctctcagccataactagctatctgaccttggccaagtatgctcaaagtcacaaaaccttagtttccttatgtgcatgatgattataataccttttgtacagttatgaggaaacttagacaatgcctgtgttgtatggtaagcgttttcataaatgctgcctacctgtaagtagcattatagtgtgtagttattggttaatttcctttttctttaccagaagtgtgggttttgcccagcctttatacaacttcagtatttctggttaatctgtctctctatggctctaaacttttcagagtggtgggggagttaccaacacttttgtaaaaggccagatagtaaatgttttatgctttatgtagtctctgttgcaaggactcaattctgtaattatagcgtgaaagcggccacagacttgtaaatgaatgagtacagctatgttctaaaaaaatttttatttaccaaacccatgtggtggactggatttggcctttgggccatattttgctgaccctgttttaaaccataagcttttctaagaatttttttaatccc

SEQ ID NO: 50849 - DNA, 375 bp, Homo Sapiens
agatttctaataagttatttgggagctatcagaatagaaactaataaatattatctatctattagctgtcagaataaaagcttactgagggtcctgaactgtgaggccactgaaggcaggggtttgggtctgatttatctgtgtttgcctagagctttaacagagcctgacacttgtaactcttaaaaatatgctttaaaataaatctaaactcaggcatggtggctcatgccagtgatcccagcactttggaaggctgaggtgggaggaaggcctgagcctaggaactcaaggtgagagtgagctatgattgtgtcactgcactccagcctgggtaacagagtggagacgctgtctcttaaaaaaaaaaaaaaa

SEQ ID NO: 50850 - DNA, 604 bp, Homo Sapiens
  misc_feature (383)..(383): n is a, c, g, or t
agagagcgagctccagtggcagactctagtttctggaataagagcaatacttttaccttcacaggtttgagcctgttgtttgctatattttataactcgttaagagttttttttaatgcactggtatcttgaaggagttcttttcctctggcagtagacctctggttttataatggaaatctttgaacaagtaagatctgcttagatttacattcatctttggtagagtaaacctcatctctaaattaaagagtttgtaatttcttacctttatgattagaatgaaaattcttggagagggcctaatccacatgtcagtttttaaagcttaaagacaaaagacaacactggcatttgtgttaatatctgcatttaaatatttntcatacacacacaaacacacacacacacacacacttagctatatggaaaaaatggatccctaccttacagtatatgcaaaaagtcaattctagatggggaaataaaactttaaaaaatttttaaagaaaatccagggccaatattctttatgaccttaaaattaaagaagggattttttaaaacaagaaactaccgcttattaagggaaaaaagttggttt

SEQ ID NO: 50851 - DNA, 557 bp, Homo Sapiens
aaatgacagggctcagcactgccctacagtaccaagaatacaaatgtttccatgaagtcttcaaaggcatttgtaaaattcaggctgtaagtgattagttagttcattctgcacttatttattaactgtatattcagttccaggctctagggtagagattatggataaaggtgaattagatagatgaagtttttgccctcacagcaaaagctttagccaataattaaagctatcactggaagtgggtctgtgccaataacctagagaagagcagtgcttttagagttgagctatattcccaatcagttcttaatggtggttttacccccttccctctacactgtcttttcttgagattggatcatgtgtgtgaacccacatcatttccagtcaaaatcaccaagagaggccggacacagtggctcatgcctataatcccagcactttgggaggcctaaatgggtgggcctcttgagtccagagtttgagaccagcctgggcgaccccagctctaccaaaaaaaccaaaaaacaaaaaataccaaaaaaaaaaaaaaa

SEQ ID NO: 50852 - DNA, 389 bp, Homo Sapiens
tgggtgacacagcaagactcttgtctcaaacaaacaggaatttgagtaaattttaaattagtatatactacaacaaatttccaaacttcataatttgctagtagtgctaactaaaattttacaccaggtaaaatcaggtcaccttttttatgtattgacttcattgttggacttcatactctgatgggaaagaaaatggacattctgaatgtgtcaggtgcataatatcctaatttatgcttgtcagagctggggtctctgtcttccttggcccatgttgcatttaactgaatgtcatgttttctcctctggaacttcttatgtatgcaagctcccatgttaacctatcataaaaatgttttttataaagcggccgctcgagcatgcat

SEQ ID NO: 50853 - DNA, 680 bp, Homo Sapiens
aagacttttgatctccacacttcatttgttcaaataagccttactcattaggccttaaattaaaagaaattctgcccacacacacacaaacacatacacacacatacacacacacagacacacacgaaacacaacacagacactacagatttactacattaaaggagcattcagcttcttaagagtagcatgacatttttatctcaatagaatagccctcttttgctttgtatcacagaagtatagcaccttcttacagagttttatatagtttgtttttgccattttgattcctatacccagtaataataacttttgcacaatacaccaatcctaaaggcagctattaaatgtttacagtttctatattgtaagagcgatctggattattttactcttcccaggccaaactttcatgacttgtactgaactgaagtatatatttatactacagttttttggggggtggggggatcttgatatgcttttcattgatttgcataattcacgttaaaggtgagaaagggttggtgccttgtaaatatgtagcagatcttcgtggtgtgttctgatgtgtgcattaactttattaaaaaagaatacttgaggtatcaatctaaaaaaaaaaaaaaaaaaaaagaggggaaaaaaaacccaggggcctcaaccatgcaggggca

SEQ ID NO: 50854 - DNA, 923 bp, Homo Sapiens
tgactgcgtcggggttgagactgggtggatgaggctcaccccggcggggagaagggacgaggaggggcggacagcggaaggtccgggagtgtccgccataaagtcgtttgaggtgaccgttgcgtaattgtgagtctgtgagagaagatgtgaagtatggcctcgtcccggtcatctgggcgtgcgggtcccgggttttgatcgcgcgtttgtttttaacttctagtcatggcgaatgatcgcaggagagcacagactggaccctgctacgatctctcttggagtggatcagactgatgatcaccaacaaccaactcattcccggataaggaagaagagagtgtcacctacttcagtgtggtttcaaccctacttctgcatcttaaagacactgtgtacaacgttggacactgtgcaggatgatgccacttcatcttggatgctaatctgccatgttgacttctgattaaccccaggcccaggaatgcctcaagatttctactttacttactgttgcttgtgtaagccaagacaaccttgatgttatcataaacatgtacttacctaagtcctgtcctttggcaaattatgggctatgagacacagcattcttgcctttccctgaggggtcaatttcagcgatcctacacattccttctgaagcacttatgctctttctatatggtatgtaagctctcggtctggggagtaaccagtgcaaagatctacctgtctttgttgcccacatggtttctaaaacttttccaaataaaatcaccctttctactggaccgaagagagaaaaataaccatatgatgggggcgggaccggcttccttaaaagatatatcccccttcggaggggggggcccccaaaagaccttaaacgagccgtttaaccccccagggcttttttttttttg

SEQ ID NO: 50855 - DNA, 769 bp, Homo Sapiens
ggaggctcaccccggcggggagaagggacgaggaggggcggacagcggaaggtccgggagtgtccgccataaagtcgtttgaggtgaccgttgcgtaattgtgagtctgtgagagaagatgtgaagtatggcctcgtcccggtcatctgggcgtgcgggtcccgggttttgatcgcgcgtttgtgtagttttaacttctagtcatggcgaatgatcgcaggagagcacagactggaccctgctacgatctctcttggagtggatcagactgatgatcaccaacaaccaactcattcccggataaggaagaagagagtgtcacctacttcagtgtggtttcaaccctacttctgcatcttaaagacactgtgtacaacgttggacactgtgcaggatgatgccacttcatcttggatgctaatctgccatgttgacttctgattaaccccaggcccaggaatgcctcaagatttctactttacttactgttgcttgtgtaagccaagacaaccttgatgttatcataaacatgtacttacctaagtcctgtcctttggcaaattatgggctatgagacacagcattcttgcctttccctgaggggtcaatttcagcgatcctacacattccttctgaagcacttatgctctttctatatggtatgtaagctctcggtctggggagtaacagtgcagagatctacctgtcttgttggcacatgtttctaaactttccaataaatcaccttctactgaaaaaaaaaaaaaaa

SEQ ID NO: 50856 - DNA, 815 bp, Homo Sapiens
cacgaggctggaatacttgctactacgcacccttctggaagcacacggaggggcctggctggcagagcatactatctcataccccctaccccaggagcaggctcggagggagccactgtgccccctttacagagtaggactctgagacccagtggaaacaaaggctcccccagggctctgcacaggctcatggccaggttgaggctggccctccacctccaggtgcttacagcctcattgtctgaagaccactgtagtgccccacttggcccaccctctccagggcagagtggttgggcgtagctgagccatagcagtgcgtcaagacttgatgaagggccaggcgttgtggcttactcctgtagtcccagcgctttctgaggccaaagtgggcggatcacttgagcccaggaggtggagaccagcctgggcaacatggtgaaagccgtctctacagaaagtacaaaaattggctgggagtggtggcacacacctgtggtcccagctactcgggaggctgaggtggaagaatcacctgagcccagggaggcagaggttgcagtgagccgagattgcaccactacactccagcctgggtgacagaggttgcagtgagccgagattgcaccactacactccagcctgggtgacagagcaagtctcaaaaaaaaaaaaaaaaaaaaaaaagacctgatgaagggctgggctggctgtggacaaggggctcccaggtctgctggagcagcagcaggcaaggcgctgaaagcagctctggttctcttaggcccccgattctacgttgagagaagtggagt

SEQ ID NO: 50857 - DNA, 478 bp, Homo Sapiens
  misc_feature (16)..(16): n is a, c, g, or t
  misc_feature (105)..(105): n is a, c, g, or t
agaaaaagaaaacagnattatcccctatagcctcccgaaggagcaagccctgctgacacgtttactttagttctgtgaaactgatttctgacttctggcctatanaactatgagagaataaatttgtgttgttttaagccaagtttgtgataatttggtacagcagcaatagaaaatgaatacaaatgtttccttgaccttattgagaacaacttttgtggagagggaagaggtaaactaaaagaaaattgtggtgggatgataactgaaagatacagaaaagacagcaaagtatccattttttaggaagtttttatatatctcatttgacccactaagaaacgacatccagaaaggagctaaagaccagaggtaattgattagctcagcacccaaaaatggcaggcagtgttggggcagtactagaatgaggtagccggcccgggcacggtggcctcatgcctgtaatgccagctct

SEQ ID NO: 50858 - DNA, 1107 bp, Homo Sapiens
  misc_feature (138)..(138): n is a, c, g, or t
ggaaggaaatgggtgatagaattactttatgtttaaattctttgtattactcactgacatgtagccaaatcttaaaacagctttgtttgctttcagcatgaagctgctataaatcacttcaccaggaggcatcttcangttgttctttagttagcagcaatacttgagtgcctttcttatttaagaattagtggcaaatcacactgaaaaacaagacctgtcagttgttttataaatgcttttgaacttgatccctagttgagctccttccccctcagagtctgatacaaattaccctttattgtcagagtatttgctcattagtcctgtgaactctacattcagactcattgcttcctccagatagaggagcttgtaccataatattctgtgtccatttatgttagtttaatgaaatcttgcgaatttaggaaaataaaagaactgctcattcttccatatctttgtagtaacttctgttgtgtgtccttttgtagtcccatatttccatatccatatgctttgtaattcttttttctttcatgtcgttttctccattcttcaccaaaacagcagcatacataggcacatggttttatgatctgtttttcccactcaatatttaaaaaaaaaaatttgccatgttaggtaggctgggtcggagttttacatctgtattctcagcacttgggaggcgaggagtggattacctgatgtcggagttggaatagccaaatggtgaaacccggtctctcaaattcacactactcgggggcgtggggcgacagctgttattccccacttggagcggcggcgagaaagcggaaccgcggcgcagtgtctgggagccccggttagtaaatgctacaaccggggtgaacaaaacttgttcctaacaaacaaaaaaaaaggggggggtcaaccacagcgggcgcacaacactctatacatgacccatgtatagaagcgagtgcagattcagagaatacctacagactctcggtcgtactatgtttcattagtttctcttcgctctccttcgtctttctgttccgtttgctcgatcatccctgctcacaccacacacaacacacgcaggaggggagg

SEQ ID NO: 50859 - DNA, 652 bp, Homo Sapiens
  misc_feature (411)..(411): n is a, c, g, or t
tgcgaggtctgggcagtgtcccagtggaactttccagagagtgccaagggaggaccgagaaggggcatgacctctgctggagccaggagggcagtgaccaggagctggcttagcactgaagggaagcaggcatcaagggcaggatttctcaaacttcttctgaggaatccccgaggtcgaaaccggtgcttcacagatttcagatgtctgatcttgatttttctttgattccatacaacagattgcttgcctgggttagtgcttattttaagttcttggtgcttcttgtctgacttctgtatttgcaattaaaaacaacatgaccctccccacctgcagccagatatcgttagaaattcaacttcgaaatatattcctatcactcctgttttcactttaatagaaggctgntgcagtactgcatgatgggctcttataaaacttctactatctgctaattcttatctttgtgacaggattgtttgacactgagcaaggaaacacaataaggaagtaatttggatgctaggctggcagaagcctgcagctgtcaaccacagcctgccccagtgtgttcaacacggtggcattgttctccctgacttcataatgagcaaatgtttcacatttgaacttaaggaataaattttta

SEQ ID NO: 50860 - DNA, 500 bp, Homo Sapiens
atcagaagactagaagtcttaaagatgaaactgatgaatctgaattgtggggaaaaaaaatccaaaatgaaactgatggatctgaaaagaaaattcacaatggagatgattatgtcagaatatccaaaaaggagccaggagggcataaggagttggatcctggtcacatacacatctagatggagtttcacctgctgaactgggccaaagtgtaaaactagctgcatttgacttgagttgtatatactgggcctgatcaaccgcctggagagataaccatacccaactatattgatcattgactagagacatcctgagctgacaaccagccatcatttatcatggactgtgctaaaaccttccagatacgtaaatttacagtagcccttaaaagctctgcctaaccttgcctgaatgcaacatgatttagctgcttgctagacttgtgtctcccaaattgcaatctctaaaaacctgattaaaatgccttttgctactcc

SEQ ID NO: 50861 - DNA, 597 bp, Homo Sapiens
  misc_feature (494)..(494): n is a, c, g, or t
  misc_feature (545)..(545): n is a, c, g, or t
aacgtggtaagtgtcctattggcgggaagaataaatccggaagagcaggaccagtggacttgctacataatctgtagtcttggagccgcacagggttggtggtaccctcgagcacaccagacttgcagaaaaagcatactccagaggaagctgaggcatgcctgctcgagagccagctgttccatgtgcaattttcctctgatagtttctggtcactgttgccacggtgataatgactgggctatgtcattatctatccgccaacagtaagagaagctttgcagtcgagatattgtttagcagatggagtgttttctgttgaacactaagtactgccacaagttacttttttttttttaaactttgagtatttttttacaatgttgctggaggtgatctgtttatgctttgagagtgttcgaatttaaaatcagaaaatcatgtcagtgagtgagtctttcaaataatccttcggcatgaaacctgagcctagntaactatgaaagtaaactcggcacattacccgaaagtctcaatgtcatatnttcacccccatcaatattattgatgattgctcattttctaatgtgggacctg

SEQ ID NO: 50862 - DNA, 743 bp, Homo Sapiens
cttcttttgtttatgttgtgtattttgtgtatctagatcacgttttagtagcttgtagttccctgttactgggaagcatttcattgcctcccagcttgggagcatccaaagtagaaccatgactgggtcatgaaatgggttaatttggtttctttcattacagggcaaagttctccctgtggactgagaaataaacatattataaaagttacatatgctcatagaatagaaatcaaagagtaaaaagtattgagtgtaaaaaacaagtgtcttttttccccccagtctaactccccagaagtaaccttttttattttttatgttattttttcttaccttcaaggaaggaggtaaccatttttgagttgatgcgtatccttcgcctgagagctatctttgtaatcatcctttttggtttctttttcattttttgctttctttctgtcgtagctgctgtgtaatatagagaatgacacatttgtggggagtttctccccacacagccaggcagtcaattctggagagaggtcaccaggtgggtgtcctcttacccaattcaattccaacattgtgtactcggagatagtgtcagatcccacagggtgagggctctgcccacaagactgcccccaacttgccacaccaattgcaagctccaggctgttttacctgtgcttctggccaaccgattataattggggttccccacccctttctttggtcaattatttgctgggcggctc

SEQ ID NO: 50863 - DNA, 558 bp, Homo Sapiens
  misc_feature (517)..(517): n is a, c, g, or t
  misc_feature (530)..(530): n is a, c, g, or t
  misc_feature (542)..(542): n is a, c, g, or t
  misc_feature (554)..(554): n is a, c, g, or t
aatacttttgagggccaccatgttccaggaaccgcagacacagaatccaactcttcagtggcttcccaacacacacaggtaaaggcagaacttcttgaaaggactccaaaccctgggaagatctggctctgctctttctctggccttctcggctccagccaccctgacagctgccagtctctggggtccaccgtgcccctcccgccacagcccacacatgcccttcgccgctcattctgcttttcttcctctccctgcctggtgtgcgctgcctgtcctccaggtctcgctgcaatctgctttatcctcctatgcctctctgtgcaatcttgccacattgcacatgtgcttgagttagcgcaataatgtcattgaagtctttaactctagcctggactctaaggccagggttcacctaatctccccatagcctggcccctagtcaaagccccataaagagttgttgaaagaatgaagagacatcagtgagcaaaatagatgctgcccttggaaagtnacactgtcacaancagaaaaaaggnagtaaaaagagnatct

SEQ ID NO: 50864 - DNA, 587 bp, Homo Sapiens
  misc_feature (546)..(546): n is a, c, g, or t
gaggcaggaaaatcacttgaacccaggaggtggaggttgcagtgaactgagaccgtgccactgcactccagcctggtgtggcagagcgagactctgtctcaaaaaaaaaaaaagaaagttgtgaatttgatgtaagcttaggaaatgaataaaatttataggcatcggtataatgtacaactggacacgggattttctttaatccttagtttctttcacgggactctagaacttttatcagaatatactgggtaaaacattggggggagggatcctgagtaggtgattgggtcagaaagatgccttcagttttggtcagtgtctaaaagttaagtctgtttaggccaagcatggtggctcacgcctgaaatcccagcacttggggaggccgaggcaagtggatcacaaggtcaggagatgagaccatcttagccaacatggtgaaaccccgtctctactaaaatacaaaaaaattagccaggcgtgggggtgcgtgcctataatcccagctacttgggaggctgaggcaggggaatcgcttgaacncgggaggcagaggtcacgccatggactccagcctgggcaag

SEQ ID NO: 50865 - DNA, 645 bp, Homo Sapiens
actactactaaattcgcggccgcgtcgacattttttaaaactacttatcaaaaagccataattattctgataggcaaaatggtaaagtcacttcaggaaaaagaaagggatgttacttatttagattattactcagtattgctcttgatgttttagcaactcagagaagaccaccaaataagtgctattcatattgtaaaagaagtgatcaaattatttctttttcttatagtgtgattgtacattaagaaatcacaatagatttttaaaaaaataaaatactagaattgaggacttctacttccagaaagaagtagtaaacagggtagatgtattttccctattcatctctggaaaaaatatataaacaaaacataagaagacccagaaagttgaaaagaagatgatgtattctctagggaacttggaaccaaagaatcaacatggaggtaagttccctgtgttttctttttgctgcatacatcctagaccagatgctagagaaactggcaaactggaaacacccaagggcacagacaaaaaaaaaaaaaaagtcgacgcggccgcgaatttagtagtagtcgaccccgggaattccggaccgggacctggcggcgtacccacctttccctattagggagtcag

SEQ ID NO: 50866 - DNA, 500 bp, Homo Sapiens
caggtttgctggtcttctggactagcgcagccagaaagaacccaggaaggaagcctcacgtctgacacaagaaccttcggtgctaatccgagggcggtatgtgcatcctcagcacctgcccatccggcaccatcctctgatccagggactgtgagcaacagggccccgtggccaggacatctctcaccctccagttaaaatctcgccagttgagtctgcccatgaaagtaggcgctgaactgcccaataaatccacaagtaagagttgcaagaaggagccaaaaagggctgagctgaatgactcatatatgaaataatttgataattaatataaataggaaatttaaagtctccagctgagtgacagaaaacaccttaaaaagctcaagagagaggaaaggaagaaaataaacctataattgcaaaataaaagcattgaaagaagccgtgctcaaggtaagatgctacagatgcaataaattcatgttttaacattaaaa

SEQ ID NO: 50867 - DNA, 682 bp, Homo Sapiens
tctggttgtattctccatgagtttaatatgacatgaaaaaatgtggaagccgagagagtaaaatactctgccctgtaaaaacatggaagacatgcaaacagaaaaaaaataattgtattgttttagataatacttaagacaactgtgaaacaacaaaaacacaactattcctttgtgaccgatgaagataaaaagaaattctggtaaagacaggtatgcagttttttaaaatgggttaagaaattgttgcagaagaatttctaacatctgaaaatggttttatgtttaagaaggatggtctgaattgtgtactaatagcaaggtataagtttggtgtagagcctatccagtagcgtccactgtaccacttttaagtaagactcagtccacagaagctggaagattgccttcgctttaaatatcctttaccttctgcatttgacactcctcctgttactacatagattccggtccccagaagcaattttacactggtactagagcttaccagccccatttagtaatttttaatggctagatgaggtttaacaagaatatgagaagaaaaaagaaaaaatatattcatgaatgataggcgatgcccattctttctctcaagctaatgaagtcctatggcgttctaaccacaaccctcggacagactcctcctattcctccatgg

SEQ ID NO: 50868 - DNA, 528 bp, Homo Sapiens
cgccagcagcatgatgactttgctgatgacatctccctgctgaagtgaggaggcccatgggcagaagatagagattcccctggaccacacctccgtggttcactttggtcacaagtaggagacacagatggcacctgtggccagagcacctcaggaccctccccacccaccaaatgcctctgccttgatggagaaggaaaaggctggcaaggtgggttccagggactgtacctgtaggaaacagaaaagagaagaaagaagcactctgctggcgggaatactcttggtcacctcaaatttaagtcgggaaattctgctgcttgaaacttcagccctgaacctttgtccaccattccttttaaattctccaacccaaagtattcttcttttcttagtttcagaagtactggcatcacacgcaggttaccttggcgtgtgtccctgtggtaccctggcagagaagagaccaagcttgtttccctgctggcccaagtcagtaggagaggatgcacagtttgctatttgctt

SEQ ID NO: 50869 - DNA, 711 bp, Homo Sapiens
tgcatatttaacagacctaaaataaatcctattaggcaagtcagttgaaaatgctcgtgctgctaatggaattagagtgcgttcattttacaggctagtattttaaaagtagaaatcaaaatctggcaccgaagcatgctaattgtttactgtaccttgtgaggttttcactcataaatttaaaccagtgtatttttttagaactggtttgtgtatatatatagtgattatggatactaattcaatgtaatttataattttctatgtcaatacaaaaatacatcacagccttctcaaacagctcaagcaatatattgtatattgccatatcgtctggtgaaagggttaaattacttcacctcttgcacttttagatgcaaatcagtttttcatttctgtaatagaaaattattcacgtatttttacatcatttgtttttcctgaccagtatttaaaaccaaaaggatattctgaaaaatggccaacaatttttttagaagtagcatcccaagcagcgtgcctaaacattacattgcatatggaaataaaagaatcaaacgtctaatgccttattatttctgatttcctttttcattttaagtggtgtggagattccagcactcccaggacagtggagtcagcagtaagccctgggacaggtggcaagggtgggtcccttgacctttgcacgcctcctcaggaacccccttt

SEQ ID NO: 50870 - DNA, 739 bp, Homo Sapiens
gcgtccgaaatttaggacttttaaaaaggtgcgcacagcttctgataaatttataactagacttaacctaatcatgtctcgttccagttctcttttctctgagcccttttcaaagtctcctctctttctcctgtcatccttttcctttcctgtccgtgtatctccgtttcttcaacatgacaagcatacagacttgaacacccctccggtgttcttccgagaactgtgaagtccatgttcatccaaatgtaaccaaaaaagaagtcaccctacatgtctgaaaaactgttgcttctcctctgaaacttcaaactccaacgatttccaaatacaatagctttgttttctttagttctgtaatggataatgtttaaaggaaaactttacaccaggcttctggttacactagaagtcaagcccattagggattttcattttttttcatttggttgttgagaagtttcaaaaatcagttttcaagctgtggtctttcaaacacatctgcacataagtcacacatttcaataaagcattttcaagactgttgaccacttgaatttctttggtgttagtggattaacctaaccattactctgagattttatatctctaatccagtattttttttctttttatgctaaacatgggagatcctggttttgtgtgaatgcattattttggatgtgagaaataaatgccaattatatgtactttcccttttctgcacaaattctgggaa

SEQ ID NO: 50871 - DNA, 522 bp, Homo Sapiens
agcggagagagtgaggaggctgcgtctggctcccgctctcacagccattgcagtacattgagctccatagagacagcgccggggcaagtgagagccggacgggcactgggcgactctgtgcctcgctgaggaaaaataactaaacatgggcaaaggagatcctaagaagccgagaggcaaaatgtcatcatatgcattttttgtgcaaacttgtcgggaggagcataagaagaagcacccagatgcttcagtcaacttctcagagttttctaagaagtgctcagagaggtggaagaccatgtctgctaaagagaaaggaaaatttgaagatatggcaaaagcggacaaggcccgttatgaaagagaaatgaaaacctatatccctcccaaaggggagacaaaaaagaagttcaaggatcccaatgcacccaagaggcctccttcggccttcttcctcttctgctctgagtatcgcccaaaaatcaaaggagaacatcctggcctgtccattggtgatgttgc

SEQ ID NO: 50872 - DNA, 500 bp, Homo Sapiens
accttcttggtcaaattgtaattagctagcattatatttatatacagggtcttttttctttaccgatgtattttcctactcatagccaaccaataaattcagtatctgtttcaaatattttagaagtgtagtttgtatagctgtagtactgaggtttgaggaaaaataaatgttgatcagcagaccacgtatttaaaattctgaatcttctgggacagggttgtaactcagccttccaaagggaagagtgcagggggacggggccatgatatggggaaatggtgtaaactaatgtatttctttattggctgttattctgtataacactcatatctttgccaaagttcaattttatatttaggcaactgatggtccttttgcatttaggattttcgttgttgttaccttatacctcatgatataaggaatgggctcatgtgtcttccgtcttttggaaggaggttgacatattttaaataaatgcttttaaatacaaaaaa

SEQ ID NO: 50873 - DNA, 768 bp, Homo Sapiens
ccccgcgtccgcagtaatatcctttcaatgtgttttatattgttttgactgcctttttttgtagaaataaaaattgaccttagaatttatcgtcagataaacttgtaaagatttgaatattaatgtcttttcaaggcaaatgggattgtccccgcactagtagagaatccatgtcgctctgacaccccaaggaagccgacgatccaaatgccgtgtgtcaccaaccccgcttctgccactggcggcttcccttcttggctcttgggggggactagatcctgtggagaagatgacttaaactttgctttttgttttaattttaattctataacttgagatctttccggggcctacaggcgtgtaagacagcttggtctggtctgtgcagaagtggggagtgatgggcaggttcggcagcctaacattgttcaggcgcatggcccctgcggtgtgtacacgaactcggcttcttttgtcctaggtacgccaagggcaggtttctggagactcccttgtgcccgggatggcaagggcaccgggctggcgtttccacatctgtcttcattagcagaaaagtgatgatggattttatttcactcacactccagtttgtaataaaatgccaaattctgtcagctatccaaacaagccaccatttgttcttggtgcttctctggatccagaaatgttgccattcttggaaactgtcccattgcttcgtatttctgccaacgtagctctgcctgcctgtcaacccctcactgcact

SEQ ID NO: 50874 - DNA, 757 bp, Homo Sapiens
gaattgggttggcagagaagactggtagaatgccgagacattaatggacagcctgcttccgagtgtgcaaaggaagtgaagccagccagcaccagaccttgtgcagaccatccctgcccccagtggcagctgggggagtggtcatcatgttctaagacctgtgggaagggttacaaaaaaagaagcttgaagtgtctgtcccatgatggaggggtgttatctcatgagagctgtgatcctttaaagaaacctaaacatttcatagacttttgcacaatggcagaatgcagttaagtggtttaagtggtgttagctttgagggcaaggcaaagtgaggaagggctggtgcagggaaagcaagaaggctggagggatccagcgtatcttgccagtaaccagtgaggtgtatcagtaaggtgggattatgggggtagatagaaaaggagttgaatcatcagagtaaactgccagttgcaaatttgataggatagttagtgaggattattaacctctgagcagtgatatagcataataaagccccgggcattattattattatttcttttgttacatctattacaagtttagaaaaaacaaagcaattgtcaaaaaaagttagaactattacaacccctgtttcctggtacttatcaaatacttagtatcatggggggttgggaaatgaaaagtaggagaaaagtgagattttactaagacctggtttactttacctcactaacaatggggggagaaagga

SEQ ID NO: 50875 - DNA, 920 bp, Homo Sapiens
gctagtggaaaagtttgggaaggagtgggcccatgccacaatcatccccaaggtcttggccatgtccggagaccccaactacctgcaccgcatgactacgctcttctgcatcaatgtgctgtctgaggtctgtgggcaggacatcaccaccaagcacatgctacccacggttctgcgcatggctggggacccggttgccaatgtccgcttcaatgtggccaagtctctgcagaagatagggcccatcctggacaacagcaccttgcagagtgaagtcaagcccatcctagagaagctgacccaggaccaggatgtggacgtcaaatactttgcccaggaggctctgactgttctgtctctcgcctgatgctggaagaggagcaaacactggcctctggtgtccaccctccaacccccacaagtccctctttggggagacactggggggcctttggctgtcactccctgtgcatggtctgaccccaggccccttcccccagcacggttcctcctctccccagcctgggaagatgtctcactgtccacctcccaacgggctaggggagcacggggttggacaggacagtgaccttgggaggaaggggctactccgccacgtcagggagagatgtgagcattccgggtcactggatctgctgctgtatgggaacccctcccccatttacttctccactcccgtctccccatcatggttttttgtgtgtcactgtggcgtttatttatcctttatttcccctttccagagactaggccgacgtacacacaaacataaaaaaaaaaaaggggggaaaatacccgggcacaaatgcccctttgaaggcccagaggaaaagagggcgcgcaagggggaaacggttgagccttggggtagaccccaacggaaagattgactggtaaaa

SEQ ID NO: 50876 - DNA, 1035 bp, Homo Sapiens
  misc_feature (775)..(775): n is a, c, g, or t
  misc_feature (987)..(987): n is a, c, g, or t
  misc_feature (1002)..(1002): n is a, c, g, or t
cggtccggaattctgcggatattgactggctgcgtgtttacagactctgggggaagacactgatgtcctcagactggttaactgtgacacggctcgccagaactctgcctgtctatttgtgacttacagatttgaaatgtaattgtcttttttcctccatcttctgtggaaatggatgtctttggaacttcattccgaggagataagctttaactttccaaaagggaattgccatgggtgtttttcttctgtggtgagtgaaacaatctgaggtctggttcttgctgaccttgttgccctgcaaacttcctttccacgtgtacgcgcacaccaacacgaaatgccatcactcctactgcggctgctatgaagcttactggttgtgatgtgttataatttagtctgtttttttgattgaatgcagtttaatgtttccagaaagccaaagtaattttcttttcagatatgcaaggctttggtgggtccaaaaaatgtctatcacaagccattttttccttttcctctctcgaaaagttaaaatatctatgtgttattcccaaaccctcttacctatgtatctgcctgtctgtccatcatcttccttcctccctatctctgtgtatctggatggcagccgctgcccaggggagtggctgtggggagggcaggtactgtctttgcctgtgggtccagctgagccatccctgctgggtgatgctgggcaagacccttggcccgtctgggccttggcttcctcacttgtgaaatgagcggnaagatgactctcagttccttccacctcttagacatggtgaggtaacagacatcaaaagcttttctgaaatcttcagaagaaatagttccattacagaaaactcttcaaaataaatagtagtggaaacttttaaaaactctcattggagtaagtctttttcaagatgatcctcccacatggaggcagcgttccctacttggtcatcacaccgncttgaagaacagtgnttttcttacgttggtgaaatcggggggaacaaa

SEQ ID NO: 50877 - DNA, 662 bp, Homo Sapiens
cgcgtccggattggtgtcattttcccatttgccaatgtagtctcacttaaaaaaaaaaaaaagaaaaagaaatggataatttcatctactgcctttacttggggttaatgtgattcttaaacaccttcatcatggaactctcagagtggggtccgttttggtttcctggtggtgggttttgaaagataagggaaagcacattttgagcatgtctgggtaccatggtgcggatgcttgggaaccagaactgtttcagaggaatctaaagtctgattttagttttcagagacacagcttgttgtaaaacatgagaagacatgatttctaggactcaagcagcaagccaggattctaggttggctgctgtgtcatctttgaagtcaagacaaagctgggctcgaccttcaagggtcctcgttttgataatacttcagaatagggaactcatgtgaatactactatgtagaaataaaacctagaccttgagcgaacatctgtatattggttgaaaacgatagtggtaaccattgatcccccttcatttgatgtttggaaaattccagtaattatcatttttgcaacgaatatggataccacatagtactttggtgttacctgcttttgaaaaataaagtctttggttcacccggtgaaaaaaaaaa

SEQ ID NO: 50878 - DNA, 773 bp, Homo Sapiens
aggtagcgaggcctgggtggcgttgcaatatttcagaagctttaactgaagtgtcaggttcctcgtgagaaacagcacacgttagaggctttgagagaaggcctagttctgtcatgagtagtcggcctcgtgtctgtcctcccatcttggaacaaccttatcaacaggccgcactgcagaaatgatgttttatgaaaaccaatgaggctgctgccactccagcaagggaaataatgcagtttcctgtcttatttaagaaaaagagaaggctctcttttctcccttgtcattgccgttcttttccttacacgcaaagattttttaactattgcagattttcatcccattctactgcttgattgaccatcaactccatcctatcgagatttatttaagaatgaagaacataattttctgctgatgccgtaccctcacccttttcagcaaagaatagtggagagtaggaaactgtactttatctcggcatcctcttgaatgatagtgcaagtttctccagttgggatgttgtctctgcccggttggacctcctccctttgttgaatgtggtgtgcagcctctcatctcacactgtgagtccagcggcgcagggtggtaccaggaaagaggatattctaggctttgcgtgctgctagctgggttcaggcttcacccactggaaagaaccaccatctgctctaaccatgtagacttattgcggcctggtttctctgttacaataaaattactgtagaccccaaaaaaaaaaaaaaaaa

SEQ ID NO: 50879 - DNA, 676 bp, Homo Sapiens
gtttgtgagtttttatcctgtttgaattttgatgtcgtccaggcgtcctgggatcagggtagacacgtggagtgctggtgctgagctgtttgagaagctctgtgtgggtgtttctgtggtcaggtaggctgggctgtgaacagcactgctccacatggtgtcggctcacagagccaccgcaactctgcccagcgggagtgacaccactgatgccacagaagcctttatcgttaggggcaaaagcagacatctctggtagcaggagctcagtgtggtgctcttcagccacgcagaaagctcacgtgcctgcagggccaggaaagggaaatgatcgtttcttttgtattaggaaaaacaagacttagacttcccgagttgtgcagagtgacgtctgtactttttatacttagaacatttggtcaagttttgtaaccaaaccttagggaattgagagggaaactttatggtacgtttaccttttttcctttttatatgaattattttgtacaaagttcagagagcggtacctttcctactgtcttttctttgactccatggaggaatttgtaacgatcggtgtgacctgaaagggtttgtgatacagcggtcactattttctcttaacacataggaaaaaagttcagacatcgctacaataaatgtgctttatttgatc

SEQ ID NO: 50880 - DNA, 580 bp, Homo Sapiens
cccaccagtgtggcgtgtgcggcaagtgctttggcaagagctctacgctgacgcgacacctgcagacgcactcgggggagaaacccttcaagtgcccggagtgcggcaagggcttcctggagagcgccacgctggtgcgccaccagcgcacacacacgggcgagaagccgtacgcatgtggcgactgtggacgctgcttcagcgagagttccacgctgctgcgccatcggcgcagccatcagggcgagcggccacatgcgtgcgccacttgcggcaagggtttcgggcagcgctccgacctggtggtgcaccagcgcatccacacgggcgagaagcccttcgcgtgccccgagtgcggccgccgcttcggcgaccgctcggacctcaccaagcaccggcgcacgcacacgggcgagaagccctaccgctgcgaactgtgcggcaagcggttcacgtgcgtgtccaatctcaacgtgcatcggcgcaaccatgccggccacaagccacacaactgccccgagtgcagcaaggccttcagcgtcagctccaagcttgcactgcaccgcaagacgcacctggg

SEQ ID NO: 50881 - DNA, 438 bp, Homo Sapiens
taagctatcgagcttcttgattgcatttggttgaccacgagtgaccctaaggcattgggggactgtccactgggagttggagtgagcacgtggtgctgcaacaggcattgttttacatactttgtctccagtattctgacaccaagtgtcaactgtggtactttctttgcctaggatatgaattcataattgttgcttttgttgatggttgataccctttccattgatttaaacctaacacattatttctattccacatgcccagtagacatatattccaaagccactggaccacttgagtacataagtgccactgtttaatgcaatatgtatattcaggtctgtaaagctaacagtgtgacttggagtgcttcctgcagatgattctgacttgagtatttacatggaccatggtgatatccaaaaaaaaaaaaaaag

SEQ ID NO: 50882 - DNA, 673 bp, Homo Sapiens
ttttttttttttttttttagtattttaaaagatttaattttctgaatgaggcatttgaattgtaccagcaatggacttttaaaaaattggatgtaaaaccattcagggtgatttttcttgtcagtggacagtgacgaacagagatttgaaatcccttacctccaataataagccattcagcctaaattcatttttatgaataaatctcttctttctcatggtaaatgtggcttgtgccactcaaacactagtgaaagggtatgtacaaccgcaacatcaggccaggacaccatttatttaaccaagtaatggaggagagtgaaacattttccaaggccttatttctttttcagaatgctttaagtgttgattatatgtgctgggtctctagagaagtttttatttgttacaatactgctgctttgagcaattttgtttctcttcattgtctgttagggaaatcaccagctttggcatcttaacaacaaacagtggatgggtaatttttatttctgatacgcatctttagagtcaaatatatcttttccctgtactcctcatgtacaaccaaagaacatacattatgaaaattgtattataatatctggaaacacaacattttcctctggcaggtgacttttgtacgaaaaaaaaaaaaaacctcgtgccgaat

SEQ ID NO: 50883 - DNA, 800 bp, Homo Sapiens
caagatggcggcgcggacagcgttcggtgctgtgtgccggcgcctctggcagggattggggaatttttctgtaaacacttctaagggcaatacagccaaaaatggtggcttgcttctcagtaccaatatgaagtgggtacagttttcaaacctacacgttgatgttccaaaggatttgaccaaacctgtggtaacaatctctgatgaaccagacatattatataagcgcctctcggttttggtgaaaggtcacgataaggctgtattggacagttatgaatattttgctgtgcttgctgctaaagaacttggtatctctattaaagtacatgaacctccaaggaaaatagagcgatttactcttctccaatcagtgcatatttacaagaagcacagagttcagtatgaaatgagaacactttacagatgtttagagttagaacatctaactggaagcacagcagatgtctacttggaatatattcagcgaaacttacctgaaggggttgccatggaagtaacaaagacacaattagaacagttaccagaacacatcaaggagccaatctgggaaacactatcagaagaaaaagaagaaagcaagtcataaagcctcagggaggccatttttgcctaaatttgaaatgagggtgggccagatgagtatgtttaagtggagagtgcttccagctgagatgatttgagtctgccctaactgctccattgagttctcgtgccctcatcagctgagggcagggaatggaactttaatggaagaaccacttttatctattcttttt

SEQ ID NO: 50884 - DNA, 851 bp, Homo Sapiens
gctactggaagtggaacttgagatagggcctaatttgttatacatattagccaacatgttggcttagtaagtctaatgaagcttccataggagtattgaaaggcagttttaccaggcctcaagctagacagatttggcaacctctgtatttgggttacagtcaacctatttggatacttggcaaaagattcttgctgtcagcatataaaatgtgcttgtcatttgtatcaattgacctttccccaaatcatgcagtattgagttatgacttgttaaatctattcccatgccagaatcttatcaatacataagaaatttaggaagattaggtgccaaaatacccagcacaatacttgtatatttttagtaccatacagaagtaaaatcccaggaactatgaacactagaccttatgtggtttattccttcaatcatttcaaacattgaaagtagggcctacatggttatttgcctgctcactttatgtttacatctcccacattcataccaatatacgtcaggtttgcttaaccattgatttttttttttttttaccaagtcttacagtgattattttacgtgtttccatgtatctcactttgtgctgtattaaaaaaacctccattttgaaaatctacgttgtacagaagcacatgtctttaatgtcttcagacaaaaaagccttacattaatttaatgtttgcactctgaggtgcaacttaacagggagggcctgagaaaagaatgggaggggggctattaattatttttagcaaaatgttgccctttgtcttgtgcaaacatgtaaaaatatgcctcttttatcttaataaaaatatttttttttaaaa

SEQ ID NO: 50885 - DNA, 585 bp, Homo Sapiens
cctaacagtgcctcacaaggcttgggggctggactccctctactccctctggccatagcccctcctggagatggggtcaaggcagcaggactgatcaagtgactactggttagccagaggagctcagctgaagccctggaaaccctcaggtctgagataggagttctctaggaacctggaatgagttcctgtctcctgaatgatggtctgggtgccacctgtttttaaactcttaaacctggaactccttaaatggggtaggtgggtgagattatcaaagctgaagctggctttgctgagaagctccctacctccctgcccttctcctccttcctgctggaatgaactaaagcagatgtcaagcaggggctggtgggggtgcctactcccttttccactctatctttagatttcaaaccttaggcttacagcccctcaatatctctctgctaacaccagtgtctctttctagttaggcctctaatcttctgtttctgtttaccagcttcccagcaactttccttttttaaaatattaaaaatttaattcaggttctcttaaaaaaaaaaaaaaaaaaaaataggt

SEQ ID NO: 50886 - DNA, 650 bp, Homo Sapiens
ggggccgaggcgcgaacagacggacgcaccggcgagcgccgaggggacaggccgagcgcggggcgccggaggcaggtgtgggacaggcactggcctcagaccggggccacactgaggtctgcccttctcccgctggccgccacccaagacaccatgagccagtccggggccgtgagctgctgcccgggtgccaccaatggcagcctgggccggtccgacggtgtggccaagatgagccccaaggacctgtttgagcagaggaagaagtattccaactccaacgtcatcatgcacgagacctcgcagtaccacgtccagcacctggccacattcatcatggacaagagcgaagccatcacgtctgtggacgacgccatccggaagctggtgcagctgagctccaaggagaagatctggacccaggagatgctgctgcaggtgaacgaccagtcgttgcggctgctggacatcgagtcacaggaggagctggaagacttcccgctgcccacggtgcagcgcagccagacggtcctcaaccagctgcgctacccgtctgtgctgctgctcgtgtgccaggactcggagcagagcaagccggatgtccacttcttccactgcgatgaggtggaggcagagctggtgcacgagga

SEQ ID NO: 50887 - DNA, 874 bp, Homo Sapiens
  misc_feature (779)..(779): n is a, c, g, or t
aggcagaggaatgatggagaatctagtgtagcagcctccaggcaggattcagcacaacactggggagtcacccttccctcgggcctctgcctaccaacaactgggcttatcactggggaaaacacaaaaaattacacaacccagcaacaacaaaagaactagtcctcttagaatttcttgcgctttgatttttttagggcttgtgccctgtttcacttatagggtctagaatgcttgtgttgagtaaaaaggagatgcccaatattcaaagctgctaaatgttctctttgccataaagactccgtgtaactgtgtgaacacttgggatttttctcctctgtcccgaggtcgtcgtctgctttcttttttgggtttctttctagaagattgagaagtgcatatgacaggctgagagcacctccccaaacacacaagctctcagccacaggcagcttctccacagccccagcttcgcacaggctcctggagggctgcctgggggaggcagacatgggagtgccaaggtggccagatggttccaggactacaatgtctttatttttaactgtttgccactgctgccctcacccctgcccggctctggagtaccgtctgccccagacaagtgggagtgaaatgggggtggggggaagcactgattcccagttagggggtgcctaactgagcagtagggatagaaggtgtgaacctgggagtgcttttataaattattttccttgtagattttatttttaatttatctctgtgacctgccaggnagaggggagagagagagagatgctgttgagcacatggacaaataaaataaaatggatggattcaaaaaaaaaaaaaaaaaaactcgagggcatct

SEQ ID NO: 50888 - DNA, 716 bp, Homo Sapiens
agcggccccactggctgctctgaaaagccatctttgcattgttcctcatccgcctccttgctcgccgcagccgcctccgccgcgcgcctcctccgccgccgcggactccggcagctttatcgccagagtccctgaactctcgctttctttttaatcccctgcatcggatcaccggcgtgccccaccatgtcagacgcagccgtagacaccagctccgaaatcaccaccaaggacttaaaggagaagaaggaagttgtggaagaggcagaaaatggaagagacgcccctgctaacgggaatgctaatgaggaaaatggggagcaggaggctgacaatgaggtagacgaagaacgaggaagaacggtggggaggaacgaggacggaggaacgaacgaacggtgactggtgaggaacgaggatggacgatgaccgatgacggaagctgagtcagctacgggcaagcgggcagctgaagatgatgaggatgacgatgtcgataccaagaagcagaagaccgacgaggatgactagacagcaaaaaaggaaaagttaaactaaaaaaaaaaaaggccgccgtgacctattcaccctccaattcccgtctcagaatctaaacgtggtcaccttcgagtacgagaggcccgcccgcccaccgtgggcagttgccacccgcagatgacacgcgctctccaccagccaagccaaaccatgagaat

SEQ ID NO: 50889 - DNA, 836 bp, Homo Sapiens
  misc_feature (715)..(715): n is a, c, g, or t
accatcttgatgccagtactggattccagcattcagcaggtgcagatctcggctttacacaatttgtctttacctagggttcagtcagtaatttctgctttttagcagggccagtgcagggtcagttaatgctatagttactgtatagcaaacagtatccttttttctccttcccctagcctattgggctttgcagatatctggagtgttttaaagtcaattattttaagcagtttgaggggatgtgtaggagtggagcatgaaacagtttataaggctggggctgtattatcagcacagcaaattaaagaatgaaagaagtacttctttttacatttcagctccagcagccagctatttaaaaaatatttttaaatatcttccccaaagtttaagatgtgggaccatctacttgtaagaaacagtggcttatttcttcatttctcagtaatcattgtaaaccttttttttttttcttctccactctaacaaaagtaaaagaacaaaacttttgctgaggtcttggactccactacttgttagttatgttggcctggacagatggcaggtctgtcggcagttcctcagtctgtaaaatgaagattatcattcttgcctctccctttgtcacagtgttgtcgtgaagatcagatatgtatgaatgcagtcaaataaactaaaaactaggaaagtgttaactatcgttgccccccgnaatttgaggtagcaaaaaaaaaaaagaatgttctggtacatgaacagactgagaaggcctttcgacatccctgaagctagtctcctgtctagactaaaatatccttgaaaagatagtagca

SEQ ID NO: 50890 - DNA, 815 bp, Homo Sapiens
agattgataggaaagaactcgtaatggagtttgagtaaagaaaatgactgatgtactaaacccagtaaaaattgttgaaaatgttaaaggtcagcatgttctaattgggaatctagatatagcttagatttcctattggcttagagtatttgctataacaaatgaagtgcaatgacaattatatattcctactcggtcatactggactggcttcgttctcttaatatactcagtaatgactcaagcctctggctattaacataccctagttgccgttttttaattgccatgagccaaatacttcttggtatacaattgatccatttattttaatggctgccttttcattttcatcttttcttgctgctacccatctatgtatgtagtcattggggggaaaatgtagccacattttttatgggaagactttgtgttaaaagtgaacattttgaaggtttttaactggtgaaactagcctggaataatgccaccagagactgagtggaaatcgccccttttgaaggtgccattcttatgagccaaaagtttgtcatttaaaagttcattttgagggaataacatgtaatataatttgaaataaaggtatagtaaccttaaaaagaacattataactgattgttgtgaatggggtgaatttgttaaaatgagtaactttgataaagtttttcatgcacaggcaaaatgtattcactagatttctacgtagtgatctgcttttactttgtaatttgtagttctcaaaagacttttttttaaaaaaataagtccatacttacaaaaaaaaaaaaaaaaaa

SEQ ID NO: 50891 - DNA, 898 bp, Homo Sapiens
  misc_feature (6)..(6): n is a, c, g, or t
  misc_feature (816)..(816): n is a, c, g, or t
  misc_feature (820)..(821): n is a, c, g, or t
  misc_feature (824)..(825): n is a, c, g, or t
  misc_feature (835)..(835): n is a, c, g, or t
gcggcngtttgccacccattgcggctcgcttcagatgctctgatgcagagggcacgcccatagtccctctgcagagcctcgcactggggccagggcaggcaccagccccaggcggccagtcggccacggcctgtcctcttcctcgtagcgtctgctcctcactttgtgttgatggtgacttaggagaatgttccgattttccatgatctaagcaggccacgtttaaaataacatcaaggcaagcgtacgtgtcaccctctgtactgacatctcttcccctgaaatgcttttcagtttgacagcccgtttcctagacaagtgcacctggggtttcaggaactttgtgttttttcggagggggttggtggggaggtcgggatgcctgggatcccttcctggagaggcaggctgtctctggaaaaagcctccattgcccacccgccaggcggaaagtcaccctgttcccagcgccgtttcagcatttaattttaagggagctaaggaagcgcggcgcgccccctggtggtggtaagccgccaacgcacctgggggctgcaaccccaccggacgggtggtccggagggaggctggagcggggaggcgaggagggggctgtgagtcctcagaggccctgggccaccacatttctggcagcgtttcccagacacccctctgctaggccatccctggatagcaagtgaattaacttaagggcactgtgatgggaagccttgcccccctctttttttttttttttaatatctgcggaataaacccaatggttaatttttgaatgaataaaaggcttttgttganatannaannaataaccaanataaattacaaaacataaaaataaaaaccaaaaatttaaaaaaggggcggcccgtctaaaaat

SEQ ID NO: 50892 - DNA, 624 bp, Homo Sapiens
gtgtggcccgacgtgaagtgagagaagatgcaagaaggagatggacaaataaggaaaatgtaaagcagctaaaggatggaatatcgaaagacgtcttaaagaaaatgcaaagaagaaatgatgacaaatccatatctgatgcacgggctcgtttccttgagagaaagcagcagaggacccaggaccacagtgacacacgaaaggaaacaggctaaggtggtgaaccctccaattcaggaagtgggaaaaggagccaggaaatgtgcttctactttgccagttatttcagacagcactaccaagaggaggtggtcagcacttgttattggcctatgaactaaaagcaaatcaaagctcataaatcaaagctcatcagttcccataaatgcagttgtcaaagaaaagatttggttgccatagtcataagcaatgatacatgaaaccaatgaaagacagtacatgtaataatattttcctcagtacaattttgctggccttaactggtatcaaacgctgtcattgagatgttttcaaagaacattgagttgtatttaatcagcgtgtactccatttgcattgaagcattaaaaattatttttcttaaaatctctttaaggccttctt

SEQ ID NO: 50893 - DNA, 693 bp, Homo Sapiens
cagactgacaccagctctttcttccacctggagctccactccctctccactggccgtcttcccagagttgtgacagccaatcggatgctgaagcagatgcttttcaggtatcaaggttacattggtgcagccctagttttagggggagtagatgttactggacctcacctctacagcatctatcctcatggatcaactgataagttgccttatgtcaccatgggttctggctccttggcagcaatggctgtatttgaagataagtttaggccagacatggaggaggaggaagccaagaatctggtgagcgaagccatcgcagctggcatcttcaacgacctgggctccggaagcaacattgacctctgcgtcatcagcaagaacaagctggattttctccgcccatacacagtgcccaacaagaaggggaccaggcttggccggtacaggtgtgagaaagggactactgcagtcctcactgagaaaatcactcctctggagattgaggtgctggaagaaacagtccaaacaatggacacttcctgaatggcatcagtgggtggctggccgcggttctggaaggtggtgagcattgaggcccagtaagacactcatgtggctagtgtttgccgaatgaaactcaactcaataaaaaacaaaaaccaaattgggcaaaaaaaaaaaaaaaaaaaa

SEQ ID NO: 50894 - DNA, 596 bp, Homo Sapiens
caaaaacattaaattcacatgcagtctcagagactatttagacaaagttcaagttaggagcttttaggatgtgggagtaaaactttaatgggaggggagggctggctgctggaagaaggaagaagccagactggttagacagtactcttaactcctagcccagcctagcgtgccctgcccctctggccactgctgcagacacctgccttaacacacacacctctaggactccacagttttgccttaaaggaccttcccaagtctccctttccctgtctggcttctcccttaagaagagagagatacttgtagaattgggtggggggaatgagcatgaactgtccttccatttgggatatgttacattagagtgagagagagaataaggagcctttcttatggaagaaatgggagaagagagacagggttcttttcagcagagtctagtagtttctctgtaaggcaaaataatctaaaaagactaacctgcccacccactccttatattgctgtgagattgcccctatcttgtgctcttctgtctgcagtgtgcacggccttgttctaacccggaataaaggtgattgattgtattg

SEQ ID NO: 50895 - DNA, 783 bp, Homo Sapiens
agcggggttatacaacttggcttgtttacctccacatgctgatgatgactattttttttttttgagttcagtgtggagacttgaaacttgaatgtcccttccaacttttatattaaaaataaaaagacaagaaaattgaagatcatttttcacctgtacaaggaatactaatggatcgtcttaaaattggtctaggaaaaaaccttggtgtgtgttatggacaattaactgttaaagttattgtaagttatctgtatttagcagagtatttccaacttgagtgatctgagctgaatttgaagactattaactaagttatgttgggaagttttaacttcaatgaagtaattatttgctgtgaaagaaacaaactttgaattactaaacaaagatggtgcaatatcttggttttttttttatgaggctcctgagaatcaacccaactgaagcatttcaattcacttgaattgagaaccgtgtttagtatcaaaagagcccaagaagacactggtgtgaaaggtacaatctcagaggttggccaattaccgtggcacacttcctggtccctttgtccaatgtagcattttggacagctcacagctggttggacaacgcctttttaacaactgctgccgccatttctggcacacaaaacaaacacacaaacacaaacgagcaccacccacccacaacacaatacacacaacagcaatacaccacacaaccatcaaaaaacacacacacctatccatcaccctccccacatagaccccacatacccaa

SEQ ID NO: 50896 - DNA, 568 bp, Homo Sapiens
tcttaagatctggttacggtaactaaaaaagcctgtctgccaaatccagtggaaacaagtgcatagatgtgaattggtttttaggggccccacttcccaattcattaggtatgactgtggaaatacagacaaggatcttagttgatattttgggcttggggcagtgagggcttaggacaccccaagtggtttgggaaaggaggaggggagtggtgggtttatagggggaggaggaggcaggtggtctaagtgctgactggctacgtagttcgggcaaatcctccaaaagggaaagggaggatttgcttagaaggatggcgctcccagtgactactttttgacttctgtttgtcttacgcttctctcagggaaaaacatgcagtcctctagtgtttcatgtacattctgtggggggtgaacaccttggttctggttaaacagctgtacttttgatagctgtgccaggaagggttaggaccaactacaaattaatgttggttgtcaaatgtagtgtgtttccctaactttctgtttttcctgagaaaaaaaaataaatcttttattcaaa

SEQ ID NO: 50897 - DNA, 651 bp, Homo Sapiens
ctgtgtccttgagtagcccaagtgatgcctctgctgcttcctcttccacctgtgcctctcctcccagccttacaagtgctaacaagaaaaactttgcaccgggagagactcctgcagccatagcaaactccagtggccagccctaccagccacttcgggaggtattgccagggaacagacgaggaggacagggctataggccacaaggccaaaagtccaatgaccccatgaaccaagggcggcatgacagtatgggtcgttacagaaacagctcgtggtattcatctggttccaggtatcagagtgctccatctcaggcaccaggaaacaccattgaaagaggccagactcactctgcagggaccaatggaactggagtcagcatggagcccagccctcccacgccttcattcaaaaaggggctcccccagcgcaaacccaggacctctcagactgaagccgtgaactcttgagagaaaatccagttggcctctctcctctatccacacaattcaacttgataactggactttaggaaacttacagttagatgtaataacaaaaagaagtttatgcgtatcactttttgtgccattctaagtatttttgggttcttggctccttatttcctctttaccatttttggagggg

SEQ ID NO: 50898 - DNA, 572 bp, Homo Sapiens
caagtgtcatatttaaaactaaggttacttaaaacagaatccaggaatatcaaggctctgtggcttggaattttagaggataggactaataaaaggacttttgcaaagaaggcttttttccacgttcactttgttttgtgttctttgaaagtaactgatacttttcgggtagttaattcagcagtccataaatatgatccagtaacttgcttatattttattgaagtctcgacagctcttcagaagtaaatttagaacgatgctgtcagttcatatttatagatattagtgttttagcagataaaacaaaatcaacaaaaattaagttcattttgtgattaaacctgcaaccatttttccattactttttttctatagttaatggttattgccatgatttcttctgtttggttctactaagctagaaagccagggtgaagttaatgataattcccattattttatttctgtaccatgagattgctgttgatgactgaaataccaggtgcaaaaattaatgatttgatttttgtacagtttcaatgagtattttttacttattaaaaataaat

SEQ ID NO: 50899 - DNA, 583 bp, Homo Sapiens
agctgcagcgggcgtgagttgggggaggacgggttgccgactcgcctacctagcggtctcttgattgtcgatattttgttggcataggtttatgtagagacgtatacatatatatagacacactgtctttaaatctaggcctgtatccggtgtccgaggcgaactcagtaagatgatgttaagaggaaacctgaagcaagtgcgcattgagaaaaacccggcccgccttcgcgccctggagtccgcggtgggcgagagcgagccggcggccgcggcagccatggcgctcgctcttgccggggagccggcaccgcccgcgcccgcgcctccagaggaccacccggacgaggagatggggttcactatcgacatcaagagtttcctcaagccgggcgagaagacgtacacgcagcgctgccgcctcttcgtgggaaatctgcccaccgacatcacggaggaggacttcaagaggctcttcgaacgctatggcgagcccagcgaagtcttcatcaaccgggaccgtggcttcggcttcatccgcttggaatccagaaccctggctgaaattgcaaaagcagagctg

SEQ ID NO: 50900 - DNA, 701 bp, Homo Sapiens
atgtaaatttggaactgttaggagattgctccgtggttttgatcttttcaaaccattttctttttgaaaaaaggcattagttgtagtcatggacattaaatgggccatatatgcttatcaatcaaaaaagtgttccttttttggaactgcccattttctggatcttccctctcaatggataggggatgaaaaccttggttgccttttatttgtttcctcttctaaaatttctcacctgaatgtagtcctgggagagtcccgatcacgtctctcctgacatgttcactgaaatcggagacaagaagttacatggatgatgggatcttatagggtcacacaaagacaatttggcagcttatcttaatttcctgcagtgagacaacacatgtggaactgggaaggacagctgttgttacgagcagtttttcctggtcatggttgtaaagctctgtaacccacattgtaaagccgtgaatgtttttagtcttgttgacgagtttttagagactgctggacctctgagggctttgagagtgcagctgtgatgatgtttcactattacttcagtgtgaatgtagaaccaaggactcatcttcattttatacctaaaagtgccttgtcaagaaatttttgcatgttttaaaagataaatatttttgtacacagagttcaaggggaaatgcacctttaaaaatcccaag

SEQ ID NO: 50901 - DNA, 867 bp, Homo Sapiens
  misc_feature (835)..(835): n is a, c, g, or t
cggaaaaatcaaacgtattagaggaatggcgtactctgtacgtgtgtcacctcagatggcgaaccggattgtggattctgcaaggagcatcctcaacaagttcatacctgatatctatatttacacagatcacatgaaaggagtcaactctgggaagtctccgggctttgggttgtcactggttgctgagaccaccagtggcaccttcctcagtgctgaactggcctccaacccccagggccagggagcagcagtacttccagaggaccttggcaggaactgtgcccggctgctgctggaggaaatctacaggggtggatgcgtagactcgaccaaccaaagcctggcgctactactcatgacccttggacagcaggatgtttccaaagtcctgctaggccctctctctccctacacgatagaatttttgcggcatttgaagagctttttccagattatgtttaaaattgaaaccaagccatgtggtgaagaactcaagggtggggataaagtgctgatgacctgtgttggcattggtttctccaaccttagcaagaccctcaagtgataaccatcacaagataaggccccaatgcctacagacaaagcagaagctgccacggacaccaatgggaccaagtccaaatggattaatccaggacagaatagccacttgcttaattttctgtgaagaaatatcaatatacaaataaaagacatccctgtagcatatggtttccagctgtttctccagtggcattgccattgcccaggaggggcccagtcaccatgagagctcccttgccttactgggaggaagaatgtgccttcaggncacagtcgtgctgctagacagtctcatagctg

SEQ ID NO: 50902 - DNA, 757 bp, Homo Sapiens
  misc_feature (14)..(14): n is a, c, g, or t
  misc_feature (21)..(21): n is a, c, g, or t
  misc_feature (36)..(36): n is a, c, g, or t
tcctccgactcagnacttggngcccgtggggctggnctgaggaggaggctgcacagcgggagagcagctggtccagaccagccctgcagcccccactcagccggcagccagatggccccgcaaggcctccagggatggcccctagccacaggccctggctgaggtctctgggtcggtcagtgacatgtaggtaggaagcactgaaaatagtgttcccagagcactttgcaactccctgggtaagagggacgacacctctggtttttcaataccaattacatggaacttttctgtaatgggtacaatgaagaagtttctaaaaacacacacaaagcacattgggccaactatttagtaagcccggatagacttattgccaaaaacaaaaaatagctttcaaaagaaatttaagttctatgagaaattccttagtcatggtgttgcgtaaatcatattttagctgcacggcattaccccacacagggtggcagaacttgaagggttactgacgtgtaaatgctggtatttgatttcctgtgtgtgttgccctggcattaagggcattttacccttgcagttttactaaaacactgaaaaatattccaagcttcatattaaccctacctgtcaacgtaacgatttcatgaacgttattatattgtcgaattcctactgacaacattataactgtatgggagcttaactttataaggaaatgtattttgacactggtatcttattaaagtattctgatcct

SEQ ID NO: 50903 - DNA, 699 bp, Homo Sapiens
  misc_feature (638)..(638): n is a, c, g, or t
  misc_feature (647)..(647): n is a, c, g, or t
  misc_feature (650)..(650): n is a, c, g, or t
  misc_feature (663)..(663): n is a, c, g, or t
  misc_feature (668)..(668): n is a, c, g, or t
  misc_feature (685)..(685): n is a, c, g, or t
  misc_feature (691)..(691): n is a, c, g, or t
ctaggtgtaagcattctctctgaattttaatttcctctcattaaaataggaacaaaatttgctatcctttagattaggagctgaagattcatttccctgggaatgtttcccatttagcttcaagtttcagctcaaacatcaccttctttctgactcctttcattcattcctccaggcagtaaggggctaccatagtactttgtttatgcctgtattatatgacatcactgtagttgcttgactgtttctcctactgttctgtaaacttattaatgggtgagaatctaattttactcatcttgatggcttcatgatccagcacagtgcctcacacaaagaactattgggtgggtggatggatggatggaggaatggagacagttggcttaaccagatcctatatacagattattactggctccaaaggatgagcagataagaccataagaattggatcaatgtaaatcctcacctgccctttgaagagccaataagggcatctttgtctttaaatacagcaaatgttattcagattttgtacttgtctatctgtttacctcagtgtagatgatatgaggatggtataactatgtaaattgtttttgaaaataatttgtttccccacaacttttgaaggntttatttgntgntgttattactagntcagncccaaacttaccctttncttttnagagagct

SEQ ID NO: 50904 - DNA, 658 bp, Homo Sapiens
gtccgcggcaatgtattccaagatgcagtcttcaatcaaacagttacagttattgaaagagaggatgggttagatggagaaacaatctttatgtatatgttccttgctggtcttgggcttctggttattgttggccttcatcaactcctagaatctagaaagcgtaagagacccatacagaaagtagaaatgggtacatcaagtcagaatgatgttgacatgagttggattcctcaggaaacattgaatcaaatcaataaagcttcaccaagaaggttgcccaggaaacgggcacagaagagatcagtgggatctgatgagtaaatgttcctttgtgcaacaattcggtctttacttaacctgccctaatatttttcggcctgatgggaattagtgcagagaagccatgtcaccatagaaggcaactcctacttgtgtgtggactgagcaatcagagtctgtggcgataatattgctgaaaatgcactgcattcatttttctaaagtaacaaatttggtttttttttaaaccattaaaatctatgtgtgtgcgtgtgtatgtatgtgagcagttggtcttaccagaatcattgttgaactacctgaaacaagtctttagaatactaaatataatgctggtgtctcttcaaaaaaaaaa

SEQ ID NO: 50905 - DNA, 877 bp, Homo Sapiens
  misc_feature (311)..(311): n is a, c, g, or t
gacctcatccacgccatgccagggaagccgtggcggacggagcagacggaggacctgaagcgagtgcttagggcagtggacagggccatcccactggtccttgtcagcggcaaccatgacattggcaacacccccacggccgagaccgtcgaggagttctgccggacttggggagatgactacttcagcttctgggtcgggggcgtcctgttcctggtcctcaactcccagttctacgagaacccctccaaatgccccagcctgaagcaggctcaggaccagtggctggacgagcagctgagcatcgcganggcagcggcactgccagcatgccatcgtcttccagcacatcccgctgttcctggagagcatcgacgaggacgacgactactacttcaacctcagcaagtccactcggaagaagttggcagacaagttcatccacgcaggtgtcaaagtcgtgttctcaggccactaccacaggaatgccgggggtacctaccagaacctcgacatggtggtgtcatctgccattggatgccagctgggcagagacccccacgggctccgagtcgtggtggtcaccgccgagaaaattgttcaccgatactacagtctagatgagctgagtgagaaaggaatagaagacgatctcatggatttgatcaagaaaaaatgacgctccttcccgttcccgttcacttttcacttgcactatttttttattttgccagaaacagcagctgcacacaacctcttgctgaaatataaaaatagcccaggcaggtttgtgaatttatgtccttttgcataaatcagagagctggggccctgtcctgaattatattcaaaatagaactgcatttctttwaaatgg

SEQ ID NO: 50906 - DNA, 796 bp, Homo Sapiens
  misc_feature (741)..(741): n is a, c, g, or t
ggaacattttgggggttgtgttggatgggatgatctgttgcagagggagaggcagggaaccctgctccttcgggccccaggttgatcctgtgactgaggctccccctcatgtagcctccccaggcccagggccctgaggcctgctagaatcactgccgctgtgctttcgtggaaatgacagttccttgttttttttgtttctgtttttgttttacattagtcattggaccacagccattcaggaactaccccctgccccacaaagaaatgaacagttgtagggagacccagcagcacctttcctccacacaccttcattttgaagttcgggtttttgtgttaagttaatctgtacattctgtttgccattgttacttgtactatacatctgtatatagtgtacggcaaaagagtattaatccactatctctagtgcttgactttaaatcagtacagtacctgtacctgcacggtcacccgctccgtgtgtcgccctatattgagggctcaagctttcccttgttttttgaaaggggtttatgtataaatatattttatgcctttttattacaagtcttgtactcaatgacttttgtcatgacattttgttctacttatactgtaaattatggctttattaaagagttcattttaaggaaaaatactttgggaacataattattggaaattaaagagaaggacccctttaattaaaaattctataattttttcccacctcgnggcggcgaacaacaaaaaagcccagtctcccgttacccgtaccccacactaccgt

SEQ ID NO: 50907 - DNA, 577 bp, Homo Sapiens
gagttttggatgcagtgctcgctgttgctgaataggcgatcacaacgtgcattgtgcttctttctttgggaatatttgaatcttgtctcaatgctcataacggatcagaaatacagattttgatagcaaagcgacgttagtcgtgagctcttgtgaggaaagtcattggctttatcctctttagagttagactgttggggtgggtataaaagatggggtctgtaaaatctttctttcttagaaatttatttcctagttctgtagaaatggttgtattagatgttctctatcatttaataatatacttgtggactaaaagatataagtgctgtataaaatcagccaattatgttaaactagcatatctgcctttattgtgtttgtcattagcctgagtagaaaggcctttaaaatttttttagaaagcatttgaatgcattttgtttggtattgtatttattcaataaagtatttaattagtgctaagtgtgaactggaccctgttgctaagccccagcaagcaatcctaggtagggtttaatccccagtaaaattgccatattgcacatgtcttaat

SEQ ID NO: 50908 - DNA, 601 bp, Homo Sapiens
gtgtggtctgtcatcaaaagtattcttaggaaagaggcccttggggttctaccatggactctcaagcactttacttcgagaagtaccaggctatttcttcttcttcggtggctatgaactgagccggtccttttttgcatcagggagatcaaaagatgaattaggcactgtacctttgatgttaagtggtggagttggtgggatttgcctctggcttgcggtatacccagtggattgtatcaaatccagaattcaagttctttccatgtctggaaaacaggcaggatttatcagaacctttttaaatgttgtgaaaaatgaaggaataacggccttatattctggactgaaacctactatgattcgagcattccctgccaatggagcactctttttggcctacgaatatagcaggaagttgatgatgaaccagttggaagcatactgaagtgtcttggtgggcctgagccaagcacaggtgtttgaggactacagttcatctcagggtttcttggagtacaacaccagtgtgaagttattctgatttcttgggaattttgctttttgtcttcccttctacgctacatcttaaactttatgg

SEQ ID NO: 50909 - DNA, 912 bp, Homo Sapiens
  misc_feature (689)..(689): n is a, c, g, or t
cagagtccacaaagccttgcaggtgaggtgaccacgcccacgtcacctggtcaggtgccatcgtcgtgagcctctggtgggccaggtgggacacagcacaccccaggggaggggatagaaacgctcattgaccaaaaaggagcagctgtgacctccacagctgtgtctgtcatgcttgcttcatctaatttctagttagtagctattaatatagcaaataataaatgcagtaataacagtataaagtcagaggaatgtatactgccttggccccagcgtacgaggaagcgtataaaacaccatatcacagattgtctgtcagtaatctgctgttcagccaagagagttcaaagggagcagtttctgcatgtagggaagttggaagacacaaaccccacctcccctgggagcttgtaacaaagcagacagggatgcaaaaataaatgatgtcagcctgcagccaaactccagcatcccacaccgcagctgacccactgctcatcgcgagggcctgccaggagctggcctcccgcactacttgtgagtaaagtgaatatcaaataccaatcttagagtacaactgtaccagcagtaagtatatctaggacttggtactgacaaaaattaactaattctgaaaagagcacacacaacacaaggggggggagctcgcgatctgggggatgagncgtgcacgggggcgccggggccctggttgcctggatggggaaccccgggggtcccgcgaaggtttcggaggggatccgggccggttccgcgcttgtaggacgggcaggccggagacctcggggaggccagtatagggtgccccccaattggcgctgcgacaagaacaccgggaaaattctccaagaaaaaattccgcggccgagtggatagaaacggcatatg

SEQ ID NO: 50910 - DNA, 570 bp, Homo Sapiens
acggaggtttcccccagagctgatgggcactggggatgcaggctcccgccccgcccctccctttttcctggctctggagccttgggtccctgagaagagcttccttggactggggtgctctgctgctctgggggtttggcccagaaggaacccctacccagccctgtccacccaccccagcgttcctgggcccccctctgggagcttcctcttggtcccaggagctgcggtggtgtctgccccctgcactgggctctgtgccctgtgggtgttcaggagactggactgtctctgctcctcatgcaaaccttgtgggggaagcaatgaccaggagcagcacctggcccctccctgaggcctgtgagtgtctcggatccgccctggagaagtgagtggctgagacccgggtggggccctcctacccttggctctgggggcttcccttctgggtcttgtccgggatatggccttcctgaaggtcttacctcccccagccgccctgcacttgaccaccaaagcaatctctaagcttataaaggagaaacatgtatatatggggttttttggagt

SEQ ID NO: 50911 - DNA, 635 bp, Homo Sapiens
cgcgtccgtgagaatcactcttgtcaagtttgactttagtatcaagtatattaaagaaatggatgccacttgctttcttggtgtaaagatttctctagaagccctttgccattggagtgagtcccttttcttctctcaccacacagtggcttgggctgagtggcgctggaggctgagaattcccccttctgtgaagcttggtacacaaggctcctagagaacatgtttctttctcatcctaggcaggctttggttactaaaccagctgaagcccagtttcccaagtcgtattgctcttactaacactatccctatttctcatccttcccgccatcgacaaagccgggcatcccagccgctgaggtgggtataggtgttgtagctgaggcagatgcggccgatgctgctgggttccctgtcccccctgacatggaagacgattacgaacctgagctgctgttaatgccatccaatcagccggtcaaccagcccattctggccgcggctcagtccttgcatcgggaagctaccaagtggtctagtaaggtactgataagcacccccagttggggggctgctccatatgcatccggccatgtgcagccttgacacattgcatcactcatgatctgtgc

SEQ ID NO: 50912 - DNA, 861 bp, Homo Sapiens
tggcagggtcaccctggcatgggctctgggttacctgggcttgtatgtgttctatgtggtcactgtgattctctgcacctggatctaccaacggcaacggagaggatctctgttctgccccatgccagttactccagagatcctctcagactccgaggaggaccgggtatcttctaataccaacagctatgactacggtgatgagtaccggccgctgttcttctaccaggagaccacggctcaratcctggtccgggccctcaatcccctggattacatgaagtggagaaggaaatcagcatactggaaagccctcaaggtgttcaagctgcctgtggagttcctgctgctcctcamagtccccgtcgtggacccggacaaggatgaccagaactggaaacggcccctcaactgtctgcatctggttatcagccccctggttgtggtcctgaccctgcagtcggggacctatggtgtctatgagataggcggcctcgttcccgtctgggtcgtggtggtgatcgcaggcacagccttggcttcagtgaccttttttgccamatctgacagccagccccccaggcttcactggctctttgctttcctgggctttctgaccagcgccctgtggatcaacgcggccgccacagaggtggtgaacatcttgcggtccctgggtgtggtcttccggctgagcaacactgtgctggggctcacgctgctggcctgggggaacagcattggagatgccttctcggatttcacactggctcgccagggctacccacggatggcgttctccgcctgctttggcggcatcatcttcaacatcctcgtgggtgtggggstgggctgcctgct

SEQ ID NO: 50913 - DNA, 631 bp, Homo Sapiens
ggaacttggaaaggagagtcaggtattagaggaaagagaagggtatttgtatacaaagccctggccttaaagaatgttacttagtagctactcccaaattgtcagccttcttacctggccaaggtgtccaagccagaaaggaaaaaaggttatggagtctttctcaccctaaggacagggtggaagagggtggtatatagggaagggccagataggcaacttcatttggcttgtgtgcatctggcctggaactggtgttaagccaggcttttgcttgtttgttgccatccctcaccctttgccatttcccttttcagagaatgtaaatgattttcatgttaggccaaaataaacaacttatagggtacatatgttgtcataaaaggtaaaagtgatgcatgccaaaccaaactaaaccaatttggattatctgctattcgggtaatcttcacagaaatgactgagagaagaatctgcagtttactgagggattttcagttcctcctaccacctcaacaggactttgtccagactctcctcctcttacctttgtgccttgactgtggttctttgtggcaagatactttggttggttaaaataatatggaacaaaggatccactgaaaaaaaa

SEQ ID NO: 50914 - DNA, 847 bp, Homo Sapiens
  misc_feature (793)..(793): n is a, c, g, or t
ttgcagagcctccattgaagtttcttgcaaaccacactaacatattactggcatcttcaatctggtatattacatttttttgcccgcatgacctagtttcccagggctattcatatctacctgttcaactactggcttcgggaatgaaggaagtgaccagaacttggaaaatagtaggtggagtcacacatgctaatagctattacaaaaatggctggatagtcatgatagctattggatgggcccgaggtgcaggtggtaccattataacgaattttgagaggttggtaaaaggagattggaaaccagaaggtgatgaatggctgaagatgtcataccctgccaaggtaaccctgctggggtcagttatcttcacattccagcacacccagcatctggcaatatcaaagcataatcttatgttcctttataccatctttattgtggccacaaagataaccatgatgactacacagacttctactatgacatttgctccttttgaggatacattgagttggatgctatttggctggcagcagccgttttcatcatgtgagaagaaaagtgaagcaaagtcaccttccaatggcgttgggtcattggcctcaaagccggtagatgttgcctcagataatgttaaaaagaaacatactaagaagaatgaataaatttacgtgatgagctctacaaggccaaaaattttttttcttatctacctgttatattgtgctaattttctatgtatgtgatgtgaaatgaagactatatatatggaatggaggtgacaganagaaagaaattctttgtttgagggagacttccccctttctggattgtaatttgc

SEQ ID NO: 50915 - DNA, 898 bp, Homo Sapiens
  misc_feature (797)..(797): n is a, c, g, or t
  misc_feature (801)..(801): n is a, c, g, or t
  misc_feature (807)..(808): n is a, c, g, or t
  misc_feature (897)..(897): n is a, c, g, or t
gcatctttaaggaaaagattaaaatagtaaaataaaagtatttaaactttcctgatatttatgtacatattaagataaatgtcatgtgtaagataactgataaatattggaactttgctagaacaagaccctgtagtaatagtaataatagttgaagtttggccaactcttaataaagttattttggtaactaatgttttatggcacttaagaataattagcagcgttaaattttgtttgtattaagcacttttaattttatccttcctaaaaatagtttattgtatctgacaagaaacttacttaaccattgtgtccttcccatcttttttgtcatctttgttttcttcaaatgccctcctcccatctgccttgagattcccttgtcttcacttaaaagccagagtgcaagtcatgatttgcgggagggctcttgaaccacttctggctgcaccacaattctgtacttgagtatcacagtcattgtttttgagacaaacatttttataattctaatttgggttaataaagattttaaatatttcttggtttacttttgtaattatatacacaacaaatgtattaataactaccttgttaaacaccttttaatagcacaaggtttttatatttgcaagctgttgatatctttctaaaactgtttaggttatagtctattgatactttttatatacaattttataaatataaatattataatttttatattaatggtaccaaaaatacattttcttaaggttaaaagcatgcacttccatgcatacttgctttttggngagnagtggnngagaagacattctaataatcagtttgtgaaaatagcttctgttggaaaaccttttgagggggaataaggaatggtcatctaaaatgagna

SEQ ID NO: 50916 - DNA, 653 bp, Homo Sapiens
cgcgtccgggctccgttggccgagggggccgtacggaggtggcagctgtgggaggaggcggcgtggaaggccgaggagctcaagcccggaccaatccccacgttccgggccgcgaccctgaccctgcagcgtaccgggccctcagcctctcttgtacaggctgagaggctgagaaatcatcccctgaataactttttcctctcgattcccatccccaatttaatattaaattaacaggcaagccggcccccacctctccctgggggtctcagggagaacctttcacggcaccctttccctaccttttccttctttaatctcctggtttaccattgatgacttcgcctctgcatctactgacttgatttttcattctgccactccatcttcaaaccccctcacctttcccatcctactcctgccatgcattgaagggtcaatgcattttggggtgagctctgggtttaggggccccctccatccctcagctaccctggatctttgcccacctcttcctcagagcccccactgaggggccgtagccctatctagggctgtggaaggagcagactggttcctaactctctccctcctcctgcccacacacatcaaaagaatcttccctacacccttctctgcctttattttttgat

SEQ ID NO: 50917 - DNA, 1048 bp, Homo Sapiens
  misc_feature (642)..(642): n is a, c, g, or t
tcagcttaatcagagaaaccatttatgggaggatgtggtatttcacttcagacttctccagaggtgacactgcgtacaccaagctagctctggatcggcacactgacactacctattttcaagagccctgtggcattcaagtgtttcattgtcttaaacatgaaggaactggtggcaggacactgctagtagatggattctatgcagcagaacaggtacttcaaaaggcacctgaggaatttgaactcctcagtaaagtgccattgaagcatgaatatattgaagatgttggagaatgtcacaaccacatgattgggattgggccagtcttaaatatctacccatggaataaagagctgtatttgatcaggtacaacaactatgaccgggctgtcatcaataccgttccttatgatgtcgtccatcgctggtatacagcacaccggactctaacgatagagttgaggagacctgagaatgagttttgggtcaaactaaagcctggcagggtcctatttayagacaactggcgtgtcctacatggcagggaatgcytcactggctaccgccaactgtgtggctgccattycacaagagatgatgtattamacactgctcgcctcttggggcttcaggcttaanattgacagcatctggattatkaatacacctggcaccctggctaccagaatttcatatgggcagaataatattgtgtcaaactctacttcagattgtctccttatcccatcccacaaaacagaatctgtccgtttctctagtaagggagacttgttggagaggcgggactctgagttatctaatgtcagacatctagtggggcagctctcttcctcatgttataacatggatccacttgttttatttaaaccttttaatataattttbgkcagtctccttcagaaatataatctccatattgatagggaagcawwattgccatgaggtacgattttttyccaagtwgwtcagtagrarraakgattcagaaawamaaaawcygataarcacaattkcaaatktttgg

SEQ ID NO: 50918 - DNA, 455 bp, Homo Sapiens
gggatggtttatgcaagtcatgctgaatactcctcccctcttctcttttgccccctcccttcctgcccccagtctgggttactcttcgcttctggtatctggcgttctttggtacacagttctggtgttcctaccaggactcaagagacaccccttcctgctgacattcccatcacaacattcctcagacaagcctgtaaactaaaatctgttaccattctgatggcacagaaggatcttaattcccatctctatacttctcctttggacatggaaagaaaagttattgctggtgcaaagatagatggctgaacatcagggtgtggcattttgttcccttttccgttttttttttttattgttgttgttaattttattgcaaagttgtattcagcgtacttgaatttttcttcctctccacttcttagaggcattcagttaacaaagaggttgga

SEQ ID NO: 50919 - DNA, 578 bp, Homo Sapiens
  misc_feature (571)..(571): n is a, c, g, or t
  misc_feature (573)..(573): n is a, c, g, or t
  misc_feature (575)..(576): n is a, c, g, or t
  misc_feature (578)..(578): n is a, c, g, or t
ggaagagcaaagagtttgtgtctagtgatgagagctcttcgggagagaacaagagcaaaaagaagaggaggaggagcgaggactctgaagaagaagaactagccagtactccccccagctcagaggactcagcgtcaggatccgatgagtagaaacggaggaaggttctctttgcgcttgccttctcacaccccccgactccccacccatattttggtaccagtttctcctcatgaaatgcagtccctggattctgtgccatctgaacatgctctcctgttggtgtgtatgtcactagggcagtggggagacgtcttaactctgctgcttcccaaggatggctgtttataatttggggagagatagggtgggaggcagggcaatgcaggatccaaatcctcatcttactttcccgaccttaaggatgtagctgctgcttgtcctgttcaagttgctggagcaggggtcatgtgaggccaggcctgtagctcctacctggggcctatttctactttcattttgtatttctggtctgtgaaaatgatttaataaagggaactgactttgtaananannan

SEQ ID NO: 50920 - DNA, 844 bp, Homo Sapiens
aaaaaacctcaggatgaagtgaaagcagtccaacttgccattcagacattattcaccaattcagatggcaaccctggaagcaggtccgactcaagtgctgattgccagtggttagatactctgaggatgcggcagattgcatccaacacttctttacagcgttcccagagcaatcctattctggggtcaccgttcttctcacactttgatggccaggattcctacgctgctgctgtgagacggccccaggtgcccattaagtatcaacagattacacctgtgaaccagtccagaagctcgtctcctactcagtatggactgaccaaaaacttctcttccctacatctcaactctagggacagtggcttttccagtggcaatactgacacctcttcagagaggggtcgatactcagacagaagcaggaacaaatatggacgtggtagtatatcactcaattcttctcctagaggaagatacagtggaaagagtcagcattccactccttcaagaggaagataccctggaaagttctacagggtttctcagtcagcactcaatcctcaccagtcgcctgacttcaagagaagccccagggacctccaccaacccaacaccataccagggatgcctttgcaccctgagactgactcaagagccagtgaagaggacagcaaagtcagcgaagggggctggacaaaagtggaataccggaaaaagccccacaggccatctcccgccaaaaccaataaagagagagccagaggggaccaccgtggaatggagaaactttttgatgaaattgaactaccatagcttttctaaccaggtttaaaaaaaaaaa

SEQ ID NO: 50921 - DNA, 684 bp, Homo Sapiens
ggtaattgagtggtggttgttattcaataaaattattcccaaaagtgtttctcctaagagtgcagttcccatgagtcacttcctgaacccattgaccaaaggtggacagagacaatcctgtagaccttgacattcagaaagatgtgagctgcttactgatcatatatgcatacgtttctttacagcagaggaaaccattgtccacaaaactgatgttcttttggggttttatgtacagacttgtccaatcatgtgtgtggttcctgcgagttgctgatgactccgcattgaagctctctgagttctttgattttaagttgggtttatggaattttttcaaatgttggaaggcgtgtggttcttcctgccctccctccccttttggaaatatgaaagcaaatgtttagaagaattccttttgaaaagctgtgtcgtgttccctgtgaaactgagcaggtgtgtgttggcgcgctaagtgccacatgcttgtgtgtagaggaggaggtggccctgccggctccgcgctgctgtgcctgtgatccctacctgctccccgctcctgttgccagcagcactcactgcactcctttgtcatatactctgcatcactgtcatactcacaagttcgtgaataaagttgtgtgctttattcgtaaaaacaaaaaacacacaatacaaaaaaac

SEQ ID NO: 50922 - DNA, 492 bp, Homo Sapiens
atgcttttcttctaaacggaaatgattttacagttatctgagtgtaccttttatagttagtagaaaatgattttaaagaatgtttagtattgtacttaaatggtatgcagaggcacagatgtaaggtttataactggaaataggtggtaagaaaaatatatagaaagcacaatgatttgaatatttttccacttaggatttcctaatctccttgtcatccaattcaagctcaagatgaagcacaattctttgatctccctttgccagttgaattttatagatcatctaatgttgagcacagtatgagaataaatattggggttgtcaacattactcagttactctttgtggtttagctctaacatttcaacaagttgtcaattaattgtatctgttgggttgtatataatgttgctcaaaataattaagtggacttccaaaaataagatttccattgtaacaggatgcattgtgatgggctttgacttacat

SEQ ID NO: 50923 - DNA, 529 bp, Homo Sapiens
caggcgccgtggctcacgcctgtaatcccagcactttgagaggctgaggcgggtggatcacttaaggtcaggagttagagaccagcctgaccaacatggtgaaacactgtctctactaaaaatacaaaattagctgggtttggtggcgcacgcctgtgatcccagctacctgagaggttgaggcgggagaatcgcttgagcctgggaggcggaggttgcagtgagccgagatggtgccattgcactccgacctgggcaacagagcgaaacactgtctcaaaaaaaaaaaaaaaaaagtaacagaaaaaagagtgaaatatattagctatcttttattctgagccaaaacttgacagatgtgggaaatcttcatatagtgtatgaaaatttcattgtacagggaaattattttcctctgtgtcttttcttttactataaagtgattcagaattttactgttactataaaattatgcaaagtattgtgacaaaactgcatcaatttgttgactattaaagtgctccttgaa

SEQ ID NO: 50924 - DNA, 748 bp, Homo Sapiens
gagatctcactgactacctcatgaagatcctgactgagcgtggctattccttcgttactactgctgagcgtgagattgtccgggacatcaaggagaaactgtgttatgtagctctggactttgaaaatgagatggccactgccgcatcctcatcctcccttgagaagagttacgagttgcctgatgggcaagtgatcaccatcggaaatgaacgtttccgctgcccagagaccctgttccagccatccttcatcgggatggagtctgctggcatccatgaaaccacctacaacagcatcatgaagtgtgatattgacatcaggaaggacctctatgctaacaatgtcctatcagggggcaccactatgtaccctggcattgccgaccgaatgcagaaggagatcacggccctagcacccagcaccatgaagatcaagatcattgcccctccggagcgcaaatactctgtctggatcggtggctccatcctggcctctctgtccaccttccagcagatgtggatcagcaaacaggaatacgatgaagccgggccttccattgtccaccgcaaatgcttctaaaacactttcctgctcctctctgtctctagcacacaactgtgaatgtcctgtggaattatgccttcagttcttttccaaatcattcctagccaaagctctgactcgttacctatgtgttttttaataaatctgaaataggctactggtaaaaaaaaaaaaaaaaaaag

SEQ ID NO: 50925 - DNA, 832 bp, Homo Sapiens
  misc_feature (706)..(706): n is a, c, g, or t
  misc_feature (795)..(795): n is a, c, g, or t
accaggaactcataatgacattttaataattattgtctaaatttcataatcgaagcgattttagagtagttaacttgagatttcacagccagtaaatggctgtatttctccagagctctcagctcccatgtttattcagccaacgaacaaaccagactgcagactgtattagagcaagacaacatcatttagccattgatttttatcttctaccttgaatgaattgaatgaagaaaatgtcttttagggataaacactatcaaggatgaattttatactaaggttatatgaaagaaaaatctcaaaaccactaagccaaagggaagtcaagctgggaactgattgaggcaaacctgcctcccattttattcctaaataagacagccacaaagataaaatttgctcacaagggaattccttatggacaaagaactcaaagtcttcacatgaaacaaatgcataaatgattgctttctctgtttcatgtttcactaagccagattaaggtataactgactattcctctactctcctctcacatgtaaattgtatattcagtgaaaggctaatcagaaactcaaaaaaatgcaaccctttctctcttacctgcctatgcttgaagcccccgcccctcttcaagttgtcctgcctttcaagaccaatgtacaccttacacatactgattgatgtctcatgtctctctaanatgtgtaaaaccaagctgtgccccaaccaccttgggcacatgtggtgaggacctcctgaggctgtgtcatgggcacaccttaaccctgngaaaataaactttctaaactgacttgagagctgtctc

SEQ ID NO: 50926 - DNA, 1085 bp, Homo Sapiens
ggctgctgagatcttggaaatagcagacacacccagtggagacaaaacttccttggagacacgtttcatgacgatcctgtgtacccggagctatccgcacctccggagagtcttccaggagttcatcaagatgaccaactatgacgtggagcacaccatcaagaaggagatgtctggggatgtcagggatgcatttgtggccattgttcaaagtgtcaagaacaagcctctcttctttgccgacaaactttacaaatccatgaagggtgctggcacagatgagaagactctgaccaggatcatggtatcccgcagtgagattgacctgctcaacatccggagggaattcattgagaaatatgacaagtctctccaccaagccattgagggtgacacctccggagacttcctgaaggccttgctggctctctgtggtggtgaggactagggccacagctttggcgggcacttctgccaagaaatggttatcagcaccagccgccatggccaagcctgattgttccagctccagagactaaggaaggggcaggggtggggggaggggttgggttgggctcttatcttcagtggagcttaggaaacgctcccactcccacgggccatcgagggcccagcacggctgagcggctgaaaaaccgtagccatagatcctgtccacctccagtacctctgacctcaggctttccagcttcctccccttgctacagctctgccctggttggggctatgtcagatccaaaaaaatctgaactctgtctggtagacaaaaaaagcgcacaaaaacaacaaacaaaaaacacacgaaggggcgcggcgcaaaaaaaaatcaccaggggggccacagcatagacacgaccccacagtttggtgacaacggggggcccaagagagagagataaaacagaacacaaggcgcaggagtaaacgacgcgaggggaacacgagaacgagacacgtgggggaggaccccatcggcgtggggacaagcggacaacacaggaagaaagcacgtaatcaaaggcgaggtgcaacacaacgctggcaggtcgatgagacgaagggca

SEQ ID NO: 50927 - DNA, 419 bp, Homo Sapiens
caagcgctacgtgtaagaagaaagccaagcccaagaaatgtgcccggcgtttcaccgtactactgtgacctgaacaaagacaaggtcatttcactgcctgagctgaagggctgcctgggtgttagcaaagaaggacgcctcgtctaaggagcataaaacccaagggcaggtggagagtccagggaggcaggatggatcaccagacacctaaccttcagcgttgcccatggccctgccacatcccgtgtaacataagtggtgcccaccatgttagcacttttaataactcttacttgcgtgtaatgtttttggtttcattttaaaacaccaatatctaataccacagtgggaaaaggaaagggaagaaagactttattctctctcttattgaaagtatttggatctgctactgacaactt

SEQ ID NO: 50928 - DNA, 666 bp, Homo Sapiens
  misc_feature (663)..(663): n is a, c, g, or t
  misc_feature (666)..(666): n is a, c, g, or t
tctagcgaggtgacagcgtagaaccagggtgaaatggctgcgcaggtcggagcggtgcgcgtagtacgggcggtggcggcgcgggaggagccggacaaagaggggaaggagaaacctcatgctggggtctccccgcggggagttaaacggcagcgccgatctagcagtggggggtctcaggagaagcgggggcggccgagccaggagccccctctcgctccccctcaccggcggcgtcgcagccgccaacatcctgggccgctgccgccaacgaatgcagccccaactgtcccaggccctgttgagcctcttctcctgccgcctccgccgccaccttcgctggcacccgccgggcccgctgtcgctgcccctctcccggccccaagcacctcggccctcttcaccttctcgcctctgacggtgagcgcggccgggcccaagcataagggccacaaggagcggcacaagcaccatcaccaccgcggccccgatggtgatcccagctcctgcggaaccgatctcaagcacaaggacaagcaggaaaacggcgagaggactggaggggtgcctctgatcaaagcccccaagagagaaacaccagatgaaaatggtaaaacccagagagccgatgattttgtcttgaagaaaataaagaagaaaaanggn

SEQ ID NO: 50929 - DNA, 917 bp, Homo Sapiens
  misc_feature (94)..(94): n is a, c, g, or t
tgagcgttggtgtttggcacgcgccaccctctcttgctttggttccgccatgccgatgtaccaggtaaaaccttatcacgggcgcggcgcgctnctccgtgtggagcttcccacctgcatgtaccggctctctaacgtgcaaggcaggagcggcggcccagcgcccggcgttggccacctacagtctttggtagatgagtggctggatagctacaagcaagaccaggatgcaggatttctggagcttgttaactttttcatctgatcttgtggatgtaaaggactcgggggactatcctctgacagctccaggtctatcctggaagaagttccagggcagcttctgtgagtttgtggggacattggtctgtcggtgccagtacatcctcctccatgatgacttccctatggacaacctcatctccctgctcactggcttctcagactcacaagtctgcgccttctgtcacactagcaccctggctgctatgaaactgatgacctccctggtaagagttgccctccaactgagtctgcacgaagatatcaatcagcgtcagtatgaggctgaaagaaacaaggggccagggcagagggcacctgagcggctggagagcctgttggagaaacacaaagagctgcattaatactacattgtcaaagacaaagacgaacatgagacatgcgatatgagttttaaaaggagagaagagcaaaaaaacaatacagctatccaaggagcaagtgctgagcttgtgaaaaaacagcttctattttattaaataatagtgttcctgcagggatgtctgaagtactctgcaaggctaattaggacagatcaatgtacacttacctctccagaaggctgaaaggtgtgtagtgactatgtgtcattaaaatttacttgaccatgggca

SEQ ID NO: 50930 - DNA, 614 bp, Homo Sapiens
  misc_feature (10)..(10): n is a, c, g, or t
  misc_feature (35)..(35): n is a, c, g, or t
  misc_feature (309)..(309): n is a, c, g, or t
gcctcgtgcngaattcggcacgagctccccagcancagaaatgtagagagtcctgttcgagtccatccactgttggctcttccctaacgacaaggaaaattgatccaccagcagtgcctgcgacaggccagttcatgcgtattcagaatgtaggccaaaagaaagctgaagagagtccagcagaaattatcatccaggctattcctcagtatgctattccttgtcactccagctccaatgtggtggtggagcccagtgggcttcttgagctaaacaacttcactagtcaacagctggatgatgaggagncagcaatggagcaggacatagacagtacacggaggatggaactgaacccagcccttctcagagctctgctgaacggtcctagtgtttggacacaatagtgcactttaaaacctgcttggttaccaagtgtccagggaaacccttgtattttgatgactaaaaagagcactttgcccgtacttaggctgtggaccctaaaacagcagtgtttcaacaagatgttgctgcaggagcagctttttaaaacaagataaaactcacaggggaatgtacttttttaaaaaaaaatgaaaaaaaaaaaaaaa

SEQ ID NO: 50931 - DNA, 765 bp, Homo Sapiens
cctggttgccccagaattgtacactggttgatatgaagattgaatttggtgttgatgtaaccaccaaagaaattgttcttgctgatgttattgacaatgattcctggagactctggccatcaggagatcgaagccaacagaaagacaaacagtcttatcgggacctcaaagaagtaactcctgaagggctccaaatggtaaagaaaaactttgagtgggttgcagagagagtagagttgcttttgaaatcagaaagtcagtgcagggttgtagtgttgatgggctctacttctgatcttggtcactgtgaaaaaatcaagaaggcctgtggaaattttggcattccatgtgaacttcgagtaacatctgcgcataaaggaccagatgaaactctgaggattaaagctgagtatgaaggggatggcattcctactgtatttgtggcagtggcaggcagaagtaatggtttgggaccagtgatgtctgggaacactgcatatccagttatcagctgtcctcccctcacaccagactggggagttcaggatgtgtggtcttctcttcgactacccagtggtcttggctgttcaaccgtactttctccagaaggatcagctcaatttgctgctcagatatttgggttaagcaaccatttggtatggagcaaactgcgagcaagcattttgaacacatggatttccttgaagcaggctgacaagaaaatcagagaatgtaatttataagaaagaatgccattgaattttt

SEQ ID NO: 50932 - DNA, 635 bp, Homo Sapiens
tctacctgcaggtgaccactggcacattctcctgcttgtctcagcttcaggttcttcacctctaagatggggatgatgaaaacagtacctgtcatgcagaattgttgggaggattgataatttagatgtttatacatgtaatgtacttagatcagtgtctgctcttttcacttgatatccagtactatgtaagatagaaggtgcatgtcttctgtattctgtatttcccatttcttttgcgtgcagtctttgattcgtacaatagaaggaacacgtagaatgtatatttgtacattcatgtcaacatagtatttgaaattgctaccaaactcatttaatttggcataagactaacagatgaagtctctcatttgcttgaagatattttacaaaataccaactgttctatatttctttagaaaaagattatagttattaatattgatacctctgataatattttattcttaaatcttcagtgattccttttactatagattcatgacagctaattagtactaactgatttagaggtttcctttcccatcatatggaatgatgtaaagaaatcagatacaaactactgcaattagaaaataaaatatgaacaactttcaaaaaaaaaaaaaaagggc

SEQ ID NO: 50933 - DNA, 608 bp, Homo Sapiens
aaagatcatgcttagaacaatgaaaaattatttgttgtatctaatacacgcctgtattgtgaaaagcttcatttagcaatgatgtaataatttttaacttccaggaaataatctgtgaatggaaagattttttaagattttgagatagtgtttagtctcatgttgggaacacatgaatgtgatgaacatagtgaatactaaagaaaacgcttcagactttcagaatgatggttcagaatttaaaatttttaatcttttctaatttctttttttcagtgtgaaaatagcactttaccaaaagattagccatgaaatggttattttgccagttacatttgatttcttttgtatctgcaatgtaatgagttattttatttcttctgtatttgcagtgtaatgagtttttgtggcaaagtgtattaagcaatttttcattatcttgaagttccacaaagtggagaatatttatattctcacatgcattttaggcacttttgatatgtgaaaatagatgtattttctgatgcatttggttaataaatattaatctgaacattttcatgttctttgctattttgaattccattatagattcatgaataaagtca

SEQ ID NO: 50934 - DNA, 550 bp, Homo Sapiens
  misc_feature (504)..(504): n is a, c, g, or t
  misc_feature (508)..(509): n is a, c, g, or t
  misc_feature (512)..(512): n is a, c, g, or t
acattttcaatccaggagccttgagtctgtgttgtgtcctgacacctccaagttctagggccgtcaggacacgggagggtttggggacagagtgtccttcctctgtcctctcatcccagtcctgatggccgcttggtgagtgtctggtgccctggtggcctgccccagctctcttctggctttctgagcaggaagcgagcagaggctccacaggcttacgctgctctcctgacagccacacgcgaccctcggtgcagagtgcagaggcggctctggttcctccagccacctcagtccctctttgggaggtgatgttcccattgtttttcaaaggcctcaccttcaactgtctgtcttagaattcccctctggagggctatggcctccctatgctttcacttcccacctctctacctaagttccttcccagcacatcgccagccctgggcctggggatgtccccaatgctgtacctggctgaccccggattaaaagcctcatccncgannaanaaaaaaaaaaaaaaaaaaaaaaaaaaaaaaaaaaaggg

SEQ ID NO: 50935 - DNA, 907 bp, Homo Sapiens
  misc_feature (782)..(782): n is a, c, g, or t
  misc_feature (798)..(799): n is a, c, g, or t
atatttaatgtagtttttcaaatttgcttattttaaatttattattttgatcttgaattatttataaactggaagtggtttgattattgtgagtcaaaactctaagtggttaaaaattagtatgaattttttagcttcttaatgaatatggatttaaaactctccagttcttattttatgaaatgacttgcctttctggtaatacaatgctgattttttagtaattgccttttcattactttgttaagaagaaatgccagctgtttaatcacacctacccctggaaaagaggtaaaccttttgaacagttgaatttcatcagaagctctatagctttttggtgagaggaagtgatactctttattacaagaaacaaggaattaacaaaaataaggaacttgttgctacctttcttttctgttgaacattaaaaataatttggtttgtggactgggcatggtggcttatggaaaagaggtgagcctttgtgaagaacataatggaaaagtgcatgtacgggaaataacagcactttaggtgtagttcaggtgagcaagatgccagatagtttctactaaccatatactctttctgcttcttagcgtcgttgtcactgcttctgtggcttttgggttcaaagtagattatatatattcctaaagcttggtggaggtagtggagctatcacacactcaaatgagcttgtatatttataatacaatatagtattatagtaacagttatcatacactgagatatagtttctgtgcttgtaaaaaatncttgaagtgaggccgnntgccgtggctcatgccctgtatcccaacgctttgggacgccgaggcgggtggatcatgaggtcaaaagattgagaccatcctggcacatgggaaaccccgtctctact

SEQ ID NO: 50936 - DNA, 583 bp, Homo Sapiens
atcgattgcaccctaaaagcaggtgacaaaagtcttccttgccacagattgattttgtcagcttgtagtccttacttccgtgagtactttttatctgaaattgatgaggcgaaaaaaaaggaggtagtgctagacaatgtggatcctgctatacttgatttaatcatcaaatacctgtactctgccagtattgatctcaatgacggaaatgtgcaagatatttttgcattggccagccgctttcagatcccctcagtgtttactgtctgcgtttcttatcttcagaaaagacttgctcctggtaactgtctagccatcctaagattaggacttcttcttgactgcccgagactcgccatttctgcccgtgaatttgtgtctgatcgctttgtacagatttgtaaggaagaggactttatgcaactgtctccacaggaactgatctcagtcatttcaaatgacagcctaaatgtagaaaaagaagaagcagtatttgaggcagtgatgaaatgggtgcgaacagacaaggaaaacagggttaaaaaccttagtgaagtgtttgattgtatccgttttcgcctta

SEQ ID NO: 50937 - DNA, 624 bp, Homo Sapiens
agaaggggaagtatgttttggggggctgcttcctgtctgagtaagccctcaggagcctctgctcccctgtgaacccactgaaccttctgagcccccactgcttctatggggctctctcttctgccttctcaggaaagctggtgtctgattttggccatcaggactctgacgtctctttggtcttgttgatttcctctgggcatatcccttccccagatctgctcctcccctttcacaggtgggatcggcactcagggggtctggaaagaaggtcataagggagcatgataggatttggggcagagggacaggctcctctggggaaaccccccagagctctttaccaaggatgaaagaggagccaggccttgggctcctgatgaggagaaaggggccccaccggggtctaatggtgacagtccaaaccactccactggcctcctggcagaagccgagtgtgctggggtctccgaagagggtccctcctttttgggggaaggtcagcccagcccctccaaaggtctgatgtctccactttcacccgcaggccttaccgctctgtttatagtgacccaccctagatcttccccaagagggactgggggtttctggggtccattctct

SEQ ID NO: 50938 - DNA, 835 bp, Homo Sapiens
  misc_feature (42)..(42): n is a, c, g, or t
tgcttggaaaccttttttccttcttgacatttatcacctctngatggctgaagaatgtagacaggtataatgatactgcttttcaccaaaatttctacaccaaggtaaacaggtgtttgccttatttaattttttactttcagttctacgtgaattagctttttctcagatgttgaaactttgaatgtccttttatgatttgtttatattgcagtagtatttattttttagtgatgagaattgtatgtcatgttagcaaacgcagctccaacttatataaaatagacttactgcagttacttttgacccatgtgcaaggattgtacacgctgatgagaatcatgcactttttctcctctgttaaaaaaaatgataaggctctgaaatggaatatattggttagaatttggctttgggagaagagatgctgccatttaaccccttggtactgaaaatgagaaaatccccaactatgcatgccaaggggttaatgaaacaaatagctgttgacgtttgctcatttacagaatttgaaacgttatgatgacctggcaacaaaaagtaatgaagaaaattgagacctgagtgaagatacagaaactgatcttttaccgtggcaaacatgaacaacatcttgagtatttaggacactgggcagtgaagctaagaacctgggtgtgttacttgggatcatggtacatttatcactgaatttagccctccggaacaaaccaacacaaaaagagaacacctcagtttcttaccgtattactcattcccgatccactttctcctgacgggcctgttgcacctctttttcctcatcaaagactcg

SEQ ID NO: 50939 - DNA, 618 bp, Homo Sapiens
gtggaatatttcctgaagtggaagggatttacagatgctgacaatacttgggaacctgaagaaaatttagattgtccagaattgattgaagcgtttcttaactctcagaaagctggcaaagaaaaagatggtacaaaaagaaaatctttatctgacagtgaatctgatgacagcaaatcaaagaagaaaagagatgctgctgacaaaccaagaggatttgccagaggtcttgatcctgaaagaataattggtgccacagacagcagtggagaattgatgtttctcatgaaatggaaagattcagatgaggcagacttggtgctggcgaaagaggcaaatatgaagtgtcctcaaattgtaattgctttttatgaagagagactaacttggcattcttgtccagaagatgaagctcaataattgttcacattgttcttttatatatatttatatatatatataaaaattgggtcttagattttgatttactagtgtgacaaaataactacatcctaatgaaaatcaagtttgatatgtttgttttgaaagtagcgttggaagagttgttggggggttttttgcatccatagcactggttactttgaacaaataaataaa

SEQ ID NO: 50940 - DNA, 839 bp, Homo Sapiens
  misc_feature (709)..(709): n is a, c, g, or t
  misc_feature (720)..(720): n is a, c, g, or t
  misc_feature (742)..(742): n is a, c, g, or t
  misc_feature (834)..(834): n is a, c, g, or t
ttgttgttgttgttttgagacagggtctcactttgtcacccaggctggagtatagtggcacaaacatggctcactgcagcctcgacctcctgggctcaagcagtcctcctgcttcagccccacaagtagctgggactacaggcacacaccaccacgcccacctctacaaaaaattgtaaaaatgagccaggcatgtggtggtgtatgcctacgatcctagctactcaggaggctgaagtgggagaattttttgagcccaggaggtggaggctgcagtgggccataatggcaacactgcgctccagcctggcagacagagggaagatatgtttgacatagtttagatatttgtccccacccaaatccatgttgaaatgtaatccccaatgttggaggtggggcctagtgggaggtgtttgtcatgggggcggatccctcatggcttggtgctgtccttgtgatagtgagttcacttcatgtgagatctggttaaagtgtgtggcaccttcgcctacccccacttgttcccaccaagtgagattcctgctcctgcttacccttctgccatgtttcttgaggcctccagaagccaagcagatgccagctccatgctccctgtacagcctacagaagcatgagccagttaaacctctcttctttataaattacccaagtcctgagtatttctttatagcaatgcgagaacggnctacacaaggntctagtagggagaaactagcangtaaatggatcccagacagcactcttacatttttaattacaggtccctttgagtagaccaaactttaagaataggggaaatcattacctatnaattg

SEQ ID NO: 50941 - DNA, 570 bp, Homo Sapiens
acagcagttgtccgagaagtgacagctgtattactcagagcttttacttcttacacctagaatattaaaatataaaacaaggggagaaatgtgacagtctattttcagttgcacatatgttccttatatataatgtttgacagttcaatctctgggtggaataaagaacacttacgtatcagtaatgggaatttttaaagatttaaaacaaatatgcaaaaatttgctatgccaagatgctggagcataatataagactgtatttggtgtgcttgttttgtttctttggtagagtttattaggtgaatcttctaaaactttccttctgttggatcccagtgacgtggaagtcatcagaaccccacggtacttggagtacctctctgcaccaagatagctggctgattttctgctcagtcacaattttacttgaaagcaagaattgtcctagctccttttccattattccaaaacgtttaacgttcaaagcagggtctcattaaaaaagaaactactggttgatataattgagatattacaatttcagaataaacatttgattaaaaataa

SEQ ID NO: 50942 - DNA, 926 bp, Homo Sapiens
gaatggtggaacactggggcaggacaactgacctgtctccttcacatagtccatatcaccacaaatcacacaacaaaaaggagaagagatattttcggttgaaaaaaagtaaaaagataatgtagctgcatttctttagttattttgaaccccaaatatttcctcatctttttgttgttgtcatggatggtggtgacatggacttgtttatagaggacaggtcagctgtctggctcagtgatctacattctgaagttgtctgaaaatgtcttcatgattaaattcagcctaaacgttttgccgggaacactgcagagacaatgctgtgagtttccaacctcagcccatctgcgggcagagaaggtctagtttgtccatcaccattatgatatcaggactggttacttggttaaggaggggtctaggagatctgtcccttttagagacaccttacttataatgaagtacttgggaaagcggttttcaagagtataaatatcctgtattctaatgatcatcctctaaacattttatcatttattaatcctccctgcctgtgtctattattatattcatatctctacactgcaaattttgggtctcaatttttactgtgcctttgtttttactagtgtctgctgttgcaaaaagaagaaaacattctctgcctgagttttaatttttgtccaaagttaattttaatctatacaattaaaaccttttgctatcaaaaaaaaaaaaaaaaaactcgagttttttttttttttttttttcaaaggcgaatttaattggggggagggggctgggccaagtcattcagggcaaacattgcatcccccggtcaaggcagggtcatccccaggtgtggggcccgcgggggtcaccggccttaacccccggggaggggggagtaacttccccccccc

SEQ ID NO: 50943 - DNA, 973 bp, Homo Sapiens
gtccggaattcccgggatgcaagtcacccagtcctactgggacaccaaccccacgagggctcagggatactcgggcctttctgtgaaagttgtaaactccaccacagggcctggcgagcacctgcggaacgccctgtggcacacaggaaacacccctggccaggtgcgcaccctgtggcatgaccctcgtcacataggctggaaagatttcaccgcctacagatggcgtctcagccacaggccaaagacgggtttcattagagtggtgatgtatgaagggaagaaaatcatggctgactcaggacccatctatgataaaacctatgctggtggtagactagggttgtttgtcttctctcaagaaatggtgttcttctctgacctgaaatacgaatgtagagatccctaatcatcaaattgttgattgaaagactgatcataaaccaatgctggtattgcaccttctggaactatgggcttgagaaaacccccaggatcacttctccttggcttccttcttttctgtgcttgcatcagtgtggactcctagaacgtgcgacctgcctcaagaaaatgcagttttcaaaaacagactcagcattcagcctccaatgaataagacatcttccaagcatataaacaattgctttggtttccttttgaaaagcatctacttgcttcagttaggaaggtgcccattccactctgcctttgtcacagagcagggtgctattgtgaggccatctctgagcagtggactcaaaagcattttcaggcctgtcagaagaaggaggactcccctagaattagcaaaccaaaacacccttgaatccctcctttcaggaaaccgggggaaccaaaaggccaaacccttaaggggggagggccgcttaccccgagaacaattggattgaagaaaaatattggagggacctggttacatggttccgggacttaagtccatttttccagg

SEQ ID NO: 50944 - DNA, 871 bp, Homo Sapiens
  misc_feature (741)..(741): n is a, c, g, or t
  misc_feature (771)..(771): n is a, c, g, or t
cctagcgtgaacgactctcttaattttccaccgctacacgattggcatcttcttctgccccctgctgccctttatccaaatgattatgcttttcatcatgttctactccaaaaatattgaagccttcagctgactgtggcccttttcgaggtctgcctctcttcattcactccatctacagctggatcgacaccctaagtacacggcctggctacctgtgggttgtttggatctattggaacctcattggaagtgtgcacttctttttcatcctcaccctcattgtgctaatcatcacctatctttactggcagatcacagaggaaaggaagattatgataaggctgctccatgagcagatcattaatgagggcaaagataaaatgttcctgatagaaaaattgatcaagctgcaggatatggagaagaaagcaaaccccagctcacttgttctggaaaggagagaggtggagcaacaaggctttttgcatttgggggaacatgatggcagtcttgacttgcgatctagaagatcagttcaagaaggtaatccaagggcctgatgactcttttggtaccagacaccaatcaaataaggggaggagatgaaaatggaatgatttcttccatgccacctgtgcctttaggaactgcccagaagaaaatccaaggctttagccaggagcggaaactgactaccatgtaattatcaaagtaaaattgggcattccatgccttttnttatacctggattgctgatttttacagacnaaatacttggggttttccattaaagattgttggattatggaatgaaccctccaaaacttaggaaagaatactagggaataatgatataatcttcagaaag

SEQ ID NO: 50945 - DNA, 731 bp, Homo Sapiens
ggcttctttcacccggcctgtctgaccccaatcggccaccatgtcgcaagaatgatgatgacagcagctttgtagatggaaccaccaacggtggtgcttggtacagcgtacctggagggatgcaagacttcaattaccttagcagcaactgttttgagatcaccgtggagcttagctgtgagaagttcccacctgaagagactctgaagacctactgggaggataacaaaaactccctcattagctaccttgagcagatacaccgaggagttaaaggatttgtccgagaccttcaaggtaacccaattgcgaatgccaccatctccgtggaaggaatagaccacgatgttacatccgcaaaggatggtgattactggagattgcttatacctggaaactataaacttacagcctcagctccaggctatctggcaataacaaagaaagtggcagttccttacagccctgctgctggggttgattttgaactggagtcattttctgaaaggaaagaagaggagaaggaagaattgatggaatggtggaaaatgatgtcagaaactttaaatttttaaaaaggcttctagttagctgctttaaatctatctatataatgtagtatgatgtaatgtggtcttttttttagattttgtgcagttaatacttaacattgatttattttttaatcatttaaatattaatcaactttccttaaaataaatagcctctta

SEQ ID NO: 50946 - DNA, 1066 bp, Homo Sapiens
ctccttcacccccagtccagcagcccaaggattcttcatacccctatagccaatcagatcaaagcatgaaccggcacaactttccttgcagtgtccatcagtacgaatcctcggggacagtgaacaatgatgattcagatcttttggattcccaagtccagtatagtgctgagcctcagctgtatggtaatgccaccagtgaccatcccaacaatcaagatcaaagtagcagtcttcctgaagaatgtgtaccttcagatgaaagtactcctccgagtattaaaaaaatcatacatgtgctggagaaggtccagtatcttgaacaagaagtagaagaatttgtaggaaaaaagacagacaaagcatactggcttctggaagaaatgctaaccaaggaacttttggaactggattcagttgaaactgggggccaggactctgtacggcaggccagaaaagaggctgtttgtaagattcaggccatactggaaaaattagaaaaaaaaggattatgaaaggatttagaacaaagtggaagcctgttactaacttgaccaaagaacacttgatttggttaattaccctctttttgaaatgcctgttgatgacaagaagcaatacattccagctttcctttgattttatacttgaaaaactggcaaaggaatggaagaatattttagtcatgagttgttttcagttttcagacgaatgaatgtaataggaaactatggagttaccaatattgccaagtagactccctcccttaaaaatttatggatatctacaagctgcttcttaccagcaggagggaaacacacttcacaccacagggcttatcagaaacctacccagatgaaactggatataatctggagacaaacagggagggttttttttaaacatctggatatccttgtcacatttttgtacattgggactgctttcaacctatacctcatggggtaattatagctttaaactttagccttccttggaactccggggtttgggtttggtaatttggcggtttacaaataatagatttattccccacttcctgggg

SEQ ID NO: 50947 - DNA, 611 bp, Homo Sapiens
  misc_feature (12)..(12): n is a, c, g, or t
cggcctcagcgngactccccactcacctggctctctctctgtcctgcctcccattatctaacacattttttacgggtacattttaatttgattcagctggtctgaatctctggatttatatcatccaaaacttccatatggtcagtagtagatgttctctaatcctccctctccttaccacgggtcagacctaaagaatgtgaacactttttttttttttctggggatgctaagcaaacccttcttacagatacgtttaatgtaataagaacaagggaacatgtaaactaacataaccaattgtcagttctccatgtattcctcaaaagaatgtcagagtaaatgtattagaaatacagtatccagactgctagtccttgccagagacattcttacctctgccctgtgatcatattttatgcttgacagcgaaaacaagtgtggccccttgcaccggttagctagaagtacagccagatttcaagctagtgcaatcacctcttccgccaattttttacaaatcttgtcaacctggatcttacacttcatctgaattcagttctttgccctccttcgcgcctgcagctcatatggaagtctttgccaccaat

SEQ ID NO: 50948 - DNA, 669 bp, Homo Sapiens
gcatattttaccacttgttgacaagatacaattgtgacctactttgaggggatgaataacgacttatcactttaagacactttgcaaacatgttactaaaaaaaggtgcctagccaagggaaaaaccattcacttggaattaaaattgtggatgtcacttcagagatgactttaacataaatgctgaaagttcattcacctcacaaatgtggcagttttctctgtggagaatggtggtctccgtggcagactggctctccaaattaaatgaaactcattgacagacctgggaccttttatgtgagtggacagacaagatcttggtttggcttcatgtactgttttctagagagagtgctacgaaaaacttatgatgcttttatgtgataaccaatataatgctttaatatgttaattctttgtgatgctatatacatagtttttatagttttatgaaaccactttgttaaacttatctggattttaagacacttgtaaacaaatggtttgttagtaaaattggggcattaacgaagttttacacgagcaatataacacaagattttgacaacgagaaacaaaacacaacacaaaaaaaaaaaacaaaaaaaaaaaaaaaaaaaccaaaaaacacaaaacaaaaccggcacccaccaaaaacacccaaaa

SEQ ID NO: 50949 - DNA, 727 bp, Homo Sapiens
ccagactctaatacgactcactatagggaaagctggtacgcctgcaggtaccggtccggaattcccgggtcgacccacgcgtccgcagttcttaataatgttcaaagttggacccatagagacatgctaagcactacatcatgctaagaagaacagttattactcagctgccatacttcagccattctacttttacaccaagaacaaaatggctagagatttttttaaaaatacaaatgccagtaccttgccgagacttgttcactgatttgccccaaccccaaggtaatggtcatctactttgcaacctatggagatcctgatagctcccatacaaagtgaggtacactgttgccaatttggaggcaggaagccatcaaactaaacgtagtttaattcagatgaacacctatcgatattcaaaaggcaaaacagaaaaactaattccagggacattagaccttggtgaaatgccaaatggaaaatggtgctttaaaaggtagtctcttaccatataaggaataagtaaaacattagcttgtgattactcattattcaggtcaatgttttagacacgactaacaagggacagttcaaactattaaagagaacaaatttttacttaagcactttgaggtatccactccccttaaatgtaagttatgtattttatctgctgaataaagggaggtccaagcatttgtacttggcaggaatgctgccaata

SEQ ID NO: 50950 - DNA, 788 bp, Homo Sapiens
tctagcgaggtgacagcgtagaaccagaagtttcaccgcggacctgtcagagatacagaggttgtgggggcgggagacagaaagagagagagatccagagaccgagtcttacgttgacacgcagagagaaagacgcagagacagacaaacaaacagataggagaggctctccaggaggccggggggcccactccgcctatcgctcccctcggctacgctgccacttcaatgccccgcaggtcgcgagctgctgttctttcgaaggcgtcggagaaccaggggcgtcccgcgccacctctgactcggagcagcgccgagcactgacgctcccgcccttgggcaaggacgccagtgcgcccgcgcgcgtccctctgcgcggcagcccgtcgcgggccctcaaggggaagcccaggccaggatggccccgggtcgcgcggtggccgggctcctgttgctggcggccgccggcctcggaggagtggcggaggggccagggctagccttcagcgaggatgtgctgagcgtgttcggcgcgaatctgagcctgtcggcggcgcagctccagcacttgctggagcagatgggagccgcctcccgcgtgggcgtcccggagcctggccagctgcacttcaacccggaagaacaaatctggaagcaatttcctcagtcactcgtgctttgaatgttcctgctgtgagtgtggaacatcattttttggagccaactgccaaaatgggtttaagtttctagcctgccaaactaacaaaattttggaaaaagcaaaagaa

SEQ ID NO: 50951 - DNA, 729 bp, Homo Sapiens
gcgtccgatttaatatcttacatacctccaccagactggacttgctttttgaattttaagcaagtttcctttccttttatacaaattgcaaatttcatatttttttaatcacatcctaggaatagcacaataattgggaaatagaacccttatcactagaagaaccattttctgccactaaatatctctgatgtttccatgagtctgagggcagagactctggtatatgaaaacatgtctgaaagtcacatattgtgaaaatttgaagctatctcagtaaaaagcagctttggaaactgtgaatgatctttagcttgtacaaatgtttaaaaatacctcaggctatactgaaagggttgcagtttggttaggagtggaaatattttgtttgttaatgatgtcttcagttctggtacctctgttttactttcttatgctctttggaaactttttgcaaaatttaagcctgggttctagataataccagatctacctaaacctcaagtctatgttaaagttgctttcctgctgttaaataagctatgatattaagatattctgacttgctccagtgtcaagggaccttctgggagcaggtgctaacatagtgttcagaatcaatatgtgagatgaaaaggatcccctccaggaggatcctgagctgttcagaaatcatttaagtttacagcgttgttccctttgcgtttgcagtgcgttttactcaagtag

SEQ ID NO: 50952 - DNA, 582 bp, Homo Sapiens
tttaccctcccctcgttccagacctgcctcatggtggcaacatggttcttgaacaattaaagaaacaaatgactttttggaatagccctgtctagggcaaactgtggcccccaggagacactacccttccatgccccagacctctgtcttgcatgtgacaattgacaatctggactaccccaagatggcacccaagtgtttggcttctggctacctaaggttaacatgtcactagagtatttttatgagagacaaacattataaaaatctgatggcaaaagcaaaacaaaatggaaagtaggggaggtggatgtgacaacaacttccaaattggctctttggaggcgagaggaaggggagaacttggagaatagtttttgctttgggggtagaggcttcttagattctcccagcatccgcctttccctttagccagtctgctgtcctgaaacccagaagtgatggagagaaaccaacaagagatctcgaaccctgtctagaaggaatgtatttgttgctaaatttcgtagcactgtttacagttttcctccatgttatttatgaattttatattccgtgaat

SEQ ID NO: 50953 - DNA, 855 bp, Homo Sapiens
  misc_feature (14)..(14): n is a, c, g, or t
  misc_feature (855)..(855): n is a, c, g, or t
cagtatccacttgnaaaatcaatcttcagtatattgtgcatggtctcttctggataactttgagtggaaccagggatacagcagccggtttggtctcttccacgttgattttgaagacccagctagaccccgagtcccttacacatcggccaaggaataagccaagatcatccgaaacaatggccttgaagcacatctgtaggcaagatggctgagaaatacaggagaggcgtctgcttttggaaaggaaatctgctttggtgatgatctttcaggcaatctcaacttacttctttaatcaacatttaatatcaatggatctgtgattaaatgtctgaatatgtaatgcctcgtgaagtatttaataatggcctttatttgtatttggaccaatgaggtttttaaaaaaaatggaagagaaaaccactaaccttgatttttgtattgcaaaatcagatagacctggaaacataaatttaaatccttagacatttttctagaaaaaaatgcaaagtttataaagatgatacaaccatgatttgcaactgtaacaggagaccatttattataagcgtacctgtttgcgaacttaattattctgattccataagctgtttttgcttaggtgatccactgccatgtgatccataatttttctacataaaaaatcaaagttaaaagtcacattatacagttatgcattcatttcaacaaaatagtgaattgataatctacttgttaatatattcggcccatattttgtgtgtttggacaagtacatctcccttttgcctaatgaacttttgaaaaataataaaataatagaataaattagaccttggatgctaaaaaaan

SEQ ID NO: 50954 - DNA, 1537 bp, Homo Sapiens
agcttggcacgaggcggtttctctccagtgtggactctctgatgagtttgcagatgtgaactctgactgatttccttaccacacacgtcacacttatagcatttctctcccatgtggactctctgatgaatacgaagggctgagatgtaacaaaagttctttccacactcatcacacgtatgagatttctctcctgagtgtaattgttgatgaaaatcaaagagggagacatcactggggatggtttatatccattgccctgggaagatttctgtcttgtgtgaattacagatagtcctgcctcagtctggcaggggaaatcaccttctttggagaactgagagctatttatcaccaagtcttgagacctggttaaatcacttgcaattttttcccagatttgctggaaggaccactcttgatgtgttcctgcttctgaaacagtctccatctcagtttggatcttgtctcctatcagaatacagaattaaaagatgaggacaagtgaagcctttgttcagtgttatcaagatttcacttaggccatggcaggaaactctcatgagtatagacaacattcagtttgtatttttcaagtgcaccataatctttggtttggatgaggccaatttcgaactaaaccaagtatcatatgtaaaatacttgatagaaataaaagacgaaaaacaatagatgttgacatgggtgtggtgaaaagaaacgcctatacactgctggtgtgaaggtaaattagtacaacctctatgaaatacagatggagattctctaaagaactaaaagtggatctaccatttgatccagcaatcccactactatctacccaaaggaaaagaagtccttacatcaaaaggacacctgcatgcctatatttattacaggacaattcacaatttcaaagacatggaaccaacctaagtgcccatcaaccaatgagtggataaagaaaatatggtatatattcaccatggaatactattcagccataaaaaaatgaaataatgtcttttgcagcaacttggatggagctggaggctattattctaagtgaagtaactcaggaatggaaaaccaaataccgtgttttcacttataagtgggagttaagctatgggtatgcaaaggcatacagagtgatataatggactatgcagactccaaatggggagggtggaaggtagggtaagggataaaaagctacaagttgggtacaatgtacactactcaggtgatgggtacactaaaatctcagacttcaccattagacaattcatccatgtaaccaaaaaccagtatatactttaataaaataaaaaaagactactgaaataaaatttttaataaaaataaaagacaataataaaattaatatgatacaaacattatacctgctactcttcctagtgaatttcctaatcagtctaaaatcttgcatggtaaattatgaagctaataaattgtgtatataataaaatatgaatcaaaaccaattttaaacaaaagtaatataaaaaaaaaa

SEQ ID NO: 50955 - DNA, 552 bp, Homo Sapiens
gctctcagaagcctaggggagtccctgtggtcctgaattctttccccaaagacgaccagcatttaaccaacctaagggcccaaaggccttggacaactgcatggagctgcactctaggagaaggaggggaaccagatgttagatcaggggagggagcaggagtgtccctcccgtcagtgcctacccacctgtgaggcagccttctgatggcctggcccaccttccccagaaccaggggaggcctgaggcttcagttttactctgctgcaaaatgaaggcgggcctgcaagccgactacacctacggaggctgttgaggacaatttcattccattaaattaaaaaatactgactggctggcaggcaggtgccatgtctgggaacagggacgggggagcttcacctttttgtcttggcttttctttgggctgtgggggggcatccatttccagggtcggggaggaaataccaaatgcattgttgttctgctcaatacatctcacttgtttctaataaagaaagcagctgaacaaaaaaaaaaaaaaaaaaaaag

SEQ ID NO: 50956 - DNA, 574 bp, Homo Sapiens
gaaaagggcatagtgccatggacgttgcaaaggcatatgctgattatagaataattgatctgattaaagaaaagctagataacttgccgaaaccagcagaaaatcaaaaactaaaaggcaagacacctcctatactgaagactgaaggccctgaaattaagaaagaagaggaactgctgtcatcaatttatggtgtaccaaccacatcagagggaaagaaagtacagaagggtaatgtggttcatctgaattcattgattaccagtggttatactaagaaagtggatatcacatttattccacggaggatttggagtcctgaagccacaacagcagagctgatcaggaagagggaactacggcgagagaggtttacacatgaggtggacttcgacgattttatgatgccttttcagaagaacatcacagagaaagctcgagcactggaagctgccttgaagacctaagtcatagcagttatttcttggggtaaatgctttgatgcccagggaccaatctttggagaaagtagatatttccatcaaagccaaagcaatccatacaccaagaactt

SEQ ID NO: 50957 - DNA, 717 bp, Homo Sapiens
acctcaggatgcttttactacccagtggcttgtaagagacctgcgaggcaaatcagagaaagagttcaaggcatatgtctctcttttcatgcggcatttatgtgagccgggggcagatggggctgagacctttgctgatggtgtcccccgagaaggcctgtctcgccagcatgtccttactagaattggtgttatgtctttgattcgcaagaaggttcaggagtttgaacatgttaatgggcgctggagcatgcctgaactggctgaggtggaggaaaacaagaagatgtcccagccagggtcaccctccccaaaaactcctacaccctccactccaggggacacgcagcccaacactcctgcacctgtcccacctgctgaagatgggataaaaatagaggaaaatagcctcaaagaagaagagagcatagaaggagaaaaggaggttaaatctacagcccctgagactgccattgagtgtacacaggcccctgcccctgcctcagaggatgaaaaggtcgttgttgaaccccctgagggagaggagaaagtggaaaaggcagaggtgaaggagagaacagaggaacctatggagacagagcccaaaggtgctgctgatgtagagaaggtggaggaaaagtcagcaatagatctgacccctattgtggtagaagacaaagaagagaagaaagaagaagaagagaaaaaagaggtgat

SEQ ID NO: 50958 - DNA, 637 bp, Homo Sapiens
cttttttttatttttttcattagaagttaccaaattaagatggtaagacctctgagaccaaaattttgtcccatctctaccccctcacaactgcttacagaatggatcatgtcccccttatgttgaggtgaccacttaattgctttcctgcctccttgaaagaaagaaagaaagaagactgtgtttttgccactgatttagccatgtgaaactcatctcattacccttttctgggtttgaagctgctgtctctagaagtgccatctcaattgtgctttgtatcagtcagtgctggagaaatcttgaatagcttatgtacaaaactttttaaattttatattattttgaaactttgctttgggtttgtggcaccctggccaccccatctggctgtgacagcctctgcagtccgtgggctggcagtttgttgatcttttaagtttccttccctacccagtccccattttctggtaaggtttctaggaggtctgttaggtgtacatcctgcagcttattggcttaaaatgtactctccttttatgtggtctctttggggccgattgggagaaagagaaatcaatagtgcaactgttttgatactgaatattgacaagtgtctttttgaaataaagaacag

SEQ ID NO: 50959 - DNA, 685 bp, Homo Sapiens
ggatgtttcagttacaactgtaatgttatttatagaacaacattaatccattaaagctaacctatttttcaatatttatgataatctatgtacatatattgtctgtccatatgtatttgtaaataggttgtatataatgtcaggtttgggtcttgggttcaagtgtatatattcctgtaagtttcttaactgcattttgatgaattcacattatgtaactataagaattgtcccaaaagtacctgtacagaaaattgaatattgaaaaattgacaaattgtgtacaaacactaaaaaaaacttgtttaaattgtatttgcaataaacaacatcaaattttttcatgaaatcttggtacaaattcagatctcttatttaaaatttaaataaggaatacattttcaaaatgcagtaatcaaaatgtgatctagtgtaatgaaataaaatgtgatctagtgtaatggaagacctttgagaacctgggtgtattaactttgtgtatatagtgtaaatatccccactgtactgttagaggccaacaattctagtatggcttgttggcaaagagtgctacaccgtttcaatgaaacaatgtatgtttgttttaactgaactaaaataaatacatgcttatcctgaaaaaaaaaaaaaacaccacaaaaaaccaaaaaaaaacaaaaaacct

SEQ ID NO: 50960 - DNA, 583 bp, Homo Sapiens
gataatttctggattgatgcagtgatgtttttgttccttccgtatttataaatgaaacacctttttttagtgtttctaaacctaaaatctacttggtttgaaatcgagtggttggaacactgtttgacttttatttgaagcatgttgttgattgaaaatttcattgaggaagttttcaatcagtgtgatcagtttgattctgtaatgagcacagcacctaatattttgaggagctctgttttggggaccaatgcttaaggtggactttgttcgtaaacaatatcccaatagatttgttgacttgaggtctggtttggttttgtttttgttttgttttgttttgttttgtttccaatagaattaagaattctaatgttgaaaaactgcacaaatttttatgggacaaagcctagaaaagagaaatgtagtttgaatcataatctaaatcatcgtatgatagaagagggaaagttttggtgccataatttctcctttcactggtgttggacttaaatcagttgaaatgtatttctgtaccacaatttacgcttcaataaaagtttaattgtctagtgaaaaaaaa

SEQ ID NO: 50961 - DNA, 493 bp, Homo Sapiens
tgatgttgagtacatttggctgttttatagcctttttcttccctcccccaaagaattctgtttgcctaactcccaaactgttggggtggtacattcctttaggaccaattaaaacataattgagggtcagtgatacatttggctgactctggttcagtattctcttaggtgattatattctctcatgtacagttacaggaaattaaaatgttaaagtaacctaaaatgaattcagaccaataaaatcaagggaaatacaagttgattgcattacttctgtatgttgcttgctattaaaaaggttaagaggccaggttacccaccagtccttgcactgttctgacactttccccaggaggaaaacaagtacaaaggttacggtggaggcataagtagaagagattgttaagaagggtattcatgtgtctttgctctttctgctttatgcctcagtttggtttaaaaacttctgtactggcaaatggtggtattc

SEQ ID NO: 50962 - DNA, 725 bp, Homo Sapiens
cgcgtccgggccatcgagctcagggaggccgtcgagcagcagaaagtgaagaacaatgacctccgggagaagaactggaaggccatggaggcactggccacggccgagcaggcctgcaaggagaagctgcactccctgacccaggccaaggaggaatcggagaagcagctctgtctgattgaggcgcagaccatggaggccctgctggctctgctcccagaactctctgtcttggcacaacagaattacaccgagtggctgcaggatctcaaagagaaaggccccacgctgctgaagcacccgccagctcccgcggagccctcctcggacctggcctccaagttgagggaggccgaggagacgcagagcacactgcaggccgagtgtgaccagtaccgcagcatcctggcggagacggagggcatgctcagagacctgcagaagagcgtggaggaggaggagcaggtgtggagggccaaggtgggcgccgcagaggaggagctccagaagtcccgggtcacagtgaagcatctcgaagagattgtagagaagctaaaaggagaacttgaaagttcggaccaggtgagggagcacacgttgcatttggaggcagagctggaaaagcacatggcggccgccctttttttttttttttttagacagagtttcgctctgtcgcccaggctggagtgcagcagcgcgatctcagctcactgcaacctccg

SEQ ID NO: 50963 - DNA, 499 bp, Homo Sapiens
ttaacactcaaattcccagctccccactgaggtgttgtgatgcttgccttttgacctccccatcccctttagtccctgcttactactttgacattcacatcctcagtgtctcagtcttttttgccgagaaagcacagtagtctgggactgggcatttatcttctctgactgaaaatctctccttggtcttaaggaaaatactaacattgaactcactgacatgatcttagcttctttaatcagactttgtgacttaaaagtttgggggttttctttgaaagtttccagccctattcagaaagcaactcttggctgtgtgcatttttcaactccaagcagcccaggggtaagtaaacaaagtatggatgaaggtcagattttcttgtcagtttctgagaaacctggcagcctgctgttaacaacacaggccagtattgggttttattgaatttggtatgtgaccaaggtcggcctaaaggatggcgcaggtcctgggcag

SEQ ID NO: 50964 - DNA, 796 bp, Homo Sapiens
  misc_feature (679)..(679): n is a, c, g, or t
tacatcgtattggtcgtacgggacgtgtaggaaaccttggcctggcaacctcattctttaacgagaggaacataaatattactaaggatttgttggatcttcttgttgaagctaaacaagaagtgccgtcttggttagaaaacatggcttatgaacaccactacaagggtagcagtcgtggacgttctaagagtagcagatttagtggagggtttggtgccagagactaccgacaaagtagcggtgccagcagttccagcttcagcagcagccgcgcaagcagcagccgcagtggcggaggtggccacggtagcagcagaggatttggtggaggtggctatggaggcttttacaacagtgatggatatggaggaaattataactcccagggggttgactggtggggtaactgagcctgctttgcagtaggtcaccctgccaaacaagctaatatggaaaccacatgtaacttagccagactataccttgtgtagcttcaagaactcgcagtacattaccagctgtgattctccactgaaattttttttttaagggagctcaaggtcacaagaagaaatgaaaggaacaatcagcagccctgttcagaaggtggtttgaagacttcattgctgtagtttggattaactcccctcccgcctacccccatcccaaactgcanttataattttgtgactgaggatcatttgtttgttaatgtactgtgcctttaactttagacaactttttattttgatgtcctgttggctcagtaatgctcaagatatcaattgttttg

SEQ ID NO: 50965 - DNA, 956 bp, Homo Sapiens
gatctgcaatctactctgacatatcaggaggtggccatccttacctgacaggcttggcagtggccggtggagcatactacctaggcctggaaggagcaatcatcggtcctattcttctctgcatacttgtggttgcttccaatatctatagtgccatgctagtgagtcccacgaattcagttcccacgccaaaccagaccccatggcctgctcagcctcagcggactttccgtgacatttctgaagatctgaaatcttcagtaggttgatgtggtttcctctgcagtgatttttctaggaagttcaaatttgacagcgagttcagctcagctgtggccctctgcccttccagctgtgcctagcaagcaaaacccaggaaagaagcagaagcctcctggccttacatacagaatgcctggacaagagagaacttgctgcgggctgctttgtattttaaaacacagcttgagagttcagagttggtggtttgctcacttaactgttgttaagatggcttgaaaagtttcattttatacactggtaccctggcttgaaatttttccactttggttatctatgttactatattatatatttataaagttattttaagaactctaaactacctgctgttaaaagaatagatggtgtaattttttcctggtttaagaaatgtattgttaaacttttctaagacagtcacttttcaaggaagagggctttcacttttgagtgtgtagttgagtgagcaggaaaaatgaatcttctacccttctcccacaatgtattatacgctctttaagaaataataaatcataagtataagggtggggtggcttatttgatgttcagttttatattataacctgggagatamaagactgagctcttcttctcttcytttytyttacgctyttwaacaatgcaaatawaaacttgctgacmcgtgaagtaaa

SEQ ID NO: 50966 - DNA, 345 bp, Homo Sapiens
  misc_feature (2)..(2): n is a, c, g, or t
cntccgtggcagacccccatcccttgggggctgtggggatctctcaagcccccgagggagaggctctggggacaccaacaaatctaagccctccctagctgcttggtaactgtgtcatgaagctgccggacagacacacgtggcatctccctgggcaggagagcaggcctgcagcatgggtcctgttcccgtgtgccgtgggtggcagtggctgcacctggcactagggctgctctgtggatgtgggtgacaacggcaggaggggatgctggccttcctgcacatagacctgcagttagtaaatcataagcccaaataaacaggttgtttaaaaaaaaaaaaaaa

SEQ ID NO: 50967 - DNA, 867 bp, Homo Sapiens
agaagaagaggatgaggatgaagatctttctaaatataagttagatgaggatgaggatgaagatgacgctgatctctcaaaatataatcttgatgccagtgaagaagaagatagtaataaaaagaaatctaatagacgaagtcgctcaaagtctcgatcttcacattcacgatcttcatcacgctcatcctccccctcaagttcaaggtctaggtccaggtcccgttcaagaagttcttccagttcgcagtcaagatctcgttccagttccagagaacgttcgagatctcgtgggtcgaaatcaagatccagctccaggtcccacaggggctcttcttccccacgaaaaagatcttattcaagttcatcatcttctcctgagaggaacagaaagagaagtcgttctagatcttcttcatctggtgatcgcaaaaaaagacgaacaagatcacggtcacccgaaagccaggtgattggtgaaaacactaaacaaccctgagcccagggccaacccctacggaacaccactactttacccagacgccacaggtcatcatctggatcatcccattctggttcccgttcaagttcaaaaaagaaataatgtattaaaatttacatcttaaaaaaatccagtacagtgcatgaagcatatttttaaagaagttggtgtcttacttggtcagaagtgctaaatctgctagtagaggtgcatgcctttcattgcttttcaaaacaatacagctgtgtttatttgtgaagttaaaagtaaatagcattttaaagccataatgtcccaaaatagatggttctggtcatttcattattttacaacccattttggcttcattttaaaaaccattttct

SEQ ID NO: 50968 - DNA, 601 bp, Homo Sapiens
gacctcaggggttgtccactttacctttatggtgaggcctgtcggatggctaagtccttgaaaccctagagctgtgacgtagaatatgtgctgtctgtgagaccgtgttcccaggagcactgactgcagttgagagagacccattttgctctcccttaccgccccccgccccgggtgctttctgcacaaagcctagagcctggcactcaagcccaccggtggcagctcctagtgactggacatgcctggaagacccctcagccttctgtttgcagaacgttcatttcaggagcttctccttcccacagacatcttacacttgctcgacactgccacctgcagaagcctggcgggctctggtcaccatgtgtctatctgaaggttgcactggccagcatgggcctgtcccaagcgagaggggagacacagtggactgaaaggactggttgaaagtggccaatctctatcagcttaatttggcagagaaaatttgtaacaactctgagcacatgctgggtgaagtcacagctcaaggaaagataaagctgggcggaaggaggtgtgcgtggcttctggggtgggacccagaggggaggctctg

SEQ ID NO: 50969 - DNA, 599 bp, Homo Sapiens
cacgcgtccggatttatcacacaatgactgcatacagacttcaaatatgtcaatagtttggtcatagaacctagaagccaaaagccacacagaagggcaagaatcccaatttaactcatgttatcatcattagtgatctgtgttgtagaacatgagggtgtaagccttcagcctggcaagttacatgtagaaagcccacacttgtgaaggttttgttttacaaatcacttgatttaacacactcaggtagaatatttttatttttactgttttatacccagaagttatttctacattgttctacagcaagaatattcataaaagtatccctttcaaatgcctttgagaagaatagaagaaaaaaagtttgtatatattttaaaaaattgttttaaaagtcagtttgcaacatgtctgtaccaagatggtactttgccttaaccgtttatatgcactttcatggagactgcaatacgttgctatgagcactttctttatccttggagtttaatcctttgcttcatctttctacagtatgacataatgatttgctatgttgtaaaatctttgtaaaaaatttctatataaaaatattttga

SEQ ID NO: 50970 - DNA, 516 bp, Homo Sapiens
ccacgcgtccgcggacgcgtgggagcaggagccggtgcgagcggagcagagccgaggtcgggccgcgagcggagccggctgagcgggcgccgagctcccgccatggcccggaacacgctgtcctcgcgcttccgccgggtggacatcgacgaatttgacgagaacaaatttgtggacgagcaggaggaggcggcggcggcggcggcggagccaggcccggacccgagcgaggtggacgggctcctgcggcaaggggacatgcttcgggcattccatgcagccttgcggaactctcccgtcaacaccaagaatcaagctgtgaaggagcgagcccagggcgtggtgctgaaagtgctcacaaacttcaagagcagtgagattgagcaggctgtgcagtcactggacagaaacggcgttgacttgttaatgaagtacatttataaaggctttgagaagcccacagaaaatagcagcgcagtgttactccagtggcacgaaaaggccttagcagtagga

SEQ ID NO: 50971 - DNA, 665 bp, Homo Sapiens
cccgggatgagagagtgaacagggagcggggcttttgtctgttggtctccctggactgaagagagggagaatagaagcccaagactaagattctcaaaatggtttattacccagaactctttgtctgggtcagtcaagaaccatttccaaacaaggacatggagggaaggcttcctaagggaagacttcctgtcccaaaggaagtgaaccgcaagaagaacgatgagacaaacgctgcctccctgactccactgggcagcagtgaactccgctccccaagaatcagttacctccactttttttaatcgtaacacctccatttgtattacatatggtgtatgggtattgatgaggtcatggtatcatatatgggattttttttctgtgtaaatcatcaagtataagaagaaactatgggactctgagccttgctttagagaatttacagtggacaaataggtgtcatcaaaccagtttttaatcattctgactcaagtgaaaacgctcagaatttcacactgtgaatccacgtttacaacccttacaggtgggccttcaggcctggttcgctacaacaatgtcttccacaactcaaactcccaccgcgctcacacaaccggtccactcctgccttttcactcacacagctcccgactgcttcttgc

SEQ ID NO: 50972 - DNA, 500 bp, Homo Sapiens
tcgccaaagttggagttagtatgttcaacagaccccattagcagaagtcatgttccagcttagactgatgaagaattaaaaatctgcatcttccactattttcaatatattaagagaaataagtgcagcatttttgcatctgacattttacctaaaaaaaaagacaccaaacttggcagagaggtggaaaatcagtcatgattacaaacctacagaggtggcgagtatgtaacacaagagcttaataagaccctcatagagcttgattcttgtatattgatgttgtcttttctttctgtatctgtaggtaaatctcaagggtaaaatgttaggtgtcagctttcagggctctgaaaccccattccctgctctgaggaacagtgtgaaaaaaagtcttttaggagatttacaatatctgttcttttgctcatcttagaccacagactgactttgaaattatgttaagtgaaatatcaatgaaaataaagtttactataaat

SEQ ID NO: 50973 - DNA, 616 bp, Homo Sapiens
  misc_feature (585)..(585): n is a, c, g, or t
gaatgatcagcatctgtgatgggagcgtcagggttggtgtgctgaggtgttagagagggaccatgtgtcacttgtgctttgctcttgtcccacgtgtcttccactttgcatatgagccgtgaactgtgcatagtgctgggatggaggggagtgttgggcatgtgatcacgcctggctaataaggctttagtgtatttatttatttatttattttatttgtttttcattcatcccattaatcatttccccataactcaatggcctaaaactggcctgacttgggggaacgatgtgtctgtatttcatgtggctgtagatcccaagatgactggggtgggaggtcttgctagaatgggaagggtcatagaaagggccttgacatcagttcctttgtgtgtactcactgaagcctgcgttggtccagagcggaggctgtgtgcctgggggagttttcctctatacatctctccccaaccctaggttccctgttcttcctccagctgcaccagagcaacctctcactccccatgccacgttccacagttgccaccacctctgtggcattgaaatgagcacctccattanagtctgaatcagtgcaaaaaaaaaaaaaaag

SEQ ID NO: 50974 - DNA, 823 bp, Homo Sapiens
acccaggaggcctatgagatggccgtgagaggcctgatccggcccatgaacaagtccccgatgctgataactggcatccgatgcctctactttgcacctccggaattcctcttagaggtgcagtgcatgcatgagacgcagaaagagctgcggaagttggttcatgaaatcggcctggaactaaagaccactgctgtctgcacccaagtgcggcgcacgcgcgacggcttcttcacgctagacagtgccctcctgaggacccagtgggacctaaccaacatccaggatgctatccgggctgctacccctcaggtagctgcagagctggagaagagcttgagcccggggctggacaccaagcagctccccagtccgggatggtcctgggactcccagggcccgagctctaccttggggctggagaggggtgcggggcagtgaatgcccaggcagctcctggggcagtggatggataaatagaagaactgctatgagctggacctgatagctgtgcagaaagtgagagcaggggcaccttttctacgtaagacacaaaactcaagctgtaacagaaaggtcaatggacttgacccaactgagaaggaaaaacttctgtatggaggaaaagacagtaaacatgacagactgatagaaagtattggcagaccaggcgtggtggcgggcacttgtaatcccagctactcccaaggctgaggcaggagaattgcttgagcccaggagtttaaggttgtagtgcgctagacggcgcctgtgaatagccactgcactctagtctggggaacatatgagacccctgccatct

SEQ ID NO: 50975 - DNA, 857 bp, Homo Sapiens
  misc_feature (730)..(730): n is a, c, g, or t
  misc_feature (804)..(804): n is a, c, g, or t
  misc_feature (833)..(833): n is a, c, g, or t
  misc_feature (848)..(848): n is a, c, g, or t
ttgcaatacagaagagtgtctaaaaactggatcacctggcaaaaaggaagagaaggccaagaacaaagaatcactttgcatggaaaacagtagcaacagctcttcagatgaagatgaagaagaaacaaaagcaaagatgacaccaactaagaaatacaatggtttggaggaaaaaagaaaatctctacggacaactggtttctattcaggattttcagaagtggcagaaaaaaggattaaacttttaaataactctgatgaaagacttcaaaacagcagggccaaagatcgaaaagatgtctggtcaagtattcagggacagtggcctaaaaaaacgctgaaagagcttttttcagactctgatactgaggctgcagcttccccaccgcatcctgccccagaggagggggtggcagaggagtcactgcagactgtggctgaagaggagagttgttcacccagtgtagaactagaaaaaccacctccagtcaatgtcgatagtaaacccattgaagaaaaaacagtagaggtcaatgacagaaaagcagaatttccaagtagtggcagtaattcagtgctaaatacccctcctactacacctgaatcgccttcatcagtcactgtaacagaaggcagccggcagcagtcttctgtaacagtatcagaaccactggctccaaaccaagaagaggttcgaagtatcaagagtgaaactgatagcacaattgangtgggatagtgttgctggggagctccaagaccttcagtctgaaaggaatagctcgccagcaggttttgatgccngtgtgagctcaagcagtagtaatcagccngaccagacattctgnaaaagctgt

SEQ ID NO: 50976 - DNA, 853 bp, Homo Sapiens
gttgtctcctttaagctttcctgggtctaacctacataggtaatttaagaacatcctcagaaaggacagctgaaggcaataggaggcagattatctctttagggcgtcctcaagtttttttggtctgttctcccacttgattgacctcaccagttgagacacctagtgtatggctcatgcccagccttccacctgggattctccagcctccacccagcagccctggattgctttctccaattaaggcctttccatcagctctctgctttttcaaagcgaaaaaactaatggattagtgggttatcttttccaaggaacaggtttgcacttcttggaaaaagtgcctaaagtgtgcccattaatatgaggatagatttaggctcataagccttttggtaacactgaaagtagtatcatataggcaagctctccttataagtaaggctttcaatttttaaaacagacatcctgctttaacaatttgtaagatgactgtgcagtaataaaagtcctttgtatttcaaaaaaaaaaaaaaaaaaaaaaaaaaaaaaaaaaaaaaaaaaaaaaaaaaaaaaaaacaacaacacaacaacaacaagagggggcggggcgctccaaaataatacccccccgaggggggcaccaacggctatgactgaccagccacacgttgttgtaaaaaaaacgcggcccccacagtagagcgacgtacgattaaaaaacacaggcgaagccggcgccgggtttaaaacacacgcacgtgatgggagaaacaaacacctctggacaccctggggaagcaacaccaccactatgcggggggagaaaaatatagaggccaccacactcgag

SEQ ID NO: 50977 - DNA, 616 bp, Homo Sapiens
atttcttgaaaagcaaattttaatggtttaattttatgtggacgtatgttaaattatccaactaccctattgttaagcatttggttttaaaatttttatgctaatataaatgctcaagtaatttaaaatattgaaagcatccctgttggtataaatttctgagtaaatgcattggatcagttggactttgaacgcctttgaaatggctttgctaaaatgctcccgccacaaagttgtaggaaatgggaagaggagtcaactagaggcaagggagttgagagagctgcaactgtaaagggcaagaacaggcagaggtaaaaagatgatggaaggtgtggtgactaagggccacggttattgggtgaaatttgagattgtaggccaactgtattttcaagcttctgaacttaggcaaaatattcatcgcaaagtctctagcgtcatatttttctcacccaaattacgtttccacgagattatttatatatagttggtctatctctgcagtccttgaaggtgaagttgtgtgttactaggctgtgttttgggatgtcagcagtggcctgaagtgagttgtgcaataaatgttaagttgaaacctcaaaaaaaaaaaaaa

SEQ ID NO: 50978 - DNA, 723 bp, Homo Sapiens
cccacgcgtccggaaggactaaaacgatccatggacaagttgaaggaaaaagaaagagacaaggtcttaactgcagaggaattgaatgctgctcagacatccgttgcatatggctgcatcaaatatgctgacctttcccataaccggttgaatgactacatcttctcctttgacaaaatgctagatgacagaggaaatacagctgcttacttgttgtatgccttcactagaatcaggtctattgcacgtctggccaatattgatgaagaaatgctccaaaaagctgctcgagaaaccaagattcttttggatcatgagaaggaatggaaactaggccggtgcattttacggttccctgagattctgcaaaagattttagatgacttatttctccacactctctgtgattatatatatgagctggcaactgctttcacagagttctatgatagctgctactgtgtggagaaagatagacagactggaaaaatattgaaggtgaacatgtggcgtatgctgctatgtgaagcagtagctgctgtcatggccaaggggtttgatatcctgggaataaaacctgtccaaaggatgtaatccttcataggtttgaacactgtgtgtttttaccaaagtggccattggcactgtttgcttttttacaatcatgtggacacaagcataagtaaagaaaatttgtcaaccagaaaaaaaaaaaaaaaaaaa

SEQ ID NO: 50979 - DNA, 660 bp, Homo Sapiens
  misc_feature (660)..(660): n is a, c, g, or t
gcagccttccaggagcctcacctgcagatgccccccagcctgggccagatgagcctgccctttgaccagcctcacccccagggcctgctgccgtgccagcctcaggagcatgctgtgtccagccctgaccccctgctctgctcagatgtgaccatggtggaagacagctgcctgagccagccagtgacagcgtttcctcagggcacttggattggtgaagacatattccctcctctgctgcctcccactgaacaggacctcactaagcttctcctggaggggcaaggggagtcggggggagggtccttgggggcacagcccctcctgcagccctcccactatgggcaatctgggatctcaatgtcccacatggacctaagggccaaccccagttggtgatcccagctggagggagaacccaaagagacagctcttctactacccccacagacctgctctggacacttgctcatgccctgccaagcagcagatggggagggtgccctcctatccccacctactcctgggtcaggaggaaaagactaacaggagaatgcacagtgggtggagccaatccactccttcctttctatcattcccctggccacctccttccagcactgactggaagggaagttcaggctctgagacacgccccan

SEQ ID NO: 50980 - DNA, 642 bp, Homo Sapiens
ctcttttcacagagagtagccaaccagagacctttgctttgatatcatcaactgcagacaatgctgttgatgggaatgctggaagcagaaactttgtcatcggaaaaacttttcttgtatgcatgagactcaacatcaggatccacagcttaaagatgggaattcaggtatgaaagaaaacaggcaaggaggcactgagggagaaagacacagactttatcgctctgtggctcattgttactggaatattctaaaactcttgttcacatgctattatgacttataaagcagcaacagctgaggcgcaccaggacacagcttccatttctttaacgtctgttcccttaacatcgctgaaatgatttactgttgaagagatgccttgcggtgtggccagctgtgaggagaaagcagctggcagtgttaggacattagtccaccttcagcgcagggtctctggccgggtctgactcagaaaccttggtactcgccccttggccacagtgcccagacccatgtaacccactggctcctgcattaacccagaaatacctcgcttctatctgtgcacttagctgggaacttacccactgtaatcacctaaataaagtgtttataaacatgaaaaaaaaaaaaaaaaaa

SEQ ID NO: 50981 - DNA, 759 bp, Homo Sapiens
atatttgacggtcaccaaggaatctgggaacagcatcgtgctcttgtttaaaatgatcagcaccagggcggccagcgggctctaccgagcgataacagagacgcacgcattctacaggtgtgacacagtgaccagcgccgtgatgatgcagtatagccgtgacttgaagggccacttggcatctctgtttctgaatgaaaacattaaccttggcaagaaatatgtctttgatattaaaagaacatcaaaggaggtgtatgaccatgccaggagggctctgtacaatgctggcgttgtggacctcgtttcaagaaacaaccagagcccttcacactcgcctctgaagtcctcagaaagcagcatgaactgcagcagctgcgagggcctcagctgccagcagacccgggtgctgcaggagaagctacgcaagctgaaggaagccatgctgtgcatggtgtgctgcgaggaggagatcaactccaccttctgtccctgtggccacactgtgtgctgtgagagctgcgccgcccagctacagtcatgtcccgtctgcaggtcgcgtgtggagcatgtccagcacgtctatctgccaacgcacaccagtcttctcaatctgactgtaatctaatctgttgtgcttttgttggacttggcatgtttccatgaactgcactattataaactattaaaatgatagattgtggagaaagtaattattccaacacccatctgccatgcgatgttaaaaaaaaaaaaaaa

SEQ ID NO: 50982 - DNA, 817 bp, Homo Sapiens
ataaatggtcaacaagcaactcttcttggatgccattcaccctacagaagccatattttcagaagacagaaacaccatggagcctgttcataaggttaaaaatatcccatccattttcaacactccagagccaacaacaacgcaagaacctttggtgggcagccaaaagagaaaagcaaggaaaaccaagattacacaccttgtcaggacagcagatggccgggtatcaccagcaggaggtactttggatgacaaaccaaaggaacaactgcagaggagtctccctaaagcaactgagacagactgcaatgacaaatgctcacacaacaccgaggtcggggagacgcggagcagtactccagaaatgcctgccgtgtctgcgttctttagcctcgctgcgctggctgaagtggcagccatggaaaatgtgcacagaggtcagaggtcaactccgctcacccatgatggacagccaaaagaaatgccgcaggctcctgtacttatttcctgcgctgaccagtgaagcgccctttcattgtaaaacattgtgctttacctactaccctagccttgtctttaccgagggatgctagtgagtccaagtggtggaaaatatagactgcaaacaagtgcttgttgccccacacggcccagattcacttgaagcagaagttagcatcctgggccagtttgttctctcagaacccagaatctttgagggtaaggttatctgtctgatactgagcagaaacagaatgatcctggagctttgctttctattgaaggcttttgacggtaataggtggtaacttggtaa

SEQ ID NO: 50983 - DNA, 811 bp, Homo Sapiens
ctgttttttggaggtgacatttccatccagaaggataacgatcaggaaactattgctgtagatgagtggattgtatttcagtctccagcaagaattgcccatcttgttaaggaattaagaaaggaactagatattcttctgcaagagaagattgaaagtcctcatcctgtagactggaatgacactaaatccagagactgtgcagtactgtcagctattatagacttgatcaaaacacaggaaaaggcaactcccaggaactttccgccacgattccaggatggatattacagctgacagcttttcaggggtggtctgaaaagccagtttgacagccattcttcatcattgtttaaattttggctggatgccaaaccctgggacatgaacaattttcatgtgtaaggtagaagccttcagtaggtagtaaagacttaatgtgcatgacttgatgttatatgtagagatatatatatatatatatataccataaaagcaatatgttctctgatcatatactctgctgtggtcatgcccactctttgggagtatattccctttatatatattgagtattgtaccacttgagaaattcctttgttctgttatacaaaattaatctttctgctcataatgattgatgataccaccagtaaaaataggatgtataccccaaaacaagtgtcacttaagaatgtgaacacaagcacattgtttacaatgaaacttctatcggaagtacattaatgtgaggtaataaagtacagtatttaatacacagtgtacagtgttaatctcaaaaacaaaacaa

SEQ ID NO: 50984 - DNA, 499 bp, Homo Sapiens
cacttacacctaaacccaaaggaaaaaccagctctaggtccaattgttctgctctaactgatacctcaaccttggggccagcatctcccactgcctccaaatattagtaactatgactgacgtccccagaagtttctgggtctaccacactccccaaccccccactcctacttcctgaagggccctcccaaggctacatccccaccccacagttctccctgagagagatcaacctccctgagatcaaccaaggcagatgtgacagcaagggccacggaccccatggcaggggtggcgtcttcatgagggaggggcccaaagcccttgtgggcggacctcccctgaggcctgtctgaggggccagcccttagtgcattcaggctaaggcccctgggcagggatgccacccctgctccttcggaggacgtgccctcacccctcactggtccactggcttgagactcaccccgtctgcccagtaaaagcctttctgcagcaa

SEQ ID NO: 50985 - DNA, 762 bp, Homo Sapiens
gcgtccggagaatgacagatggaatgaaactagagcccagctgcttgcacaaatggatgttagtatgggaggaagagtggcagaggagcttatatttggaaccgaccatattacaacaggtgcttccagtgattttgataatgccactaaaatagcaaagcggatggttaccaaatttggaatgagtgaaaagcttggagttatgacctacagtgatacagggaaactaagtccagaaacccaatctgccatcgaacaagaaataagaatccttctaagggactcatatgaacgagcaaaacatatcttgaaaactcatgcaaaggagcataagaatctcgcagaagctttattgacctatgagactttggatgccaaagagattcaaattgttcttgaggggaaaaagttggaagtgagatgataactctcttgatatggatgcttgctggttttattgcaagaatataagtagcattgcagtagtctacttttacaacgctttcccctcattcttgatgtggtgtaattgaagggtgtgaaatgctttgtcaatcatttgtcacatttatccagtttgggttattctcattatgacacctattgcaaattagcatcccatggcaaatatattttgaaaaataaagaactatcaggattgaaaacagctcttttgaggaatgtcaattagttattaagttgaaagtaattcaatgattttatgtttggttactctactaaattgataaaattgtgccttta

SEQ ID NO: 50986 - DNA, 674 bp, Homo Sapiens
ggcacgaggaagtacaacactccaagatgggttcatcttttcttcctttcccattcacctggctcaatcctcctccaccaccaggggcctcaaaaggcacatcatccgggtctccttatcttgtttgataaggctgctgcctgtctccctctgtggcaaggactgtttgttcttttgccccatttctcaacatagcacacttgtgcactgagaggagggagcattatgggaaagtccctgccttccacacctctctctagtccctgtgggacagccctagcccctgctgtcatgaaggggccaggcattggtcacctgtgggaccttctccctcactcccctccctcctagttggctttgtctgtcaggtgcagtctggcgggagtccaggaggcagcagctcaggacatggtgctgtgtgtgtgtgtgtgtgtgtgtgtgtgtgtgtgtgtgtgtcagaggttccagaaagttccagatttggaatcaaacagtcctgaattcaaatccttgtttttgcacttattgtctggagagctttggataaggtattgaatctctctgagcctcagtttttcatttgttcaaatggcactgatgatgtctcccttacaagatggttgtgaggagtaaatgtgatcagcatgtaaagtgtctggcgtgtagtaggctct

SEQ ID NO: 50987 - DNA, 484 bp, Homo Sapiens
gatattgtcattaatcattttgtaccttgacatgggttgtctaataaaactcggacccttcttgtgaaatcagttaaataagacttgtctcggtcacctgtgccctgtccagactcgaggcagtggtaacactgcacagtgctatgtggcttctctttgaggatttttgggttttgtaactaaattcttgctgccctcatactttttatgtattagaatcatattcgtattgcccttttaaaacattgggatcctccaaaggcctgccccatgtatttaacagtaatacaggaagcatggcaggcaccatgcaaaccaaggatggatggtgcagtccctgtgtcagtgggcggtggtttcctgctggcctggaatcactcatcacctgattgattggctctgtggtcctgggcaggtgcctcataggtgtgtggatatgatgacgtttctttaaaatgtatgtatttaacaaatacttaattgt

SEQ ID NO: 50988 - DNA, 559 bp, Homo Sapiens
cgcgtccgccatcttcctccccaccccccctttcctccccactacctgaggctccccagcctaaggaggagccgccagtgcctgaagcccccagctcagggcccccctcctcctccctggaattgctggcctccttgaccccagaggccttctccctggacagctccctgcggggcaaacagcggatgagcaagcataactttctgcaggcccataacgggcaagggctgcgggccacccggccctctgacgaccccctcagccttctggatccactctggacactcaacaagacctgaacaggttttgcctacctggtccttacactacatcatcatcatctcatgcccacctgcccacacccagcagagcttctcagtgggcacagtctcttactcccatttctgctgcctttggccctgcctggcccagcctgcacccctgtggggtggaaatgtactgcaggctctgggtcaggttctgctcctttatgggacccgacatttttcagctctttgctattgaaataataaaccaccctgttctgtgaaaaaaaaaa

SEQ ID NO: 50989 - DNA, 653 bp, Homo Sapiens
tgggcagtgtccttgagttgttttttgacactcttacctgggcttctctgtgtgcatttgcgtctggcctggagtaagcaggtccgacccctccttctttacagcttagtgttattctggcatttggttaagctggcttaatctgtttaatgttatcagtacattttaaataggggcattgaaatttactcccaccaccagggcttttttgggggatgcctgggcctttaaaacactagccaaactctaattaattctcaaatcactgccaggagttcttgctcctggctgcaggcccaggccccaaggtctccttcttggggtcacaaacagcagtaaggaagaggaatatatagcaactcagggcctgggaattgtggggcaatccgttcttagggactggatacttctggctggctgagtatagtactagctgcctccccaccaggttccgagtagtgtctgagactctgctctgcagggcctagggtagcgctgggagtgtagaagtggcctgcccttaactgttttcactaaacagctttttctaaggggagagcaagggggagagatctagattgggtgagggggacggggatgtcagggaggcaagtgtgttgtgttactgtgtcaataaactgatttaaagttgt

SEQ ID NO: 50990 - DNA, 758 bp, Homo Sapiens
ggtcttgatgctgtggaagtagtttgaggaacatcctatgagttttcttagaatgtataaaggttgtagcccatccaacttcaaagaaaaaaatgaccacatactttgcaatcaggctgaaatgtggcatgcttttctaattccaactttataaactagcaaaaaagtgtttgcttattccaccagttctactgtgacatactcgagtataaagacatgtagcaataacggggagtggggggggagtctcacagtgcctttggaagggcccgaacttgccttaaatcttcctcaaccaaataagtattttattagtgcttgagagaatctgaatgtaggatgggttcaactgcacaaaaggaaaagatttttaccactttttttatatagatataaagtgaagcaaccgccttagtgctgaaatatgtagtacatgaatatgccttgtttaattacagaaaattccaaaacttgtactatttttttttccatgtagaaaggcaggaatgtctcctaagctttcctggacagcagatgaatgagcggtagctttagtttgtacgtaggtacagttggagcactatatgtactctctggactactttggacagaagtaggtttttgaatgtaacaagataagtcaacttgagttgtaatatatttttggggaatcagctcactacaaattgtgactgtaaacattgtactgtaaatgttttgtagtttttccccccataaaattttttggcaaaaaaaaa

SEQ ID NO: 50991 - DNA, 662 bp, Homo Sapiens
ccacgcgtccgcggacgcgtgggctcagctactgtctctccggaatgtatgaccacagatacggcgacagtgagttcacagtgcagagcaccacaggccactgtgtccacatgaggggcctgccgtacaaagcgaccgagaacgacatttacaacttcttctctcctctcaaccctgtgagagtccatattgagattggcccagatggaagagtgacgggtgaagcagatgttgagtttgctactcatgaagaagctgtggcagctatgtccaaagacagggccaatatgcagcacagatatatagaactcttcttgaattcaacaacaggggccagcaatggggcgtatagcagccaggtgatgcaaggcatgggggtgtctgctgcccaggccacttacagtggcctggagagccagtcagtgagtggctgttacggggccggctacagtgggcagaacagcatgggtggctatgactagttttgttaggaacatttgagttacttcaatcattttcacaggcagccaacaagcaattaagagcagttataatagaggaagctgggggacccattttgcaccatgagtttgtgaaaaatctggattaaaaaattacctcttcagtgttttctcatgccaaattttcttctagcatgtgat

SEQ ID NO: 50992 - DNA, 814 bp, Homo Sapiens
tctagcgaggtgacagcgtagaaccaatgagaaatgggtgccggagattcgatgccactgtcccaaagcccccatcatcctagttggaacgcagtcggatctcagagaagatgtcaaagtcctcattgagttggacaaatgcaaagaaaagccagtgcctgaagaggcggctaagctgtgcgccgaggaaatcaaagccgcctcctacatcgagtgttcagccttgactcaaaaaaacctcaaagaggtctttgatgcagccatcgtcgctggcattcaatactcggacactcagcaacagccaaagaagtctaaaagcaggactccagataaaatgaaaaacctctccaagtcctggtggaagaagtactgctgtttcgtatgatgctggcaagacacccagaaaggctattttcagatgaaatcgatattagaagctatattagctgaaacaactccttttactgcgtagaacctatatcgagagtgtgtgtatatgtattataggaggagctctcaattttatgtattctttctgcctttaattttcttgtttgtttgagcttagggatgagatacttatgcaagatatttttgaagtaaattaaacatttttcacatctctggaaatttagagttctagacctctggttaatttatatctaatatgaagaagacacctctaatctggatgttaagaatgaagttctgctacattataatgtacagaagagcaaaaggggagggaacactatggtttaacccctctctttgatttaaagggctacttaaatggcacaaggtgcatttatgg

SEQ ID NO: 50993 - DNA, 582 bp, Homo Sapiens
  misc_feature (538)..(538): n is a, c, g, or t
  misc_feature (566)..(566): n is a, c, g, or t
tcacaccttcatccctgtcttcctcatgttcacacttgtcttccccatgttcatagctgcctttcttaccattttggtttgaagggcagtcttctctggcttgtttttttgtttttcccagaaaatcagtattattttttaaataagaaaaacattcctagaagatgataattgtgaaaacctcctttggcttatttgcttttccagattttagtctcctttctccccatccgggaaagatggtggaagacataggctaaatttctccagcctcacaatggtcttcacttggtctgacttgtaccaattctagcacccactgaaaaacaagttgagtagagagtgtagagtgcagaaatgtggcttttgccccactttgcatctccaaaattacaacggttggccgatcccatttgaggacaatgcttagttataagtctccgagttggaaaaggaagaaagccagagctgtctagtttcattcattctttcagtaaatatttattgagtacctactgtgtgctaggcattgacctgngaactagagatacttcacagaataacangggaaagttcccttgt

SEQ ID NO: 50994 - DNA, 669 bp, Homo Sapiens
cctgtccatgaactgggccatcgtggccgacattctgctgtacgtggtgatccctacccgacgctccaccgccgaggccttccagatcgtgctgtcccacctgctgggtgatgctgggagcccctacctcattggcctgatctctgaccgcctgcgccggaactggcccccctccttcttgtccgagttccgggctctgcagttctcgctcatgctctgcgcgtttgttggggcactgggcggcgcagccttcctgggcaccgccatcttcattgaggccgaccgccggcgggcacagctgcacgtgcagggcctgctgcacgaagcagggtccacagacgaccggattgtggtgccccagcggggccgctccacccgcgtgcccgtggccagtgtgctcatctgagaggctgccgctcacctacctgcacatctgccacagctggccctgggcccaccccacgaagggcctgggcctaaccccttggcctggcccagcttccagagggaccctgggccgtgtgccagctcccagacactacatgggtagctcaggggaggaggtgggggtccaggagggggatccctctccacaggggcagccccaagggctcggtgctatttgtaacggaataaaatttgtagccagaaaaaaaaaaaaaaaaaaaa

SEQ ID NO: 50995 - DNA, 850 bp, Homo Sapiens
ttggagggagggcaagacgacagtgttaagtcagatcatttaatggtttcccctaagccctggaaaaatatttgaaagaatggcagcaaaaaggttaagaaagcaagccagatttactgcacaatatgcagtacccagtactactttaaatcccaagagaacagtgtgatgtctaatatatacaggtctatgaaaatactgtggaataagcccaggaaggttagatgtgtttgcaaataagttgcccaaagggtccccctctaagtaaaacaaatattcagaccacaggctttaatgtaaactgtcaaaaagtgggatgtggaggatttttgttaagtgtcaatcgaagttaaaaagcaagggtttttggccaggcgtggtggctcacgcctgtaatcccagcactttgggaggccgaggccggcaaatcacctaaggtcaggagttcgagaccagcctggccaacatggtgaaaccccgtctctactaaaaatacaaaaaaattagcccggtgtggtggcaagtgcctgtagtcccagctacttgggaggctgaggcaggagaactgcttgaacccgggaggtagaggttgcagtgagccacgatcatgccactgcactccagcctgggcaacagagcaagactccatctcaaaaaagaaaaaaaaaaattaaaggttttggctgggtgcagtggctcatgccggtaatcccagcactttgggaggccaaggtgggaggatcacttgaggtcaggagtttcagactggcctgggcaacgtaaaaaattaaaaaatagccaggcatggacatggtagtgcatacctgtggtcccagccactcaagaggct

SEQ ID NO: 50996 - DNA, 870 bp, Homo Sapiens
tataggtaattttgcataccatttttatttaagggaaaaaattaggtattgtgaaatattttgctaatcttatagaaaaggaaaaaatcccgttatttaaagggaaaagtaaatttaacagttgccttttttcttaatgtcagggcagatcttattttacagtacagtgggggaaatagaaacatgtgaaaggcaaaaggcaggctcctaaattaatgtcagtgaagttcagggtgggcaaatgagtgtgtgtgaggtataggaaatgctgatgacttctttaatgcttgaagtccgttcacaggtatctagccctagaatgcctagaacaggaagaggcagctggtgttctgcaaaacttggacaggggcaaagttgctgaaaaagttttggtttaacccgaagataagtggaaaagagcttgtccatgaacccaggttctcactctgtttacagaagtgtgttgagtacagttggtgaaggaagaggtaacaaaaaatgctaaatattttatccatgaaaatgacttccagaaaaggaagaatatgaaccccagaccgaaggggaaaagatagttaatagtattatctaacctggttggtatttgtaatgaatggtgattttaattagtcattagccataatgatgtttatttacagtataactcctgaatgctacttaaataaaccaggattcaaactgcaagccagccaggccgttcattatttaaaacgttttaatcggggccttccgggtagaaggtggagcggcagggtgtaattagtgttgattgtttgggcccttttcttccccttgcgagttttatactcctgggcccatgatggctcgtgttgctcctctggtctttgt

SEQ ID NO: 50997 - DNA, 914 bp, Homo Sapiens
  misc_feature (914)..(914): n is a, c, g, or t
gggagagccttagaaaaatgcagatcacatcctgaggtgatcggtgtctttggtgagtctgttaaaggctatggggaggtgacaaggcggggtcgccggcagcatgtcaggttcactgaatatgtaaaagatgggctgaaacacacgtgtgtgaaattctacattgagggctctgagccagggaagcaaggaacggtgtatgcgcaagtgaaagagaacccaggaagtggtgaatatgattttcgatatatatttgtagaaattgaatcttatcctagaagaactattatcattgaagataatcgatcccaagatgattaaaatagggtttctgatggatgttgaatggcgtggactcgctactccgttcttcacagctgccttccagaatgtgttcaaaagaaagacaagaaggagtgtatggcttataaagtgaatctaatacagtatttgttgcatttaaacaaactagacattttcttacggaaaaattatgaaatacagcatattttatgttctcccattgactcaatcatgacaatatttctgctttaacaccatctttcatgattagaaatgtttgttattggaaatgttacaccatgtaaataaaggacatagcattttagtatcggtatttcattttatattatagaaactggttaaatgtctggcggaataaaatttaaaactaaccaactaaaaaagaacaagaaacaaacagaaggagaaaatggagagagaggcaaggagaaccgaggaaggaggaggaagggacggaggagggcggaaaaaggcagaacgtgagagcgaaaggcggacgaaataggagaggagagggaggaggaggagagcggagagaggaggagctaagaggggaaacaaagaagaagaagacggagttggggcgcagn

SEQ ID NO: 50998 - DNA, 712 bp, Homo Sapiens
accgtcacctggcagagcactcaccctactatgaggccatgaagaagaaagacacagaggttctcttctgctttgagcagtttgatgagctcaccctgctgcaccttcgtgagtttgacaagaagaagctgatctctgtggagacggacatagtcgtggatcactacaaggaggagaagtttgaggacaggtccccagccgccgagtgcctatcagagaaggagacggaggagctcatggcctggatgagaaatgtgctggggtcgcgtgtcaccaacgtgaaggtgaccctccgactggacacccaccctgccatggtcaccgtgctggagatgggggctgcccgccacttcctgcgcatgcagcagctggccaagacccaggaggagcgcgcacagctcctgcagcccacgctggagatcaaccccaggcacgcgctcatcaagaagctgaatcagctgcgcgcaagcgagcctggcctggctcagctgctggtggatcagatatacgagaacgccatgattgctgctggacttgttgacgaccctagggccatggtgggccgcttgaatgagctgcttgtcaaggccctggagcgacactgacagccagggggccagaaggactgacaccacagatgacagccccacctccttgagctttatttacctaaatttaaaggtatttcttaacccgaaaaaaaaaaaaaaag

SEQ ID NO: 50999 - DNA, 894 bp, Homo Sapiens
  misc_feature (831)..(831): n is a, c, g, or t
  misc_feature (836)..(836): n is a, c, g, or t
  misc_feature (857)..(857): n is a, c, g, or t
  misc_feature (894)..(894): n is a, c, g, or t
gccgtggggccgacctgggggatgcagacatccggctccgtattcctgcctatcggggccaggatgcaaaaacaatttttgcgtaaaagatgtcacactgatctgctggagtggggtggacacatgaattcagttttatcatgaacactcgccactggctgcttgttaattcagggataatggtggcattcttacaaactgctcgggaaatagaatgacgggaacacttttagggagcccaggaagttaccagggacattggtgtcgccggcccaggcaacagcagcgtacgcttttcaaagatcattgagttgtcttagaatttgaagctgtgtaatgacaatgtcacctggagttcgtctccatttcttaactttttgttgcacaagtatttggacagaagtcgaactgtgaatgagatactgaaatgcactaaattgtattacattaaactggagttacttgatacaatgaagaaatgcatctgatctacttgtatttattgtctcagaattgtacgttgtgacaatcaaatgttacttgcctaaatgccaggaaattcaactggccttttaatcagcaagatcgccagcaagtactgtaactgtaaaggaaaatctctctctctggagaacccacacaaaccattgacctgagtgcgcatgacagccactggcttctttttctatgattgaaaatctgccatcgctgactgttggccagtttcaaagggacccattgtatacagggtgcaaatgtattatacggatgtttccttttgtacacttcatttttacaagttttgctactcacaagctttatgtatgggangatanaaggtattttttggtctttanaaaccttggccggggttgaagggctgctaaacttacn

SEQ ID NO: 51000 - DNA, 488 bp, Homo Sapiens
agatgccaaggagcacaagaagtggtccatctcccgaattcgctgttaccgcctgtctctttaagggcatgccttgtgctgttaatagatcttagggtgaaccacttcattctgcagggttctccctcccaccttaaagaagttccccttatgtgggttgcctggtgaatggccttccttcccgccagagggcttgtgaacagaccggagaggacagtggattgtttatactccagtgtacatagtgtaatgtagcgtgtttacatgtgtagcctatgttgtggtccatcagcccctcacattcctaggggtttgagatgctgtaggtggtatgtgacaccaaagccacctctgtcatttgttgtgatgtcttttcttggcaaaagccttgtgtatatttgtatattacacatttgtacagaattttggaagattttcagtctagttgccaaatctggctcctttacaaaagaaataccttgagaaaa

SEQ ID NO: 51001 - DNA, 707 bp, Homo Sapiens
cgtccgcacagggaacatccctgaagaatgctgggaactgcctaagccccgcagtcattgtcggcctcctgaaagaggcttccaagcaggcggatgtgaacttggtgaacgctaagctgctggtgaaagaggctggcctcaatgtcaccacctcccacagccctgctgcaccaggggagcaaggcttcggggaatgcctcctggccgtggccctggcaggcgccccttaccaggctgtgggcttggtccaaggcactacacctgtactgcaggggctcaatggagctgtcttcaggccagaagtgcctctccgcagggacctgcccctgctcctattccggactcagacctctgaccctgcaatgctgcctaccatgattggcctcctggcagaggcaggcgtgcggctgctgtcctaccagacttcactggtgtcagatggggagacctggcacgtcatgggcatctcctccttgctgcccagcctggaagcgtggaagcagcatgtgactgaagccttccagttccacttctaaccttggagctcactggtccctgcctctggggcttttctgaagaaacccacccactgtgatcaatagggagagaaaatccacattcttgggctgaacgcgggcctctgacactgcttacactgcactctgaccctgtagtacagcaataaccgtctaataaagagcctaccc

SEQ ID NO: 51002 - DNA, 581 bp, Homo Sapiens
tttccttacagtgagacatttaagcacacattttattcacatagatactatgtccttgacatattgaaatgattcttttctgaaagtattcatgatctgcatatgatgtattaggttaggtcacaaaggttttatctgaggtgatttaaataacttcctgattggagtgtgtaagctgagcgatttctaataaaattttagttgtacacttttagtagtcatagtgaagcaggtctagaaaataagcctttggcagggaaaaagggcaatgttgattaatctcagtattaaaccacattaatctgtatcccattgtctggcttttgtaaattcatccaggtcaagactaagtatgttggttaataggaatccttttttttttttttaaagactaaatgtgaaaaaataatcactacttaagctaattaatattggtcattaaatttaaaggatggaaatttatcatgtttaaaaattattcaagcactcttaaaaccacttaaacagcctccagtcataaaaatgtgttctttacaaatatttgcttggcaacacgacttgaaataaataaaactttgttt

SEQ ID NO: 51003 - DNA, 495 bp, Homo Sapiens
ggcacagctccccacagagagcaagttgtcagcaggtctctgtgcactggtattggggcagggcagtgccctgggggtaagctaggtggctcagggagtggcagaagggccatttttccctctgccaaaaagacttccttggatttgtagatgttgacccagagtcctctgtcccctcctgaagaggattttcttactggtttctactgaaggggaggtaggggaggaggaaaaaaggaccatgtgtgatgctgttagacaagacactgacgctgattatggagggtctcctgcaggcccttgtgggctccttggcaaggccccaggctgggaaggagctccccccactgcccatcctgcccgctttgtggcgggtagagtcagtgacagggaggcagccctccttttgtgtatatagagtgagctgatttgggctcaggaaaacctagtcgcttgttgctctcgtctgtgacatttttgtacactggtttgcta

SEQ ID NO: 51004 - DNA, 569 bp, Homo Sapiens
ctatagaaatgtctgcattttaacttggtttattttaccctcattttgttggagagaaaaagatacacattggtttcttcctatttttcccagctattgacctgaaaagtggttctggaaaagtgtaccaaggccctgcaaaaggtgctgctgatacaacaatcatactttcagatgaagatttcatggaggtggtcctgggcaagcttgaccctcagaaggcattctttagtggcaggctgaaggccagagggaacatcatgctgagccagaaacttcagatgattcttaaagactacgccaagctctgaagggcacactacactattaataaaaatggaatcattaaatactctcttcacccaaatatgcttgattattctgcaaaagtgattagaactaagatgcaggggaaattgcttaacattttcagatatcagataactgcagattttcattttctactaatttttcatgtatcattatttttacaaggaactatatataagctagcacataattatccttctgttcttagatctgtatcttcataataaaaaattttgccc

SEQ ID NO: 51005 - DNA, 655 bp, Homo Sapiens
atggacattggacggactgtgcttcagaactaccttcctcgtcacaggcttgatgctggtactttcggaacaatgggagttggtttgggatttgctattgcagctgccgtggtggctaaagatagaagccctgggcaatggatcatctgtgtggaaggagacagtgcatttgggttttctggcatggaggtagaaaccatctgcaggtacaacttgccaatcatactgttggtagtgaataacaatggaatttaccaaggttttgatacagatacttggaaagaaatgttaaaatttcaagatgctactgcagtggtccctccaatgtgtttgctgccaaattcacattatgagcaagtcatgactgcatttggaggcaaagggtattttgtacaaacaccagaagaactccaaaaatccctgaggcagagcctagcagacacaactaaaccttctcttatcaacatcatgattgagccacaagccacacggaaggcccaggattttcattggctgacccgctctaatatgtaaataaagacgccagtkggtggtcttgagttttctctttcttgcaagatgaaattttattttccacagcaaaattactctactgttaaaattgtgcaaaataaaataaacatttaaaatgaca

SEQ ID NO: 51006 - DNA, 829 bp, Homo Sapiens
  misc_feature (764)..(764): n is a, c, g, or t
  misc_feature (786)..(786): n is a, c, g, or t
ggtgccaaactcagggacccagcactgggctgggttgggagtagggtgtcccagtggggttggggtgagcaggctgctgggatcccatggcctgagcagagcatgtgggaactgttcagtggcctgtgaactgtcttccttgttctagccaggctgttcaagactgctctccatagcaaggttctagggctcttcgccttcagtgttgtggccctagctatgggcctaaattgggctctaggtctctgtccctggcgcttgaggctcagaagagcctctgtccagcccctcagtattaccatgtctccctctcaggggtagcagagacagggttgcttataggaagctggcaccactcagctcttcctgctactccagtttcctcagcctctgcaaggcactcagggtgggggacagcaggatcaagacaacccgttggagcccctgtgttccagaggacctgatgccaaggggtaatgggcccagcagtgcctctggagcccaggccccaacacagccccatggcctctgccagatggctttgaaaaaggtgatccaagcaggcccctttatctgtacatagtgactggagtggggggtgctggcaagtgtggcagctgcctctgggctgagcacagcttgacccctctagccccctgtaatactggatcaatgaatgaataaactctcctaagatctccaaaaaaaaataacaaaaaaaaaaaactgtcgacgcctcgccctcgagagcttctaaacattcnttgcgcgcgggccagaagtaangaactgggctactggttctaagaacctggcctgactaggctgg

SEQ ID NO: 51007 - DNA, 585 bp, Homo Sapiens
gaacatcctgctgcatgacctatcagtatggtgttaatgtgtctgtggaccctcgctctctgtctccaggcagttctctcgaatactttgaatgttgtgtaacagttagccactgctggtgtttatgtgaacattcctatcaatccaaattccctctggagtttcatgttatgcctgttgcaggcaaatgtaaagtctagaaaataatgcaaatgtcacggctactctatatacttttgcttggttcattttttttcccttttagttaagcatgactttagatgggaagcctgtgtatcgtggagaaacaagagaccaactttttcattccctgcccccaatttcccagactagatttcaagctaattttctttttctgaagcctctaacaaatgatctagttcagaaggaagcaaaatcccttaatctatgtgcaccgttgggaccaatgccttaattaaagaatttaaaaaagttgtaatagagaatatttttggcattcctctaatgttgtgtgttttttttttgtgtgtgctggagggaggggatttaattttaattttaaaatgtttaggaaatttatac

SEQ ID NO: 51008 - DNA, 1024 bp, Homo Sapiens
ctcgagtgtataattctctggagctcaattctatgcagttgtgctgatatttcattaagtcactgtgtatttttaagtgttgatacattaaaagtcgctttatggaagatgagtaaattttttaaatacttggaaattttatttccttgttaacttctacagatcagggcatgcaaccaaaagcagcttaaatgaaatattttaaaataaaatatcaggaagctatttttagatttcttctggcttatgtttctactttaggaccctcattgttctcttattaaaaaaaattatttcctgtgcatctcatggactgcagggtaaattatttgggcataaataatttaaatagttttctttcattttgactatctccagtaataacagtttttattatccagcatattggcttattgcacaaatcttaaaatgtacattgactactttctgagaagaaagtggtatcagtactcatgatgaaaaggttactactgaacaaattcacatttcaggaacacctctatctttggtttaaatcttactcttagtttttccgtctaaaaatcatactggtattagtatcaggtaaggaaattaaagtttttaaaatggtttcattctctgcaatatgcaaaatttagattttactttctggtactgtaaagaacctgaagtgatttacacttaatgggtgattaatccagtattctttaccctgaatgtttggatattaaagttcctttatgttttctataacctgtgggatcttcttgcagtgattattgtgtgtgagattttttttctttttggtctatccatattgttatattcactcaggtattttttttttaatcttattccagaatcagtggtttatattgggttactgtttaacacaaatggawtggcatctgcagattaattawtatgaamcagggyymttttcytgckrtacttgtgaaatgagatcacatyagtcttatttccccgtttgtccygtgctgtamwctyctttattgtgtgt

SEQ ID NO: 51009 - DNA, 643 bp, Homo Sapiens
ctcatattcgggaaggagctaagtgcaatagggtctgacacgaccccgctgccctcctgggccgctctgaatagcagcacgtgggggtccctgaagcaggctctgaaaggcctgtctgtggaattcgcgctgctcgccgacaaggctgcacaacagggtaagcaggaagagaacgacgtggtggagaagctgaacctcttcttggatctgctgcagtcctataaggacctgtgcgagcggcatgagaagggcgtgttgcacaagcaccagcgggccctgcacaagtacagcctgatgaagaggcagatgatgagcgccaccgcgcagaaccgcgagccggagtccgtggagcagctggagtcccgcatcgtggagcaggagaacgcgattcagacgatggagctgcggaactacttctccctgtactgcctgcaccaggagacgcagctcatccacgtctacctgcccctcacctcccacatcctccgcgccttcgtcaactctcagatccaagggcacaaggagatgagcaaggtgtggaacgacctgaggcccaagctcagctgcctctttgcgggaccacacagcaccctgaccccaccgtgctccccgccggaggacggcctgtgtcctcactagcgcc

SEQ ID NO: 51010 - DNA, 498 bp, Homo Sapiens
ttcctgtgtttgtcctgggttctggggcatcagccagctaccccttgtgggcaaaggcagggccacttttgaagtcttccctcagatttccattgtgtggcctggtgggtcagggggagtctttgcaccaaagatgtcctgactttgcccccttgcccatcagccatttgccatcaccccaaacaactcagcttcggggccggtgaggggaggggcctcccccagcacagatgaggagcagctggggtaggctgtctgtgccatggccccccactcccccttcccttggagggagaggtggcaggaatacttcacctttcctctccctcaggggcaggtggtggaggggcgcccagggtcgtctttgtgtatgggggaaggcgctgggtgcctgcagcgcctcccttgtctcagatggtgtgtccagcactcgattgttgtaaactgttgttttgtatgagcgaaattgtctttactaaacagatttaatagttaaaa

SEQ ID NO: 51011 - DNA, 743 bp, Homo Sapiens
  misc_feature (9)..(9): n is a, c, g, or t
  misc_feature (15)..(15): n is a, c, g, or t
  misc_feature (17)..(17): n is a, c, g, or t
  misc_feature (652)..(653): n is a, c, g, or t
aatcgaacncccttngnattggccgcgcgccattgtgttggtacccgggaattcggccattatggccgggctcattcacaagagttgctcccaagcctggatgagttgcaccttgcatcttgagcatgcatttctcacaataattattaagctgtgtgataatttctgctttcaggacactcatccattatcttggctgtgagctccttgggtacgggtaccttgtatgtttaattttatatccctagcacaaagcaagtgcctggcacatagtcagtgccctaagtattcgtagagtgaagaatgccagcctctcttgtccctggtttccttatgtgttgaatgtggttgagtttgtccattgctagggagagacttccagtaataaaatttactattctagatgcttctactgttatgttttatctgcccatttatctttcttagttaccaggagaaatgtgtgacacctatattataatgaaaacaatcttattacttatagtttatctatattaaacaaatttaattgcattttaaagcattctttgatattgttgcttttgcaataaatatggataatcttggttataagggagttaaaacaatgctgtaataaataaagtgtttcatgtgatcaaaaaaaaaaaannttaacctatttaccctctctcttcccaaattatattctattaaaaaacctttgtggccgctttggccaatcattttccttaccttttttc

SEQ ID NO: 51012 - DNA, 1132 bp, Homo Sapiens
aattcccgggatatttttgtgaaagaaatacagttttaaaggctataggaatgtgttatatgtaccttaaacagataatttaattttagcaatttatcataactgatacttagctaacaattgtccataacttgtttaagtgtaagaaataccatttcaggaatgaaaaagaaggaatactactttctaagaaagaagatcttataatagacatatttagtaggttaaactactcctttgaaagaataagttttggttcaaagtcaataatgaagacgagatttgtttttctcttctctggctgatttttaaggatattatgtagttcatttagttaacagaattgaaatgtttgatatggcaagataggtatggtaatttcaaagtgaattgggaattcctctggctcatagaacccttttttttttcctttaagtattcttgagatacaaaaaaaaaaagtaaatacaatttcaaaaaaaaagttccggatctgtttttaagctccatctggtcctcataacctgcaagatttttcttaaaacctttcagctgaaagtgggggtaaaggtggagtaatctgtggatttgtttctgttgtcttttaaaatgtcaaatatataatatgtaatttttttaaaaaccaccagatacagaaatgtgctttaacatcagttgaaacctaaattttcttatgttgtggtgattgtattaaaaagggataaaagaagagtgtcaaacatggttaaatatattgtactcatttatgttgaatacgtattaaaattaagacaaatggaaaattatactttgagtatatattttgttaaatattactttatatgggaaattttatgtataaatttcatataatgggtaaaattcaaaaactacactttgagaaatttttttaaccttaagtttgggggcgaaatggggttggatgaaaactgattggaatagaaaaaggggctaatggccccaacctttatataagaatttcctttttttccagccgaagggccttattttgaaatttttataaaaaaaaggacagtttttttttttttaaaacctctttttgggtttttggggaagagattccccttaatttaagagagcacttttcttt

SEQ ID NO: 51013 - DNA, 791 bp, Homo Sapiens
  misc_feature (684)..(684): n is a, c, g, or t
tttaagacattcttttaaatatttgtatcattgttaggatgttttaatcagttgttttttaattccatgtaatatatgtagccctcatcagatttatatcaccatatttctccttgtgtcctaagagaattgatgacaattcgtaaccataaattgttttatattagctagtatgtatatttatttttacccaatggctttatctgtttcccaaaatttgtttgggatttgttgaaagcattgtgtaacttctataaacggctattttcttgtaactgtcagtgaaatgaatgtgtacattgttttcttgtatttctctgggttgttttttgtttttttttccaagggttaacatagaatgttttttttaaaaaattatctttggccaatgactttttcatctagatcttactttcattcaaccttctaaagaagttcgtttctcattgttttgttctgtcaacttgcctgaaaaacagagacttcatctcatcaatgaagaaagcatttcattattcctacagatctttcctgcgagcacagaattcttcataaggaccagatctcttccatgtctgtgtcaatcacataaagctaaaatgtaaaggacattgaagcctttatttaattgtactaatatgatggtgttatatactacatcattagctagttaaggttttctgnactgacttctctttgtcttcctaggtattatttgttatcttttatcttgtgtatctaaattacttagttatagttaccaacgaatactatgcaagcactagtaagat

SEQ ID NO: 51014 - DNA, 877 bp, Homo Sapiens
  misc_feature (741)..(741): n is a, c, g, or t
  misc_feature (800)..(800): n is a, c, g, or t
  misc_feature (854)..(854): n is a, c, g, or t
gcacgaggcaaacttgggttcttctcagcggggcgagctgagaagcggtcatgagcacctggggattttagtaagtgtgtcttcctagaattcgaaggctctctctttctagaggtgctacatagttggtaatgcttggaatggcaatagggtagaatgattaatcaaaggcatatcttctatatctgaagagtatccttccttcagggtttaatagactgagtcagatgggtctgatattaatcaaaattgtctcttctgaggaccgctgataagcattgacttgctgtcccctaaggaaatccgagcggctacaaagcgtttctttacttttcacttcaattaatgctgcgcttcgcttggtgagtgcgtactttttctacctgtacacattcctgcattcatgtattttgttttttttgactaaagctatgttacatggaaaggattttgaagccttttgtttcccttgctttgttttaataaacagtatattctttggttgtgaatcctactttctttgaatgcaaagagttcctataactggaaagcaattaattagccttcataataaatgttcacttgggggggatgttaactcattataaacccgaagattagtccaaggcatggagatccttcttcctagtgtttgcagccctgaaatgcatctttcaaagcatgaaaacactaaaaacaaaaagccattttgcctgaggatgctgatgatctggcacttgngattttattgatgtttacgcagcagtctaacaccaaccacgcttttgaaatgtgtacangacagtgagctgggtaagaaaacagtaaattatggctagtggggccttttcagnttcagcaaaaagcaatggctcgt

SEQ ID NO: 51015 - DNA, 684 bp, Homo Sapiens
  misc_feature (638)..(638): n is a, c, g, or t
  misc_feature (665)..(665): n is a, c, g, or t
gcacagatatgctgtctggacatgcacacacgtgcagatatgctgtccggatacacacgcacgcacacatgcagatatgctgcctgggcacacacttccggacacacatgcacacacaggtgcagatatgctgcctggacacacgcagactgacgtgcttttgggagggtgtgccgtgaagcctgcagtacgtgtgccgtgaggctcatagttgatgagggactttccctgctccaccgtcactcccccaactctgcccgcctctgtccccgcctcagtccccgcctccatccccgcctctgtcccctggccttggcggctatttttgccacctgccttgggtgcccaggagtcccctactgctgtgggctggggttgggggcacagcagccccaagcctgagaggctggagcccatggctagtggctcatccccactgcattctccccctgacacagagaaggggccttggtatttatatttaagaaatgaagataatattaataatgatggaaggaagactgggttgcagggactgtggtctctcctggggcccgggacccgcctggtctttcagccatgctgatgaccacaccccgtccaggccagacaccaccccccaccccactgtcgtggtnggcccagatctctgtaattttatgtanagtttgagctgaagcccgt

SEQ ID NO: 51016 - DNA, 593 bp, Homo Sapiens
gagatccagaaactgagagcagaaataagcagcctccagcgagcacaagtgcaggtggagtcccagctctccagtgcccgcagagatgagcaccggctgcggcagcagcagcgggccctggaagagcagcacagcctgctccacgcacacagtgagcagctgcaggccctctatgagcagaagacacgtgagctgcaggagctggcccgcaagctgcaggagctggccgatgcctcagaaaacctccttaccgagaacacgtggctcaagatcctggtggcgaccatggagaggaaactggagggcagggatggagctgaaagcctggcggcccagagagaggtccaccccaagcagcctgagccctcagccaccccccagctccctggcagctcccctccacctgccaatgtcagcgccacactggtgtctgaaaggaataaggagaacaggacagactaactttttaaatgatatgaagaaatcagaggtgaaaattgtacattgggaatatatttatgcaaattttattgaaatttattgtaaataaagattttctcagtggtctagaaaaaaaaaaaaaaaaaacgcgg

SEQ ID NO: 51017 - DNA, 960 bp, Homo Sapiens
ggatttcttgatagtccttcacccctgaaaccccgtatttacttaacaagatttagctcttagttcttcaagtaaaattaaagtctcttgtgtaagagccaacacatgcccagctgcggatgggagctgttcctggacagccttctactgcctgggaagtgatggaacaggaactcagggtgcccttaccccctccccagacctgttccctttctttgactgacagagcaccatccaggcaaaattagagcgccaaatggttttcttctcaatcttaaagcagtatacctttccacaggctcgtctgtgtccctgccactctgagtwatccagaaaccaccacctacaaatgaggggactcatctagaagacctctaaggtccccttttggctctgaggggtctctaataatccccacttggaattcagcaccgcaaggaaattatgggtatgtgagccataatatgatggccagcaggtggcgctgccttccacccatggtgatggatggtttggaaagggaatgttggtgccttttgtgccacaagttaagatgctactgttttaaaggaaaaaaaaaaaaaaaagtactgatcttcaatatgaagacatgagcttttctcgcaggaaattttctttttcacagaactggtgtcaggaatcactgaagggctaaccgtgatagtccttgcaagtaagtwaaggttttatcctgattggaaatagaagacatttccggttgagagaacagattcgttggaagcttaacttttgttgcctcttaacgccaccaaattttagggtaatttgattatgaaagagtgaatttttctggacagaaaagggrgagctaccaaattgtttttttctttttaaaaggaagtttaatgtccgttgtatcmcaaatcagtgttaaaacaccagaactttagccaaaataaatgtyttwcattacaaagg

SEQ ID NO: 51018 - DNA, 883 bp, Homo Sapiens
  misc_feature (631)..(631): n is a, c, g, or t
  misc_feature (659)..(659): n is a, c, g, or t
  misc_feature (681)..(681): n is a, c, g, or t
  misc_feature (758)..(758): n is a, c, g, or t
taaataataatttgctctcatcgtattgtgtatattcacctaatgcccattgtgtattgatattgcattcttgaattttgaacactgaatatctttttgaaagattatacttctttacctctttgtgctttagaaattattttccttcaagtgttcaagtctaatgaagaatgaagataacattttatcacttctgtccttaaagatttcagacatggtgaaactgaataaagcatgtcatttgctcctagatagattcattctatctagttgtggggatggagaaatctttaatggtatattttcggttattgccttatttttgatacagtattctgtcagtaatttattagacctggcagctttgggtgagcttagatttttcaccttcagtgttacattgtgtttgcttttaaaaactgcttttgaatggagttgtaaatacaatttttctatgaagatgtttggtttatttacctttttcttaagtttttaatgagaactttgagaaattatcacagggaattcccatgtagttcttttaatgggaagaatttgtaaatttaattgcactgagatattttggtcgttaccttgcaagtttctgtataaaacatagatacctgagttntaacacactgcaagtttatactaaggantatctgtgaaggtagggcaaangaggttctaggaaagcccaactccacttgcttcttttatcacgacaggattcttgaaatacagcattggtggggttntttggaatttttttttctttattagaaaatctctgttggcacgtccccatgattacttgggttacattgagttatggcaactgctgtgagagtagatgatgtgggtatgccgagggtggactctg

SEQ ID NO: 51019 - DNA, 623 bp, Homo Sapiens
agcatactttttcactgccaggtactgaatgcagaggctcagtgaagtatatatgtgggaagtgcatgcatttcgtttattagcaaacatagctggattaagacaaagttgttggtttggaaaggggttaaagccttaagtgaacaaatctagctaacagtgaatgaactaggtaatataacttgcatatttttaatttcctttggttaaaggtcccccatacttctctgttcggagacatgagaagtatgattacttcagtgttagttttcttaattttttttttcccctatttgtcccttgtcactttgttgcaagctagaaatctgtgggttatacatagggcagctctttgtgaaagtggtttattccactggagaaaggggattgaaaatcagttagaaccaatgtatttcttgccccacggaacactattcctataagatagctgaaagaagctgctgtgaggagctcagctccaaacacaggatcagcaccttgtataggaattcccatgaattatgacttctcattctgttttatcagagtgcatatatgtcctacttcaggaaaagtaaaacagtcatttacgaaagaaagtcaatctgtatcctaagcatttt

SEQ ID NO: 51020 - DNA, 760 bp, Homo Sapiens
  misc_feature (46)..(46): n is a, c, g, or t
aaaggggccctgggtaccgcgtccgcgaattccctgggatgcagtntggagagtgaaatagatgaactttacatccaatatatcaagcacaatgatagcaaaaatatcttccatgcagctcgtaccccagccacactgtttgtagtcatctttatcacatatgtgattgctggtgtgactggattcattggtttggacatcatagctagcctatgcaatatgataatgggactgacccttatcaccctgtgcacttgggcatatatccggtactctggagaataccgagagctgggagctgtaatagaccaggtggctgcagctctgtgggaccagggaagtacaaatgaggctttgtacaagctttacagtgcagcagcaacccacagacatctgtatcatcaagctttccctacaccaaagtcggaatctactgaacaatcagaaaagaaaaaaatgtaatgcaaattttaagaaatacaggtgcatgaccaattgtcaattaaatattcagttttatgtctccatgcaaacattcaaagtgcttccatcagaacggagtaaaatactaaacacctctgaagactgcaaactggattagttcttttacttcagtgtttaataagcagatgtatgtatgcatggttatactattttgttaacatgtacaatttcctgatttttcttcaaaaatgctgttataaagtatttgtctatttatgataacagtacacgtgttctgcttgaatttactaaattc

SEQ ID NO: 51021 - DNA, 473 bp, Homo Sapiens
atcgatggtcgctacaaaccaggaaatactcaagttattatgtgtatacattggttttagttttatgaaacaatttaccttcatgatctcatagttaaaattgtaataaatttaggaatataaaggatcaatatgggaagcaaaatttctaaaggcagtttctgttgttttaattagtatttgtgtagttcaaaccaggaaggatttgactatcattagattttgcttaactttatgaaagctaaaatattctctgttataaaggggcaactccatctggtcctatagcatctttactactgattttttttgtttaatttgaaaatgcaaagaattgttaaatgttcttaaatgttctcactacaaaaaaagaaaaaagataactacgtgaggtgatggatatgttaattagctggattgtggtaatcattttggaatgtatatgtatatcaaaacatgtagtacaccctaaa

SEQ ID NO: 51022 - DNA, 779 bp, Homo Sapiens
gacaacacgacggtgacaaggcttctcaacatcaaccccaacaagacctcggccagcgggagctgcggcgcccacctggtgactctggagctgcacagcgagggcaccaccgtcctgctcttccagttcgggatgaatgcaagttctagccggtttttcctacaaggaatccagttgaatacaattcttcctgacgccagagaccctgcctttaaagctgccaacggctccctgcgagcgctgcaggccacagtcggcaattcctacaagtgcaacgcggaggagcacgtccgtgtcacgaaggcgttttcagtcaatatattcaaagtgtgggtccaggctttcaaggtggaaggtggccagtttggctctgtggaggagtgtctgctggacgagaacagcatgctgatccccatcgctgtgggtggtgccctggcggggctggtcctcatcgtcctcatcgcctacctcgtcggcaggaagaggagtcacgcaggctaccagactatctagcctggtgcacgcaggcacagcagctgcaggggcctctgttcctttctctgggcttagggtcctgtcgaaagggaggcacactttctggcaaacgtttctcaaatctgcttcatccaatgtgaagttcatcttgcagcatttaccatgcacaacagagtaactatcgaaatgacggtgttaattctgctacctgggttaataatttgctacttgttacacattaatattaccaaagtagatttgaagggggggtgcctctctaggag

SEQ ID NO: 51023 - DNA, 708 bp, Homo Sapiens
cccggtggcctgggagctgctttctccccactggctgggctgcatctggccctggtctggaggccttgctttgaggggctgtgaccctcttcccccaggccctccccagccgacgacagccaccggagaggagatcggaacacgattgtctcagatgcagggcgctgtgcgggacgaagccgcaaggactctcgtatcgggcccttgggactcgggaggtgccagaggcggcggcttgctctggacctcggtgttcactgacctttgtttcacttgcctctgctcgactccgagagcaggaaacccggccgtggcctggcagctccgcctcccatgcccgcacgctggggtctgtcttgtctggagcagtggggcacaccccggaggaggcgggggtcagggctgtcggccttggccccctgctggtcgctgtttcggggactcggggcggcagtaccaccgcctgaggcggggctcagcagcgttgcatgtacgggcctcgtactgcctcatggaacatcctccggagccgcctccattgtgggttcctgagagtaggacacattgccatggtttgtgggaatcacgcgcccctgatggaacttttctgctgttgtgaacgtacttttatccatttgcttactctgctgaccttgccaagttgttcgagggtggaattaaacatctctcagacaaaaaaaaccaaaa

SEQ ID NO: 51024 - DNA, 854 bp, Homo Sapiens
  misc_feature (584)..(584): n is a, c, g, or t
  misc_feature (586)..(588): n is a, c, g, or t
  misc_feature (590)..(593): n is a, c, g, or t
  misc_feature (598)..(598): n is a, c, g, or t
  misc_feature (721)..(722): n is a, c, g, or t
ggtcatctgaggaggcctcgtctctgaacttgggttgtgccgagagagtttgttctgtgtttcccaccctctccctgacccaagtctttgcctctactcccttaacagtgttgaattcaactgaaggcgaggaatgttggtgatgaagctgagttcaggactcggtggaccctttgggaatgggtcatgaaagctgccatggggtgaggaaagaggagacagtgggagaggacaatgactattgcatcttcattgcaaaagcactggctcatccgccctacttcccatcccacacaaacccaattgtaaataacatatgacttctgagtacttttgggggcacaactgttttctgtttgctgtttttttgttttgttttttttctccagagcactttggtctagactaggctttgggtggttccaattggtggagagaagctctgaggcacgtcatgcaggtcaagaaagctttctttgcagtagcaccagttaaggtgaatatgtattgtatcacaaaacaaacccaatatccagatgaatatccgagatgttgaataaacttagccatttcgtacacatggnannncnnnnccccnttacaccctaccgccgccacaaggccctaacctctgttaacagtccataacaccttacgtcctaataccccctgccctaacgcaacccgaccttttttttcccctacccccttttaagcgaanntgctttttgggggggcccccggccccaagaaaagttttcataaaaattttctttggggggggggcgccccaagggaaaaagaaacggggcgcccaccgtttttttaccaaaaaacccgggcacgtaaaacgg

SEQ ID NO: 51025 - DNA, 611 bp, Homo Sapiens
ttcgctcatgtatgcaaaattcctatcagttcatttgcacagccagttccaatcatgtatgtgatcaccagattaaaagcttcatccagaaagacaagactcctcagaacgaatagtagacaagtaagactgctacccacagaagccagtacgcttcaggtgtgaggcggggtaactactcatctcttcacagagccaaggaaagaaaaagaacgtctctaacatgatttaccattttaaacagccttataagttttgtctcttaaaatcatgctgcagaaggagggggtaaaagtcgtgttctgccctgtctgtggcattggagtgccccgctaggtaagaagcaatgcttagatcttgcttccaggcagcagcttgaattcccgaatcttcctgcaaggtgcatacaaatgcagcgtgagaatccatacacgtaatccatattcaccttcccatccatcccgcagaagaggcatggtgacacccaggctactgtccatgcttgagaggacgtatttgaaggttctgttactacaagttgggaatattcacggacatgcctgaataccccggctgtaactcacacgtggtctgtgtaagtggattaacct

SEQ ID NO: 51026 - DNA, 816 bp, Homo Sapiens
cacgaggttggggttgaaaatcatgctcaagtgtgaccccagtgaccagaatccctgatgttaatgggctctgccctcatccccacagtcttgggatctcagggcacaatggctggacatgggtgggctctgatgcagaactttctcttttgaatgttaagaataactaatacaattcattgtgaacagaagtccttaagcagaggaattggtgtgccttaaagatacaatctgggatagtttgggggaacttgtagccagaatgccctgttcatgctgagcaaagttcagcaagtagagcagagtttggcaggcaggtgccaggaactccccttcttcctggagtgccttcattgaggaaggaaatctggcccttgggtttcctggttccactgctactgacccagaggggaatgagggctgagttatgaaaagataacttcatgaagacttaactggcccagaagctgattttcatgaaaatctgccactcagggtctgggatgaaggcttgtcagcacttccagtttagaacgcaatgtttctagagacatattggctgtttgttttgatgataaaaggagaataagaaaaggcatcactttcctggatccaggataaattttaaaccaatcaaatgaaaaaacaactaacaaaaaaggaatgtcatgtgaggtaaaccagttgcattccctattgtgaaaagtagagactactcacctgttgaagatgctctctacgctcgagattggtattcctgcagtgagaccctcccaatgccaccatctaaatgtcctgtccgcacagaatgtatgg

SEQ ID NO: 51027 - DNA, 880 bp, Homo Sapiens
agctttagaaaagtttgaacaactgactcttgatggacacaaccttccttctctcgtctgtgtgataacaggcaaagggcctctgagggagtattatagccgcctcatccaccagaagcacttccagcacatccaggtctgcaccccctggctggaggccgaggactaccccctgcttctagggtcggcggacctgggtgtctgtctgcacacgtcctccagtggcctggacctgcccatgaaggtggtggacatgttcgggtgctgtttgcctgtgtgtgctgtgaacttcaagtgtttacatgagctggtgaaacatgaagaaaatggcctggtctttgaggactcagaggaactggcagctcagctgcagatgcttttctcaaactttcctgatcctgcgggcaagctaaaccagttccggaagaacctgcgggagtcgcagcagctccgatgggatgagagctgggtgcagactgtgctccctttggttatggacacataactcctgggccagaggctataaaaccccaggacccctgctgtccttcccgcagcttcttcttggagtctcagggcaaaccctttcgagcagcacctcccagtggccagaagctgaaatgacagcagtggtactgcctggtaaaagaattggttctgtgacccgggaagctttggttggccttgatttcttctctggaggcttggaaacgcttcctctcttcttctgttcttcacgccccatgcccctgctagcgtattactgttctgtgacttccctgtgacctctgcagaactcctcatcctgcgtttgggtctccaggtgtccccttttctggccgtgtttcctaaccattttggatttcctggtctttgaaaa

SEQ ID NO: 51028 - DNA, 571 bp, Homo Sapiens
ttttttttttttttttttagaatgtgacataatgagcacccacactcgggggaggggaaggttggtaggtaagctgtaacagattgctccagttgccttaaactatgcacatagctaagtgaccaaacttcttgttttgatttgaaaaaagtgcattgttttcttgtccctccctttgatgaaacgttaccctttgacgggccttttgatgtgaacagatgttttctaggacaaactataaggactaattttaaacttcaaacattccacttttgtaatttgttttaaattgttttatgtatagtaagcacaactgtaatctagttttaagagaaaccggtgctttcttttagttcatttgtatttcccttgttactgtaaaagactgtttattaattgtttacagtttgttgcaacagccattttcttgggagaaagcttgagtgtaaagccatttgtaaaaggctttgccatactcattttaatatgtgcctgttgctgttaacttttgatgaataaaaacctatcttttcataaaaaaaaaaaaaaaaaaaaaaaaaaacctcgttcc

SEQ ID NO: 51029 - DNA, 488 bp, Homo Sapiens
cgaagatgtacaatgttaaatgttcataccagttaaactgcactttcccaaggggacagctggcatctacttgaaatgggcatcaagagaccaccaaatgtttacagtttctgtggcccgtttaagtgtaaaatgcagaagtggctctgtccccccagagttaaggatttgctacactggtcctctggaagcatttaagtagaagaaaaggcttatagtcagaatcactttagtaatcgtcttctggtccttggacttttctgttctgtaatgcttgtaacaatgaatatggtgttgccaatctagtctgatatcattgttgacctgtacttactttgtggatggttctacctggggttgcactggcacaaacagagccagaacactggactttcaaaagaccattttgacttctacagtgtccacacacatgaatttaaatgcacttgtaactggttaattaccatgaagtaagtctaacttccact

SEQ ID NO: 51030 - DNA, 661 bp, Homo Sapiens
gtcttaaatgtaaagtttctggttctcacactgtactctgaggtccaaatactgtctgtcaatgtgtaacctgatgtctcaaccccctgtgagaagagtccattatttggtgttcaccaacgtgggagacttcaccggaacaggcttttttgctttgggctctgctatttgtttgcagaacacccaagagcgagcaaacatgctctcttcacagcagtaccttagggttttgccattgtaaatgggtctgatgtgatatgacaagaccagagaaattggatgtaaatttacatttttgaatatgcttgttgtttcacatgatacatttagggtatgcagctccttttgtagtttttatttttactatttaagtttggaaatgatgccaaatttttgtatttctttaatcaatgtgttctcttcggtgatatatattgcattatatattgatgtgtgtatcaatatatattgatatgtattacacttacacatacaaacacatataagagggggtgaaaaccgtagcctttgcattctctatagcctctgcagagagatactaagcagaaaatcttgggtgttggtcgattgtacccagaaacatgggacgaaagaagtattaaaacaattatttaacgaaatacacacacaaccccaacag

SEQ ID NO: 51031 - DNA, 376 bp, Homo Sapiens
ctcaccgatcagcacctggccgagttcctgcggcgctgcaagggcagcctccgccccaacggcatcatcgtcatcaaagacaacatggcccaggagggcgtgattctggacgacgtggacagcagcgtgtgccgggaccttgacgtggtccgcaggatcatctgcagtgcaggcctcagcctcctggccgaggagaggcaggagaacctccccgatgagatctaccatgtctatagctttgccctgagatgagccggggctggcaggagaaactgaggaaccacagtcctggtggggggagctggcagctgggcaagatccaggcgccacgctggcggttcgtgagtgtcgaggcaccactaaatatagctgtctg

SEQ ID NO: 51032 - DNA, 739 bp, Homo Sapiens
  misc_feature (714)..(714): n is a, c, g, or t
ttttttttttttttttttggtgagccgaatgggcatggctgcgctggatcctgcgcctctggacgtgctagccatttccagtgtcccaactactgtcatcgtgaggttttcatcggctgtgccatttcccaacgtcttttgggatttacatctgtctgtgttaaaataatcaaacgaaaaatcagtcctgtgttgtcagcatgattcatgtatttatatagatttgattattttaattttcctgtctcttttttttgtaaattttatgtacagatttgatttttcatagttttaactagatttccaagatattttgtgcatttgtttcaactgaattttggtggtggtagtgccattatctagcaccctgattttttttttttactataaccagggtttcattctgtctttttccactgaagtgtgacattttgttagtacatttcagtgtagtcattcatttctagctgtacataggatgaaggagagatcagatacatgaacatgtcttacatgggttgctgtatttagaattataaacatttttcattattggaaagtgtaacggggaccttctgcatacctgtttagaaccaaaaccaccatgacacagtttttatagtgtctgtatatttgtgatgcaatagtcttgtaaaggtttttaatgaaaactaccattagccagtctttcttactgacaataattattaatanaaaaaaaaaaaaaaaaaactcgtgc

SEQ ID NO: 51033 - DNA, 633 bp, Homo Sapiens
cctcgtgccgaatcggcatgagggtcaggggcgagccaaccccacctctatgccctgagccctggtagtccagagaccccaactctgccctggcttctctggttcttccctgtggaaagcccatcctgagacatcttgctggaaccaaggcaatcctggatgtcctggtactgacccacccgtctgtgaatgtgtccactctcttctgcccccagccatatttggggaggatggacaactacaataggtaagaaaatgcagccggagcctcagtccccagcagagcctgtgtctcaccccctcacaggacagagctgtatctgcatagagctggtctcactgtggcgcaggccccggggggagtgcctgtgctgtcaggaagagggggtgctggtttgagggccaccactgcagttctgctaggtctgcttcctgcccaggaaggtgcctgcacatgagaggagagaaatacacgtctgataagacttcatgaaataataattatagcaaagaacagtttggtggtcttttctcttccactgatttttctgtaatgacattatacctttattacctctttattttattacctctataataaaatgatacctttcatgtaaaaaaaaaaaaaaa

SEQ ID NO: 51034 - DNA, 551 bp, Homo Sapiens
caaccatgagtggttccatgatgggaagtgacatgcgtactgagcgctttgggcagggaggtgcggggcctgtgggtggacagggtcctagaggaatggggcctggaactccagcaggatatggtagagggagagaagagtacgaaggcccaaacaaaaaaccccgattttagatgtgatatttaggctttcattccagtttgttttgtttttttgtttagataccaatcttttaaattcttgcattttagtaagaaagctatctttttatggatgttagcagtttattgacctaatatttgtaaatggtctgtttgggcaggtaaaattatgtaatgcagtgtttggaacaggagaatttttttttcctttttatttctttattttttcttttttactgtataatgtccctcaagtttatggcagtgtaccttgtgccactgaatttccaaagtgtaccaatttttttttttttactgtgcttcaaataattagaaaaatagttataaaaaaaaaaaaaaaaaaaaaaaaaaaaataaaaaagagggggg

SEQ ID NO: 51035 - DNA, 789 bp, Homo Sapiens
  misc_feature (156)..(156): n is a, c, g, or t
  misc_feature (242)..(242): n is a, c, g, or t
cagaggcagcaaagccgggtgcgatgagctcagcctttactcattcacatacaccatcacactttaattccaatctgtatattgctttttaaaagttaagtccattctaattacccaaatatgcatgaattcattctccttttgagaagttagatngttaaagatagtctcattcagctaccaaccactccttgatccttcccttcttagtggctgtgtttgttgtacttccgtttagactntgttttaatgcttgtacgtacatatgtgaactcattggaaatattgtgtgtttaatgcaaatgatatattgaattgtttagcaatttgttttctttgcttaacgatgtttttgagatctgtgcatgttacttaatgtagctcaatccatcttctgtaattgctgtatagattgtcatcatatgattaccacattttacttacgcatttcttttgtgatggacattaagactgtttttaggttttgctattacaaaatactacacaggagcatcactatgcctgtgtgaaagtatatgtatgaaagtttacctagggttgattcctagaagtggaattgcaaagtcataggatatttatatattggtttttaataatacttccaaattgccctcctgtactatttactcagtatttttcttgaggttgatctgaggtctaacattgttatcctatatcattttcatcccaagtagtgatatctgtgaaatcacaggtctgatgtgtgctaattatgtattcttctaatacatattacaaagacataat

SEQ ID NO: 51036 - DNA, 631 bp, Homo Sapiens
acatttcatgctggttcggagaggagacgtagatgagttcaaaaagcttcgagaaaacatgctggacaaggggattaaagtcatctcctatggagatgactatgccgatcttccagaatatttcaagcgactgacatgtgagatctccacaaggggtacatcagcagggatggtgagagaaggtcagctaaatggctcatctgcagcacacagtgaaataagaggctgtagtacatgagcgagctagagaaatcaccaccgtttagaccaagctgtaaggccctactacagacagtgtttaacaagtaaacttacaagaacccaacacaattcccagaaagtaacaatagccagaggttgaagggcggggtagaagaggggggaatgttgcagcgtaatccttcataccacctggttcttgatattctgccgcctgttcaagttcaagaataaaagcgacagcaggacccaaatgcagctcccaacccactccccaggctagacatgcttgtgtccacacagcacaccaatgtgatacttccactgaccggctgcagctctgcatgaaggactcggggtctggatgccatggaatcactgtggctcttgttgcagttttgtactctatact

SEQ ID NO: 51037 - DNA, 757 bp, Homo Sapiens
ccccgcgtccgggccaatagtcttgtaggcataacttctgcttactccagaggaataacaaaagaaaatgaaagagagggagaaaaaagagaagaggagaaagaaggagaagataaatcacaacctaaatcaatcagagaacgacgacgaccaagagagaaaagaagatctacaggagtttcattttggacacaagatagtgatgaaaatgaacaagaacaacaatcagacacagaagagggatccaataagaaagaaactcagacggattccatttctagatatgaaaccagttctacatcagctggtgatcgatatgattccttgctgggtcgctctggatcatacagttacttagaagaaagaaaaccttacagcagcaggctagaaaaggatgactcaactgactttaaaaagctttatgaacaaattctagctgaaaatgaaaagctgaaggcacagctacatgatacaaatatggaactaacagatcttaaattacagttggaaaaggccacccagagacaagaaagatttgctgatagatcactgttggaaatggaaaaaagggaacgaagagctctagaaagaagaatatctgaaatggaagaagagctcaaaatgttaccagacctaaaagcagacaaccagaggctaaaggatgaaaatggggccttgatcagagttataagcaaactttccaaataaaaaaaaaaaaagcagcaagtaatggaattgcacatattagtaacccagt

SEQ ID NO: 51038 - DNA, 545 bp, Homo Sapiens
ggactatcagattaaagcaaaatgtaattttaattcaatgaagatatcattaccaggttactcttgagatttttcaacggtgttagaactctcaaccaagacctgaaaaccaagtatgcaaggtttctgaatctctctggtagattaactattgacaatgattttctgttatctttgttcaaaaagttcatgtcttctcaaaatatgaaatattgataaatggaagagcatacggtgacaagtctcctttccaaccccaggttccctacaccctgctctcagcaggcagtgagtgtcacacacctgttaatccatcttgagcaggacagtactatacaaatagaatgcaagctgtaatgtaattttatattttcttatagccacgttgaagtaaaaacaaacaggtacagtgttttttaccagctttatagaagtacagttgtaacatatttaatgaatacaatttgatgggtctgactatatgcacacacctttgatacacatcaccacaatcagggtaataaacatacctgtcatctccacaa

SEQ ID NO: 51039 - DNA, 638 bp, Homo Sapiens
ggcacgaggatcaccaattttctcgatttaaaaaactgtcaagagatttatttttccattgcaggttttaaagtggagattctgaagtggaaaataggtactgtcagaacaaagctacctggaaacagcatagagtgaagcctttcgtgagggcttgcaggccgctgctgagtggcagtttacagaagaggtcgcggggtgagcctcttagcaggacagaaaacaaggcagcagcgcacctgccaccccttcacgagctgctccttgagcctaaaaagtaggctttattcatcccttctgttcatttaccaacctgggggattgatacgaccggggaaaatgttcctaaaccaggaagctgcgttagccgatcaggctttgtaagatctcgccaacagctagctgcttaggagtacccccacgatacgcacagcacaccactgtcccttcactgcactttcttcctgccttaggtagttgggcttgcccaccctagtttgcttttgtagtggtttggcaaggttagaaggcctcggcctctctgtcatgctgggaagtgcctactctctgggccactgctgcagaggccgtggcacttgtcatgggtttggaagacccagccatctgcagcagaggca

SEQ ID NO: 51040 - DNA, 876 bp, Homo Sapiens
gcccatgtatctagtccccagccaaccccaccaggtcccgaagctaaggagccaggcctgggggtggacttcattcgtcacaatgcacgagctgccaagagagccccccggaggcattcctgctcactgcaggtcctggcacaagtgctagagcagcagcggcaggcccaggagcactacaatgccacgcagaagggccatgtgccacattacttgttggagcgcaggacctgtggcggcgggaggccgaggcccgcaagcagagccagccggaccctgccatgcccccaggccacacgcgcatgcctgagaaccagcggctggaaacactgaccaagctgctccagagccagagccagctgctgcgtgagctggtactgctgcctgctggggcagactcactgagagcccagagccaccgtgctgagctggaccggaagctggtgcaggtagaggaggccatcaagatcttttctcggcccaaagtcttcgtgaagatggacgactgagcccctttgggggacagtggcaaggagctccatgctgaggatcgccacatggctgcaaaggacagggttggacccaatcccagagcagaggtctgaagacaggagcagggggggtggccagtgtccctagagcactcttcccagtcaccagtggctgcagaagggccacctagccttttaactgcttggtcaaaattaacatttgtacacagaacacaaacgaaaaaaactccgggggcccatatgcgcgcggcgcacacacacgcacggacggcgccagggcaaacgcggtcctgacccgcgttcctggcccagcgggaacccgcggcccccaaaggagccaataactcgaaacccaggtaccgtg

SEQ ID NO: 51041 - DNA, 718 bp, Homo Sapiens
gtccttcctttccgacttagtcctcgggaagaagtttagactacaaggtatcattggaacatttcaagatcatcaaatcaaattccacagggattggtgaccaaccagaaggctcagacatctgattgctgacctgtccagacatcatctggtctccctgaacctgaaatcacaccatggatgattttgagcgtcgcagagaacttagaaggcaaaagagggaggagatgcgactcgaagcagaaagaatcgcctaccagaggaatgacgatgatgaagaggaggcagcccgggaacggcgccgccgagcccgacaggaacggctgcggcagaagcaggaggaagaatccttgggacaggtgaccgaccaggtggaggtgaatgcccagaacagtgtgcctgacgaggaggccaagacaaccaccacaaacactcaagtggaaggggatgatgaggccgcattcctggagcgcctggctcggcgtgaggaaagacgccaaaaacgccttcaggaggctctggagcggcagaaggagttcgacccaacaataacagatgcaagtctgtcgctcccaagcagaagaatgcaaaatgacacagcagaaaatgaaactaccgagaaggaagaaaaaagtgaaagtcgccaagaaagatacgagatagaggaaacagaaacagtcaccaagtcctaccagaagaatgattgggaggggatgct

SEQ ID NO: 51042 - DNA, 1119 bp, Homo Sapiens
aaaaaaacaaaacaagaaaagcagcagtgattatagagaggtcacactctaagtggggtcgcggcgtggccacgcttcacggtcacgctcgtccgtcctgcagtggcgtgtttacatggtcacacgtgtgtgtatcaccagtgggtcaactgcttgtcattcctcccgtggcagtttgtgtagacaatcttactgagcaaaaggcaatgaaaagtcttggttcccacactgcgatatattggaattttcacctcagtttatgaagtttatttcgaaatccatagtcatctaagaatgaatacctgtctgccatgtatttcaatcttagtgagccaaaattgtttgtttgttactacagaatagagatgactgttttttgccacagccctatggaatttgcaatctgtgattgccttgtaaaaaggagagtgcatatggcactgcattaaacgtgtggtgtttctagtcaatgatattggtgagcacaatgtattcatttaatggcatagaccataccagacctaatttgcaagtattgggtcttaaacttcaagtgcaatgtatatgaaaaccaatctgagccttgtatctcttaaatatttattttttttaacgtgtgagatgttcgagagaaggttctccattcatttcagtgctgcctggaggaaactcggcaatgatttctttcagttgtgaagttcctttcgtgttacaccctccactgaaccctcaaccttcgaaatactccagttttgtgggtttggtcatttttacttataaatttacctttttgtattttgcaatttacatgtgtttggtttgttttaaattctgtgaaagtggcttgattaaaagactccttttaaatggragccaccagtcagcagaatggaagcttagaggacttgcctgtmagccctggtctttgtgtttggttttgtgatgtaaacgatctttgctgggggtttttgctttgttttgaggggaawgtcttggagkaaatttwaatyccsgggkkaattttttttwcmaggawtttgttttttwaaaaaaagggcatyytsamctttgggggrccccccttwtwttttyygraaaaaaaaaaakwcawkaaaaaaa

SEQ ID NO: 51043 - DNA, 628 bp, Homo Sapiens
tgaatctgtctttgacaataccaaagaaatagggggtagctagagtaaagaacctagggcctggacctgggctggacagtgtatccctttaggtgtgggaactgggtatttccctggggtctgtatgcctttgtcttgtcatttgcttttagggcagatgacactttttcccacccttttaaagctacaagtctatcttctttcttgacccatttcaggagggagccctctcctttatcctgatataatatttaagaagacagaacaagaaagcatgtagccctaatgataggagattatcgcatagagttcagagactggaaactgaattttccctcgactttcacttgtggggtaaatcacccaattttaggctcttttctgcaaggatggccaaaattaatcatttttaaaaagtagattcatgcccactgcccttgggtgagggggaagaatacgggggttcccagaagcccccatgtgatccaagggtttgtattttttttttaagttggttcatatttgtatgtacatgactatttaaagccaggggattatctttctataaagtgtataactggcaaaaagacaaaagaatacaaaacaacaagaactcactacaaaaagg

SEQ ID NO: 51044 - DNA, 577 bp, Homo Sapiens
gggggggatgcgtgcggttccaacatggcggagctgacggtggaggttcgcggctctaacggggctttctacaagggatttatcaaagatgttcatgaagactcccttacagttgtttttgaaaataattggcaaccagaacgccaggttccatttaatgaagttagattaccaccaccacctgatataaaaaaagaaattagtgaaggagatgaagtagaggtatattcaagagcaaatgaccaagagccatgtgggtggtggttggctaaagttcggatgatgaaaggagaattttatgtcattgaatatgctgcttgtgacgctacttacaatgaaatagtcacatttgaacgacttcggcctgtcaatcaaaataaaactgtcaaaaaaaataccttctttaaatgcacagtggatgttcctgaggatttgagagaggcgtgtgctaatgaaaatgcacataaagattttaagaaagcagtaggagcatgcagaattttttaccatccagaaacaacacagctaatgatactgtctgccagtgaagcaactgtgaagagagtaaacatcttaa

SEQ ID NO: 51045 - DNA, 836 bp, Homo Sapiens
  misc_feature (779)..(779): n is a, c, g, or t
  misc_feature (822)..(823): n is a, c, g, or t
aggaggagtcggacgaggaaggcagccaggagaaaggaggggacgacagccagcagaagttcattgctcacgtccctgttccctcgcagcaagagattgaggaggcactggtgcgaaggaagaaaatggaactcctccagaagtatgcaagcgagaccctgcaggcccaaagtgaagaagccagaaggctcctggggtattaggacccagctggggctctccttggagttcttccatcccccagtggtacctcaggacccagggctgcagacacaggctggtgctgcaagggctcctgccccattctcagccttccttccctctccttgtctcatgttgaccggagggtaggggtctgtccctggtcttcctggtaggttttgtacacatattttgctactgtgtggatccatttatttttattgtggagtgtatacaacaggttgcgaactggctgcctgtgtcttattttgacttgcactgccattttgaggggagaagaatcaattagtggcaaacatttaaaaatgcaattttttgcagaccaaagtataattttaaaaaatgcaaattttctaaaagacacatctcttgaaaaatgagatgatgtggccaggcgcagtggctcacgcctgtaacccagcactttgggaggccgaggcgggcgggtcacgaggtcaagagatggagaccatcctggccaacatggtgaaaccccatgtctactaaaaatacaaaaaatttagctgggcgtactggcatgcacctgtagtcccagnctgccttgggaaggcttgaaggcaggaaaatcacttgaaccgnnaagaaggggggga

SEQ ID NO: 51046 - DNA, 797 bp, Homo Sapiens
atcgacgacctgttcgcctttgtcatcaagatgcccgttatgtaccggatcggctgcctgcgggacgatgtggttttcttcatctacctctaccaacggtggatctaccgcgtcgaccccacccgagtcaacgagtttggcatgagtggagaagaccccacagctgccgcccccgtggccgaggttcccacagcagcaggggccctcacgcccacacctgcacccaccacgaccaccgccaccagggaggaggcctccacgtccctgcccaccaagcccacccagggggccagctctgccagcgagccccaggaagcccctccaaagccagcagaggacaagaaaaaggattagtcgagactggtcctcacctgctccggctcctggcgaccactacccctgcgtcccggccccctcgcctcccctccctgtcgccctttccctggacagatcaggccggggcggtgggaggcccgcctcaggtcagggcccagcgtgtgacgtaggggccggggcaggccagggtttgtttgtggaggcgctgtctgtccctctgtccctctgtgtttccagccatctcgccctgccagcccagcaccactgggaatcatggtgaagctgatgcagcgttgccgagggggtgggttgggcgggggtggggccgggccccctacgggatgcccacggccgttcatcatcttgtccctcgtccccctaccacactccccctcctagaccgccgccctttaacacagtctggatttaataaattcatatgggtgtttaacttaaactca

SEQ ID NO: 51047 - DNA, 750 bp, Homo Sapiens
cgcgtccggcaccttcaccgctgtcatccccaccaacgtcttcgggccccacgacaacttcaacatcgaggatggccacgtgctgcctggcctcatccacaaggtgcacctggccaagagcagcggctcggccctgacggtgtggggtacagggaatccgcggaggcagttcatatactcgctggacctggcccagctctttatctgggtcctgcgggagtacaatgaagtggagcccatcatcctctccgtgggcgaggaagatgaggtctccatcaaggaggcagccgaggcggtggtggaggccatggacttccatggggaagtcacctttgatacaaccaagtcggatgggcagtttaagaagacagccagtaacagcaagctgaggacctacctgcccgacttccggttcacacccttcaagcaggcggtgaaggagacctgtgcttggttcactgacaactacgagcaggcccggaagtgaagctggaagacaggatcaggtgccagcggaccatcggctggcagagcccagcggccaccacccgtcaaccctgccaggagctgagggcaccacccagcaacctgggcctgcattccatccgctctgcagccccaagcatctttccagtggggcccccattcacgttggtcctcagggaaaccagggtcccgggcaggcccggcgctttgctccccacaccagccccctgcgcgtgtccactctgatcctgcatcccactccct

SEQ ID NO: 51048 - DNA, 1106 bp, Homo Sapiens
  misc_feature (591)..(591): n is a, c, g, or t
  misc_feature (877)..(880): n is a, c, g, or t
  misc_feature (887)..(887): n is a, c, g, or t
  misc_feature (889)..(890): n is a, c, g, or t
  misc_feature (1025)..(1025): n is a, c, g, or t
ctgtcctgacctggacgatgacgtggggaaaccctccacctccttgcaggcttgttgcctgttgaaagaaggaaaaagacacggcgctggcaagtgataggaacattctggccagaggttaaagagcaggctgacatggctggccattaagctttataaaatcatgtgggctctgaaattgttcttttatgtgtctagcaagtatttaataaacccttgtatagtaattttgttgttgttgggtgctggtagctccagaattttgtgaccactattgtgggtaaaatgtctctgcatcacttgttaatgctactggtctaacttcattcagtatgcttcattcaccgaactttgtgctcaaaatgcgtatataccattttatgttgtattcctccatttcacttgcaaaacagaagtaaataagagttcgggacccagggtaaaatggtagcttcatccaatatatcattcaaatgcatctgatttctaaaacatattacattttatgctgatcttcagttcataattcttccaggaaaactcagtcttccaactgcaataaaatactgggtagaatcaaatgggaaaggngttgggtggggcaatacccatgagttgatagtgataagctcctaaggatttttaacttgtacttttgtgaacgaagagaatgcataaataatgttggtgaggataaagtacagatatttcatgtagaattaattgctagttatgatgcttgtggatagttaactgtttttttttttagtcaaaatgatcatgctacgaaaagatgcttctgagagaattgtatgagtaactgatttttcctcctgagtcgcccttggccaatatgttactggaataattaatcttnnnnaaaaaantnnaaaaggcgggccgctctaaaatatccccccaaggggccccagcttaccccgtaacccactttttttggaaaaagtgggccccctaagtggagccgtactttaaacctggggcctgggcccccctttttaccaccntccggaactgggaaaaacgcctaacctcggggatcctttgtggacgacaccctactcttctgggggggggacaatattgta

SEQ ID NO: 51049 - DNA, 594 bp, Homo Sapiens
ttttttttttttttaattttatcccatttttaatattttggtctagcaacttgtgatacatagatgacaattttgtgagtttttcaaatgtgtgtacagatttttgtaaatatgactcttttgtaattaactcatgtacagcctcatcctgtatagtttaatgatgaatgtgcaggggacctgtctcaggctcctatatggttcctgggccttatagccaggtttgtgtggcgctcccgacttttgtgactgactggtgtcttcccatttggactgtggcctggccagagccccttgcatatccccactgtcaggggcagccaggactgttcccatcctcctggaatgggggaaccttccttatcccctgcccacatcccctctccaataaagcacctgtgccctcagcaatggcctgccatgtgctgttgctgggatgtttgtattaaggtaagtgtgggtattggttttttgagcaagggggtggttgaagcatatggggaaattaatagtggtggcatctcaggggaagacattccttggctcctctgaggggatacagcctccagtgggagactggcattgttgtgtgag

SEQ ID NO: 51050 - DNA, 652 bp, Homo Sapiens
cagagaatctaaagcactcgtctactgttttaatgagatttaacagcttttaacagtgagtttcgtttgtaaactgcttgaagtctgtggcattcaggcacacatctggctggccggctgggtctcctcccgggctcagtgggcctggggcctctctgacgtggtgcctgctggagggaggctcgtcgtcaccagctgactgctggtccggcttctgaccggcctttgtcctggctccgtagcagaacactgtaaaagtgcccgcgtctttgcagtagttgcagatttcagtcgtcgtgttacttgtgcacaaacagaagctgggtcttacccgcagcacgagtgtctcgggctgcccggagtcgcccgggagcaggtgctgcagccagagttacgcgggggccacgcgggccggcgggggtggggggaacgtgggggaacctgtgtttcacgtgactcagcagtgcccgccgccgtcaccagctatgcattcactccgtttccagtgagcagatgtcttgcttggaaagtggacctgtgtctgtgtctgtcctgagaacttaccagcagaaatcctcatttctgtgctacggatttaccaaaaattgtcaagtctttttcagtttaacagttcctttaaatgtgtagtatt

SEQ ID NO: 51051 - DNA, 498 bp, Homo Sapiens
ctggcagactccccctcctaccacgtcctcctggcctgcattcccacccgctcctgccagcacacagcctggggtccctccctcaggggctgtaagggaaggcccaccccaactcttaccaggagctgctacaggcagagcccagcactgatagggccccgcccaccgggccccgcccaccccaggccacatccccacccatctggaagtgaaggcccagggactcctccaacagacaacggacggacggatgccgctggtgctcaggaagagctagtgccttaggtgggggaaggcaggactcacgactgagagagagaggagggggatatgaccaccctgccccatctgcaggagcctgaagatccagctcaagtgccatcctgccagtggcccccagactgtggggttgggacgcctggcctctgtgtcctagaagggaccctcctgtggtctttgtcttgatttttcttaataaacggtgctatccccgcaaaa

SEQ ID NO: 51052 - DNA, 630 bp, Homo Sapiens
tgtacagctgcctcccggcagtccaggaaaactgcaaaaaatgggaagtaaggtcctggcaggcagacccggcatgtagccgctggccatcttgaatcctagggcatgaagttgccccaaagttcagcacttggttaagcctgatccctctggtttatcacaaagaataggatgggataaagaaagtggacacttaaataagctataaattatatggtccttgtctagcaggagacaactgcacaggtatactaccagcgtttggatattgatatatacatggcaaatctgaatattgttttatgagaggcctggcaatgggtaaaacaccaaacttgaaatcagaacataggtgcaaatggccactcctgtagtttcttttctgtaaaatgggatctggacgaatgataccaaacgtttctttctaacattgtattttataactctggcctatgattgtgttgtgtcttgcattaaaaaaaaaaatttgagagtggtagaattacttctgttatctgaaatacctgagatgcactttaaactgttgaaatgtaagctctgagggcagggaccgtatcttatttactgttagtatccgttgcatctagtgtggtgcacctggcacacagt

SEQ ID NO: 51053 - DNA, 603 bp, Homo Sapiens
cgaatgtatggaagaaaataattattctcttctggcatcagtttgctacagtgagctcagatcaaataggaaaatacttgaaatgcatgtctcaagctgcaaggcaaactccattcctcatattaaactattacttctcatgacgtcaccatttttaactgacaggattagtaaaacattaagacagcaaacttgtgtctgtctcttctttcattttccccgccaccaacttactttaccacctatgactgtacttgtcagtatgagaatttttctgaatcatattggggaagcagtgattttaaaacctcaagtttttaaacatgatttatatgttctgtataatgttcagtttgtaactttttaaaagtttggatgtatagagggataaataggaaatataagaattggttatttgggggcttttttacttactgtatttaaaaatacaagggtattgatatgaaattatgtaaatttcaaatgcttatgaatcaaatcattgttgaacaaaagatttgttgctgtgtaattattgtcttgtatgcatttgagagaaataaatatacccatacttatgttttaagaagttgagatcttgtg

SEQ ID NO: 51054 - DNA, 606 bp, Homo Sapiens
gtgcccagagggagaagcactgagcctgaagaaactagatgagtctcagaaccacagaccggccagaaatctctcccaccattatatcagcgtgatacaggtctatattcatttctacaaacaggaacaagttccttgcagcaataatattattttatgacttgtatttttactatacccttcctctgaggtttagttttcatcacattatgttcaagattccatatctccgtaaattacagctaattacagggcattgttccatggttattaaaaatcagagtttattaaaaatcctgagtcttaagggctgtcttacctttcacttccactgtcctgtagaaacagatcaagctgcaaaccacgtccttcatctgctcgttcattttcttgcaactctttgactctgatcccctgagcagcacgttcatcacgcatgctctctgttgcgttccccatttcagatgtccagtaatggtgaaatacaaatcctgcttcgacaccaaacaaacaccacacaacaccacccccaccccttagaccccactcgcccccaacaacttttctacacaacccttataccccctcgtccccctctcacaatcc

SEQ ID NO: 51055 - DNA, 762 bp, Homo Sapiens
ggagagtaaaagagcaagcttttgtgagataatcgaagaacttttctcccccgtttgtttgttggagtggtgccaggtactggttttggagaacttgtctacaaccagggattgattttaaagatgtctttttttattttacttttttttaagcaccaaattttgttgttttttttttctcccctccccacagatcccatctcaaatcattctgttaaccaccattccaacaggtcgaggagagcttaaacaccttcttcctctgccttgtttctcttttattttttattttttcgcatcagtattaatgtttttgcatactttgcatctttattcaaaagtgtaaactttctttgtcaatctatggacatgcccatatatgaaggagatgggtgggtcaaaaagggatatcaaatgaagtgataggggtcacaatggggaaattgaagtggtgcataacattgccaaaatagtgtgccactagaaatggtgtaaaggctgtctttttttttttttttaaagaaaagttattagcatgtattttgtgagggaggtttacagcactacaggtcttgagttaagaaggaaagaggaaaaagaaaaaacccccataccccgatttaaaaaaaaaaaaaaccgatccttagtctttagaagttccatttaaacccatagggaaccttttccccttaatcctcatggttaagcctgtacccagttccagggggatttaaggttagaaaccttaccaggtttgtgtaa

SEQ ID NO: 51056 - DNA, 804 bp, Homo Sapiens
atctttttgatatagtmacccataagcatggtgagctcctgctctcataaggtcagccaaagccccttaagaaggtacacagcacatctgcagtaattcaggaggtcctgtgaagtgtggtgatgcatctaacamcttttgctgctcamtgagaacccagctttgaacttacaagattacactaaccatttttaaagtgcacaaaaatattattattagtcttaactaaaattacatattttataatgccctgcaactctaaaccatccttttgtttacacatttttgtatggtattttaagattatcaatcacttcaacatttctataaccttgtttgtatagcactttctcaagagctgtcagtcccacatacagaatcatttcttttacaaaatgatttaatatgtaatcatgtgtcaggacataaattttgtcacttgggacagtagctttccagctaagataattgcgtgaactctgttaaaactgattatcactcatcaatggctttatttttaacctataaataacccctttcaatatacctggtttttacagcattgcaaaatctgtaaaaataacttttattggaaaatgtcatgaagtcatttttcattatttgtactaaacaatgttttatgtactccttttgtgttttatcttttgtttttccatctgtactcccctcatcctcctaatgttgagaaaatcaaatttcctgggtgtgtgcttgttaagtgatcaaaagtaaatgttctctttgccattttagatggaaaaataaaaaaaattaaaaaktaaa

SEQ ID NO: 51057 - DNA, 638 bp, Homo Sapiens
cgcgtccggcctggtggcgagcccaagtggttgcctcctacgaggagaccaacgaagtggagattcgatacgtggactacggcggatataagagggtgaaagtagacgtgctccggcaaatcaggtctgactttgtcaccctgccgtttcagggagcagaagtccttctggacagtgtgatgcccctgtcagacgatgaccagttttcaccggaagcagatgccgccatgagcgagatgacggggaatacagcactgcttgctcaggtgacaagttacagtccaactggtcttcctctgattcagctgtggagtgtggttggagatgaagtggtgttgataaaccggtccctggtggagcgaggccttgcccagtgggtagacagctactacacaagcctttgacccccatgctgcttcctgagagtctttttttgcactgttgaaattgggcttggcactcaagtcaaagatgaacatcggaataacaaacattgtcctctccagaaagtcctttctttctccatactgtagtcctattgagaagacatttcgtctctgagaaaaaaaggatggaactatgggttctcttcgcaaagccaaaggatagtgtttaacaagccagctggcttatgctgg

SEQ ID NO: 51058 - DNA, 509 bp, Homo Sapiens
gcacgaggagagtccactccccaccaagagaggcactgcaggactcctagagcaatggctgaagcgggagaaggaggaggaacctgtggccaagcgtccttacagccagtgacacaggactttcagagaccaaggccagggtctgctgcactgctgttctgataataggttcttaacattgtatgtatatgtgtttgctttgggaggaggtggcactgtgttagttgacagttgtgggctcatgtagtcttttttgccatgagtaggagcccctagtggggctggtggacagctttggaagaggtgtcctgctgctgttaccagccatgtgggccccataggggcactgcgcctgctgccctttcctggcagggctggtggagtcttccctcaaagcatgccttacccagctgggaagtctctgccctgatctggtactccttgtagtaagctgttttctgctcagccactgggctctttcacttttttagttcttaaaaatttatttt

SEQ ID NO: 51059 - DNA, 443 bp, Homo Sapiens
ttttttttttttttttttgccaaggccactgttgctgcctaaaaaaaaaaaaaaaaaaaaaaaaaaaaaaaaaaatgctataaaatggtgaaagcttccttctaaactgccccaagtgttgaagtcttcactttattttgttcggttttgttttgtttttctgttttgtttgcaaaatggaaagggggtgtcgggggggatggggtgtattttgttgcaagtttgtgaggggaaaatgttttggtttgtttctactgacctgaatgtgttggatctacacgtgttgttttgtttttgctttattgatgcacggatgcttttgaacagtaaagcgaaatgctaaacatggaaaatctgctctgtttgtcctttaaacatttctgtagttaacaaaacactgtaatgtgccttggagcttagtaacttgtaataaatcctcgtgc

SEQ ID NO: 51060 - DNA, 458 bp, Homo Sapiens
atgcataccaaatgaagactgcctatcatcatatcaaatatgccaattctaaaaagagcttaacattagaatagtatatggtagaattactagttcagaattggcatagattctggtgttaaaatagactggatctgtattatctgagggttagtaactaatgcttagccaggcctgcttcacagagttgctaccagggagtattctttggataagcaaaatgctagcagcatgtgttttaagctctgttaaggggtgaaagatgtaattattgacagattaaatagataacttcgtaaccaccagggggcagattcaatacatcacagaatggctgaggaagatccttgggttgtgaagagagtagaaaccctagggagcagtgcttttgggtcctagaacctgttgagtttctaatgaatatttgtagaatctcataaaacagtttaatacaagct

SEQ ID NO: 51061 - DNA, 1132 bp, Homo Sapiens
ggagcgatgaacgcaagaggcataccaagatccacttgcggcagaaggacaagaaagcagacaaaagtgttgtggcctcttcggccacctcctctctctcttcctacccgtccccggttgctacctcttacccgtccccggttactacctcttatccatccccggccaccacctcatacccatcccctgtgcccacctccttctcctctcccggctcctcgacctacccatcccctgtgcacagtggcttcccctccccgtcggtggccaccacgtactcctctgttccccctgctttcccggcccaggtcagcagcttcccttcctcagctgtcaccaactccttcagcgcctccacagggctttcggacatgacagcaaccttttctcccaggacaattgaaatttgctaaagggaaaggggaaagaaagggaaaagggagaaaaagaaacacaagagacttaaaggacaggaggaggagatggccataggagaggagggttcctcttaggtcagatggaggttctcagagccaagtcctccctctctactggagtggaaggtctattggccaacaatcctttctgcccacttccccttccccaattactattccctttgacttcagctgcctgaaacagccatgtccaagttcttcacctctatccaaagaacttgatttgcatggattttggataaatcatttcagtatcatctccatcatatgcctgaccccttgctcccttcaatgctagaaaatcgagttggcaaaatgggggtttgggcccctcagagccctgccctgcacccttgtacagtgtctgtgccatggatttcgtttttcttggggtactcttgatgtgaagataatttgcatattctattgtattatttggagttaggtctcacttggggggaaaaaaaaaaaagaaaagccaagcaaacaatggtgatctctattttgtgatgwgctgtgamataagtttgaactttttttttgaaaagcgtccagtttytcagagcwgtgtcagrtgttgttcsgtaacyttttktaatmtggttgccgtmycycmaggggsaatatggttggtttctttttttttttttttgarggttttctcgcctttggtt

SEQ ID NO: 51062 - DNA, 367 bp, Homo Sapiens
catgtgtcttgctgaagattaaggggaaatgttacagtgttgggacttcctttcatggcagaatctacaatttgagcgacttcagtagtatctcttagtctacgcttttcatacacaaaacactgtggaaccacaagccattaccaagcaaaactctttcactggaaacaagggggcagtctagaagtaaaagtgaccttaagaagactctttacaggcaacaaatgaagcttttctaagggatttttgcatcagttcagtcataagaatacttttttccagggtaattaggcaatagcttcactgaaaatgacagcttttcattgcattatttaatccttatatttggaattgaagtcgtaacttc

SEQ ID NO: 51063 - DNA, 661 bp, Homo Sapiens
cccacgcgtccgcacagattccaaaaagtgtgtgaagttgtagatgggttcatctatgttgcaaatgctgaagctcataaaagacatgaatggcaagatgaattttctcatattatggcaatgacagatccagcctttgggtcttcgggaagaccattgttggttttatcttgtatttctcaaggggatgtaaaaagaatgccctgtttttatttggctcatgagctgcatctgaatcttctaaatcacccatggctggtccaggatacagaggctgaaactctgactggttttttgaatggcattgagtggattcttgaagaagtggaatctaagcgtgcaagatgattctcttttcagatcttgggaactgaaaccatttgaaatttattactaaggtcgtgatgtgaatatttgctcagtcagcccaccttgtcctgcctttttgcagataggctttcatttggacagctataactgctgtgttttttatattatttttactctttaccataaatcaattacaagcaaaagagtttcagtcctagtatttagccccaaaatgaacctttaaacattttttcggtatttttatattttctgtcttttttacaaatatgacatgcttggacagacaaccatataacaatacaacaaccgg

SEQ ID NO: 51064 - DNA, 539 bp, Homo Sapiens
tttaatgagttttatcttgacaggcgccgcctcgcccccgggccctttcgtccacagcaaaaatgcatcaagtctccacgtgtttcgggccagggcgtggcttggcattgaccttcatgaccttacatagctttagagaagccataacgttagactgcaatactaacgaccgacgcccctccgggcagagaccaccgcgcccctctgcgccccagcgacgcggcccgcggggacgtcgctgtccgtcctgctcgccctgtgccctctcactgacttctcccgggtcgtgtcttttaaaaactcctgttttcacaccttacaaagccagctctgagcagacagggcgtcctctcgtagaacctgcgcaccccgttcccagcgcatggcgccccgggccgcgagcttagcttagaccgtggtgtcctctgtccgtctgtcctgcgcctgcgcctcctcctgcatgtcggggcccctgcgtgtgttctctccggatggaatcacagccaataaacaccagtgatttcaaaaaaaaaaaaaaa

SEQ ID NO: 51065 - DNA, 666 bp, Homo Sapiens
  misc_feature (9)..(9): n is a, c, g, or t
aggatttcnaaatacattagtgagagtaacagctagcagaataattacaatggctaaaacgtttttatagagaatcttgtttttcaaaaaagaataaaaagtttgaatagctattattaaagaaaagccatgtcttcaacatctgagtcaccaagaagtaacactttttaaacttgttagaaatccctggaggcatttcaaattcatcttctaacctacctaagcactttaaaatacagcctccttctgttcctctgttccccttcatgcctccttttgaattgatatctcagctgtcaatatttctttgacttcagcattgttattttatttctctatatcaatgtgtccttagttttcttagcctgttaatttaaaaatccagacttgggggtcattgtgttgctacccaagagaaaatgctacagttttatagattgcacatcattctttaaggcatacttttacctcaggaaacttactctagtatgttctcatatattgaattctcaactaagtaactatttctttatacctataaactagtacctaattcactgttagttaaatgagctatagataaggcagctaaatttctgaaagatagccagagtaagtaagcagccactgcaagctctgaatcagttttttaaaaaaaaaaaaaaa

SEQ ID NO: 51066 - DNA, 616 bp, Homo Sapiens
cccagaaaaagtgcccaagctgctgacgcaaacaacaacaaatgctgcttatttgcatgccgacttacatatatttgcatgttcgttgactatcaaagagtgcagagctctccccagccccgtgggtggtgactttgttttcctgcggggctcagccccctccaggatgcagccccctcccccgcaccccggaaccggcgtcgctggcgcatcctgggtggaggcaggccccgagctcggggaaggggttttcccttcctctctgacccagatctgcgcgcggcctagcccgggcctcatttcttatccccgccaagggtttcctctcagtcatttgtttaccagaaacatgaaaactgcctgtctggccgggccgcacttgtggcccccgggaccccacctctggccccacctccctcaagtctgcgccccgtccccagccagacccactcgctgccgggaccctttcactgccccggtggagtgaatagaggatgaggggccctgaccctgtgtctccaactgctgcaccccatcccgaccctgtctccgccacctcgcagccccattaaagcgctctcatctggaaaaaaaaaaaaaaaaaaaaaaaaaaaaa

SEQ ID NO: 51067 - DNA, 427 bp, Homo Sapiens
taacaatggtgtgcatgtgcaggaaatgacaaatttgtatgtcagattatacaaggatgtattcttaaaccgcatgactattcagatggctactgagttatcagtggccatttattagcatcatatttatttgtattttctcaacagatgttaaggtacaactgtgtttttctcgattatctaaaaaccatagtacttaaattgaacagttgcaaagatgtcttaattgtgtaaagaattggtgtagtcatgactttagctgatactcttatgtacgagatctgtctctgctgtttaacttcattggattaatcagctggtttcaactctactgcgaaacaaaaatagctccttaaaagtactgttctccttcagtggcatgtagttatctaatcaagacacctcattcaaacaaaacctgccttag

SEQ ID NO: 51068 - DNA, 696 bp, Homo Sapiens
gaaacaggtcaggctctcccaccgtatctgcaagtgtactggcatccatctgtcttcttcctacccctacagtagaaacagtgtctgtccccagctgtgctctgatcccggctcctttcacctcagagcttggaaaattgagctgtccccactctctcctgcgcccattcatcctaccagcagcttttccagccacacgcaaacatgctctgtaatttcacattttaaaccttcccttgacctcacattcctcttcggccacctctgtttctctgttcctcttcacagcaaaaactgttcaaaagagttgttgattactttcatttccactttctcacccccattctcccctcaattaactctccttcatccccatgatgccattatgtggcttttattagagtcacgaaccttattctccaaaacaaaagcaacaaggactttgacttctcagcagcactcagctctggttcttgaaacacccccgttacttgctattcctcctacctcataacaatctccttcccagcctctactgctgccttctctgagttcttcccagggtcctaggctcagatgtagtgtagctcaaccctgctacacaaagaatcttctgaaagcctgtaaaaatgtccatgcatgttctgtgagtgatctaccaagaaataaaaaatttaccaatcaacaaacaaaaaa

SEQ ID NO: 51069 - DNA, 702 bp, Homo Sapiens
taaactgaggtttgttttggcaccttctgccaccccagcagaagccttcatacaacatgacgaaacaagggatcatgttgaagtgtgtcctgatgctggtgttatcatcgaggaactttctcaacgcattgcattaactggaggtgctgcactggttgctgattatggtcatgatggaacaaagacagataccttcagagggttttgcgaccacaagcttcatgatgtcttaattgccccaggaacagcagatctaacagctgatgtggacttcagttatttgcgaagaatggcacagggaaaagtagcctctctgggcccaataaaacaacacacatttttaaaaaatatgggtattgatgtccggctgaaggttcttttagataaatcaaatgagccatcagtgaggcagcagttacttcaaggatatgatatgttaatgaatccaaagaagatgggagagagatttaacttttttgccttgctacctcatcagagacttcaaggtggaagatatcagaggaatgcacgtcagtcaaaaccctttgcatccgttgtagctgggtttagtgaacttgcttggcagtgatatttcagcttggacattttacccttcagtcggcccaagaaatcaaaataaaggaaacacatttcatatactgcaggtaacaaaagtcaaagtattttatcttttcacagcaa

SEQ ID NO: 51070 - DNA, 869 bp, Homo Sapiens
  misc_feature (7)..(7): n is a, c, g, or t
gaaatcngtcagcaaaaccttgccctctacttggtctgaccccagtgtaaacatcagcctagacaacttactacctggtatgcagccttccaaaccccagcagccatcactgaatacaatgattcagcaacagaatatgcagcagcctatgaatgtgatgactcaaagttttggagctgtgaacctcagttctccatcgaacatgcttcctgtccggccccaaactaatgctttgatagggggacccatgcctatgagcatgcccaatgtgatgactggcaccatgggaatggcccctcttggaaatactccgatgatgaaccagagcatgatgggcatgaacatgaacatagggatgtccgctgctgggatgggcttgacaggcacaatgggaatgggcatgcccaacatagccatgacttctggaactgtgcaacccaagcaagatgcctttgcaaatttcgccaattttagcaaataagagattgtaaaagaagcagattgaatgaagaatttttagctgtgcagataggtgatgttgggatggaaaatgctaatcaactaccctttcttttatcaagtaattaaaataaatctacataaagaaccaaaaaggctgttttataaaagtgaaatatccagtatttcagagggccaggcaagagcacttcagatgaggcagtcaaaatcatttttttccagtgaggatagaccacaagtgggttggtgagaccattgaaagcctttatcaactgaagagtccatttaacagcataatttgtgggaagactggaatagggctgaaataaatgggttttgaatctctaaattttatacctttctttttctgaagaaccttgattttttca

SEQ ID NO: 51071 - DNA, 646 bp, Homo Sapiens
acagcttttccgctgaagcttaaacaggcattaacgcttctttagatctgaagttgcaggttaagcttgtctggtcaacattccagtgtggaaaaataatttaaacaatcttattctcttaattcttttggcaacaaaaactattagtaatagctatttgggaccagacaaaatcagctttcatctataattcattggggataatgggagatttagataatgtatccagatttaaacctaccagtttgtcctaccccttaagcgtttaaaataaaatatgcaacaaaatggatgacttagtggagatggaagcccattaattgggttccccattaaatcgtttacatacaagaacacagtttttatactaaggatttgtgtttaaagtcttgtaaagttcatgtctttcacccagatatatcaaatgttagaagaccagtgtgacttcattagataacgtttagtgtatttagaatgtgtaaatttgtgctttgaactgtagtttaataaatgtaaaattgcatcatagtatttgttgacctaatgtaacccttgtatgattgcaataaaattttgtgtagattttactgttttttcaggctaaaactttgggaaaggggctagctagcaaaggtagttttgaaat

SEQ ID NO: 51072 - DNA, 582 bp, Homo Sapiens
agcctttggggccgaagtgggcgtgcggctcgcgctgttcgcggccttcctggtgacggagctgctccccccgttccagagactcatccagccggaggagatgtggctctaccggaacccctacgtggaggcggagtatttccccaccaagccgatgtttctgccagccttgccctggctctgaatggcgtctttaccaacacaataaaactgatcgtagggaggccacgcccagatttcttctaccgctgcttccctgatgggctagcccattctgacttgatgtgtacaggggataaggacgtggtgaatgagggccgaaagagcttccccagtggacattcttcctttgcatttgctggtctggcctttgcgtccttctacctggcagggaagttacactgcttcacaccacaaggccgtgggaaatcttggaggttctgtgcctttctgtcacctctactttttgcagctgtgattgcactgtcccgcacatgtgactacaagcatcactggcaagatgtactagttggatccatgattggaatgacatttgcctatgtctgctatcggcagtattat

SEQ ID NO: 51073 - DNA, 871 bp, Homo Sapiens
  misc_feature (776)..(776): n is a, c, g, or t
tggaccggtccggattcccgggatacaacttgaaaggggaaaaaaaaactacaaaaacttaactttggtataggccaagtcagggagaaagtagagaaagctgtcatgccacagacttctttagtggagatcatttcctttttaactttgttcaggttgcccttcaccatggatacagtccggtacccttaaacatttaagggctgtttttttttttctttatatgatgttcagcttggtattaaccaaacttaaattttttttccagaagtattaaaatttagttaaagcaagatgaagtcttttcccatgaatgtgtccccttatctcattatagcttatgctcagtttcactttcttggaaaggttaaaacaaattagcctggcactttaggtaacttgaaaataactctcacccttctgactgccttccatccactctcaccccacacctttttttaatatatatacacccttacagattttctaacaaccaaataaaattctagcaataaattgaattatactgctatatttgtatatactgtaccataaatagtatgtctgtacctggaaggtatttttttgagaactgatttatatgaaatatacttgagggtaatgtagcttgtcctttttagtttcaaattcttattcataggcagatactttgaagacaccttaactctttgttgtgtgtattttcccttgcatcagataactatacatggagaaatccattttgttttttggtttatcttctgttcttcctaccntgtgcttgtctgactagtatcacccctgagccagtatacagtacccatcctctcccccttaccaattttgggcagaaggtggtttatactggcat

SEQ ID NO: 51074 - DNA, 474 bp, Homo Sapiens
gcacgaggccaatcattagggagaggcaacaaggtaattcagcctttcctcctatcagcacaaagaaactcaaagctgttttttccctttctgttccaaagcagtcttatcctgacaggagcggtctatactagtgcagatttcaacacttttttttaacgttttaattactatagtgttatgtagagatttgattgagcagctaatgtttctgaactttacttactaattttcagtgtccttaagggttctgtagtgttatcaaagcaaaaagaaaatgctgcataaaaataccaaacttcagcaactgttaatactcagatcatatacctcttaataaatagcatcttatgctaattagccctgctaaactatgtacagaggaaactgttcaagtattggatttgaaagtaaagtgacttatgtttaacagaactaatgatgtattgaaacactgtattatgaaaagctaaa

SEQ ID NO: 51075 - DNA, 921 bp, Homo Sapiens
tttaattaaaaaataaatgcagagaattgtgtacgattgttgagttttgctgatctcttcagttgtgaggaattaaaacagagtgctaaaagaatggtggagcacaagttcactgctgtgtatcatcaggacgcgttcatgcagctgtcacatgacctactgatagatattctcagtagtgacaatttaaatgtagaaaaggaagaaaccgttcgagaagctgctatgctgtggctagagtataacacagaatcacgatcccagtatttgtcttctgttcttagccaaatcagaattgatgcactttcagaagtaacacagagagcttggtttcaaggtctgccacccaatgataagtcagtggtggttcaaggtctgtataagtccatgcccaagtttttcaaaccaagacttgggatgactaaagaggaaatgatgattttcattgaagcatcttcagaaaatccttgtagtctttactcttctgtctgttacagcccccaagcagaaaaagtttacaagttatgtagcccaccagctgatttgcataaggttgggaccgttgtaactcctgataatgatatctacatagcagggggtcaagttcctctgaaaacacaaaaacaaatcacagtaaaacaagcaaacttcagactgccttcagaactgtgaattgcttttattggtttgatgcacagcaaaatacctggtttccaaagaccccaatgctttttgtccgcataaagccatctttggtttgctgtgaaggctatatctatgcaattggaggagatagcgtaggtggagaacttaatcggaggaccgtagaaagatacgacacttgagaagatgagtggacgatggtaagccccttaccttgtgctttgcaatggagtgcagacatttgtggttcatgactgt

SEQ ID NO: 51076 - DNA, 581 bp, Homo Sapiens
catatgttatccccccgcctgtggcattttctatgggctcaggttacaccttcccagctggtgtttctgtcccaggaacctttcttcagcctacagctcactctccagcaggaaaccaggtgcaagctgggaaacagtcccacattccttacagccagcaacggccctctggaccagggccaatgaaccagggacctcaacaatcacagccaccttcccagcaaccccttacatctttaccagctcagccaacagcacagtctacaagccagctgcaggttcaagctctaactcagcaacaacaatcccctacaaaagctgtgccggctttggggaaaagcccgcctcaccactctggattccagcagtatcaacaggcagatgcctccaaacagctgtggaatccccctcaggttcaaggcccattagggaaaattatgcctgtgaaacagccctactaccttcagacccaagaccccataaaactgtttgagccgtcattgcaacctcctgtaatgcagcagcagcctctagaaaaaaaaaatgaagccttttcccatggagccatataaccataatcc

SEQ ID NO: 51077 - DNA, 876 bp, Homo Sapiens
acctcccagcccggaggccatgagagcctggtggaccgctggatccgcagccgcctgacagaggctgtgaggctcagcaatcaaggcttccaggcctacgacttcccggccgtcaccactgcccagtacagcttctggctctatgagctctgtgatgtctacttggagtgcctgaaacctgtactgaatggggtggaccaggtggcagctgagtgtgcccgccagaccctgtacacttgcctggacgttggcctgcggctgctctcacccttcatgcccttcgtgacggaggagctgttccagaggctgccccggaggatgccgcaagctccccctagcctctgtgttaccccctacccggagccctcagagtgctcctggaaggaccccgaggcagaagccgcccttgagctggcgctaagcatcacgcgagccgtgcgctccctgcgggccgactacaacctcacccggatccggcctgactgtttcctggaagtggcggatgaggccacgggcgccctggcatcggcggtgtcgggctacgtgcaggccctggccagcgcaggtgtggtggctgttctggccctgggggctcccgccccccagggttgcgctgtggctctggcttctgatcgctgctccatccacctgcagcttcaggggctggtggaccctgcactggagctgggcaagctgcaagccaagcgagttgaggcccagcggcaggcccagcgtctgcgggaacgccgtgctgcctcgggctatcctgtcaaggtgccgctcgaagtccaggaggcagatgaagccaagctccaacagacagaagcagagctcaggaaaggtggatgaggcccatcgcccctattccagaaagaa

SEQ ID NO: 51078 - DNA, 850 bp, Homo Sapiens
cttcagttgtgcctcaaaccttcgaaagcatggtaggactcacactggagagaaaccctatgagtgtaagcaatgtgggaaagccttcagatctgcctcaaaccttcagatgcatgaaaggactcacactggagagaaaccctatgaatgtaaggaatgcgaaaaagcattctgtaaattctcttcttttcaaatacatgaaaggaagcacagaggagagaagccctatgaatgtaagcattgtgggaatggattcacatctgccaagattcttcaaatacatgcaagaacacacattggagagaaacactatgaatgtaaggaatgcggaaaagcattcaattatttttcttccttgcatatacacgcaaggactcatatgggagagaagccatatgaatgtaaggattgtgggaaagcattcagctagcctggttccttttatggacatgaatagactcacactggaaggaagcactatgaatgcaagcaatgtggcaaaactttcacattttccagttcttttcgatatcatgaaaggactcacactggggagaaaccctatcaatgtaagcagtgtgggaaagccttcattccttttacttcttttcaatgtcatgaaaggactcacacgggagagaaaccctatgagtgtattctagttccgtttgatatcatgcaaaggacttacactggagtgaaacccttatgaatgtaagcaatgtgggaaagccttcagatgtgcctcgcaccttcaaacggcatggaaagggttcacacttggggagaaactctatgaatgttaagcagtatgggaaaagctttcagatctgcaagattctttgaactc

SEQ ID NO: 51079 - DNA, 927 bp, Homo Sapiens
  misc_feature (637)..(637): n is a, c, g, or t
  misc_feature (644)..(644): n is a, c, g, or t
ctacacgaatggggagaagaaggtttcatggctcatgtagacagggttattgatttctatagtaaccagaaggatgcaatactggcagctgcagacaagtggttaactggtttggcagaatggcatgttcctgctgctggaatgtttttatggattaaagttaaaggcattaatgatgtaaaagaactgattgaagaaaaggccgttaagatgggggtattaatgctccctggaaatgctttctacgtcgatagctcagctcctagcccttacttgagagcatccttctcttcagcttctccagaacagatggatgtggccttccaggtattagcacaacttataaaagaatctttatgaagaaattaaactaggttgggcatggtggctcacacctataatcccagcactttgggaggcagaggagggaggatcacttgaacccaggaattcaaggctgcagtaagctacgatcacaccactgcactctggcctgcatgcactctggcctgcatggcagaacaagaccctgtctctaaaaaaagagaaagaaatcaaactaatcatgctgctcatggatttttccaataaatttcttgttttggcaggaagaaatgaacactggtattagacttanagattanatttccctcaacatgtcctatctgtagtagttcaactagacaccttttaaagtgcctctaaattcatcagatggccaaactgtatttataatccaccttaggcatttttgaaaaaactttcaacctgtaaaaaagttactttttaatcttggatttatttagtgaagaaactttggaaatttggctttggaaattttccccataaaattggtctttttgaaaacctaaaaatttttaacccctgggaattaatttttttgaagattttttaaaagaaaagtaa

SEQ ID NO: 51080 - DNA, 701 bp, Homo Sapiens
tttttttttttttttgggggcatctctatagaaagtgaccaccaaggccagtaagtacgggaaaaaatgtttactaacttcctcagagattcgtgatacgcgtttctccactgacagacatttaaaaacaaccttcagctccgtttcaatcaatcacctcgacttgttttttagcatggacactgccagcaggacagacagggatggagtaaaccgaagtcaatttcagggctcttggcgtgttggacacagaagaaatcctagtgcagcctttggtagctaacagtcactgattttataattggagaatgcgtaaagattcatttttcaaggagaagagcctgcaaatggccaatgaaggaggtaaataaactaagatattccgagggaagggacccaggccacctcccttccgcaggtctgcagatgaagggttttttgaatgaaatgccactgtgcattttcagaaaaaaaaatctctgataaacagactttgaatggatgtttgttcctcctgattctcttttctcttcgtggcgacttagagttggcggatattcggaactgtgaatgtacatagcgttgagttaaaccccttgtgtgtgagacaggacgcagcgggcccctggtggcctgggggccagacccgtgggcaggtggggcatgggccctggcctgcggggacctgctggggtgtgagg

SEQ ID NO: 51081 - DNA, 654 bp, Homo Sapiens
ccacgcgtccgtgcgtatgtaactgtgggaggcatcacctctgttattaagctgatgtttgcaggacttttctttttgttctttgtgaggtttggaattggaaggcaacttctcataaaattcccatggttcttctcctttggctatttttcaaaacaaggcccaacacaaaaacagattgatgctgcctcattcacgctgacattctttggtcaaggatacagccaaggcactggtacagataagaacaaaccaaatatcaaaatttgtactcaggtgaaaggaccagaggctggctatgtggctacccccatagctatggttcaggcagccatgactcttctaagtgatgcttctcatctgcctaaggcgggcggggtcttcacacctggagcagctttttccaaaacaaagttgattgacagactcaacaaacacggtattgagtttagtgttattagcagctctgaagtctaaacactggaagaattaactgaagtcataacgtgcgtgaattaacagcttctctatttgatatttgaaattcttctgtaagcctgtctgagtgtatgtggaaacgattgtcaaatctaaaatatctatatattaaaaagtaggaaattgtcctagcttaccctaaaaaaaaaaaaaaag

SEQ ID NO: 51082 - DNA, 581 bp, Homo Sapiens
ccgatttctagtgaattgtttgtatcagtttcatgtctaagtataaattttctattttaaaatttaagaaccgtttataatcagtgctttcccaactcttgggttgctctccataactatgtatttgtgaaagaaaatggtcatttttttttactgaagtcatataatgacttgggtcagctcgtaatgcattgtgatggttttgtatgagctgggtgtttttttccattacttttaatgatcttcgttgcaagttatagttgtggataaaggggagaatttattgctcttgcaaaccaattatggaaagcaacttaagaaaaccaatgttctaaatcataattgtttgtatttatgtaaagtatggtctcttactttttagtttgtagtttaagtgcaaagaaacagtagtggttttttttctattgttttgtagtcttcctgtccccttcagtccctccagtgtgtatattaccattctccaatgaaataatagggcatttaacaaagatcgctatgtgcaatactgtatttagtgtttctatttcaatttttctaggatgttaatttatatgaaaata

SEQ ID NO: 51083 - DNA, 592 bp, Homo Sapiens
cttgatgtattctagactactgaaagaaaaccacttcaaagattttgttgaaagttttagtgttgtctgaaatgcaagagggaaggtgattggtagtgagttaaaagaaaaagagaggaaaagagagtagttttgtcttcaagtaaaatgtctggttgtgccagacatttcacaagtgtgaaaggagataggaggagctcaacttgagggcgtgtagtaagttgtagaaggctcgaggggacgtggacttatttgccttggtttgcaatacctgcaaataatgagtttgaaaagaaacaatgaaatgtgttaaaaatttgaccatattagataaattttggtggatttagtcataagatggaaaaagactggtgaatcttttattacaaaatgtttctgttaaaatgggatcatcatctttgaaaggggggaggaggagtaaaagcccgattataatggtgatcaattcaagtcagtgttgactattctgtgaaatatatttggccagtggaaatgataatcagaaaagactgtaaatagatccatccaaatgatttctctgtacaaatgaatgatactattaaaaaaaata

SEQ ID NO: 51084 - DNA, 632 bp, Homo Sapiens
cgcgtccgggagaagatccagacaagagaatttctattcgagcatcagacaagcggatagcttgtgatgaagaattctcagattctgaggatgaaggagaaggaggtcgaagaaatgtggctgatcataagaaaggagcaaagaaagctagaattgaagaagataagaaagaaacagaggacaaaaaaacagacgttaaggaagaagataaatccaaggacaacagtggtgaaaaaacagataccaaaggaaccaaatcagaacagctcagcaacccctgaatttgacagtctcaccaatttcagaaaatcattaaaaagaaaatattgaaaggaaaatgttttctttttgaagacttctggcttcattttatactactttggcatggactgtatttattttcaaatggctttttcgtttttgtttttcttggcaagttttattgtgagtttttctaattatgaagcaaaatttcttttctccaccatgctttatgtgatagtatttaaaattgatgtgagttattatgtcaaaaaaactgatctattaaagaagtaattggcctttctgagctgatttttccatcttttgtaattatctttattaaaaaaattgtacttggaaaaaaaaaa

SEQ ID NO: 51085 - DNA, 1034 bp, Homo Sapiens
atacgccgacctcttccactccgaggaaatcaaggcaccagagaaggaggaattcctggcctggcagcatgatctggaagtgaatgataaagctcccgcccaggctcggccaacggtgtttcgatggacggggggcggaaaggaagtttacttatctgggtccttcaacaactggagtaaacttcccctcaccagaagccacaataactttgtagccatcctggatctgccggaaggagagcatcagtacaagttctttgtggatggtcagtggacgctcgacccttccgagcccatagtaaccagccagcttggcacagttaacaacatcattcaagtgaagaaaactgactttgaagtatttgatgctttaatggtggattcccaaaagtgctccgatgtgtctgagctgtccagttctcccccaggaccctaccatcaggagccctacgtctgcaaacccgaagagcgctttcgggcaccccctattctccccccacatctcctccaggtcatcctgaacaaggacacggggatttcctgtgatccagctttgcttcctgagcccaatcacgtcatgctgaaccacctatacgcgctgtctatcaaggatggagtgatggtgctcagcgcaacccaccggtacaagaagaagtacgtcaccaccttgttatacaagcccatatgaagagctgggggcggatggtggcccaggagacagcacaccaccaggctccacacgtgcatgctttccccaagaaggaatggactgtacattgctcatttcacactcttcagaagaatttcatacctgccctggtcctgcttgaagggttgtccaggcagagcagctcctgcagcgcctccggtctgtgacagtccctcctagcacccccatggcctttgagcctcggggactcatccagtcccagaaaaaaaggaaggggtggccaaaagatcttgcaaccctggccccggcggggcatgtaaggctggggggcagtttcaaaaccaactttctcgaaattttccta

SEQ ID NO: 51086 - DNA, 682 bp, Homo Sapiens
  misc_feature (682)..(682): n is a, c, g, or t
gggaaaatggaaaaggtcaataaagatatatttctttagaaaatggggatctgccatatttgtgttggtttttattttcatatccagcctaaaggtggttgtttattatatagtaataaatcattgctgtacaatatgctggtttctgtagggtatttttaattttgtcagaaattttagattgtgaatattttgtaaaaaacagtaagcaaaattttccagaattcccaaaatgaaccagatatcccctagaaaattatactattgagaaatctatggggaggatatgagaaaataaattcctcctaaaccacattggaactgacctgaagaagcaaactcggaaaatataataacatccctgaattcaggacttccacaagatgcagaacaaaatggataaaaggtatttcactggagaagttttaatttctaagtaaaatttaaatcctaacacttcactaatttataactaaaatttctcatcttcgtacttgatgctcacagaggaagaaaatgatgatggtttttattcctggcatccagagtgacagtgaacttaagcaaattaccctcctacccaattctatgggatattttatacgtctccttgtttaaaatgtcactgctttactttgatgtatcatatttttaaataaaaataaatattcccttagagccn

SEQ ID NO: 51087 - DNA, 581 bp, Homo Sapiens
aattaattttatcaaacctaactgtgacagctgtgatttgacacgttttaattgctcaggttaaatgaaatagttttccggcgtcttcaaaaacaaattgcactgataaaacaaaaacaaaagtatgttttaaatgctttgaagactgatacactcaaccatctatattcatgagctctcaatttcatggcaggccatagttctacttatctgagaagcaaatccctgtggagactataccactattttttctgagattaatgtactcttggagcccgctactgtcgttattgatcacatctgtgtgaagccaaagccccgtggttgcccatgagaagtgtccttgttcattttcacccaaatgaagtgtgaacgtgatgttttcggatgcaaactcagctcagggattcattttgtgtcttagttttatatgcatccttatttttaatacacctgcttcacgtccctatgttgggaagtccatatttgtctgcttttcttgcagcatcatttccttacaatactgtccggtggacaaaatgacaattgatatgtttttctgatataattactttagctgc

SEQ ID NO: 51088 - DNA, 932 bp, Homo Sapiens
  misc_feature (828)..(828): n is a, c, g, or t
  misc_feature (893)..(893): n is a, c, g, or t
  misc_feature (901)..(901): n is a, c, g, or t
gtaatatggaaactggggaaacatgcataagtgccaatcctttgaatgttccacggaaacactggtggacagattctagtgctgagaagaaacacgtttggtttggagagtccatggatggtggttttcagtttagctacggcaatcctgaacttcctgaagatgtccttgatgtgcagctggcattccttcgacttctctccagccgagcttcccagaacatcacatatcactgcaaaaatagcattgcatacatggatcaggccagtggaaatgtaaagaaggccctgaagctgatggggtcaaatgaaggtgaattcaaggctgaaggaaatagcaaattcacctacacagttctggaggatggttgcacgaaacacactggggaatggagcaaaacagtctttgaatatcgaacacgcaaggctgtgagactacctattgtagatattgcaccctatgacattggtggtcctgatcaagaatttggtgtggacgttggccctgtttgctttttataaaccaaactctatctgaaatcccaacaaaaaaaatttaactccatatgtgttcctcttgttctaatcttgtcaaccagtgcaagtgaccgacaaaattccagttatttatttccaaaatgtttggaaacagtataatttgacaaagaaaaatgatacttctctttttttgctgtccaccaaatcaattcaaatgctttttggtttatttttttaccaattccaatttcaaaatgtctcaatggtgctataataaataaacttcaacactctttatgataccaccctggggtatatctttgaatcctanccatctgcagagcaatgctgggctcacccagtaaaaggataccttctttctgaaatagtcaaatncgaaattngaaaagccttcctatttaactaccttactgg

SEQ ID NO: 51089 - DNA, 837 bp, Homo Sapiens
tccattattcgagaagagaacatgagggaaggagatgtaacctcgggtatggtgaaagacccaccggacgtcttggacaggcaaaaatgccttgacgctctggctgctctacgccacgctaagtggttccaggctagagctaatggtctgcagtcctgtgtgattatcatacgcattcttcgagacctctgtcagcgagttccaacttggtctgattttccaagctgggctatggagttactagtagagaaagcaatcagcagtgcttctagccctcagagccctggggatgcactgagaagagtttttgaatgcatttcttcagggattattcttaaaggtagtcctggacttctggatccttgtgaaaaggatccctttgataccttggcaacaatgactgaccagcagcgtgaagacatcacatccagtgcacagtttgcattgagactccttgcattccgccagatacacaaagttctaggcatggatccattaccgcaaatgagccaacgttttaacatccacaacaacaggaaacgaagaagagatagtgatggagttgatggatttgaagctgaggggaaaaaagacaaaaaagattatgataacttttaaaaagtgtctgtaaatcttcagtgttaaaaaaacagatgcccatttgttggctgtttttcattcataataatgtctacattgaaaaatttatcaagaatttaaaggatttcatggaagaaccaagtttttctatgatattaaaaaatgtacagtgttaggtattatttgaatggaaagacacccaaaaaaaaaatgtgctccgactagggggaaaacagt

SEQ ID NO: 51090 - DNA, 507 bp, Homo Sapiens
cacgaggcggcacgaggtgtaccgatgaaacgcgcaactttgtaatcccaacactttctattttctagaatcttctttgttcattgggtggtttttcagtcggctggaattctatcttctgggggccttccgtctgagatggaagctgtcatgggcttgttgtctcttccttctgttgctccctgcccctccccctgcctttccactctgtctggtgagctctgctttttcagtgcaccatcaagagatgcagccccgtggacatgaagacacaatctcccacggacagctttcccccttccgccctctcccaccctctcctccccttgcgctcgcgctcgcgctcgctttctcactggcgtgctctctttctctctctctctccctctgtacctttctcatagttgcttcagatcttaggtctcaagggcactttggcgcgtagtaagtgctttatgtaagaaggcagggcaggggggctttttacaggagaaaaaaaaatgactt

SEQ ID NO: 51091 - DNA, 1032 bp, Homo Sapiens
  misc_feature (1031)..(1031): n is a, c, g, or t
attcagaagagatccaaacaactataggccacgaataaacaaacttaattcaattaaggatgtagaacaaaagaagagtggaaactactttttcttggatgattagactgactctgagaatattgataagccatttattaaaaggagtatttactagaattttttgtcatataaaacttgaatcaggattttatgccccacatactctggaacttgaagtataatatacttaatataacataaaaagccagttgggttctaaattgtagttgaaacacagaaaatgccacttttctgttcctgaagaggctcttttgtgcataatattctaaaatgaagacatttcaagctatacaaattacttccaagttttcatgatgtatgggaagattttcagtaggtgtattatattcacggtaccaaatgctgaccagtgttgctccattttttaaatcttgaaaagggtttctgtacttacctggtttgccaagtatgccagtgtaatgaaactgcccttattttaaaagccagtcaaagattccactgattgacatttgataaataaacatcaggattatgtctattgtgcgtctcagtcttgcactatattaccagtatatggtttccgaaggaagatctctactggaaacacactgttggcaaaatagggattttacatggttctacaccttatgcgggcttaacatgtttgccaaaccaatcagtccattccgcaaaaacctttattgcacgaacattggagaggatccacaggacggataacacaatacaggaagacacaccggagccccaatgtgaaaacgaccgcgacgaccaagagcacactctaaaacgatgcccccacaaaagacgacctaaacgaccgagcaacaacatacatagacaccacactgggagagcaaaaactaacgaagcagcacacgcaacacacgacaccactgctagcacagtaacagacacagcatgacacagccgactacgatacgaatacaataataacgacgaatgant

SEQ ID NO: 51092 - DNA, 656 bp, Homo Sapiens
ggcagaattgttttgttaatggaaagtttaagtaaattatattgtaataaaaaggtagataaaccattgtacaacagtattctaggccgccaacaaaagtgtgacagacacactaaaagccctccaactttaacttgtaacgtagcttcattctcaaagctgactccttttttttctttttccttttcctgagtgtagtacagttaaaatttcaaacagctccttgacactgcttttcatgttcaaaccagccattttgttgtactttggtaaaggacctcttccccttcctcccctacacatacagatacacccacacacagactgactctctttctctcataccccaaggtcatgagtgaatgatgcttagttccttgtaaagaaaatcttgggatggggaaaggggtaggcagcaagaggattcaacaaacgaaaaacataaaaactttgtatatgacttttaaaacaagaggacaacacagtatttttcaaaattgtatatagcgcatatgcatggacaaagcaagcgtggcacgtgtttgcataatgtttaattacaaaaaaatatttattctttaaaaatcttcaagattatgtctatttgctgtgcattttctttcagtttgcttatctttcccgggttggggttggga

SEQ ID NO: 51093 - DNA, 582 bp, Homo Sapiens
cttcttaaagcggcggcgggaagatgaggcttcgggagccgctcctgagcggcagcgccgcgatgccaggcgcgtccctacagcgggcctgccgcctgctcgtggccgtctgcgctctgcaccttggcgtcaccctcgtttactacctggctggccgcgacctgagccgcctgccccaactggtcggagtctccacaccgctgcagggcggctcgaacagtgccgccgccatcgggcagtcctccggggagctccggaccggaggggcccggccgccgcctcctctaggcgcctcctcccagccgcgcccgggtggcgactccagcccagtcgtggattctggccctggccccgctagcaacttgacctcggtcccagtgccccacaccaccgcactgtcgctgcccgcctgccctgaggagtccccgctgcttgtgggccccatgctgattgagtttaacatgcctgtggacctggagctcgtggcaaagcagaacccaaatgtgaagatgggcggccgctatgcccccagggactgcgtctctcctcacaaggtggccatcatcattccattccgcaacc

SEQ ID NO: 51094 - DNA, 582 bp, Homo Sapiens
  misc_feature (561)..(561): n is a, c, g, or t
gtttgaatgttaggggttggatcctagagtagatgcctgaggccacatctgaacagacctgtcagccaggcctgccaggtcttcacgttgaggattcaactggccaatcacaggacaggtgtcctggcctttcttcctgaggtctctaggggaggggcatgggtaagggtgtttcctcagcaccctcctggggtggggattatgtctgctgtcatgtctgggtctttagggtaggacaggctgtggtatgagaggcaggagtctccacaaggcttcatgtggccccttatagggcaggccctgccctctgggaaggtcccttcatgctggaggcacacagctttaaggaagtaggttgaagtaggactccttcgtcctctcactggctttggctccctcaataaactgtgtgggaacctggctcagtgtctgtctctctctctcactctctgtttttcctatctgaggtctttcatctcctcacttcaggaaaacacagttcagcaaagtcttcggatgcgatcctgtgtaggagaaaatacccttctggtgccccatganaaagggaaataccaaaaccat

SEQ ID NO: 51095 - DNA, 583 bp, Homo Sapiens
  misc_feature (572)..(572): n is a, c, g, or t
ctgaagaaagcctctcagtgatggagataatttatttttaccttcactgtgaccttgagaagattcttcccattctccatttgttatctgggaacttattagatggaaactgaaactactgcaccatttaaaaacaggcagctcataagagccacaggtctttatgttgagtcgcgcaccgaaaaactaaaaataatgggcgctttggagaagagtgtggagtcattctcattgaattataaaagccagcaggcttcaaactaggggacaaagcaaaaagtgatgatagtggtggagttaatcttatcaagagttgtgacaacttcctgagggatctatacttgctttgtgttctttgtgtcaacatgaacaaattttatttgtaggggaactcatttggggtgcaaatgctaatgtcaaacttgagtcacaaagaacatgtagaaaacaaaatggataaaatctgatatgtattgtttgggatcctattgaaccatgtttgtggctattaaaactcttttaacagtctgggctgggtccggtggctcacgcctgtaatcccagcaatttgngagtccccgag

SEQ ID NO: 51096 - DNA, 757 bp, Homo Sapiens
ccagccggagtgtgccacctggcagaggtgccctacctccggattctctgtcaactcgaaaagggcttccaagaccaagcactgcaggacacagagtgcgggaaagtggacacaaggttcctgtttcccagcgactaaatcttcctgtcatgggtgccactcgcagcaatctgcagccccccaggaaagtggcagtcccaggacctaccaggtaaagagatcaggacagcaagcaagacttcagtagcaaaccactacagtcagtacctggactcgcctctacccagcagaccctgactccagcagattctggcccagggacaggaggaagagatgccaccagggctggtctcccaggagtagagaccatgggaaatggggtggattaggattgagctggagaagacttaaactctctgggttgaaagaagattaggggaaaagaggtcaccttccagcagtgaaatgaacaaatagaagatgagaagtacaggcaagtggtttgtctttatccacccccactgttgtggtcagccccagagaattttatcttcttccttggcattggttcactggacatttccacgtgagcggcctccgtagctaacctccctgccctctgaggagccatcttcctgaatcgcattctctactggactctggcctgcttggagaggtggcagcaggcacctggtcttcagaaattgtttcctgtgaattctgtgactcctaataggccagtttgtgataagcttac

SEQ ID NO: 51097 - DNA, 967 bp, Homo Sapiens
  misc_feature (16)..(16): n is a, c, g, or t
tgtggaaaaccggcanaacattcacgtggtgaatgaatggatcgctaatgacatctcatccacaaaaatccggagagccctcagaaggggccagagcattcgctacttggtaccagatcttgtccaagaatacattgaaaagcataatttgtacagctctgagagtgaagacaggaatgctggggtcatcctggcccctttgcagagaaacactgcagaagctaagacataggaattctacagcatgatatttcagacttcccatttggggatctgaaacaatctgggagttaataactggggaaagaagttgtgatctgttgcctaaactaaagcttaaaagtttagtaaaaatcgtctgggcacagtggctcacgcctgtaatcccagcactttgggaggctgaggcaggtggatcacggggtcaggagatcgagaccatcctggccagtatggtgaggccccatctctactaaaaatacaaaaattagctgtgtgtggtggcacgtgcctgtagtcccagctacttgggaggctgaggcaggagaatcgcttgaccccgggtggtggaggttgcagtgagccaagattgcaccattgcacttcagcctggcaacagaacaagactctgtctcaaaaaaaaaaaaaatttagtaaaaatcaatggtaagctaaaaataagttttgtttgtgtatttgtttttgagatggagtctttactaaaaaaacaaaaattacccaggcttggggcccgaataactataatcccagcttcttgggaggttgaggcagaaaaattgtttgaacttctgacttaagggattttgcccaccttggcctttcaagggtcttgggattcaggtatgaaccaccgcacctaaccgcgaaccattgggggccctttatatgagcaaacaatttttttaaaaaaaaaaacttggtaaaaagaacaaaacttggtgttttt

SEQ ID NO: 51098 - DNA, 582 bp, Homo Sapiens
ttttccttgctgctaccgcgctgccaccaaatggaattgaccagcggctgttacactgttctttgccactgtgcctatgctcagaatatgctcactgctaagctacaaactcggacagggtcagaaacagaggtgtcccatcccattgcagcctccaccacctgtaaccccttcctggcattggccactgaagggtacaaaggcaaaaggaccacagcaccacttaggtgtagcatggattttaaactgcagtcagtatcagatcctgtttgataaataagctgactgttctctcttgagaacctgtggcctcaaccagccaccaagctgatgtggcccaagtccatctcttggtcttctcctttgaagcacagcctatttctgagccaagggttggggaagcctgtctagatgtgggactcattgccccaaaccagggagaggaagagctcccacagggagagcccaggctctctttgcagcctttcccagtttggtgtttaagcagtgccatgttccttgtttgacaacaagacagtctgtaaagtattgctcttaaaaacaatttaaaaagaacccttt

SEQ ID NO: 51099 - DNA, 644 bp, Homo Sapiens
ccctgatgaagccaccgcggctgaccaggagtcagaggatgacctgagcgcctcgcgcacatcgctggagcgccaggccccgcaccgcggcaacacaatggtgcacgtgtgctggcaccgcaacaccagcgtctccatggtggacttcagcatcgcagtggagaatcagttgtctggaaacctgctgaggaaattcaaaaacagcaacgggtggcagaagctgtgggtggtgttcacaaacttctgcctgttcttctacaaatcacaccaggacaatcatccccttgccagcctgcctctgctcggctactcgctcaccatcccctctgagtccgagaacatccagaaagactacgtgttcaagctgcacttcaagtcccacgtctactacttcagggcggaaagcgagtacacgttcgaaaggtggatggaagtgatccgcagtgccaccagctctgcctcgcgaccccacgtgttgagccacaaagagtctcttgtgtattgatggccggacacactcgtttccgcagtggctgctttcctggaagacgtttcctttcttctgtattaatgaagcctggtaaaattaacacctgtctgaaaatcaaaaacatggcttcccagcagcaaaaaaaaaaaaaaaa

SEQ ID NO: 51100 - DNA, 782 bp, Homo Sapiens
aaaccttttttaaaaaaggttcactctaaaagctgaactacatccttagttttcagtctacttgactctatcaggagctttttaaggaaagtaagtataacatgcaaaggaagcttttttgtattcatttggactcctgtcaataaaaatagaagcttgttgactcgttttatgtttcaatggtgtgtgtctttttactatcaggacataaatagggcaatccacttctttatttttcaactaaagattgaatagtattgtacattactgctaaagtgactgctatttctgtatactgtagaaaaacccaggagtgggagggatttcccctcatagtacaactggaaggatagtgcttgtaaagagtagagatgtgtacatgatgaatcattgagggagggtggatatttttattcctagatatggaggaaacataagtctgtaagtattataaaatgattgtaataattctttcctatcaaaatctccataggtcaaaatattgtcggcaatactacaatttgcaacccttgttttacctttcacaaggttgccactttccagtgcagaaatactaccggcatctgttactgaatagtcggcaatcaactgtgaaactaccaaacaaacaacaacgaaacaaaaaaccactgtgtgggcgcgacacgacacggagagaacattataaacaatctttgggcgaggcccagtgaagggacagtatatcggtcaaggagaactgacacgacatgcggtcacacaaaaaggggggcggccagtta

SEQ ID NO: 51101 - DNA, 474 bp, Homo Sapiens
gccacaacatcctgcgccagacgcgcagcgagcgctgccactgccgcttccactggtgctgtttcgtggtctgcgaagagtgccgcatcaccgagtgggtcagcgtctgcaagtgagcggcccggggtcccctgggccctgatcgaggtcccctcctggagcctggccctctgaggcttacggtcttggcaaggcagcatcgccttggctcttgggaagaggagattggaccacatgatcttataggaacccctcagctctgaggtctgtgatcgccggacagtccaggcctgtctgaaccccaccactcacttctgtgggctctaggactgactgggttcttcctccctccccgaagcccagacagttcagttgggctgggggttgctccacaccctaaaacaagcctcagccaggcaacccgtcagtctgtctccatcctttcaccccttccctggagatgggaggtgggga

SEQ ID NO: 51102 - DNA, 666 bp, Homo Sapiens
gtgctaaatatgaattgtctcaaaattagctgtgtaaaatagcccgggttccactggctcctgctgaggtcccctttccttctgggctgtgaattcctgtacatatttctctacttttgtatcaggcttcaattccattatgttttaatgttgtctctgaagatgacttgtgattttttttcttttttttaaaccatgaagagccgtttgacagagcatgctctgcgttgttggtttcaccagcttctgccctcacatgcacagggatttaacaacaaaaatataactacaacttcccttgtagtctcttatataagtagagtccttggtactctgccctcctgtcagtagtggcaggatctattggcatattcgggagcttcttagagggatgaggttctttgaacacagtgaaaatttaaattagtaacttttttgcaagcagtttattgactgttattgctaagaagaagtaagaaagaaaaagcctgttggcaatcttggttatttctttaagatttctggcagtgtgggatggatgaatgaagtggaatgtgaactttgggcaagttaaatgggacagccttccatgttccattgtctacctcttaactgaataaaaaagcctacagtttttagaacaaaaaaaaaacagaaacaaaaaaa

SEQ ID NO: 51103 - DNA, 535 bp, Homo Sapiens
cgcccgagcatttgcacagcgttacctggctgaccttctcccgtctgtttttggcagcctcagggatagtggctacttttatgatcccattgaaagagatattgagataggatttcttccatggctaacgaatgaagttgaaaaaaccatggaatatagcatggtgggaagaacagtgcttgacatgttgatccgtgaggtggttgaaaagaggctgtgtatgtatgagcatggggaagacacacatcagtctccagaacccgaggatgagcctggtggtcctggagcaatgacagagtcattggaggcctctgaattcctggagcagagcatgtcacagacacgggagctgcttttagatggagactacctacaaagaacaacatatgacagaaggtcatcccaggaaaggaagtttatggaagagagagagctcttagggcaagatgaagaaacagcaatgaggaagtccttaggggaggaagaattgtcataggagggaagcttcaaagtcatgaaaccaatcaacagccaa

SEQ ID NO: 51104 - DNA, 517 bp, Homo Sapiens
tttttttttatttattaccattatatattatattatattatatattttttgctttcttataactttggaggaaagtcaaatcttggtattattaaaattgttttaaaaaggagtaaattttccagttgataaatgaaaatcactggcctatgtttaataagtttttctttaattactgtggaataacgtgccagctatcatcaacacaatgattttgtacatagggtagggaagcagtgatgctctcaatgggaagatgtgcaacacaaattaaggggaactccatgtattttacctacttcagcaatggaactgcaacttggggctttgtgaataaaatttagctgccttgtatagtcgtttgaaagaatatgtgatctgtgagagaattatagtttttttttagaagaaaaatctgcaaaagatctttccaaagacaatgtgccacagatcttttgttctctgtaatgaggattaattgctgtttaaacaaaaatgtaattgttcatctttaaat

SEQ ID NO: 51105 - DNA, 705 bp, Homo Sapiens
  misc_feature (564)..(564): n is a, c, g, or t
  misc_feature (569)..(569): n is a, c, g, or t
ggagaatttggaaaacgggcaaagagtagggatatgtgggttaagaatcagctctttcaaacttggggttttttttgagatgggggtctcaccatgttgcccaggctggtctcaaacccccagcctcaactgatcctcgcatctcagcctcctgagtagctgggatgacaggcgtgcacctggcagctttttcaaagtgttgatggtaatctgaggcaatctaagggagtcattttttaagtgactttatacagaaagatggtaagagccaaggggtagaagtggcataaatgtctaaagcagggaagtgacaggactttcattgttcttggctgaggagaagcgggagtggctgatggaagcacctaaatgatgcctttgtctgtgggaaggcaaatgatgccccagagctctaaccaaaggtttgcagccgccgaaaaacaggaaagttgggaagcgggggtaggactacactgaatcattaacagtgctgtaaactaccatgtggccattaacaatgacctttagggagttttcctaaacgatcactctggtgcgggtgtnggttntgttttaaaatagctttgcagtgaaagctttcatgaccatacaaattatcttttttcttcctatttccttgtagaggtttttcctccttgtcttaaggtcataaaaatatggttatgtgggaaaaaaaaaaaaaaa

SEQ ID NO: 51106 - DNA, 543 bp, Homo Sapiens
tgattggccagtttatctgctccacggtggagcagtgtacaagccagaagatacctgaaattcctgcagatgttgtgggtgcccttctgttcctggaggattatgttcggtacacaaagctacccaggagggttgctgaagcacatgtgcctaatttcatttttgatgagttcagaacagtgctgtaactgtttttcctacttcttcaatggaaggattgtccttagatcttcccaccatcacaaatgaatttgaagatgaaaagaaactcagttgctcatacaactgcattttttctgtctattatgggaaacatcagacgttctgagtaagatatatctcatggcattagttaatataactgatattgtttaaatcatggtattacatgcaatttatatcagataaaagcagaacacatttttgtactgcctctcttaaatgctgaatgtaactgttatgtataaatccatttagttttatgttctaaagaactatttgtgcaactccagattttcagtaaaatagtattactagtaaaaa

SEQ ID NO: 51107 - DNA, 632 bp, Homo Sapiens
ggttaaacacatatttacatttaatatgggaacataaaagagctttaaatattatagactttgtacctgttatatatatgaatattccctatgttaaataataataataactagtgtgttatgaatagaatcatatcatctttagaaattgtttaaaattagttctgggaagttgaaagtggggaatgaagagataataaataaaactagattggccatatgtttataatttttttagaatgggtaatgaatacatggaggttcattatacttttctctccacttttggctatgttgaaaattttctgggagctaaatgatgagaacacatggacacatgatggggaacaacacacactatggcctgttgagggcacggagtccgcagagagagagcatcacgaagaatagctaatggatgctgtgcttcatacctgtgtgatgagatgatctgtgcagcaaagcaccatggtacatgtgtacctatgtaacaaacctgtacatactgtacatgtacccggaacttaataaaagttggaaatttttataaagaatgaataagacctgtgatttgatagcacaacacggagactatagtcaacagcaaattaaatgtgtattttaatatgact

SEQ ID NO: 51108 - DNA, 593 bp, Homo Sapiens
ggggtttaataatatttaatgtctttttaggatcataaacataaataggtttgttgatattcaggccttcagaatttaagggttttaaatatagcattcagattgtaattggtatgtttttgccatctggtccactcaattgtatatttttattttgcaaaacaacccaaaacttactttacgttgctttgttcagtaccttttgaattcccccagaagagttgttttcaaaacaaacattccagaatgaatgtcgctcttcaatggaacgtctttattgtgcttgaagtatttcttctctggttgtaattctaaattacagagtcatttgagctttctcccctcccgctagtatctttacaggagcagggaagagcagtagaggatgtataattttgggcgaagttaaattacaatttatttgaggttattcctaaacctatttatttggtgttttggaggagatcacacactaagagaacgttgattgcctcggctattgtgctggctggacactttggtcacttttgaagcatgttaataaatgtcactgattaaaaaaaaaaaaaaaaaaaaaaaaaaatggtggagcg

SEQ ID NO: 51109 - DNA, 562 bp, Homo Sapiens
caaaactatagtggctatggcggatatgattatactgggtataactatgggaactatggatatggacagggatatgcagactacagtggccaacagagcacttatggcaaggcatctcgagggggtggcaatcaccaaaacaattaccagccatactaaaggagaacattggagaaaacagcgggaacttcattgcaggccgtgtgtcaccctgaccacgtctatctctgggggtcgcacgttgcgggcagagcgcaaggcatacaccagaaaacgctgtcctgtggaggagatgttaaagtaacccatcttgcaggacgacattgaagattggtcttctgttgatctaagatgattattttgtaaaagactttctagtgtacaagacaccattgtgtccaactgtatatagctgccaattagttttctttgtttttactttgtcctttgctatctgtgttatgactcaatgtggatttgtttatacacattttatttgtatcatttcatgttaaacctcaaataaatgcttccttatgtgaaaaaaaaaaaaaaaaaaaaa

SEQ ID NO: 51110 - DNA, 744 bp, Homo Sapiens
cgtccggaacagggcagtggaatgaaaattttttgtttgtttgtttttaagaaacaagaaaacagaactgcctttgcactaaattagtgacttggacttttgcccagtgaagacaggctgtgacactctggatgtcttggtgtgtgtagacacacattgcagactcttaacgcaggaaggacttcaaacttctgctgagaccttggggtcaaggaacatttcattggttttttttgtccacccccatctcccttgctcatttggatgcgtcaccttaattctcctgctgccaccgtctttgattcaccgggatgtacagtttacagttgaagagcaaacagaaaggttttctcttggtgggatatgcagaacttgggatgtgtgtatatataaatatataatatatataaatatatataatactgacttaaaaaatcaaatcccccgacatacgttttttttaatctgtgccaaaaatgtgttttcagaggaaatcttattttcatattcagactttgtattgcccactcatttgtataagtgcgcttcggtacagcacgggtcctgctcccgcgatgtggaagtgtcacacggcacctgtacaaaaagactggctaacccctcttcctattaccttgatctcttcccccaacttcctaacacttattaatttatgaaactgtttttctcagcgcagttttgttttgtgtggccattggattaccaacttttattaaaaaatat

SEQ ID NO: 51111 - DNA, 501 bp, Homo Sapiens
acccatcgtccaccccagtgtgcacgcctgcaggctggagactggaccgctgactgcaccagcgcccccagaacatacactgtgaactcaatctccagggctccaaatctgcctagaaaacctctcgcttcctcagcctccaaagtggagctgggaggtagaaggggaggacactggtggttctactgacccaactgggggcaaaggtttgaagacacagcctcccccgccagccccaagctgggccgaggcgcgtttgtgtatatctgcctcccctgtctgtaaggagcagcgggaacggagcttcggagcctcctcagtgaaggtggtggggctgccggatctgggctgtggggcccttgggccacgctcttgaggaagcccaggctcggaggaccctggaaaacagacgggtctgagactgaaattgttttaccagctcccagggtggacttcagtgtgtgtatttgtgtaaatgagtaaaacattttatttcttttt

SEQ ID NO: 51112 - DNA, 626 bp, Homo Sapiens
gaaagacggacatgagcgtgggtgctgactcctggaagagcaactctatctgatctcaaaatgcgtatactgggaacaggatgccttagcccacaacagaaccagaatgaatctttgaaggcacaagactctgcttttgccactcttcctctttcctggtatagaagatggatgtaggagagcttcttttctaactaccatctgatcagacaaggaatgaagcaatgactgtgggctgggaaactgtacctacctctcttcccactgcaaatttctgggatagaccaaaagtgaatttgattatgtgttggctgaagttcttcattctgactgttgaggggaggttttcctttgaagagttttcatcccagactcagctgtcttttcacatggatgaaataattcctgctaccaacaacagagcttcaccaggaagttgagttttcaagatgccttgttgctttgaagaagggagtgatgtcaattctcttgttacattctccctttagcaacctgagtaagagactctctgccactgggctgcaaaaaaataaattacttgaatctccccttggcccaggctgaggtactatcttgtcctatacacttctacttggtcactttgc

SEQ ID NO: 51113 - DNA, 645 bp, Homo Sapiens
ggcacgaggccacttcaggggctggggatatcgacctggaaaagagacagaggaagaggaagctgctgaggactggggagaagctgagccctgccccttccgagtggccatctatgtacctggagagaagccaccgcctccctgggctcctcctaggctgcccctccgactgcaaaggcggctcaagcgcccagaaacccctactcatgatccggaccctgagactcccctaaaggccagaaaggtgcgcttctccgagaaggtcactgtccatttcctggctgtctgggcagggccggcccaggccgcccgccagggcccctgggagcagcttgctcgggatcgcagccgcttcgcacgccgcatcgcccaggcccaggaggagctgagcccctgcctcacccctgctgcccgggccagagcctgggcacgcctcaggaacccacctttagcccccatccctgccctcacccagaccttgccttcctcctctgtcccttcgtccccagtccagaccacgcccttgagccaagctgtggctacaccttcccgctcctctgctgctgcagcggctgccctggacctcagtgggaggcgtggctgagaccaactggtttgcctataatttattaactatttattttt

SEQ ID NO: 51114 - DNA, 709 bp, Homo Sapiens
ctacatgcacatccagtgcaccaagcctgacaccgtaggctctgctctgaatgactctcctgtgggtctggctgcctatattctagagaagttttccacctggaccaatacggaattccgatacctggaggatggaggcctggaaaggaagttctccctggacgacctgctgaccaacgtcatgctctactggacaacaggcaccatcatctcctcccagcgcttctacaaggagaacctgggacagggctggatgacccagaagcatgagcggatgaaggtctatgtgcccactggcttctctgccttcccttttgagctattgcacacgcctgaaaagtgggtgaggttcaagtacccaaagctcatctcctattcctacatggttcgtgggggccactttgcggcctttgaggagccggagctgctcgcccaggacatccgcaagttcctgtcggtgctggagcggcaatgacccacccctctccccccgcctgccacctccccccacaagtgccctccaggcttttcttggggaagataccccttttctgaggaatgagtttgcctccgtcccctgcccatgctgggagcccacgctcaccccctcacccctccaagctcactccccaacccccaactccgtgtggtaagcaacatgggctttgatgataaacgactttactctcaaaaaaaaaaaaaaaacccc

SEQ ID NO: 51115 - DNA, 774 bp, Homo Sapiens
  misc_feature (614)..(614): n is a, c, g, or t
tcgctagagattgtcatggccagagatcataggtcacttcaggtagcaagacccctggcaaactgggcacttggcctatgtactgatttgtgggatggtggcaggggtgtggggtccttcaccctgcctgaattctctttggcttctgtgctctgtatgctgctgtccccaagggctctttcttattatggcagggagtggggattggtcctactttctttctctggaaaggaaagcctccaagactccatgtgcttgggcagcttgagaaggcgttcagcaccacgcctagcaggcagaccttgaagcctcacctttagtctatctgcagaggtattcagttcctggcacaggggactaggggcatgtagagtatatgaggaggcagtatggctgtgcaggagccttcatttcagcttcaattaatagggaagaatttatgatagctctatagatgctgaaaaggtatttcgtaagatttaaaatccatcccttattaaaactcttagtaaattaagtctggaaagaaacaccctaatctagataaaggtctgtttcagaaaccaacagtgatggcattctaaagagtcagacgccacaggcattcccattanagtcagaaactagccaagggcaagctattattcagcagtgtcccggcactactaacccctgcaacaagccagatgaggaacataaggaagaattataattgtcaataatttgtagaacataaaactgcctaactgtaaaaacctaaaaaaaaaaaaaaag

SEQ ID NO: 51116 - DNA, 763 bp, Homo Sapiens
cttccctccatagccacgctccaaaccccagggtagccatggccgggtaaagcaagggccatttagattaggaaggtttttaagatccgcaatgtggagcagcagccactgcacaggaggaggtgacaaaccatttccaacagcaacacagccactaaaacacaaaaagggggattgggcggaaagtgagagccagcagcaaaaactacattttgcaacttgttggtgtggatctattggctgatctatgcctttcaactagaaaattctaatgattggcaagtcacgttgttttcaggtccagagtagtttctttctgtctgctttaaatggaaacagactcataccacacttacaattaaggtcaagcccagaaagtgataagtgcagggaggaaaagtgcaagtccattatgtaatagtgacagcaaagggaccaggggagaggcattgccttctctgcccacagtctttccgtgtgattgtctttgaatctgaatcagccagtctcagatgccccaaagtttcggttcctatgagcccggggcatgatctgatccccaagacatgtggaggggcagcctgtgcctgcctttgtgtcagaaaaaggaaaccacagtgagcctgagagagacggcgattttcgggctgagaaggcagtagttttcaaaacacatagttaaaaaagaaacaaatgaaaaaaattttagaacagtccagcaaattgctagtcagggtgaattgtgaaattgggtgaagagctt

SEQ ID NO: 51117 - DNA, 686 bp, Homo Sapiens
ggatcagggagagagcttcggggcgtctgtctccgtgctctcctgcctccaccgccttggttttgcttcctgctggaggcagggcacctgctgcgacccagattcttctgcaggatgtgtctgtctttgtcacggtggacagagggtgacatcataggagcagctcgctggccagaaggggatgggggcatccctgtgcctcactcagctcctgctgctcttagggaaaggaggcctgggtcaagccagcatccccttggtaaagacccccgcaggccaccaggcattctggacacgcacacacacacacacacacacacacacacacaaaacttcacagcaggccagctgcagtgacttgtcatcaagagtcacctcagctgcgcccccctcccatcctttcctatgagaagccactgctttgggggcgccggctagaaaaagtagggtgcggtggccaggagggcccctgccgcgcggggggctgggtctggttgagtcgctgctttcccgagggcagcgcagggatccggggaagctgcggcagggagcgggcgccggcttcgtggctctgaggtgtaacgggggtgggctccctccctcggaggacatcgtctgtgtccaggtcagaaagtggcccaggaagggggcagtttctgtcgcgggtccggtgggggcgcggccgc

SEQ ID NO: 51118 - DNA, 664 bp, Homo Sapiens
gctcgaggcggaagacagacgaggagaccctgaccctccagaagattgtcaccgactggacagaactacacacggctcttcagcggcctgcgcaccacctccaccaagactggagaggcggtcaagaacatccaggccaccctgggggcctcctcacagcgcatcagccagaactcagagagcatgcacgacctggtaccccaggtcatgggcttgcagctgcagctggataacatctcgtccttcctggatgaccacgaagagaacatgcatgatcttcagtaccatacccactacgcccagaaccgcactgtggagaggtttgagtctctggaaggacgcatggcttctcacgagattgaaattggcaccatcttcaccaacatcaatgccaccgacaaccacgtgcacagcatgctcaagtacctggatgacgtgcggctctcctgcacgctgggcttccacacccatgccgaggagctctactacctgaacaagtctgtctccatcatgctgggcaccacagacctgctccgggagcgcttcagcctgctcagtgcccggctggacctcaacgtccggaacctctccatgatcgtggaggagatgaaggcagtggacacacagcatggagaaatccttcgcaatgtcaccatcctacgag

SEQ ID NO: 51119 - DNA, 825 bp, Homo Sapiens
ccacgcgtccgctccaggaaacttaagtattttattaatatatatataggaatttttttttattttgctttgtctttctctcccttcttttatcctcatgttcattcttcaaaccagtgttttggaagtatgcatgcaggcctataaatgaaaaacacaattctttatgtgtatagcatgtgtattaatgtctaactacatacgcaaaaacttcctttacagaggttcggactaacatttcacatgcacatttcaaaacaagatgtgtcatgaaaacagcccctttacctgccaagacaagcagggctatatttcagtgacagctgatatttgttttgaaagtgaatctcataatatatatatgtattacacattattatgactagaagtatgtaagaaatgatcagaacaaaagaaaatttctattttcatgcaaatatttttcatcagtcatcactctcaaatataaattaaaatataacactcctgaatgcctgaggcacgatctggattttaaatgtgtggtattcattgaaaagaagctctccacccacttggtatttcaagaaaatttaaaacgatcccaaggaaagatgatttgtatgttaaagtgactgcacaagtaaaagtccaatgttgtgtgcatgaaaaggattccttggttatgtgcagggaatcatctcacatgctgtttttcctatttggtttgagaaacaggctgacactattctcttttgattagaaaataaaactcataaaactcctaatgttggatataaatcaaagatgttaacccactattaaaatagtgtaggaagcaggaaa

SEQ ID NO: 51120 - DNA, 856 bp, Homo Sapiens
  misc_feature (741)..(741): n is a, c, g, or t
  misc_feature (774)..(774): n is a, c, g, or t
ggacgcgtgggcagcagtagcaacagtagccaggactcgctccacaaagccccaaagaagaaaggcattaagtcctccattggccgcttgtttggcaagaaagaaaagggccgacctggacaaactggcaaagaagcattaggacaagctggtgtttccgagacggataactcatctcaggatgccttgggacttagcaaattggggggacaggctgaaaaaaatcgtaaacttcaaaaaaagcatgaattgctggaggaagcccggagacaaggtttaccttttgcccaatgggacgggccaacggttgtggtctggctagagctctgggttgggatgccagcctggtatgtggctgcctgccgagcaaacgtgaaaagcggggccatcatgtcggccctgtccgacacagagatccagcgtgagattggcatcagcaaccccctgcacaggctgaagctgaggctggccatccaggagatcatgtcgctgaccagcccgtctgccccgcccacatctagaacgacactcgcctatggggacatgaaccacgagtggatcggcaacgagtggctccccagcctgggcctcccccagtaccgcagctacttcatggagtgccttgtagacgccaggatgctggaccacttgaccaagaaagaccttcgagggcagctgaaaatggtcgacagttttcacagaaacagttttcagtgtggaattatgtgccctcgagacggntaaattatgaccgggaaagaactgggaaagaanaagagaaagaaaggtcagagtggaaataaaaagaccgtgcttgttttgggagccaatggatcggagtggatttcccttggac

SEQ ID NO: 51121 - DNA, 728 bp, Homo Sapiens
  misc_feature (643)..(643): n is a, c, g, or t
atttttaaaaacgaattgtagttgtttttcttcatttaaaatggatctgttggaggttatgtgtgtatgttgtagttttattgcagccacaataattttaccaaagttttcacataggcagttagcctttacttaatatcaagacaagtgaaaaaatattggcatcgatgaaaccgataacattggcctcattggatttctttacccattcacagtgtaaagaagttaccttcatgctttcattgtacctgcaggcctgtgggcttgtacagtagataattaatttctaaaaagaacagctgcctattttcttcctaggttaggttatatcttcataatcacaagaattagtgatggcaaaataaaattttgcttatgaatcttttacattgtttatatatgattaatatcatcatatatattttctgtattaagctcatttggcttcatttaagctgtatacttagtcatatatctttcattagttctatggatatgagcagatccctttactggagcccagtatgtgctgtgtgagttagaagtcattcttgctgagaaggtgaataggtagggatttgccttgttttgtaagtctacaatttgccaagagtaaataacactggaccagctgtaaaagtanacagtgtgtttatgcattgagatactaaagcatttaagaaaaaattaaaagatctcttttgtttaaaaaaaaaaaaaaaaaaaag

SEQ ID NO: 51122 - DNA, 740 bp, Homo Sapiens
tttttttttttttttttacatatatatgcagggaagtaatggtactggtagtgtatgttttctatgtggttcaaatatgaatttcgaacacaccaagccgctaatgagatagcagcttttttctgggacccagagtcacaaccaaattgatttaagaccggacccaagacacctttaacaataggactgaaaggaaaaaggatagggaaaaagcttattaaagaaatgtgtcaacaccaaatgtagaggggaagaaccacaaccaggcataataccaaaccggttccagggggaaacaaggctttggtattccgctggctccagcgctttttctgaaacccgaggctggccagggtgctgtcaccgtgtggtctttgattgcagccattcaatgcccacatgcttttccttcttgtttcagaacagcacatggtcacaacaagatattttctttccctccaaagccttttgtctccttgtgcctctttttatccttaggaaaagatccaggtgcttgtgaaaagaatcatgaatgcaacaagggaggctggtcctgttgctgtcgccgattaagttttaaacttttatttattatttatgtctgccgtattttaaataaacattctcgttccttccagttccagtcatagtgtgtctgtggcattccagtccaaccatgtgacttatttattctaatttgagggctgcactgtacaccatggtgtcctgtgacaccgtgt

SEQ ID NO: 51123 - DNA, 602 bp, Homo Sapiens
  misc_feature (469)..(469): n is a, c, g, or t
  misc_feature (556)..(556): n is a, c, g, or t
cgctctagagtatccccgcttacacctcagtagtactacaccaacagcacttgtacatacaagtccatcaacggcaggttcagctttgttacagccttcaaatattacacagacttcaagttcccacagtgcactgagtcatcaagtaactgctgccaattctgcaacaactcaggttctgattgggaacaacattcgattaactgtaccttcatcagttgccactgtaaactctattgccccaataaatgcacgacatatacctaggactttaagtgctgttccatcatctgccttaaagctggccgctgcagcaaactgtcaagtttccaaggtcccatcttcatcctctgtagattcagttccaagggaaaatcatgaatcagaaaagccagcactgaacaacatagcagacaacacagtagcgatggaggtgacgtagcttcctccgagtggaactgcagcctgnggacttgattaggtgctatgcatcagtagcattttgaatgcaagggatgatggaaagcagcacatgcgtttctgtggcagctgtggngacttgacagcaatgctcatctctcatgcttcaatttttcttttct

SEQ ID NO: 51124 - DNA, 447 bp, Homo Sapiens
ccgaggtgatcggctcggaggatttcagaggttccatgacgagcctggagtccagccacagcggcttctcccagctgagtgccgccaccacctcctccagccagtcccactccagctccatgatctccaggtagtgccgcgctgcctgcacctagtgtgcagaggggacggccgcccctcctcggacagccagctgcacccgcccacccagcggcgacattgtacagactcctctcacctctagatagcaaatagctctcagatggtaaacgtagtcgtttgatcccaaaactaccttggcaggtagttttaactctgatcctaacttaactcaatagccatagattttgtatacgttgtgcacaaaatccaaccagagcgcaagggctctcttgaaagaaaagtagtttctgtaccaattaaaggattgacgtggtctcagataaa

SEQ ID NO: 51125 - DNA, 1110 bp, Homo Sapiens
atctttgacagaggaagaatgcttttgaaaacagttcttacgtgattttatgtaacttaatttgccctggaaaggaaatgtctcgtctctggtatgggaaaaaagggagaagacatcaaccaattaatcataaatacactctgattactacaagggaagacataaattcaaagcaggttgctacagtgaaagcagacctggagtctgaatcttttcgaccaaacctaagtgatcccagtgaacttttactgccagatcaaattgaaaagcttaccaagcatcttccaccaagaacaattggctatccatggactcttgtttatggtactggaaaacatggcacaagcttgaaaactctttatcgaacaatgacaggtttagacaccccagtgctgatggtgattaaagacagtgatggacaggtttttggtgcgttagcatctgagccactgaaagtgagtgatggcttttatggtactggagagacctttgtttttacattctgtccggagtttgaggtctttaagtggacaggagataatatgttttttatcaaaggagacatggattcactagctttcggtggtggaggaggagaatttgcgctttggcttgatggagatctctaccatggaagaagccattcttgtaaaacgtttgggaatcgtacactttctaagaaggaagatttctttatccaagatattgaaatctgggcttttgaataaataaaatgctctctgtcttagcaggagaatggcccaaacctgacatggacaagcattgtttggaagttcaagaagcaatacagtgtaacatgtcacttgtgctttaaaattagtctgtatcaccatttattacagttataattttggagtttatttttcaaatcatgttcttgtcccagagttctttaggttaacactagggactgcgtccatgtactagtatwacagcttggggtttgttagaatttgggcacattttgattataatgacacttycttttccmtgtactcagtyccyaataggwggggcctttgktgamcygtattgtttttttytttaaccaaatkgttcgttacaacaaagmyawttggggmttgggga

SEQ ID NO: 51126 - DNA, 825 bp, Homo Sapiens
gcaggacaacctggacaagttgcaggcgctggcaaacgcccttctggaaaaggaagtgataaactatgaggacattgaggctctcattggcccgccgccccatgggccgaagaaaatgatcgcaccgcagaggtggatcgacgcccagagggagaaacaggacttgggcgaggaggagaccgaagagacccagcagcctccacttggaggcgaagagccgacttggcccaagtagttgggaggtgttggctgcacgtgcgggtggtccgggaagtgagggctcactcagccaccctgagttgcttttcagctgaggtttgcacttcctctcgcggccctcagtagtccctgcacagtgacttctgagatctgttgattgatgacccttttcatgattttaagtttctctgcagaaactactgacggagtcctgtgtttgtgagtcgtttcccctatggggaaggttatcagtgcttcccgagtgagcatggaacacttcgagttcccagggttatagacagtcgttcccagtgtggctgaggccacccagaggcagcagagcattcagactccaaacagacccctgttcatgccgacgcttgcacgaccgccccagttcctgtggctccctcggaatgctaaggggatcggacatgaaaggaccctgtgagccgattgtcctatctccagcggccctgtcatccagctcactcatcaatggggccagtcaggcccaggcactgggctccggaggactcaccactgccccctgctgccatgtggactggtgcaagttgaggacttcttgctggtctagtcacgcat

SEQ ID NO: 51127 - DNA, 565 bp, Homo Sapiens
gtgatactcacttctgcaaggtcaatgagagaggagagtacttctgggagaagagggtcacaggctgcccaccctttgatgaacacaagtgtctggctgagggaggtaaaattatgaaaattccaggcacctgctgtgacacatgtgaggagcctgagtgcaacgacatcactgccaggctgcagtatgtcaaggtgggaagctgtaagtctgaagtagaggtggatatccactactgccagggcaaatgtgccagcaaagccatgtactccattgacatcaacgatgtgcaggaccagtgctcctgctgctctccgacacggacggagcccatgcaggtggccctgcactgcaccaatggctctgttgtgtaccatgaggttctcaatgccatggagtgcaaatgctcccccaggaagtgcagcaagtgaggctgctgcagctgcatgggtgcctgctgctgcctgccttggcctgatggccaggccagagtgctgccagtcctctgcatgttctgctcttgtgcccttctgagcccacaataaaggctgagctcttatcttgc

SEQ ID NO: 51128 - DNA, 523 bp, Homo Sapiens
ggctggaggatctgcagctctcagaggacgactgaggcagcccatctggggggcctgtaggggctgccgggctggtggccagtgtttccacctccctggcagtcaggcctagaggctggcgtctgtgcagttgggggaggcagtagacacgggacaggctttattatttatttttcagcatgaaagaccaaacgtatcgagagctgggctgggctgggctggtgtggctgctgaagccccacagctgtgggctgctgaagtcagctccgcgggggagctgaccctgacgtcagcagaccgagaccagtcccagttccagggggaggcctgcaggcccctggccccttccaccacctctgccctccgtctgcagacctcgtccatctgcaccaggctctgccttcactcccccaagtctttggaaatttgttcttttcctttgaagtcacattttcttttaaaattttttgttttgcatccgaaaccgaaagaaataaagcggtgggaggcaggaaaaaaaaaa

SEQ ID NO: 51129 - DNA, 584 bp, Homo Sapiens
gtttgttcttaaaatgcatttaaagaaaaattacccatattgactttcacacctcatataatcagatctattacaaatatatatcggagtgacggtgcccaggatagatgtaatatttcttacagatgctggcacagaggaaataatataccagctaatctagtcacctaaccttgtggttagaattgcaattttaagaccagaaaaatttgaagtctgatcagagatttacaactgttcattatagtggtgccttaggcaatctttccaaagtaaattcagggccccattgctacttatgccatatttggacatactttttttttcttcaattttgtaaacttcctggaaagctgtcttcactaagtatcccctagtctctatatatgtggttagtagtcatggaaatgacacataaagtacgccagaagtttgatggaacgtgttagaaactgttttgtgcttttatggatgtcatacttgacaatacatgtgtaagttactaatatatgaattgatgctaaatatatcttacatttgaattccttttggataaagttatttcttgatgtgaaaaaaaaaaa

SEQ ID NO: 51130 - DNA, 893 bp, Homo Sapiens
gcagggagggttaggaaaaccacaaacggagcccctgaaagcctcacgtatttcacagagcacgcctgccatcttctccccgaggctgccccaggccggagcccagatacgggggctgtgactctgggcagggacccggggtctcctggaccttgacagagcagctaactccgagagcagtgggcaggtggccgcccctgaggcttcacgccgggagaagccaccttcccaccccttcataccgcctcgtgccagcagcctcgcacaggccctagctttacgctcatcacctaaacttgtactttatttttctgatagaaatggtttcctctggatcgttttatgcggttcttacagcacatcacctctttgcccccgacggctgtgacgcagccggagggaggcactagtcaccgacagcggccttgaagacagagcaaagcgcccacccaggtcccccgactgcctgtctccatgaggtactggtcccttccttttgttaacgtgatgtgccactatattttacacgtatctcttggtatgcatcttttatagacgctcttttctaagtggcgtgtgcatagcgtcctgccctgccccctcgggggcctgtggtggctccccctctgcttctcggggtccagtgcattttgtttctgtatatgattctctgtggtttatttgaatccaaatctgtcctctgtagtatcttttaaataaatcagtgtttacattagaaacaacaacacaaagaagcccgagggcccaaaagccgggcgcgcgacaagagggcaacgaacggccctggccaagcgggtccctgacccaaggctggcacaagggagaccgcggcccctaaaggacgcgatattcgaaagccggtaaccgtaggg

SEQ ID NO: 51131 - DNA, 653 bp, Homo Sapiens
ttttttttttttttttttcctaggtgacagagggaaactccatctccaggaaaaaaaaaaaaaacccaatttggataccaaattaatcaactaatttgagctatctggccttactcttagtagtttttagtacgtgctggacaccacttttaaaaagcaatcactgtgctagaaaagtatattggctttgttaggattaaagttcattaacttcaatgtaatcatgcctcctattactgaagtcagattggaaccactaaagatccaaactttctgtctggtaatagaaagtaaaaatctagacatcatttacatttgagaaagctgtttttaacattattttaaaatgccaaatatgttctttctagaaaaatatttatttttgtttttgttggatagcttttaattacatttcagagaggtgtaattttgggtagatgctcattacatttttgaaaggtttatgattccaaaataaagatttatatgactggtgatactggctttacagaaatttcagagaactaatttttaaaatctttagcatttaaaactttttttgttttgttttctgacatattctgacaaagagcagcaaaccactgctgtgtggcattcttggagtgtgctgtgaatgtgctttttaagaaatt

SEQ ID NO: 51132 - DNA, 806 bp, Homo Sapiens
ggcggatgagcccacgactttaaccaccaatgcgctggacttgaattcagtgcttgggaaggattacggggcgctgaaagacatcgtgatcaacgcaaacccggcctcccctcccctctccctgcttgtgctgcacaggctgctctgtgagcacttcagggtcctgtccacggtgcacacgcactcctcggtcaagagcgtgcctgaaaaccttctcaagtgctttggagaacagaataaaaaacagccccgccaagactatcagctgggattcactttaatttggaagaatgtgccgaagacgcagatgaaattcagcatccagacgatgtgccccatcgaaggcgaagggaacattgcacgtttcttgttctctctgtttggccagaagcataatgctgtcaacgcaacccttatagatagctgggtagatattgcgatttttcagttaaaagagggaagcagtaaagaaaaagccgctgttttccgctccatgaactctgctcttgggaagagcccttggctcgctgggaatgaactcaccgtagcagacgtggtgctgtggtctgtactccagcagatcggaggctgcagtgtgacagtgccagccaatgtgcagaggtggatgaggtcttgtgaaaatctggctccttttaacacggccctcaagctccttaagtgaattgccgtaactgattttaaagggtttagattttaagaatggtgctctttcatgcctattatcagtaaggggacttgtattagagtcagagtcttttatttaggccagtgtcaagtgtcaataa

SEQ ID NO: 51133 - DNA, 722 bp, Homo Sapiens
ctgctggtgaatctttggcacttctctttgaattggccagaggaatagagagtgactttttttatgaagacatggagtccttgacgcagatgcttagggccttggcaacagatggaaataaacaccgggccaaagtggacaagagaaagcagcggtcagttttcagagatgtcctgagggcagtggaggaacgggattttccaacagaaaccattaaatttggtcctgaacgcatgtatattgattgctgggtaaaaaaacacacctatgacacctttaaggaggttcttggatcagggatgcagtaccacttgcagtcaaatgaattccttcgaaatgtatttgaacttggacccccagtgatgcttgatgctgcaacgcttaaaacgatgaagatttctcgtttcgaaaggcatttatataactctgcagccttcaaagctcgaaccaaagctagaagcaaatgtcgagataagagagcagatgttggagaattcttctagattttcagaacttgaagactattttctaatttctatttttttttctatttcaatgtatttaaactctagacacagtttttatcctggattaacttagataacttttgtagcagtggttatattgcttataatttaatgtacaatactattgaaactggtgagttctgattattaacatattctctgtaaatcagtaaaaaaaaaaacactcaaaaaggg

SEQ ID NO: 51134 - DNA, 921 bp, Homo Sapiens
ctaacctatttggaaacagtggggccaagacatttggtggatttgccagctcgtcgtttggagagcagaaacccactggcactttcagctctggaggaggaagtgtggcatcccaaggctttgggttttcctctccaaacaaaacaggtggcttcggtgctgctccagtgtttggcagccctcctacttttgggggatcccctgggtttggaggggtgccagcattcggttcagccccagcctttacaagccctctgggctcgacgggaggcaaagtgttcggagagggcactgcagctgccagcgcaggaggattcgggtttgggagcagcagcaacaccacatccttcggcacgctcgcgagtcagaatgcccccactttcggatcactgtcccaacagacttctggttttgggacccagagtagcggattctctggttttggatcaggcacaggagggttcagctttgggtcaaataactcgtctgtccagggttttggtggctggcgaagctgagggcgtgtcagcaggcctttcgatccctgggaccaaccgcatcctcagcttcttccccgagaaatgctggagcaggctgttcagaccgacgttgccatcaaaacacatacacccagaaaagaaacaacagaaacccaaaactcccaaaggcgcatgatttacttggttttatattctcctggtggggtttttccctccccactattaaaacagtcctgttttccggaccaaaaaaaaaaaaaaaaaaaactcgaaggcatcctatggtccgggtggcggaaaaaaaaaggataatggaaaatggcacactgggccaataacctggttttcctggaccccgcttttttcttggtaaaaaaggggggaaaaatcttgcccggtcctcccctatataagggagccc

SEQ ID NO: 51135 - DNA, 920 bp, Homo Sapiens
gatgcagatgctgttgctgcacagatcctgtcactgctgccattgaagttttttccaatcatcgtcattgggatcattgcattgatattagcactggccattggtctgggcatccacttcgactgctcagggaagtacagatgtcgctcatcctttaagtgtatcgagctgatagctcgatgtgacggagtctcggattgcaaagacggggaggacgagtaccgctgtgtccgggtgggtggtcagaatgccgtgctccaggtgttcacagctgcttcgtggaagaccatgtgctccgatgactggaagggtcactacgcaaatgttgcctgtgcccaactgggtttcccaagctatgtgagttcagataacctcagagtgagctcgctggaggggcagttccgggaggagtttgtgtccatcgatcacctcttgccagatgacaaggtgactgcattacaccactcagtatatgtgagggagggatgtgcctctggccacgtggttaccttgcagtgcacagcctgtggtcatagaaggggctacagctcacgcatcgtgggtggaaacatgtccttgctctcgcagtggccctggcaggccagccttcagttccagggctaccacctgtgcgggggctctgtcatcacgcccctgtggatcatcactgctgcacactgtgtttatgacttgtacctccccaagtcatggaccatccaggtgggtctagtttccctgttggacaatccagccccatcccacttggtggagaagattgtctaccacagcaagtacaagccaaagaggctgggcaatgacatcgcccttatgaagctggccgggccactcacgttcaatgaaatgatccagcctgtgtgcctgcccaactctgaagagaacttccccgatggaaaagtgtg

SEQ ID NO: 51136 - DNA, 906 bp, Homo Sapiens
  misc_feature (7)..(7): n is a, c, g, or t
  misc_feature (709)..(709): n is a, c, g, or t
tagaggnaaacaaacccacctttgggtgaacctgaaagcactcatcagtgtgacactaaatatgcttcctttggtcaagaaagctcaagggagagttattaatgtctccagtgttggaggtcgccttgcaatcgttggagggggctatactccatccaaatatgcagtggaaggtttcaatgacagcttaagacgggacatgaaagcttttggttctcttgtctcatgcattgaaccaggattgttcaaaacaaacttggcagatccagtaaaggtaattgaaaaaaaactcgccatttgggagcagctgtctccagacatcaaacaacaatatggagaaggttacattgaaaaaagtctagacaaactgaaaggcaataaatcctatgtgaacatggacctctctccggtggtagagtgcatggaccacgctctaacaagtctcttccctaagactcattatgccgctggaaaagatgccaaaattttctggatacctctgtctcacatgccagcagctttgcaagactttttattgttgaaacagaaagcagagctggctaatcccaaggcagtgtgactcagctaaccacaaatgtctcctccaggctatgaaattggccgatttcaagaacacatctccttttcaaccccattccttatctgctccaacctggactcatttagatcgtgcttattttgattgcanaagggagtcccaccatcgctggtggtatcccagggtccctgctcaagtttctttgaaaaggaggcttgaatggacattacataggcagtcctgccctgatttaggctttgcctgcttggggggatgtaaggaaattgaaagacttgccatttaaaaagatctttaccggggccttgcccatgcttatgggtccccag

SEQ ID NO: 51137 - DNA, 647 bp, Homo Sapiens
gttggatatagctggttacaaacagagccttactatttattagtggggaaatgattttaagaccgtccttttcagtatttaattctgacagatctgcatccctgttttgttttggattatttctgttttggaaaatgctgtctcatttaaaactgttggatatagctggatcctggataggaaaatgaaattattttttcattgtgttttttaattggggtgatccaaagctggcaccttcaggcacattggtctcatagccattactgtttttattgcccttctaagatcctgtcttcagctgggtcagagaaaacttcttgactaaaactggtcagaactcatcacagaaatgaaatacagtggtctctctctcccagaactggttgcagctaaaacagagagatctgactgctggctataggattttggacttaatgactgaaattgcaaattgtcctttttcttggcattacagattttgccaaaataactttttgtatcaaatattgatgtgtgaaagtgaaggagctagtctgctgaaccaggaatagtttgagatattgaactgtcatttttgcacatttgaatactttgcaggctggctttgtataaaacttatcctctggtttcctatatgttgtaaa

SEQ ID NO: 51138 - DNA, 652 bp, Homo Sapiens
  misc_feature (45)..(45): n is a, c, g, or t
  misc_feature (641)..(641): n is a, c, g, or t
accgagcactttattcagtgcatagctttaagccagtgttggatntcactaagtggacagccagtctcccagctctctgccttccccaaaagggtcgtagtaggtcacccttctacagcagctaactagagtcctaactaatgggatccagcagggccatttctccagagggccagtatcctattaggagactcttggaattcttaggttctactcaagagtggaaggaccaatcacctctgatattctgtggaaggttttggggtcaaattctgccctctgcattctgtgcaacttgtataaaagtcaagttagtattacatgaatttggggtagggttagtgctttgaaaaaatgttgaaccggctgggcgcggtggctcacgtctgtaatcccagcactttgggaggccgaggcgggtggatcatgaggtcaggagttcgagaccagcctggccaacatagtgaaaccccatctctgctaaagatataaaaaattagcccggcgtggtggtgcacgcctgtaatcccagctactcgggaggctgaggcaggagaattgcttcaacctggaggtggaggctgcagtgagccgagatcgcaccactgcgttccagcctgagcgacaggggcagactcagntctcaaaaaaa

SEQ ID NO: 51139 - DNA, 895 bp, Homo Sapiens
  misc_feature (757)..(757): n is a, c, g, or t
  misc_feature (759)..(763): n is a, c, g, or t
  misc_feature (767)..(767): n is a, c, g, or t
  misc_feature (771)..(771): n is a, c, g, or t
  misc_feature (773)..(773): n is a, c, g, or t
  misc_feature (775)..(775): n is a, c, g, or t
  misc_feature (777)..(777): n is a, c, g, or t
  misc_feature (779)..(779): n is a, c, g, or t
  misc_feature (784)..(785): n is a, c, g, or t
  misc_feature (787)..(787): n is a, c, g, or t
  misc_feature (789)..(789): n is a, c, g, or t
  misc_feature (812)..(813): n is a, c, g, or t
  misc_feature (815)..(815): n is a, c, g, or t
  misc_feature (817)..(821): n is a, c, g, or t
  misc_feature (823)..(823): n is a, c, g, or t
  misc_feature (831)..(832): n is a, c, g, or t
  misc_feature (841)..(841): n is a, c, g, or t
  misc_feature (843)..(844): n is a, c, g, or t
  misc_feature (855)..(855): n is a, c, g, or t
  misc_feature (859)..(859): n is a, c, g, or t
  misc_feature (861)..(862): n is a, c, g, or t
  misc_feature (864)..(864): n is a, c, g, or t
  misc_feature (867)..(867): n is a, c, g, or t
  misc_feature (874)..(874): n is a, c, g, or t
  misc_feature (880)..(880): n is a, c, g, or t
  misc_feature (889)..(890): n is a, c, g, or t
  misc_feature (892)..(893): n is a, c, g, or t
catgcatgcgccattttttacttaatgcagctgttaaattggcaaagctctaaaatgcactgctgccatctagtgatacacttttgtaaagtacagcaaaacctacagatatatacagtatataaatatatatatatatatatttatatttttgggggtgggagaaatccaaaataaagtaaatgcttgtttcatttttaagctgctgatattcattccttattgtatgttgtcagatgaggaaattgtgcagttctggtacataaagatgagtaatataaactgaaatctataattttaagggcttaacctgtgactttaataagctggaacagtccactgaatgggtataatgaattgcagtatatacgtatgattgctttttaagtgattatcttttcttctgttaagtcatgtaaattcataaatccttttgcactgatgtgttgaaccttattcttgtacattcattcaatcaaggcaaacttttataatttttcttttgtttccaatgaccttgaaatgttatagcatggtaatattctatgcaactatagttatactttttggtttgacactgtattttttcacattgatttactggttgatgatagattttataacctaacggttctcatgcggtgcgtaattgtagatgcatgtacttgtgtgttttgtgtaattattgaagtgcaatgatgtataaaaaagtggattcacctggtttttaaaataaaacattgataaaagggaaaanannnnnaaanaaanananananaaaannananaaaaaaaaaaaaaaaaaaaaaannanannnnnanaaaaaaannaaaaaaaanannaaaaaaaaaanaaanannanaanaaaaaanaaaaanaaaaaaaannannaa

SEQ ID NO: 51140 - DNA, 786 bp, Homo Sapiens
attaaatcttaatacaaatggtttgcacagctttcttaaacaaaaaggcattcaatctctaggtgtaaaaggaagagaatgtctcctggacctaattgccacaatgctggtactacagtttattcgcaccaggttggaaaaagagggaatagtgttcaaatcactgatgaaaatggatgacccttctatttccaggaatattccctgggcttttgaggcaataaagcaagcaagtgaatgggtaagaagaactgaaggacagtacccatctatctgcccacggcttgaactggggaacgactgggactctgccaccaagcagttgctgggactccagcccataagcactgtgtcccctcttcatagagtcctccattacagtcaaggctaagtcaaatgaaactgaattttaaactttttgcatgcttctatgtagaaaataatcaaatgataatagatacttataatgaaacttcattaaggtttcattcagtgtagcaattactgtctttaaaaattaagtggaagaagaattactttaatcaactaacaagcaataataaaatgaaaactataacaatactgacaaagaagagaaacaataataacaaacagacgagaaaaaaagacctcaataaaggagcggcgccctcaacaacgactaaccatccccggagagcgcccccctactctgctcctttctcaccaacatgaaacgttggctaacaacgagatggcaacccctgcaatcccgagtgtgcacgtctacccgatgtcacgtcgctg

SEQ ID NO: 51141 - DNA, 910 bp, Homo Sapiens
  misc_feature (9)..(9): n is a, c, g, or t
  misc_feature (16)..(16): n is a, c, g, or t
  misc_feature (20)..(20): n is a, c, g, or t
  misc_feature (25)..(25): n is a, c, g, or t
  misc_feature (29)..(30): n is a, c, g, or t
  misc_feature (44)..(44): n is a, c, g, or t
  misc_feature (720)..(720): n is a, c, g, or t
  misc_feature (740)..(740): n is a, c, g, or t
acttgtgtncactgtncggnctagnccanngattggcacacagnaaagcctgccagtgtcactaggccctgagtcctggcagcagattgcaatggatcctgaagaagtgaaaagcttagacagcaacggagctggagagaagagtgagaacaactcctctaattctgacattgtgcacgtggagaaagaagaggtgcccgagggcatggaagaggctgctgtggcttctgtggtcttgccagcgcgggagctgcaagaggcacttcctgaagccccagctcccttgcttccacatatcactgccacctccctgctggggacaagggaacctgacacagaagtgatcacagttgagaaatccagccctgctacatctctgtttgtagaacttgatgaagaagaggtgaaagcagcaacaactgaacctactgaagtggaggaggtggtccccgcactggaacccacagaaacgctgctgagtgagaaggagataaacgcaagggaagagagccttgtggaagagctgtcccctgccagcgagaagaagcccgtgccgccgtctgagggcaagtctagactgtcccccgccggtgagatgaagcccatgccgctgtctgagggcaagtctatactgctgtttggaggggctgctgctgttgccatcctggcagtggccatcggggtagccctggctctgagaaagaataggaagcttttcanaaggaaagacgaaggatgtnaggttgggagtgtattgcctggatttgaacctcagcactgtctggacatttgtgaacactctgggataatgggggcctctgctcacaatggatgggcttgtaggcatgtaaggcttgagggggggattcacatctttgactgtgaatccagggcctccctatgctaattg

SEQ ID NO: 51142 - DNA, 678 bp, Homo Sapiens
cttgatttcagaaaggtccggaagtggaaagcaggtttcagggctgctgaggtacagggttctcctgtaggccccagggatggtctcaggggtgctgagtgcgtgcgtggtaaatggatggagcccaggggcgcctcctgccagtgtcctccaggcactcaaacctagcccttctgaagccgacctcacgtgacctcacagcccctcctgaaggcgcctcactgatgacggtgggtggaataacagcccccagagatgtccaggtttggaaccccaggacgtgggaaagtgttaccttgcgtggcaaaagggacccggcgcctgtgcttcagttcaggatttcgtggtggggagatgaccgtggatggttgaggtgggccctgagtaatcatgggggcccttataagggaaggggagtcacgagggtctgcgcatgaagcaaggaagcttctggctgtgaagatggcaagaaggcctggggccaggcgatgaggtggcccctggaggagctggaaaaggcattggattctgccccagagcctccgtggagaaacaaagccgcactgacaagacttcagcctggtgaaaaccattttggactcctgacctctagaactgtaagataataaattggtgtggttttcaacctctcaaaaaaaaaaaaaaaaaaaaaaaaaa

SEQ ID NO: 51143 - DNA, 624 bp, Homo Sapiens
cgctggaccggtccggattcccgggagtcacaaaaatgtcccctgcccagccccctcgccgcccttgacctcctgcaggccatgtgtgtattacttgtctagtgatgtcctctcaaagtgctgtacgcgagctcggcgccacctccgcctccctttcagagcctgctccccgccctctctgctcgctgcattgtggtgttctcttctcaaggctttgaaatctccccttgcactgagattagtcgtcagatctctccccgtctccctcccaacttatacgacctgatttccttaggacggaaccgcaggcacctgcgccgggcgtcttactcccgctgcttgttctgtcccctccctcggaccaaacagtgctcatgcttcaggaccttgtttgtcgaagatgttggtttccctttctctgttatttatataaaaataatttatcaaaaggatattttaaaaaagctagtctgtcttgaaacttgtttaccttaaaattatcagaatctcagtgtttgaaagtactgaagcacaaacatatatcatctctgtaccattctgtactaaagcacttgagtctaataaataaagaaatcagcacccaaaaaaaaaaaaaaaaaaagg

SEQ ID NO: 51144 - DNA, 709 bp, Homo Sapiens
  misc_feature (655)..(655): n is a, c, g, or t
ctggacctgcccaaggccaacctcctcttcaaaggctctgtggatagcaactggatcgtgggtgccacgctggagaagaagctcccacccctgcccctgacactggcccttggggccttcctgaatcaccgcaagaacaagtttcagtgtggctttggcctcaccatcggctgagccctcctggcccccgccttccacgcccttccgattccacctccacctccacctccccctgccacagaggggagacctgagcccccctcccttccctccccccttgggggtcggggggggacattggaaaggagggaccccgccaccccagcagctgaggaggggattctggaactgaatggcgcttcgggattctgagtagcaggggcagcatgcccagtgggcctggggtcccgggagggattccggaattgaggggcacgcaggattctgagcaccaggggcagaggcggccagacaacctcagggaggagtgtcctggcgtccccatcctccaaagggcctgggcccgccccgagggggcagcgagaggagcttccccatccccggtcagtccaccctgccccgtccactttcccatctcctcggtataaatcatgtttataagttatggaagaaccgggacattttacagaaaaanaacaaaaaacaacaaaaaatatacgtgggaaaaaaaacgaaaaaaaaaaaaaaa

SEQ ID NO: 51145 - DNA, 827 bp, Homo Sapiens
  misc_feature (661)..(661): n is a, c, g, or t
  misc_feature (818)..(818): n is a, c, g, or t
caggctgaagagattctgcagacatacttgaaatccaaggagtctatgactgatgcaattctccagacagaccagactctcacagaaaaagaaaaggagattgaagtggaacgtgtgaaagctgagtctgcacaggcttcagcaaaaatgttgcaggaaatgcaaagaaagaatgagcagatgatggaacagaaggagaggagttatcaggaacacttgaaacaactgactgagaagatggagaacgacagggtccagttgctgaaagagcaagagaggaccctcgctcttaaacttcaggaacaggagcaactactaaaagagggatttcaaaaagaaagcagaataatgaaaaatgagatacaggatctccagacgaaaatgagacgacgaaaggcatgtaccataagctaaagaccagagccttcctgtcacccctaaccaaggcataattgaaacaattttagaatttggaacaagcgtcactacatttgataataattagatcttgcatcataacaccaaaagtttataaaggcatgtggtacaatgatcaaaatcatgttttttcttaaaaaaaaaaaaagactgtaaattgtgcaacaaagatgcatttacctctgtatcaactcaggaaatctcataagctggtaccactcangagaagtttattcttccagatgaccagcagtagacaaatggatactgagcagagtcttaggtaaaagtcttgggaaatatttgggcattggtctggccaagtctacaatgtcccaatatcaaggaacaccacccctagctttctttagtgaaggacnatgttacag

SEQ ID NO: 51146 - DNA, 622 bp, Homo Sapiens
cacgcgtccggatgacctccgggggtatcctgggcaaaagggacaaagagggcaaatgagatcacctcctgcagcccaccactccagcacctgtgccgaggtctgcgtcgaagacagaatggacagtgaggacagttatgtcttgtaaaagacaagaagcttcagatgggtaccccaagaaggatgtgagaggtgggcgctttggaggtttgcccctcacccaccagctgccccatccctgaggcagcgctccatgggggtatggttttgtcactgcccagacctagcagtgacatctcattgtccccagcccagtgggcattggaggtgccaggggagtcagggttgtagccaagacgcccccgcacggggagggttgggaagggggtgcaggaagctcaacccctctgggcaccaaccctgcattgcaggttggcaccttacttccctgggatccccagagttggtccaaggagggagagtgggttctcaatacggtaccaaagatataatcacctaggtttacaaatatttttaggactcacgttaactcacatttatacagcagaaatgctattttgtatgctgttaagtttttctatctgtgtacttttttttaagg

SEQ ID NO: 51147 - DNA, 512 bp, Homo Sapiens
tctggccaccctggcccgcccctcgctgctgctactacccgagcccagctacattcctcagctgccaagcactcgagaccatcctggcccctccagaccctgcctgagcccaggagctgagtcacctcctccactcactccagcccaacagaaggaaggaggagggcgcccattcgtctgtcccagagcttattggccactgggtctcactcctgagtggggccagggtgggagggagggacaagggggaggaaaggggcgagcacccacgtgagagaatctgcctgtggccttgcccgccagcctcagtgccacttgacattccttgtcaccagcaacatctcgagccccctggatgtcccctgtcccaccaactctgcactccatggccaccccgtgccacccgtaggcagcctctctgctataagaaaagcagacgcagcagctgggacccctcccaacctcaatgccctgccattaaatccgcaaacagccaaaaaaaaaaaaaaaag

SEQ ID NO: 51148 - DNA, 790 bp, Homo Sapiens
ctgcgacagtcggggtcggtgcggtttgctaagtggtcggttcctggagctgcggtcttctgctagcctgatccgcagcttcagcctccgccgcctcctcagccctcggcgccgccgcctgacccgcaggccgccgcgggccgcagagcccatgagggcgcgggcaccgccgccgcctccgcggcgtcgccgtcgtcccggagcgccccgagctggcgcgggcatggccgcggcatgagcgtggagccgccgccggagctggaggagaaggcggcgtcggagcccgaggcgggagccatgccggagaagcgcgcgggcgcgcaggccgcggggagcacctggctacaaggctttggcccaccaagtgtgtaccatgctgctattgtcatcttccttgaattctttgcgtggggccttttgacaactccaatgttgactgttctacatgaaacattttctcaacacacattcctcatgaatggtctcattcaaggtgtaaagggcctgctctcttttttgagtgccccactcattggtgccctgtctgatgtgtgggggaggaagccctttctcctcggcactgtattctttacctgcttcccaatcccactgatgaggatcagcccatgtagccaaaaagtgaaaacaacccaaatgttcatcacctgatgaatgaataagtttcaggatatccaccaatggaatattattcagcaataaaaaggtttgatgtaatgatagatgctaaaaacatggatgaaccttggaaatatttaaagtaaaataagac

SEQ ID NO: 51149 - DNA, 500 bp, Homo Sapiens
aatggggaaaagctaactctgaaccgaatgttttggacttaactgttgcgtgcaatatgaccgtcggcacactgctgttcctccagttccatggacaggttctgttttcactttttcgtatgcactactgtatttcctttctaaataaaattgatttgattgtatgcagtactaaggagactatcagaatttcttgctattggtttgcattttcctagtataattcatagcaagttgacctcagagttcctgtatcagggagattgtctgattctctaataaaagacacattgctgaccttggccttgccctttgtacacaagttcccagggtgagcagcttttggatttaatatgaacatgtacagcgtgcatagggactcttgccttaaggagtgtaaacttgatctgcatttgctgatttgtttttaaaaaaacaagaaatgcatgtttcaaataaaattctctattgtaaataaaattttttctttggatcttggc

SEQ ID NO: 51150 - DNA, 712 bp, Homo Sapiens
gggaagtggaggaaccactgtccgcctgcggaggggcctcagtgttggccgtgctcatggcgccctcctcctggggctccctctcctctggtcctgcctctcctgcacgcccttcctgcctccttggtgccaggggagccagcccaggacagtctctgtgcctaggccctgccagcctggctgccctgcctccagccatggggggcaggcggggagggagtcgaccagtgcttgtctttgcagaactgctggtggactgaatgtggttctgggggtggccaggcctgagggtaactcattttggaaggtttgggatgtcacttcacttaaggagccttcagcaacatggagtttaagtggccctcttcactgtggccttgtggcttcatgaatggagctgctgtggtcagcatggctggccctctggagaggagggtgggccatgaggagaagatgctgtgtctggaggccttaaccctttcctcccttctctccctccctccctcctgtctctttctctctctgtctctttctctctaggtgcataaaaaaaattgctttcagataaagttgacatgcaataaactgcatattctccctttgcttttaaaatgatgatctgtttcagccatgcaaagcagggtataaaataatatttcagtgtaaccactcagcggaagaaataaaccattccagttgcaatacctgaaaa

SEQ ID NO: 51151 - DNA, 656 bp, Homo Sapiens
cgcgtccgcgtagtagaagcagggagcggaagaagtctcgatccaggagtagggagcggaagaaatcgagatccagaagcagagagaggaagaaatcgagatccagaagcagggaaagaaaacggcggatcaggtctcgttcccgctcaagatcaagacacaggcataggactagaagcaggagtaggacaaggagtaggagtcgagatagaaagaagagaattgaaaagccgagaagatttagcagaagtttaagccggactccaagtccacctcccttcagaggcagaaacacagcaatggatgcacaggaagctttagctagaaggttggaaagggcaaagaaattacaagaacagcgagaaaaggaaatggttgaaaaacaaaaacaacaagaaatagctgcagcagctgcagctactggaggttctgttctcaatgttgctgccctgttggcatcaggaacacaagtaacacctcagatagccatggcagctcagatggcagccctgcaagctaaagctttggcagagacaggaatagctgttcctagctactataacccagccgctgttaatccaatgaaatttgctgaacaaggagaaaaaaaggaaaatgctttggcagggcaagaaagaaggggacaaatcccaatc

SEQ ID NO: 51152 - DNA, 197 bp, Homo Sapiens
atcacccttcccttggctggaactactggacagacccttttgagatgtgcctgtggtgctgtggagatgtgtgtagtggtcttagctctttgttgagcttgtgtgtgtgttgtgtagtcttagctgtatgctgaaattgggcgtgtgttggagggcttcttagctctttggtgagattgtatttctatgtgtttgta

SEQ ID NO: 51153 - DNA, 802 bp, Homo Sapiens
  misc_feature (562)..(583): n is a, c, g, or t
  misc_feature (585)..(610): n is a, c, g, or t
  misc_feature (612)..(612): n is a, c, g, or t
  misc_feature (614)..(625): n is a, c, g, or t
  misc_feature (631)..(635): n is a, c, g, or t
  misc_feature (640)..(642): n is a, c, g, or t
  misc_feature (644)..(649): n is a, c, g, or t
  misc_feature (651)..(654): n is a, c, g, or t
  misc_feature (656)..(657): n is a, c, g, or t
  misc_feature (659)..(661): n is a, c, g, or t
  misc_feature (677)..(678): n is a, c, g, or t
ggggagcagatgacattgaattacttcccgaagctcaacacaaagctgaagtctacacgaagcagggctttgggaatctccccatctgcatggctaaaacacacttgtctttgtctcacaacccagagcaaaaaggtgtccctacaggcttcattctgcccattcgcgacatccgcgccagcgttggggctggttttctgtaccccttagtaggaacgatgagcacaatgcctggactccccacccggccctgtttttatgatattgatttggaccctgaaacagaacaggtgaatggattattctaaacagatcaccatccatcttcaagaagctactttgaaagtctggccagtgtctattcaggcccactgggagttaggaagtataagtaagccaagagaagtcagcccctgcccagaagatctgaaactaatagtaggagtttccccagaagtcattttcagccttaattctcatcatgtataaattaacataaatcatgcatgtctgtttactttagtgacgttccacagaataaaaggaaacaagtttgcaaaannnnnnnnnnnnnnnnnnnnnncnnnnnnnnnnnnnnnnnnnnnnnnnncncnnnnnnnnnnnnaaaatnnnnnaagannnannnnnntnnnnanncnnncccccacaaaccttcnnaaaaacctttcctataccctctttctttaaagccaaaccctggccccataaccgtaatcccttaggagtttctcttgggggtgtttctcttgggcgggggtctgtggaccacaggccaaaatta

SEQ ID NO: 51154 - DNA, 806 bp, Homo Sapiens
aaagaacagtgggaccagttgccccgggatcagcagcaggctcgtcagtctcagcttgctcaggatgagcgtgtgtcccgctcttacctcgccctggccaccgaaaccgtggacatgttccacatcctcacgaagcaggtccagaagcccttcctcagaccggagcttggaccccgattggctgcaatgctgaactttaatcttcagcaactttgtggccccaagtgccgtgacctgaaagttgaaaaccctgagaaatacggctttgaaccaaagaagctgttggaccaactgacggatatttacttacagctggactgtgctcggttcgcgaaagccattgctgacgaccagagatcctacagtaaggaattgtttgaagaagttatttcaaagatgcggaaggcagggatcaaatccacaatagcaatagaaaaatttaagctgctcgccgagaaagtggaggagatagtggccaagaacgcacgcgcagaaatcgactacagcgacgctcctgatgagttcagagaccctctgatggacaccctcatgacagaccccgtgcggctgccctctggcaccatcatggaccgctccatcatcctgcggcacctgctcaactcccccacggaccccttcaaccggcagacgctgacagagagcatgctggaaccagtgccagaactgaaagagcagattcaggcgtggatgagagagaaacagaacagcgatcactaaaccgttccgccgcccaccctctgctagacacagccaaggccaacgaggcaagcagaagcagcggccgc

SEQ ID NO: 51155 - DNA, 578 bp, Homo Sapiens
agcctcctgcagcaggggacgggtgctttggccagagtcacagactgacacgtttcccactgtactggaactctggaaagaggggctccccgacctgcccatcccccaggctcttctgggccttccccttgggaactggcctcatcacactgggagttggtgcttcttgtctctgggtctccagagtttgccccgcctgtgcacacctcacattccagactctagccatctcggcaggatctcctggctccttgagtgcccaggtgccaccaagaggaagggccttgtgggatacaccttgcagaatagggatcggtgtgccccgctgcgaggggccccccatgggggctgtggcccctccgcaggcaggacatcccaacccctggctgggactgaaccacccagagcggagcggctcccttttcagccttgtgagtcacctggcaggccccagctgggctggctgtccgtgtccctcagcctggctggtgattccttgcaggccagaaatgaagagtccctgtaggttttggttttgtttgttttattttgttctttcaccttttttcctcattaaa

SEQ ID NO: 51156 - DNA, 534 bp, Homo Sapiens
aatacctggttttgtacatatctaactctgttctcttttggttgttcagaaactggattttttttttcttaagcagtgcttaatttgtgttttttaattttgattcagaagtagtcccagctcataggtgttcatactgttacatccagaacatttgtcaggctctctgtcagctttcatgtacatatggtatagaaaccatggagttaggcacttcctggattttttttttatgagaaaaatactgtatttaaaatgtaaaataaacttttaaaaagcaggcactaatatatatttcttccagcctttgattacaaatttgtccttgcacatgttaagatgaattatctcctaaaaatatcattgttcttgggagcagtgtatgttactttacatagcagcggttcctgtcatgtgttcatgtcagaatatttttggttttaaactttcttattgcctttggctgttgattagtacagtacaagtgcgatttcaaaaagatcttgaaagtaatatatttaatcaattaaaatg

SEQ ID NO: 51157 - DNA, 676 bp, Homo Sapiens
atgtcactattttcactagggctgaggggcctgcgcccagagctggcctcccccaacacctgctgcgcttggtaggtgtggtggcgttatggcagcccggctgctgcttggatgcgagcttggccttgggccggtgctgggggcacagctgtctgccaggcactctcatcaccccagaggccttgtcatcctcccttgccccaggccaggtagcaagagagcagcgcccaggcctgctggcatcaggtctgggcaagtagcaggactaggcatgtcagaggaccccagggtggttagaggaaaagactcctcctgggggctggctcccagggtggaggaaggtgactgtgtgtgtgtgtgtgtgcgcgcgcgcacgcgcgagtgtgctgtatggcccaggcagcctcaaggccctcggagctggctgtgcctgcttctgtgtaccacttctgtgggcatggccgcttctagagcctcgacaccctcccaaccccgcaccaagcagacaaagtcaataaaagagctgtctgactgcaaaaaaataaataaaaaactcgagggggggcccggtcccaattcgccctatagtgagtcgattacaattcactggcccgcggtttacaacgtcggaactgggaaaaccctggggttcccaacttaatgcctttgcaaaaat

SEQ ID NO: 51158 - DNA, 801 bp, Homo Sapiens
cccgaggccgcccgggctttgcctccaccagcgccctggcctccgctcgggcctccacacgggcctccgaagagctgccgcgacgcccggcccgcagggcaggtaaagagattataaatcttccactgaatgaaaaaaattttcttaaagctgcatatactccaagaaaaaaaccacaaatgtttttctgttttgcctgaatacatgatttaaacaagagatttccacagaagactgaccgcggggcagctgcggagcatgtcgaccccggcccggaggaggctcatgcgggatttcaagcggttacaagaggacccacctgtgggtgtcagtggcgcaccatctgaaaacaacatcatgcagtggaatgcagttatatttggaccagaagggacaccttttgaagatggtacttttaaactagtaatagaattttctgaagaatatccaaataaaccaccaactgttaggtttttatccaaaatgtttcatccaaatgtgtatgctgatggtagcatatgtttagatatccttcagaatcgatggagtccaacatatgatgtatcttctatcttaacatcaattcagtctctgctggatgaaccgaatcctaacagtccagccaatagccaggcagcacagctttatcaggaaaacaaacgagaatatgagaaaagagtttcggccattgttgaacaaagctggaatgattcataatagacaactggtctgttaatctttttcatcattgttgtgtataatttacctctcattagaaaggctaacaaattttaagtgcca

SEQ ID NO: 51159 - DNA, 628 bp, Homo Sapiens
aacctgaaatttctaatgccttgaaaagcatattacaaaagtaatgctaccttttgggaaacaaactgccctgttaactccagatcattgcactggaatgtaatcaagaaagttagtcatgttttatgtaccatgttttcacacgtgtctcttctcttcgacttcctgaaagcgaaagctttacctcctgcaaatgtcagcacatgtagtaggacaccagtatcctaggacagagagccataagtagccctttggaggactgatggtgtcaaccaaaggcatgtgattgattaatgattcccccttagaaagcaagtgttaccaaagttgtgttatcttgaaagcattacaggtaagggcatgttatggttatttatcattgtttaatgaatagtagaggtgtcaagggactatgtatacatgattagggtaagatagaatgtattatatatatatatatatatacacacacacatatatatagctgaatctttggtgtattgaaataggcagcactctgaaagacagaagcttcgtccagccactcttcagcacattcctttactaagcagtttaaagccgtcctagtggagcaagccctaaagcagatttaatttttgccattttc

SEQ ID NO: 51160 - DNA, 797 bp, Homo Sapiens
atgaaagaacccaacttagtttttcagtgaatttgacacctattttttagtgatgaaatttttctttgagaactggcaaggatgcagtcagctgtttgcagtttttagcctgattttggggtctatagagattgctttattggatacttcaagtcatttttgcttgcacttcccctattgacacatgaaagctgtgttggtgttttattgtacatacttcagatgcacataggaatagaagtgtgttataaatctagctttctttatgatgtttctgataatacgagaattgaaaactttaccttctcttgtacatagtcagactatttgtattaaatttacatttcattctaagttcaaaagtttgaaaattattagttttgcaagatcacacactaatgtaaccattttatgaaggttgaagtggatttatgcaggcagttctatatatagaaatacaattctttttaaatttttaggaccaatacaaaataacaaaaatgtaatggaatcagactgaattaaagtaaggctgtatattgaaagtcatattataaaaggtttgctttctttaagtgttatttatcttaaattataatcgttaaatgtttggaagataatttttgaatcataacgtcagcataacttcatttgacttctcaataatcttgatactagaagcaataaaagaaccattattaaatatattgtaatgttaaagatgtgaaggttcttccaaaaatttgtaaggctttcctaattaacagtaaactcttatagctgatattattacatac

SEQ ID NO: 51161 - DNA, 780 bp, Homo Sapiens
  misc_feature (23)..(23): n is a, c, g, or t
  misc_feature (708)..(708): n is a, c, g, or t
ctaattttgcagtgcaacacagnatatctgtttgaagaagacaatcttttacggtctacacaaaagctttcccattcaacaaaaccttcaggaagccctttggaagaaaaacacgatcaatgcaaatgtgaaaaccttataatgttccagaaccttgcaaacgaagaagtaagaaaattaacacagcgcttagaagaaatgacacagagaatggaagccctggaaaatcgcctgagatacagatgaagattagaaatcgcgacacatttgtagtcattgtatcacggattacaatgaacgcagtgcagagccccaaagctcaggctattgttaaatcaataatgttgtgaagtaaaacaatcagtactgagaaacctggtttgccacagaacaaagacaagaagtatacactaacttgtataaatttatctaggaaaaaaatccttcagaattctaagatgaatttaccaggtgagaatgaataagctatgcaaggtattttgtaatatactgtggacacaacttgcttctgcctcatcctgccttagtgtgcaatctcatttgactatacgataaagtttgcacagtcttacttctgtagaacactggccataggaaatgctgtttttttgtactggactttaccttgatatatgtatatggatgtatgcataaaatcataggacatatgtaccttgtggaacaagntgggattttttatacaatattaaaattcaccacttccgagaaaaaaaaaaaaaaaaaagatgcgggccgcag

SEQ ID NO: 51162 - DNA, 722 bp, Homo Sapiens
tcaactttgctacgtggaatcaggctcggctggagcgggacttgagcaacaagaaaatctaccaagaggaggagatgcccgaatcgggcgcgggcagtgagttcaaccgcaagcttcgggaggaggctcggaggaagaagtacggcatcgtcctcaaggagttccggcccgaggaccagccctggctgctccgggtcaacggcaaatcaggcaggaagttcaagggcatcaagaagggaggcgtaacagagaacacgtcctactacatcttcacccagtgccccgacggggccttcgaggccttccccgtgcacaactggtacaatttcacaccgctggcccggcatcgcacgctcactgccgaggaggccgaggaggagtgggagaggaggaacaaggtgctgaaccacttcagcatcatgcagcagcggcggctcaaggatcaggaccaggacgaggatgaggaggagaaggagaaacgtggccgcaggaaggcgagcgagctgcgcatccacgacctggaggacgacctggagatgtcgtccgatgccagtgatgccagtggtgaggaggggggcagagtctccgaggccaagaagaacgcgccgctggctcatggcgggcggagaaagaagaagaagaagggttcagacgacgaggccttcgaggacagcgatgatggggacttcgagggccaagaggtggactacatgtcagacggg

SEQ ID NO: 51163 - DNA, 779 bp, Homo Sapiens
cagcaaaactgcatgacaagctgcatattcagcctcagtttttccaaggagaatggaaagcacttgcctcctgtcttaagaatgcacaaagagtaggactagcaaggctgggggatgaaatctcccttcctaagtctttgacagagaacttttattattctgaacagataagattagcaaacttacaaggaatagcttcttatttcccattccttacggttataatcagtcctttaacaacaccagcatgaaggcaaaggtgttttgtcagactgcaacatctattagaaaggcaaggcaactgggaattgctggagaaggataaatcaggaggaattgctggtagaaaaggctgcagacagtcacagggaagtgctgtatattaaatgcatgtgaatagctggcaaaaagatgtcaaggatgtcactgggagccctttggcttcacactcgcctgttagcgccttgctttcgctgaattaccagagcctaccactcggaggaaggtcttggagttagactgatgagaaggcaatggggttgtcaaaaaccaagtgttcaaaagttctcttagatttcttgaagtcggtgatgaagcaacacaattaaaagtggtttctgtggcaaacacacccccccctaaaaaaaactttttggggccgcccgggccgaaaaattttttcaaacccccctccgtttggggcggccggccccctttttttgacaccctgggccaccccgtccaaggaaaccccgggcccgcaccggcgttggtttctc

SEQ ID NO: 51164 - DNA, 500 bp, Homo Sapiens
ggcaaatgcttactttgcttcccagagtcagagaattggcaaaggttcctaaatggtaatctggccggcctgggagaaagactcacgagaaaagccagtggagaaagcgcccttccagggcggcagcagcgggagccactcagaccccgaggcgcacctgctggctcttgtgtgtggccccagtttctagcggcttttgcagcattagcctacaagctttgtcactccctgccctctgtggtggtcactgtttttctctcttgccaaatgaggcagtctctgagtgacggtgactgtggccttgaagcctggaggactgttgggcatgtagactggcaccttgaagattcaccattgtttaaataaaatcaagcaaatgcttttttaccaagaggcccgagcctcgctctaagggacgcagtcctagaggcgtgccctttggggcttgaagagcacactgtgggacgcacgtgcttctgattaaaggaatctcagatctc

SEQ ID NO: 51165 - DNA, 923 bp, Homo Sapiens
gtcacatttattaaatgttactacatttctgaatttttgaaaaatgtattttatcattaaatggcattattttaaagggtgaaaaactgacacagtcaattcagaaaatggactgaagtctgaataaggtcattgcatttaaaaagcatataactgtacttgactgatgagggaggtgttactttcattgtatataggtcttatttcataaacagatatcctgtatcaaataaaagtatttgttatatatttgaagttatgcatggaaaggagtgtgtttaaattgttacaaacaataatgcgtcattaaaggccatgctgatcttgcataactataagtactatgaatgaatttggttggttttggtgttgtacagctcacatgtttacacactcagtgccctaatttcccctgagggaatcgctttttaagtgatccttacagtggtgttttatgttactttattacagagctccttggttttttacttctgcacttaaatttttttaaataacatgatgatggtacattttcctctattgtctagctaagggctttcggtccaccagtaaataagatcaaatgctcttaaatgttcctgttaccatcctaatgtaaatactggatttttctgtcatttagcaccatgctgcttctgtctgtcttaatgctggcattaagatcatgagccctttttctccagtagtacaggctttgaaaactacttctattaagttattgatgcaatttgatattttttcataatctatatttaaacaaaattacatcattgcatcatcttttctaaattcatctccattaaaacttgccttaagctaccagattgcttttgccaccattggccatactgtgtgtttgtttgtttaatttactttcacaataaacttctgtgtagtaaaaa

SEQ ID NO: 51166 - DNA, 747 bp, Homo Sapiens
tccaaattttatttctgtacgacaacagttcttattgaaagttgtcagtgcagctgtccaggcccaacattcagccacaaaggtcaaagatcccacagaagaggccacacccactccttttgggaaagaccaagattggccagctctagctgtggatttagcccatcaccttcaagttagtgaagatgttgttagaaggcattatgtgggggaactatacaactatggagttgaccacttaggagaagaggccattctacaggttcatgacaaagaggtccttgcctctcagctgctggtgctcacggggcaaaggctggctcatgcgcttctccacacccagacaaaagaaggaatggagctgcttgccagacttccacccacactgtgtacttggctgaaagcaatggacccccaggaccttcaaaacactgaagtgccaattgcaacaacagctaaactagtaaataaagtaattgagcttttaccagaaaaacatgggcaatatggtctagccttacacctcattgaagctgtggaagccatatctcttccttctttatgacacttacctactggaaatagtctaaaattatgattataacatgaagtagtgcatggttattttacatagtaagacctggaattttatgggaaaagtatgtctttttttttccttttggaaaataaataaaagtatatacaacttttaaaaagtgcaaccctggctaaattccactcctttgg

SEQ ID NO: 51167 - DNA, 612 bp, Homo Sapiens
gcgggtagggggggtggccatccctgctacccgcccacccctgagtcccttgacttttgtattctgactccaaggtattgttcagacctcagctcctgggggccggcccctggagtcttccctccctggtagcctctaaccagcattcccagacacctgaggcagatagatggatgggctggtgggcagggggtggctggggctgggccatcaccattccagagacaaggccagtgtatatgcaaactgggggactctcctcccttctctccccagttctggtcctggccaggccatgctacactaacccctgcccccactctcctcccctcttttccttccttcctacccccttctccctctcccttcccctgactgttccacccaggaggaggaaacttcacatagccgtgctcacagttttttattttaaaggaatttggctggggagctgaacagggctccctgtgatctgaagaaagcttttggtgcttgtcctcacaaccacctcagtcctccctccctgtcctcccctgtctcctttcctcctcctgggttcatgttgtactaaacagaagattgtggtgtgtaaaacaaagagacaacccaaaa

SEQ ID NO: 51168 - DNA, 581 bp, Homo Sapiens
caaacaacacgctggctcagctggagggggcctgtcgcaggctagctgaggtgtcgaagcccccaaagcagcggtgctgtgtggccagtcagcagagggacaggaatcattcggccactgttcagacgggagccacacccttctccaatccaagcctggctccagaagatcacaaagagccaaagaaactggcaggtgtccacgcgctccaggccagtgagttggttgtcacttactttttctgtggggaagaaattccataccggaggatgctgaaggctcagagcttgaccctgggccactttaaagagcagctcagcaaaaagggaaattataggtattacttcaaaaaagcaagcgatgagtttgcctgtggagcggtgtttgaggagatctgggaggatgagacggtgctcccgatgtatgaaggccggattctgggcaaagtggagcggatcgattgagccctggggtctggctttggtgaactgttggagcccgaagctcttgtgaactgtcttggctgtgagcaactgcgacaaaacattttgaaggaaaattaaaccaatgaagaagacaaa

SEQ ID NO: 51169 - DNA, 539 bp, Homo Sapiens
cagcagagcagactgtatgacgagcaccagcaccaggcacagggatttcctagccgagcagtggccatccccatgcctctgacctccaccgacctctgcccaccatgggttggaactaaactgttaccttccctcgctccacagaagaagacagccagcttcaggggtccctgtgctggccaagccagtgagcctgcggggaggctggtccaaggagaaagtggaccagctcccatgacctcaccccactcccccaacacaggacgcttcatatagatgtgtacagtatatgtatttttttaagtgacctcctctccttccacagaccccacatgcccaaaggcctcgggacttcccaccaccttgctccacagatccagctaggcctgacctgtgcctcatcccgtgccgctcggtctctggctgatcccgaggctttgtcttcctctcgtcagttcttttggttgtgttttttgttttttttttaataactcaaaaaaaaaataaaagacttggaggaagggtgcaagctcccagtg

SEQ ID NO: 51170 - DNA, 1048 bp, Homo Sapiens
cccagggccgtggtacggtccggattcccgggatcagatgaagactatgaatatatgaatcggcaacgagatggaggtggtcctgggggtgattatgcagccatgggggcctgcccagcatctgagcaagggtatgaagagatgagagcttttcaggggcctggacatcaggccccccatgtccattatgcccgcctaaaaactctacgtagcttagaggctacagactctgcctttgataaccctgattactggcatagcaggcttttccccaaggctaatgcccagagaacgtaactcctgctccctgtggcactcagggagcatttaatggcagctagtgcctttagagggtaccgtcttctccctattccctctctctcccaggtcccagccccttttccccagtcccagacaattccattcaatctttggaggcttttaaacattttgacacaaaattcttatggtatgtagccagctgtgcactttcttctctttcccaaccccaggaaaggttttccttattttgtgtgctttcccagtcccattcctcagcttcttcacaggcactcctggagatatgaaggattactctccatatcccttcctctcaggctcttgactacttggaactaggctcttatgtgtgcctttgtttcccatcagactgtcaagaagaggaaagggaggaaacctagcagaggaaagtgtaattttggtttatgactcttaaccccctagaaagacagaagcttaaaatctgtgaagaaagaggttaggagtagatattgattactatcataattcagcacttaactatgagccaggcatcatactaaacttcacctacattatctcacttagtcctttatcatccttaaaacaattctgtgacatacatattatctcattttacacaaagggaagtcgggcatggtggctcatgcctgtaatctcaacactttgggaggctgaggcaaaaagattacctgaggcaaggagtttgagacaagctaacccaaatagtaagaaccccatttcttta

SEQ ID NO: 51171 - DNA, 1012 bp, Homo Sapiens
gtccctacacagggagctcctccccaagggtagatcggaccgttcatgctgcctataggcattatgtccctcaaaaaaaaactcctttgcctgcatcctgtgtacaacatgacatttttaaccaatccaatctaaaaatgtgccagaatccacctgtggcccgaatcgtgtttggttcctctttctactccactgcagatgaccaaacctgtcccgctgccactttcctcactgatattgggaggagggcaaggcccagccgaagttccactaaaaatgccccaggagaataggcaccggctggcttgccaaagggtttgggttttattgctttctgttttttcttttccccgacagcacaaagaagtaagggcagttattggacaggtgttatttaaacattctattgtaaatgaatgtgttgtttggttctactgcattgtggagcatgcgggggaagagaactgacccaggtaatgaaatggagcccttccctggaactaaccagtccttgatgttgtgtgactaagtaaagatgataaaccccatctgctgggggtgtcacttcacactcggcatgcattgtgaaagctttccatacccttggccattccctctctcctctctctccaaccccatttatgcaggaagggactgctaacaagaacgcttccatctcaaaccttttctctgcctgggaaattattttatgtttgtttttgaaataaaggatttagtttaagattctaaattttagagaaacaaacgtaggccttgtttactaatagccagacatcagaactgcaggtaggtatgttaatgagatgacttatttctggcagcycctggaatcctaatattgtaaatgagtgggammacttgcatattgtgacattctattgaggccctyctctgtttawgcatatwawactktgcytttactgtggaatcwattctaacyaaaggkgtgccctakwchtttcttgctgccctgygcyyttttcttycaaaa

SEQ ID NO: 51172 - DNA, 454 bp, Homo Sapiens
ctccaactctccaccccacaaaataacggggaccaatatttttaactttgcctatttgtttttgggtgagtttcccccctccttattctgtcctgagaccacgggcaaagctcttcattttgagagagaagaaaaactgtttggaaccacaccaatgatatttttctttgtaatacttgaaatttatttttttattattttgatagcagatgtgctatttatttatttaatatgtataaggagcctaaacaatagaaagctgtagagattgggtttcattgttaattggtttgggagcctcctatgtgtgacttatgacttctctgtgttctgtgtatttgtctgaattaatgacctgggatataaagctatgctagctttcaaacaggagatgcctttcagaaatttgtatattttgcagttgccagaccaataaaatacctggttgaaatac

SEQ ID NO: 51173 - DNA, 791 bp, Homo Sapiens
  misc_feature (685)..(685): n is a, c, g, or t
  misc_feature (707)..(707): n is a, c, g, or t
ggttatggttctggatcaagacgtgaacgatcaagagagagggaccatagtagatcacgagaaaagagtcgacgtcataaatcccgtagtagagaccgtcatgacgattattacagagagagaagcagagaacgagagaggcaccgggatcgtgaccgagaccgtgaccgagagcgtgaccgagagcgcgaatatcgtcatcgttagaagctgaaggaagaggatcaccttccaagacaaaacagtcttcatgggggaaaaatgacgcttgtccagcagtttgcttcttgtgattgaactgaacctgtaaggattcatggataaaatgaacaggaatagatctgaataaagcaaatctgcataaatggtaaccagtagctctacttttattttttatgttgcttaactgttttatttgaaggaaacctgtgtgatttaaaaagttatagcttttgcaactttattactggttatatacatttggccattatgatgtgcaagcaattggaaaaaaagtcaagtaaatgcttgtttttgtagtagtttgttcttgttaaaaatgtttatatgataatgtctgtaaacagcatcactttgattacaatagatgtagtgttgtaataaactgtttaatggggctgatgtgtaaagctgttcaagttatttgatgtttacacctcagggnaaagtcttgtgttcagcaatantctaaagataatgttactatgacaacattttttactgtccctttaagcattttgcaatagcgttttttgcatatgcctcaatcc

SEQ ID NO: 51174 - DNA, 671 bp, Homo Sapiens
gtcagtgagaggaagctgactagcccctggattcttctccagacccccctgcttcaggaacacccgccagtgcccaccccgtcccaccccgtcgccagcattcgcacttcaccctcgcgagccgctgttcactcctctcccctttctctttctctctgtttttaaaataatctaaagaaagcacattttaccattgctgttgggaggaagcagaggcagatgtggaaagcagagagaggagcgcgcttcctttcctccccgctgccgcccaccctggggagagacttttgcggggatgggaaggctggagctgaggacagccatgctcctgccctcccaaggctgtgcgttcctgagggccaggtcgggggcaggcatggatggggaggaaatggcgtccctcttggccctccccagagtggctttcctggcaccctggcctgggtgtctggttctgttttcttttcttccccttgtgtttccagtcacctaacttcccttcctcaggctcccccggaccaccctgctcagtgaccccacaggaagcttacacattttctcagaggactttgtgctcccacctcttctaccctccccctcttctttcccatttacaaaagaaacgaaggaaaaagaaaaaggggccagagcccgcgggggctggcaggcct

SEQ ID NO: 51175 - DNA, 632 bp, Homo Sapiens
ccacacaggcttcctggacacctgcctgaaggactgcatgctcaccaaccccgagctgctgaaggtcttctccaagctcatgtctgtgtgcgtcatgttcaccaactgcatgcagaaatttacacagagcatgaaattagatggcgagctgggcgggcagacgctggagcacagcaccgtcctggggctgcccgcaggggccgaggagcgggcccggaaggagctcgccaggaagcacctggctgagcacgcagacactgtgcagctggtgtccggcttcgaggccaccatcaacaagtttgacaagaacttctcagcccacctgctggacctcctggcccggctgagcatctatagcaccagtgactgtgagcacggcatggccagcgtcatctccaggcttgacttcaatggtttctacacggagcgcctggagcgcctgtctgcagagaggagccagaaggccaccccccaagtgcctgtcctgcgggggcccccggctcctgcacccagggtcgcagtcaccgcacagtgagccctggctgtgacaggaaggaagggtgtggggtcagcagggactggtgcaaatgggtccagaattttcaaatcgaatgctctgggttctgtctttg

SEQ ID NO: 51176 - DNA, 672 bp, Homo Sapiens
cgtcgaccccgcgtccgctgacgtgggaagcctggagcagatacggtatttacatgaggaatttccagagtcctggtcagttcccaggttggctgaaggctttgatgtcagcactgatgtgatccgaagagttttaaaaagcaagtttttacccacattggagcagaagctgaagcaggatcaaaaagtccttaagaaagctgggcttgcccactcgctgcagcacctccggggctctggaaatacctcaaagctgctccctgcaggccactctgtatcaggctctttgcttatgccagggcatgaagcctcatctaaagacccaaatcacagcacagctttgaaagtgatagagtcagacactcacaggacaaatacaccaaggagaaggaagggaagaaataaagaaatccaggacctggaggagagctttgtgcctgttgctgcacccctaggtcatccaagagagctgcagaagtactccagtgattctgagagccccagaggaactggcagtggtgcgttgccaagtggtcagaagctggaggagttgaaggcagaggagccagataacttcagcagcaaagtagtgcagaggggccgagagttctttgacagcaacgggaacttcctgtacagaatttgagtcggggcttggcttatggagatgcc

SEQ ID NO: 51177 - DNA, 979 bp, Homo Sapiens
tcaggctgtggcccttacctcacccgcagttctcgcccagtgctgcagccggctcacctctctccgcttcttgcacatcactggcctgtgtgtgctgcttgctcctgttctgttcgcttgctcccgttccgttcggcttttgctttgcgttagggtgaagaccctagcgtccagctcccctcaacgctatattttgacactaaaaaagaaggtttctaaattgtaggagcaggatggaaatactttgctgcccttgccatcttttaggatgggcccccaggagactgaggtcttcctgggccctcattgctgcttatcgtaccccccatcacctgcacatgggacagaccgggctggagggtgaccttggctgtgtacgtcccagcaaaagagctctggcccgcatctcgctgtgccctgaagggggatgaagggcgatgcctcgcccgaggctttgggctgctgcactgcatgctgggactgctcctactctctgtcccacccctcacccagctgtggtccggctttgggagagtggtgaattgcgctgcccgaactcggagcggagcagggtagggaccgtgtacagcttgataacccttaataaaaagggagtttgaccagaaaaaacacaacccccccccccctatcccacaaaatacccccagacttctattctcggtgtcgcatataaaactctcgagggattttttgtccggggggcgggaaaaaaaggggaatggaaatgggccccggggcccattagctggtttcccggaacccaatttttttttggagaaaaggggggataaattttgcggggcccccccttaaagggggagcggaaattaattctcccgataaagccccggggtaaccctgccacttaaaggaaatggggggggcagaacccccggggaatttttaccccggctttatggagaggggggttttttttatttgtgaacacccacagacg

SEQ ID NO: 51178 - DNA, 802 bp, Homo Sapiens
  misc_feature (578)..(578): n is a, c, g, or t
  misc_feature (618)..(621): n is a, c, g, or t
  misc_feature (625)..(628): n is a, c, g, or t
  misc_feature (633)..(636): n is a, c, g, or t
  misc_feature (638)..(645): n is a, c, g, or t
ggggccgcttggcacatgacaactttgccagcttttcctcccttgggttctgatattgccgcactaggggatataggagaggaaaagtaaggtgcagttcccccaacctcagacttaccaggaagcagatacatatgagtgtggaagccggagggtgtttatgtaagagcaccttcctcacttccatacagctctacgtggcaaattaacttgagttttatttattttatcctctggtttaattacataatttttttttttttactttaagtttcaggatacatgtgccgaatgtgcaggtttgttacataggtatatatatgccatgatggaaatatttatttttttaagcgtaattttgccaaataataaaaacagaaggaaattgagattagagggaggtgtttaaagagaggttatagagtagaagatttgatgctggagaggttaaggtgcaataagaatttagggagaaatgttgttcattattggagggtaaatgatgtggtgcctgaggtctgtacgttacctcttaacaatttctgtccttcagatggaaactctttaacttctcgtanaagtcatatacctatataataaagctactgatttcgtaannnncccnnnnccccnnnnannnnnnnncttgtcggcccgcctcggcccctcgaagaagctttcttagaccatttcgtttgggccgcgcggggcccccagaaaggtaaagtgaaacatggggccattagctgggttttccccaaggaagaatccttgggccaatgaaactaaagggctttggcaa

SEQ ID NO: 51179 - DNA, 885 bp, Homo Sapiens
taggatttcagggcccagcagtgttcctccatcagcatgttagacaactacacagtatgttgttagttttgaaagacattcactcaaggaaaacaccatctcaactttgcccgctcaccatgtcccttgcccccatgtagcccatttcccaggttatgctcttttctttctcagggtcctctttggtgggcagccactccccgagatgttgccatcagttttctgcagtccaaagagggtatggttaggtacgggtcttcctgcctcattcctcttcctctttgtgtaggtttcagccacaaaactgtcattcactctaggggacccctactaaagggtaacttcaggtgtgcagccctgagctccaaggctctgcaccatgccacacacttgctgtaaggctagaagtgaagaccttattaataggagcataattgcgagggagaatcatggttctgcagtctggtgtagacactggaataacagcacagaaaaatctatgactcccaatatcttctagaataaagaattttccctctttaacacaagggccctccttgtcattgaccttagctaaaccatggcaattcataaatagaggaaacattaatgaattaaaagcattccttattttttaactaatatttgtacattttcttagtctctttccaagtctttgcctcttttttttctttatttttattttttcctttgacagatggtatcccttcctggatcattcatttcaccttggtttctaactttaggtttactttcacttgttatttgacttagcaggtgcamaaaaacaagaaacaaatgtgccccccccactttccgcttaactgaaaagcttaaaataaatttctgaattatgtwtctgaa

SEQ ID NO: 51180 - DNA, 633 bp, Homo Sapiens
cacgcgtccgcttaaacaaaaactttccatgacagtagcatactgatgagacaacacacacacacacaaaacaacagcaacaacaacagaacaacaacaaagcatgctcagtattgagacactgtcaagattaagttataccagcaaaagtgcagtagtgtcacttttttcctgtcaatatatagagacttctaaatcataatcatccttttttaaaaaaaagaattttaaaaaagatggatttgacacactcaccatttaatcatttccagcaaaatatatgtttggctgaaattatgtcaaatggatgtaatatagggtttgtttgctgcttttgatggctacgttttggagagagcaatcttgctgtgaaacagtgtggatgtaaattttataaggctgactcttactaaccaccatttcccctgtggtttgttatcagtacaattctttgttgcttaatctagagctatgcacaccaaattgctgagatgtttagtagctgataaagaaaccttttaaaaaaataatataaatgaatgaaatataaactgtgagataaatatcattatagcatgtaatattaaattcctcctgtctcctctgtcagtttgtgaagtgattgacattttg

SEQ ID NO: 51181 - DNA, 764 bp, Homo Sapiens
ggctcagaatttcctgacaaatttggatcctgtgttcctcatacaactagaccaaaacgagattatgaggtagatggaagagattatcattttgtgacttcaagagagcagatggaaaaagatatccaggaacataaattcattgaagctggccagtataacaatcatctatatggaacaagtgttcagtctgtacgagaagtagcagaaaagggcaaacactgtatccttgatgtgtctggaaatgccataaagagattacagattgcacagctttaccctatctccatttttattaaacccaaatccatggaaaatatcatggaaatgaataagcgtctaacagaagaacaagccagaaaaacatttgagagagccatgaaactggaacaggagtttactgaacatttcacagctattgtacagggggatacgctggaagacatttacaaccaagtgaaacagatcatagaagaacaatctggttcttacatctgggttccggcaaaagaaaagctatgaaaactcatgtttctctgtttctcttttccacaattccattttctttggcatctctttgccctttcctctggagtctttcttgagtactgatttcatgttgaattgtatcccacacatcatggtctgcagcttctttttcacatgtagtgtctccttcaagttacatcgtgtgtattatttaatgtcactattggttagtggccatttttcaaaactgaagatggaatggcctgaccagctat

SEQ ID NO: 51182 - DNA, 497 bp, Homo Sapiens
tctgctttggttaaacttccttctggagaggattacaatttgaaactggaacttcttcatcctataataccagaacagagcacgtttaaagtactttcaacaaagattgaaattaaactgaaaaagccagaggctgtgagatgggaaaagctagaggggcaaggagatgtgcctacgccaaaacaattcgtagcagatgtaaagaacctatatccatcatcatctccttatacaagaaattgggataaattggttggtgagatcaaagaagaagaaaagaatgaaaagttggagggagatgcagctttaaacagattatttcagcagatctattcagatggttctgatgaagtgaaacgtgccatgaacaaatcctttatggagtcgggtggtacagttttgagtaccaactggtctgatgtaggtaaaaggaaagttgaaatcaatcctcctgatgatatggaatggaaaaagtactaaataaattaatttgctct

SEQ ID NO: 51183 - DNA, 815 bp, Homo Sapiens
  misc_feature (639)..(639): n is a, c, g, or t
  misc_feature (641)..(647): n is a, c, g, or t
  misc_feature (649)..(710): n is a, c, g, or t
  misc_feature (712)..(712): n is a, c, g, or t
  misc_feature (714)..(761): n is a, c, g, or t
  misc_feature (770)..(770): n is a, c, g, or t
gggaatacattgttgagtttctgaagaagaaggctgagatgcttgcagactatttctctttggaaattgatgaggaagggaacctgattggattaccccttctgattgacaactatgtgccccctttggagggactgcctatcttcattcttcgactagccactgaggtgaattgggacgaagaaaaggaatgttttgaaagcctcagtaaagaatgcgctatgttctattccatccggaagcagtacatatctgaggagtcgaccctctcaggccagcagagtgaagtgcctggctccattccaaactcctggaagtggactgtggaacacattgtctataaagccttgcgctcacacattctgcctcctaaacatttcacagaagatggaaatatcctgcagcttgctaacctgcctgatctatacaaagtctttgagaggtgttaaatatggttatttatgcactgtgggatgtgttcttctttctctgtattccgatacaaagtgttgtatcaaagtgtgatatacaaagtgtaccaacataagtgttggtagcacttaagacttatacttgccttctgatagtattcctttatacacagtggattgattataaataaatagatgtgtcttaacntnnnnnnnannnnnnnnnnnnnnnnnnnnnnnnnnnnnnnnnnnnnnnnnnnnnnnnnnnnnnnnnnnnnnanannnnnnnnnnnnnnnnnnnnnnnnnnnnnnnnnnnnnnnnnnnnnnnntatgggggnccccttggcccctaaaaaattttttaaaaccttttttttgggcgc

SEQ ID NO: 51184 - DNA, 634 bp, Homo Sapiens
  misc_feature (632)..(633): n is a, c, g, or t
gggagcttcacctgcttccaacttcactttggagggggtggggtccgttggcatcaacacggggaccctctgcttcaccaaagcccgagccctcagcccctggggagaacaaatggctgagctttgatacctggggtcgtcgagaggctgcgggctggcggcagtcccaggggagagacaccacagaaggagacccagacatcccgaggaagttcccagcagagcaaactgctttccagcctgaagcctgcttaaactgtgtgatgtgcaataactgagcttagagttaggaattgtgttcaagtgcttggatttccgtctgtagatttaactgctgaaattgtatctctcagtaattttagatgtctttaaaaaaaattgaaaaacaaagtgttagactgtgtgcgtgtgcgttgatgggcactcaagagtcccgtgagtcatccagccctgcctttcccctgcgcccccatcctctcacgtcccgccccgcctccacttggggaccctgcctcgtgtcgtctttatctgcctattactcagcctaaggaaacaagtacactccacacatgcataaaggaaatcaaatgttatttttaagaaaatgaaaaaaaaaactttataaacacccnna

SEQ ID NO: 51185 - DNA, 753 bp, Homo Sapiens
  misc_feature (692)..(692): n is a, c, g, or t
  misc_feature (727)..(727): n is a, c, g, or t
  misc_feature (732)..(732): n is a, c, g, or t
  misc_feature (753)..(753): n is a, c, g, or t
aagtaatccaatagtatgaaataaaatcaaggattatctttcagatgtgtttacttttgcctggagaacttttagctatagaaacacttgtgtgatgatagtcctccttatatcacctggaatgaacacagcttctactgccttgctcagaaggtcttttaaatagaccatcctagaaaccactgagtttgcttatttctgtgatttaaacatagatcttgatccaagctacatgacttttgtctttaaataacttatctaccacctcatttgtactcttgattacttacaaattctttcagtaaacacctaattttcttctgtaaaagtttggtgatttaagttttattggcagttttataaaaagacatcttctctagaaattgctaactttaggtccattttactgtgaatgaggaataggagtgagttttagaataacagatttttaaaaatccagatgatttgattaaaaccttaatcatacattgacataattcattgcttcttttttttgagatatggagtcttgctgtgttgcccaggcaggagtgcagtggtatgatctcagctcactgcaacctctgcctcccgggttcaactgattctcctgcctcagcctccctggtagctaggattacaggtgcccgccaccatgcctggctaacttttgtagttttagtagagacggngttttgcctgttggccaggctggtctttgactccntgacntcagtgatccatccaccttgn

SEQ ID NO: 51186 - DNA, 615 bp, Homo Sapiens
tcggcacgagggctgtacgagcgggctcggaggtcctcccgctgctgtcatggttggttcgctaaactgcatcgtcgctgtgtcccagaacatgggcatcggcaagaacggggacctgccctggccaccgctcaggaatgaattcagatatttccagagaatgaccacaacctcttcagtagaaggtaaacagaatctggtgattatgggtaagaagacctggttctccattcctgagaagaatcgacctttaaagggtagaattaatttagttctcagcagagaactcaaggaacctccacaaggagctcattttctttccagaagtctagatgatgccttaaaacttactgaacaaccagaattagcaaataaagtagacatggtctggatagttggtggcagttctgtttataaggaagccatgaatcacccaggccatcttaaactatttgtgacaaggatcatgcaagactttgaaagtgacacgttttttccagaaattgatttggagaaatataaacttctgccagaatacccaggtgttctctctgatgtccaggaggagaaaggcattaagtacaaatttgaagtatatgagaagaatgattaata

SEQ ID NO: 51187 - DNA, 817 bp, Homo Sapiens
caaagatttccatgaaatgtaattgctaccactttgctgttcaagacataacttacctatttttagcaccaagaattatagcgtttataagtacaacttggaacgatggaatgcatctgttactagagactgtatataaaaagcagccaaagctcaggggaaatttttcaaaaattgaattttaaaatttcttatgattttaaataccttgacattgattttgcttcccatctttgaagtaattggttagttttctttgttcagccatttcaagttggtggttgggatatctgctctctgggatggcatcagttgggcagtcatctttttggaagagaagtgtgcttttgagtggaagattcaaagccagtctttgttaaactgcagggtgtactctcaaagaccaaaactattggccacttttgtatgttgccagcatattttgaacttgtacctttttttatactagcaacactacaaaggagaagttactcatttcaaaatggatgaattgttattatgtgtgaagagactctgagtttatgatctgtgccataaaatttcagtgtaataagacttcttcaatacatcttccaataaggggtgcttctttgtgacagtatttttatttctgacattcattttatttgggtacatagtgtggttgtcgatacctttgcaatagtattgcttctgaaagtattaaaaaattttaggagactccgagaagtttacagaattacttattcattgtttcttagtaagtcaggttaatgttaattttctcattatttcatcactgaataaagactaaggt

SEQ ID NO: 51188 - DNA, 780 bp, Homo Sapiens
tataatggagagaggaagttgcctatgttttgtaataatttattttttagcaggaatattgattagcagcttttttttctttatacacatagataactaactagattaatgtttagtttcttatttgtaggcacaggatgcatgaaatttcaagctctgggattttttgtatattgtgtatctgtatcaaaaatatcctctccttttcaaaaatgacaggttggaaaatgtttgtcagacttattaactggtcatattataataatactgataatgaccaactgctcattctgaaagccaaacataaaagctaggagaagtggcatctgaacatttttgctttgctgccagagtaaccctgactaataatacaataacagcaatttttttaaaaaactgagatttcctactggcttgaagtttttctatttagcaaaataattagtaataagttttgactaggtctaaagaatgaacacattgtaaacagttgccacagtagtttctaataaattgatcataaaagcagctatcctttttttttttaattctagcttctttttaaagattattggggtacctaataaaggataatttatatctctattacagactgatatttggcttttcatgtgtcatcatactgtcagtatattcaacaagaaattacagcctaaaacttaacatattccatacatatctatcacgcgtgtcaaagggcttatctcaatcatcttacaactactgtcagacccattcacacttcatgaggaatataac

SEQ ID NO: 51189 - DNA, 473 bp, Homo Sapiens
cgcccttttttttttttttttttttttttttgcccaaaaagctttatttccatttggtccaaggcttgttaggatagttaagaaagctgcctattggctggagggagaggcttaggcagaagccctattactttgcaaggggcccttcagaagtcgctgggctcagaaggctcttagtcgtgcttgagagtgagcctttcgaagagatactcgcccagcccagcctccgggccacccagcctgtggaggttggtcaggtggtcacccatcttcttgataagcttcacttcctcatctaggaagtgagtctccaggaagtcacagagatgggggtccgtgcgggcagaacccagggcatgaagatccaaaagggcctggttcagctttttctccagggccatggcagctttcatggcgtctggggttttaccccactcatcttcagctggcttcttgatgtcctggaagagagc

SEQ ID NO: 51190 - DNA, 661 bp, Homo Sapiens
  misc_feature (660)..(660): n is a, c, g, or t
cacgcgtccgaagataccaagaacatggaggccaagaaactctccaaggaccggatgaagaagtacatggcaagaaggaaatggcagaaaacgggcaatgctgtgagagccattggaagactgtcctctatggcaatgatctcagggctcagtggcaggaaatcctcaacagggtcaccaaccagcccgctcaatgcagaaaaactagaatctgaagatgtgtcccaagctttccttgaggctgttgctgaggaaaagcctcatgtaaaaccctatttctctaagaccattcgcgatttagaagttgtggagggaagtgctgctagatttgactgcaagattgaaggatacccagaccccgaggttgtctggttcaaagatgaccagtcaatcagggagtcccgccacttccagatagactacgatgaggacgggaactgctctttaattattagtgatgtttgcggggatgacgatgccaagtacacctgcaaggctgtcaacagtcttggagaagccacctgcacagcagagctcattgtggaaacgatggaggaaggtgaaggggaaggggaagaggaagaagagtgaaacaaagccagagaaaagcagtttctaagtcatattaaaaggactatttctctaaaactcaaaaaaaana

SEQ ID NO: 51191 - DNA, 812 bp, Homo Sapiens
ccagattgcccagatcaagcgcaacctctcctatggagacaacagcgaccctgccctagaggcgtcctcgctgcccccacccgacccctggctcgagacctcctccagctccccagcagagccggcacagccaggggcctgccgccgagacggctactggttcctaaagctactgcaggcagaaacagagcggctggaaggctggtgctgccagatggacaaggagaccaaagagaacaacctctctgaagaagtcttaggaaaagtcctcagtgctgtgggcagtgcccagctactgatgtcccagaaattccagcagttccggggcctctgtgagcaaaacttgaaccctgatgccaacccacgccccacagcccaggacctggcagggttctgggacctgctacagctgtccatcgaggatatcagcatgaagttcgatgaactctaccacctcaaggccaacagctggcagctggtggagacccccgagaagaggaaggaagagaagaaaccaccccctccggtcccaaagaagccagccaaatccaagccggcagtgagccgcgacaaggcctcagacgccagcgacaagcagcgccaggaggcccgcaagagactcctggcggccaagcgggcagcttctgtgcggcagaactcagccaccgagagcgcagacagcatcgagatttatgtcccggaggcccagaccaggctctgagaccatgcaggaggaaagaaacgattttaaatcattaaaaacacaaaaactaagtgcgaacggaacagagttttctcaacctttgctatgg

SEQ ID NO: 51192 - DNA, 551 bp, Homo Sapiens
caaccaggaaaatgatgaaaaagatgaaaaggagcaagttgctaataaaggggagcccttggccctacctttgaatgttagtgaatactgtgtgcctagaggaaaccgtaggcggttccgcgttaggcagcccatcctgcagtatagatgggacataatgcataggcttggagagccacaggcaaggatgagagaggagaatatggaaaggattggggaggaggtgagacagctgatggaaaagctgagggaaaagcagttgagtcatagtctgcgggcagtcagcactgatccccctcaccatgaccatcacgatgagttttgccttatgccctgaatcctgatggtttccctgaagttaatagggagacccctgcttcctaaacttacacatttgtggtgtacctttgtcgtaaacgttttgatgttacctatttcttgtgggtctcctattaccagcttctaaatgaatgttgtttttgacccagtttgtaagtttctgtcagcaggagagttttacctattgcatggaaagatgctcattatatatt

SEQ ID NO: 51193 - DNA, 751 bp, Homo Sapiens
  misc_feature (747)..(747): n is a, c, g, or t
gggcaagggccatgcgtaccggggtccggaattcccggggatagaagaaaaaatttgcattttggaaaattgggtcctttccccacttttttaaagccacattcccccatctttataataatctggtcacagtggtagtcgctggccccaggaccccctcctgattttggctaggcatcgtggaaccagctccagcccctgaagaaacgatagatgtgcaggttgtgcggaagaggctgagtggaaaatggtgtgagccccaccgctgtgcatcgaatgagggaagtggcagcagagaggccagagctgccccctctctgtctcttcaatggacccttcacaagtgtttctcctgcccttggggctgtcttccttctcctgaaatccagagactttcttgctcatcccttctccctttcacttctgttctctgctgcagaaagcagacttgcatatccctgatgagcagctcggctacttttgtaaacttcagatttggagagaaacacgaaagtctgaatcctgaccccttgagagagagtgatctggcgagggccgatgaaggggctgggcctggtcttgccttctcttctctcggttgctccctctgcctaggcccctggtactcagtcacggcagccaggagaccccaggtgagtttctgagcgcatacgtagttggttcttacccccaggtgtcacacggggccgagagctgagcaagaatttggaatggaagttatgaccnaggg

SEQ ID NO: 51194 - DNA, 768 bp, Homo Sapiens
  misc_feature (592)..(592): n is a, c, g, or t
  misc_feature (726)..(727): n is a, c, g, or t
  misc_feature (729)..(766): n is a, c, g, or t
aacaacaaaggcaatggtgaaaagagattaggaaccccccagcctgtttccattctctgcccagcagtctcttaccttccctgatctttgcagggtggtccgtgtaaatagtataaattctccaaattatcctctaattataaatgtaagcttatttccttagatcattatccagagactgccagaaggtgggtaggatgacctggggtttcaattgacttctgttccttgcttttagttttgatagaagggaagacctgcagtgcacggtttcttccaggctgaggtacctggatcttgggttcttcactgcagggacccagacaagtggatctgcttgccagagtcctttttgcccctccctgccacctccccgtgtttccaagtcagctttcctgcaagaagaaatcctggttaaaaaagtcttttgtattgggtcaggagttgaatttggggtgggaggatggatgcaactgaagcagagtgtgggtgcccagatgtgcgctattagatgtttctctgataatgtccccaatcataccagggagactggcattgacgagaactcaggtggaggcttgagaaggccganagggcccctgacctgcctggcttccttagcttgcccctcagctttgcaaagagccaccctaggccccagctgaccgcatgggtgtgagccagcttgagaacactaactactcaataaaagcgaaggtggaaaannannnnnnnnnnnnnnnnnnnnnnnnnnnnnnnnnnnnnngg

SEQ ID NO: 51195 - DNA, 588 bp, Homo Sapiens
gatcagttctagacctagaagggggtcaggctgctttacagaattctatttccttaagtccctggcacttctcataccacatcactgaacctgttcagtaacaatcagtttggccgtcccccatgatggtaggaaatatagagagcaagttcttctgccagggtcacactgtggtctctgaactgaccagtatatccctaactcctctttgatagagaaagagtctcaaatggacaactgtcctgtgttgctttccctaggccttcagcagcctattggctctccctgcctctgagctctggactctgtttgaatattccaagtagtatatggacagtccagggcttatgcccagcagcccactggaggcattcttcaggctcctttaaggcaggtgcattgatagttccattagtgtgacccttgcattggcacccctccagcctggaggccaggcttccagcaacttccttctgccctagagcaagccatgagccccagagcagtagcaggagacttgagaagtagagtgacaaaaacaagcacttaattaaattataaaatttaactttaaaaaaaaaaaaaaag

SEQ ID NO: 51196 - DNA, 565 bp, Homo Sapiens
  misc_feature (104)..(104): n is a, c, g, or t
  misc_feature (520)..(520): n is a, c, g, or t
aaaaaaaaaaaaaaaaaaagaaattgaattggggggagtcatggtcaggggtgagacctgaaggacctccccctggtgtggccctggacacagcccaccctctngtgagccgtttccaattctaaaacagactcaatgtccccctcacccccacctcaaggtcaggatgcgaacacactgagtgaggagtggacgctgtccattgccacggccatgagggctggagaccagaacagcatggcccgaagcgtgcggggccccggatgacttggggacaccccagaatcccctggggagaacccttcctgcgcgctttcattttttgacctcatcactgagaaaggctcaatttggtgctcacgtgtccttaacacctgatctggcccaagctgggctccctttaagccaagagagcctcttgtggaccccgcctgcccgaatgaaatccgaacagttggggctgttcatggcaagtggggctggtttttcatttccattggttatttaaagtttcctttanaataaacgattttaagttataaaaaaaaaaaaaaaaaaaataggt

SEQ ID NO: 51197 - DNA, 577 bp, Homo Sapiens
ggctgccgctgctgccgccgccgcctcgggtcgtggagccaggagcgacgtcaccgccatggcaggcatcaaagctttgattagtttgtcctttggaggagcaatcggactgatgtttttgatgcttggatgtgcccttccaatatacaacaaatactggcccctctttgttctatttttttacatcctttcacctattccatactgcatagcaagaagattagtggatgatacagatgctatgagtaacgcttgtaaggaacttgccatctttcttacaacgggcattgtcgtgtcagcttttggactccctattgtatttgccagagcacatctgattgagtggggagcttgtgcacttgttctcacaggaaacacagtcatctttgcaactatactaggctttttcttggtctttggaagcaatgacgacttcagctggcagcagtggtgaaaagaaattactgaactattgtcaaatggacttcctgtcatttgttggccattcacgcacacaggagatggggcagttaatgctgaatggtatagcaagcctcttgggggtattttaggtgct

SEQ ID NO: 51198 - DNA, 608 bp, Homo Sapiens
taaatataatcagacaggtttaaaagttgtgcatgtatgtatacagttgcaagtctggacaaatgtatagaataaaccttttatttaagttgtgattacctgctgcatgaaaagtgcatgggggaccctgtgcatctgtgcatttggcaaaatgtcttaacaaatcagatcagatgttcatcctaacatgacagtattccatttctggacatgacgtctgtggtttaagctttgtgaaagaatgtgctttgattcgaagggtcttaaagaatttttttaatcgtcaaccacttttaaacataaagaattcacacaactactttcatgaattttttaatcccattgcaaacattattccaagagtatcccagtattagcaatactggaatataggcacattaccattcatagtaagaattctggtgtttacacaaccaaatttgatgcgatctgctcagtaatataatttgccatttttattagaaatttaatttcttcatgtgatgtcatgaaactgtacatactgcagtgtgaatktttttgttttgttttttaatcttttagtgtttacttcctgcagtaaatttgaataaatgagaaaaaatgca

SEQ ID NO: 51199 - DNA, 524 bp, Homo Sapiens
gttcttgtcgatgctatataagccaggagttctaagacgccagctctttgagattgctcattcccctgtatttcccacatatatattacatatacccgctaataaatttatgtttgtttttctcttgtcaatctgtcttgtgttataggggccccagccaaggaacctaaagtgggtagaaggaaaaattattttttctttccctacaaactgaacatggattattagaactcaaggttttcattgacaatatagaaaagaaacactgaatcattttattttattgcccaatttttatttcttatatgactctagtgtttcatcttcataattaatcatgtttgaaggatttctgagtgactcagcagcctgttaaagaaggatgaaccaaagaaaacatttcactaaatgtgcttttaaaaatcaagtgtattgctggttctgctgcagtatgtagtcgaagaataaagttagtaaattgcttctgagggtctgaaattgaataaagtaatggcttgtattct

SEQ ID NO: 51200 - DNA, 786 bp, Homo Sapiens
ggtaaagttaagaaaatacaaaaggacacattcaaaggaatgaatgctttacacgttttggaaatgagtgcaaaccctcttgataataatgggatagagccaggggcatttgaaggggtgacggtgttccatatcagaattgcagaagcaaaactgacctcagttcctaaaggcttaccaccaactttattggagcttcacttagattataataaaatttcaacagtggaacttgaggattttaaacgatacaaagaactacaaaggctgggcctaggaaacaacaaaatcacagatatcgaaaatgggagtcttgctaacataccacgtgtgagagaaatacatttggaaaacaataaactaaaaaaaatcccttcaggattaccagagttgaaatacctccagataatcttccttcattctaattcaattgcaagagtgggagtaaatgacttctgtccaacagtgccaaagatgaagaaatctttatacagtgcaataagtttattcaacaacccggtgaaatactgggaaatgcaacctgcaacatttcgttgtgttttgagcagaatgagtgtttcagcttgggaaactttggaatgtaataattagtaattgggtaatgtccattttatataagatttcaaaaatccctacattttggaatacttggaactctattaaataatgggaagtattatattttacaagccaaatattctatttctcaaggtgggtaaagtcaactggactttattttattgaacaagaaaattttccaacggg

SEQ ID NO: 51201 - DNA, 626 bp, Homo Sapiens
cagataggggccacagcaggattttcacacatcaaaggaggcagcctctgctctagttgatgtgaggatgagggggcggcctagaccccctgctgcccaggccgttgaggcaacactgggttcctggcttgacagctgtgggctggctgcccttgccagctcagacggctggcgagttttcagcttccctaagggactggcatagggttttgtggggtcaatgccaggaacctgggggaaactggatgcgttttatcctaagaagttcatccctcctgctcttactgtttccggccctggaggagaatgagggaggagagggttttctatgactggtgttagcttttattattagcaagagggctccttttgtaatttgtgcatgaaattcatgtcatttcctgggagaggagagggccgactggagagggtggggggcacactggggaagcaggcagaggtttccttcccttgtaggggggtggggagagtggggagagggggtgctatccagttcgcctgatgagggctctcgaaccacgccgtttgggttgtgttaaaggtgagaccttcctccattaatgtacaatctcgaactaactgctaataaagtggggttctgtttg

SEQ ID NO: 51202 - DNA, 624 bp, Homo Sapiens
aaatattagagctccattcttttggttcaaaacgttgatacttacttagatgttccctgagaggagtgtttatttctgagtaaggggctttgttgaaagagggggttagagagagcaagacagcacttgagtgcactggcaggaagagagataagacttgaatttcagtttggtagacctccttctttagcagcccaacctgtagcaaatctagtttagcctgcatggcagggagagggattctcttcccaccctcaccatttgcaagtggcaggagctgagaatgccagtacgagagtgtagccaaagtgagaggctgagagcaaaggagacatttttttcagttttgagtcgagtatccagacagaggcaaatcattttgtttaactttttattaaagtgtaactatagaaacacatcaatgatttttcacaagtggagcacgtgcatacaatcggcaccccagaagccccccgtcagattcccttccagttaactacctctccaagggaaaccactatcctgagttctaagcgcatagattagttctgtctggtttggggagatatataaatggaattatgcattcttcgtatctggtttcttttcaccaatattatgttt

SEQ ID NO: 51203 - DNA, 835 bp, Homo Sapiens
aaaaaagtgcttgaaaagtgtgtttggaactcatcgatagggtaattctccaaaaatgcccaaactctctttctgtaattagccttgccactttcttcagtcacttaaatggtgagattacacatcagtgcaagatgaccattatggttatggtctactgcaaggttgaaaggaaaaatggaggattgtatttagaaaaagggacaactttgtggccacctgctctgaaagtcaaaaggaaatgtaaattagtgtcattagtgtgttggaagagaaatactattcagtaagcttcgccaaagaaaagtgagtcaaagttaatgtgtgtgtgcatttatatgtaggcagctcgtagaccacattttagccagcaactggtaacaaagagcttagttttccttgtttgaatgctgtagatctgtacctagtacccctcccatctactgatttgtttgtttttgtaaccaaacacattttcagatagaaggagccttaaaaaaaaaaaaatcactttgagtaacttcagtatgaatgaatgagagtgtgtggagctacccctcaccctccacccctttgtgctttttattcccgaattttcccagtctcttaaacagaaaaatgactgatataattatctttgggaaactgagccttaatttttttagagggggaaataagttttccccaattcacacagcataagcaatgtttgacagcatataatgccgttgtaaactactgagagtatcgatctggtctggtaacccatgtccgcactgtgaaactgtcttatgaatctcacctaatccttatattgctaaacaactcaacaaaa

SEQ ID NO: 51204 - DNA, 627 bp, Homo Sapiens
  misc_feature (573)..(573): n is a, c, g, or t
agcaggggagccccaacggctatgcggtcctcttagccacccaggcaacccccagtgggcttggcactgaggggatgcccacagtagagcccggtctgcagaggcggcttctcaggaacctggtctcctacttgaaacagaagcaggccgcaggggtgatcagcttgccagtgggggggtccaagggcagagacggcacaggcatgctctacgccttcccaccctgcgacttttcccagcagtacctccagtcagcactaaggacattgggcaagctagaagaagaacacatggtgatagtcatcgtcagagacactgcctagcccaagcctgtctttcccagcgtcatgtttgtgtcacaaaagcagttattttaaaatctgatcccctctctaccctaccactttggtttgaattatctcctgggttattttggttcatttgggtggggatcaaagtcctgtccaccaccaaaactaagttcttagattttgggggatttttttttttaaacgatgagaagggaatccggttatgttgatttctagtgtacaagatactgtctgctgtggntctgtatttttttattttttgaccaactgtatggaaagttgtcagtaaaacctt

SEQ ID NO: 51205 - DNA, 815 bp, Homo Sapiens
  misc_feature (766)..(766): n is a, c, g, or t
  misc_feature (768)..(769): n is a, c, g, or t
acagatgaatttaagttattctgaggaagaatttgatgttttgtctgagtcggctgttgatttcatcaggacacttttagttaagaaacctgaagatcgagccactgctgaagaatgtctaaagcacccctggttgacacagagcagtattcaagagccttctttcaggatggaaaaggcactagaagaagcaaatgccctccaagaaggtcattctgtgcctgaaattaattcggataccgacaaatcagaaaccgaggaatccattgtaaccgaagagttaattgtagttacttcatatactctaggacaatgcagacagtctgaaaaagagaaaatggagcaaaaggccatttccaaacgatttaaatttgaggaacctttgctacaagaaattccaggagaatttatctactgagcaatatttccctttagaacttcaagatttctacactgaaaatgttaatattatttatggacctctggccaaatggtacatgtactggaagtggataaccagtatcacttacacaaacaaaaataactttgtcaaatttgtggagttaggtggaagccagattttaaaagttgccaaccaggatatttaacaggtacagttacccgtttcaatgttatttttaagaagggagatgttggcacctttgaattctacatcctgtttctccagaatgagaatttgtgtacaaagatatttgtattcacctttctttaaaaaatccaagtaaaagtgcccaaaactacccantnnaaaaacaccaacgtaagggggcggcccggcttctaaaaaatattca

SEQ ID NO: 51206 - DNA, 1023 bp, Homo Sapiens
  misc_feature (12)..(12): n is a, c, g, or t
  misc_feature (966)..(966): n is a, c, g, or t
ccgctcgaaacngtccttcctaaaactgaagtggaggtgccacaaaaatcatctggtaaattgtttaaagtaatcccaaatgcaactcaaatctacagaatcccaggtgaagctcagtaatctgtatttttatccttctccccaaataattctgatgtgcaggcaagtttgaaaaccactgctttaaagaaaatggatactccccttaccaagcagaaagtaggattttggaaactgatgcaagggaagcaaaaagatgcctcaggaggcacgattacaacaggattgatgcaaacggaagctgaagcttaaccaaagacattaatatacgcccacaaaagaaaatgctaaggaagtcaagtggtctgcatgaattctgaagaaaaatggagaaccaaagaacaaaatttgtcaatgaacttccagcacagtctaggttaagggagtgaatttcttgactgaatggcacagactctgtaccacctgattggctgttaccttaatggaggaattatattacaatgtataggtactttaattagaatgacctggcagttactgaggcaaaattttccgctcctttgtattctgtaatacaagaaggatctacatggatgttctgttctctgaactgtctggatgaaccggtcaaccgcactcatcataccttaatttttaaatccgcattgtgggcactatcctgctattacataaatttctcggatttttaataaaaactttgcctatatcaaaaaaaaaaaaaaaagggggggcggttctaaaagaatcctcgagggggcccagctttacccgaccccacctttctttgtacaaaggggcgccctatagggaatcctaattataaagttagcgcctggcccgtccttttacaagggtcggggaggggaaaaactgcttaccttggggatctttggggaagaaaccttcatttggcggggggggacntaattggggcaaagaccctacaggaaatttaaaccttcaagggaaaaaaacaattct

SEQ ID NO: 51207 - DNA, 917 bp, Homo Sapiens
ggacgcgtgggtgagtctgcacctccaggcaggctctgtgcagtactcaccccctccgtctgctccctccaaggtgtgggggtgggcagtgctcagggcctcctcggagccaaaggacagcatggtcggcacagaggaaggggtacctgggctgggtgcagggccatcccactgcccttgagctgtggctctggcaggaaggaggggcagcccatccctcttctccctcctggggattctggggaatgggatgcaacttaagacttctgcctgagaagcctcctccctgctgcctccagggggcaccaaggcacaagcctgtgcagtaggggcgggatgggggtgtggaagagcaggtccaggctcctagcacaactggcctggggccttggcacctctgtaggccctgcctgtgcctgtccgctggcctggggggcctgggcttatctgggccttctcactcagggactctcttgacgctgacttgcccccgcagtggtggccagtgctgcctctgctccaagctgcccctgcgctgggaggggtgggggcggtgccattggtctggtgcagcatagccctggccagtggcctcatccccagcaggcctcccgtgcctctgccagcaagggagggggcggccagctctgcttgcacagggggcccccatgtggggcccccgcccgcccacgtttactccacctccatcccctttttagagcaaagcccctttctcctctaaacccacaccccccccacggggggcccgctccaacacgaatcccctcacaggggggcgaaagctttccgcgcacgccccgccttttctgcgactaaaggcggcgccccaaaccaggaatattattccagtgacccttcgcccttgcccccccccaatttctcatggtgcactccat

SEQ ID NO: 51208 - DNA, 583 bp, Homo Sapiens
tttttcatttgccaaccaagcacaaagttattttatactgactgtatattttaaagtatactctcagatatggcctcttacagtatttaagatatagcaaggacatggctgatttttttttataaaaattggcactaataagtgggtttattggtcttttctaattgtataatttaatttagtacaaagtttgtaaaatatcagaggatatatatatattgtttctacgacatggtattgcatttatatctttttactacagtgatctgtgacagcagcagcttcatgttgtattttttttactgaaattgtaaaatatccatcttaaagacatcaactattctaaaaattgtgtacaggatattcctttagtggtggaattaaaatgtacgaatacttgctttttcaaaaaaatgtattttctgttaaaagtttaaagatttttgctatatattatggaagaaaaatgtaatcgtaaatattaattttgtacctatattgtgcaatacttgaaaaaaacggtataaaagtattttgagtcagtgtcttacatgttaagagggactgaaatagtttatattaa

SEQ ID NO: 51209 - DNA, 540 bp, Homo Sapiens
aggaggtggcaatggtagatccacccttatgcttctcagtttagcataacctcttatggattttcatcaaattcagcgtgttggtcactggaaagagccttttccttctccttttcttactctcccctcatggtgttcccctcttaaaggagaggagcttttaatttacacttaccacctcatttgcttttctggaggccatgcaatataggcgggactacagagttaatctcctttttacaaatgaggccaagagaagcctcattggttcacagtcatgcagctcatactgtccacccttgtattctcagatgcaggacaattgcattttagttttattttgtggaggtgcagaatatttactctttctgtccaacccttgattctgccgaggaagacactgatggtttgatgagtgattcagctgtttttggctaagggcttttggagctgatggcaggggtttgatgaatccaaatgagctctagacattatcacagactgaatagatcttaactgtctcctacatgtgtgttttca

SEQ ID NO: 51210 - DNA, 834 bp, Homo Sapiens
  misc_feature (704)..(704): n is a, c, g, or t
tggaagagaggcacctgctggaaaccacacttcttgaaacagcctgggtgacggtcctttaggcagcctgccgccgtctctgtcccggttcaccttgccgagagaggcgcgtctgccccaccctcaaaccctgtggggcctgatggtgctcacgactcttcctgcaaagggaactgaagacctccacattaagtggctttttaacatgaaaaacacggcagctgtagctcccgagctactctcttgccagcattttcacattttgcctttctcgtggtagaagccagtacagagaaattctgtggtgggaacattcgaggtgtcaccctgcagagctatggtgaggtgtggataaggcttaggtgccaggctgtaagcattctgagctgggcttgttgtttttaagtcctgtatatgtatgtagtagtttgggtgtgtatatatagtagcatttcaaaatggacgtactggtttaacctcctatccttggagagcagctggctctccaccttgttacacattatgttagagaggtagcgagctgctctgctatatgccttaagccaatatttactcatcaggtcattattttttacaatggccatggaataaaccatttttacaaaaataaaaacaaaaaaagcaaggtgttttggtataataccttttcaggtgtgtgtggatacgtggctgcatgaccvgvnvssssggggggagtgtctmagggtcttctkttaactyaaaraactktyagamtktacagttttccaacttgccatattcatgatgggtttgcattttagctgcaacaataaaatttttttctaaagaaca

SEQ ID NO: 51211 - DNA, 820 bp, Homo Sapiens
ggggccatggaggacaaatctgctgagcacaaaagaactcaatattcctgctattgctgcaaactgagtatgaaagaaggtgacccagccatctatgccgaaagggctggctatgataaactgtggcacccagcttgttttgtctgcagcacctgccatgaactcctggttgacatgatttatttttggaagaatgagaagctatactgtggcagacattactgtgacagcgagaaaccccgatgtgctggctgtgacgagctgatattcagcaatgagtatacccaggcagaaaaccagaattggcacctgaaacacttctgctgctttgactgtgatagcattctagctggggagatatacgtgatggtcaatgacaagcccgtgtgcaagccctgctatgtgaagaatcacgctgtggtgtgtcaaggatgccacaatgccatcgacccagaagtgcagcgggtgacctataacaatttcagctggcatgcatccacagagtgctttctgtgctcttgctgcagcaaatgcctcattgggcagaagttcatgccagtagaagggatggttttctgttcagtggaatgtaagaagaggatgtcttaggaggagggcacccagaagtatcgagccatagctatccaaagtggtctgcatttctactgtaaaatgcaatttgaaaaaaataaaacgcaaaaaaagaaactgtaaaggaaacccaagagatttgtttaaatttttttggccatttttttcttcatcaatttttttttcggtctccaacttttaaacttggggttaagccattttgatttgt

SEQ ID NO: 51212 - DNA, 587 bp, Homo Sapiens
tcaatgtgtgtgtgaccagggttacagagcatctgggcttggagaccactgtgaagatatcaatgaatgcttggaggacaagagtgtttgccagagaggagactgcattaatactgcagggtcctatgattgtacttgtccggatggatttcagctagatgacaataaaacatgtcaagatattaatgaatgtgaacatccagggctctgtggtccgcaaggggagtgcctaaacacagagggttctttccattgtgtctgccagcagggtttctcaatctctgcagatggccgtacgtgtgaagatattgatgaatgtgtaaacaacactgtttgtgacagtcacgggttttgtgacaatacagctggctccttccgctgcctctgttatcagggctttcaagccccacaggatgggcaagggtgtgtggatgtgaatgaatgtgaactgctcagtggggtgtgtggtgaagccttctgtgaaaacgtggaagggtccttcctgtgcgtgtgtgctgatgaaaaccaagagtacagccccatgactgggcagtgccgctcccggacctccacagatttagatgtag

SEQ ID NO: 51213 - DNA, 867 bp, Homo Sapiens
  misc_feature (7)..(7): n is a, c, g, or t
  misc_feature (786)..(786): n is a, c, g, or t
  misc_feature (799)..(799): n is a, c, g, or t
  misc_feature (801)..(803): n is a, c, g, or t
  misc_feature (812)..(813): n is a, c, g, or t
  misc_feature (817)..(818): n is a, c, g, or t
  misc_feature (837)..(838): n is a, c, g, or t
taaatcngtatttaacctaaaattacatatttgcaacagaagatattatgttatgctcagtaaataattaagagatggcattgtgtaagaaggagccctagactgaaagtcaagacatctgaatttcaggctggaaaactatcagtatgatctcagcctcagttctcttgtctgtaaaatggaagaactggattaggcagtttgtaagattcctcctaactttcacagtcgatgacaagattgtctttttatctgatattttgaagggtatattgctttgaagtaagtctcaataaggcaatatattttagggcatctttcttcttatctctgacagtgttcttaaaattatttgaatatcataagagccttggtgtctgtcctaattcctttctcactcaccgatgctgaatacccagttgaatcaaactgtcaacctaccaaaaacgatattgtggcttatgggtattgctgtctcattcttggtatattcttgtgttaactgcccattggcctgaaaatactcattgtaagcctgaaaaaaaaaatctttcccactgttttttctgcttgttgtaagaatcaaatgaaataatgtatgtgaaagcaccttgtaaactgtaacctatcaatgtaaaatgttaaggtgtgttgttatttcattaattacttctttgtttagaatggaatttcctatgcactactgtagctaggaaatgctgaaaacaactgtggttttttattaatccataactgcaaaatttaaagtacctttcaatggataangaaaaaaaaaccncnnnaaaaaaaannaccnncaaaacaaaaaaaaaaaannaaaaaaaagggcgggccgcttccaaaata

SEQ ID NO: 51214 - DNA, 690 bp, Homo Sapiens
cacgcgtctccctaaatacttcattgggaccacgagtaactgatgtagcccttaaggagacataggttataaactagttatcttttaaaaggctcagcaacacaactcttgaaatgcttatcacgctaatggtagctatagctggccatttagaggaattctaggacagtgggagctgtgttactagcactatataattccggtcagtgctgacaaataacatttaacaagtattgcagtaatcatcacttacaggtaccatttatttcaaaacaacttttttagtctgctccaaagttaaaataattaactagctaagcattattattcgactggtctaaaaactattgttatcttttttttttccttttcactgttatggccttttcacatttctaaatcccatcttgatatactatgaatactctagaatgatgtaaagcagataggaatgtatgtgtacatatttattgcatacttgcacatcaaatcgatgtacatagtttaacacgtggtccttttgtgaaacctagaactcagaggattgctttttttctttcagcctattttgagttaacttcagtgctttcttagggaaatgacagggcaaagcaatttttctgttggctttgggctgtatttgtgcactaaatctttattctaaaaaaaaaatggaaactttaatttttt

SEQ ID NO: 51215 - DNA, 441 bp, Homo Sapiens
tagtgctgctttgcttttcatcaccgtcccgcacagtggacggaggtccccggttgctggtcaggtccccatggcttgttctctggaacctgactttagatgttttgggatcaggagcccccaacacaggcaagtccaccccataataaccctgccagtgccagggtgggctggggactctggcacagtgatgccgggcgccaggacagcagcactcccgctgcacacagacggcctaggggtggcgctcagaccccaccctacgctcatctctggaaggggcagccctgagtggtcactggtcagggcagtggccaagcctgctgtgtccttcctccacaaggtccccccaccgctcagtgtcagcgggtgacgtgtgttcttttgagtccttgtatgaataaaaggctggaaacctaaaaaaaaaaaaaaaaaaaaaaa

SEQ ID NO: 51216 - DNA, 696 bp, Homo Sapiens
gctccactcactgaagatcctattataatcccatgaaaatgtaaattacagtttacttgggagagccagattttctctgtgctcttgagttttttattcattcaagaaaccttgggccaccgctttgtacatagcaccgtgctaggctctgggatcccaaatggacccttttaactttctgaagatgggaccgtcccctggaggaaagtcattcctgcctaatccatcgagagaaagaggcttacgaaaaactttgcctctgatgctcagccccacccccaaatagcacacaagcttgttaaccccacctcttacaaaatgtttagattctgtaggtgttaaaagcctttctggaagtattgcattctgccgtgtttataggtgttcactttcctccagagctgattaactactgacatgacttggctttctcatccagaaattatggaaacagggtctgtcagtggcaggaggccgtgctgtgttttacttggatgacacaatgcagtttacttgcctcttcatacccatgcatgctgctcaccctagacaatgacatataagccgtatatagatcaatgtccacatatatatacacacacacatatatatatataaagtgtaacaaggaacactaaaacagtgttgattcttgtctctgaagacaaaatattaaaccttttttttcccaactaa

SEQ ID NO: 51217 - DNA, 894 bp, Homo Sapiens
  misc_feature (793)..(793): n is a, c, g, or t
  misc_feature (863)..(863): n is a, c, g, or t
  misc_feature (873)..(874): n is a, c, g, or t
ggacgcgtgggtttaaagagaggcaggcttgggaatgggttgggagaggcatctgttcattggagcatgagtggatgccagaactgtaggttataaggcagtcactttttctctctactcccacccacacctgcctccctcttacccctgctcccccacactgcaggaggatttgtctctaagaggtgctgccccaaagctccccaagcatcaatactcctagggctcaggacaagtggctcccctggccaggagagccacagccatgatacagggctcttatggagccctggagttgttgggcaaggatgctgtcattttttgaaccaaaagacaaacaggttaaaaggaaaaaaagtaatctgaatttcccaagtgcctacgctgcatattccccttgttagatcccattttcatgttactttgtagccttggccagaggctcaaaaaggacacaaccagtttggggaaggggtggctaaggaagatggtataggtgaaggcggctgtgtgaccactttcccccacccttcccaccctctagacaactctctcccttacctgtttttgctatggctgtaaaggtatttttcctctgccccactccctgccatacctttatcctgggatcctattttggggcctggggtgggtatacctggggctggtcttaggagggtgctaggctgcagactgccttgtactccctggacacctccaaatgggggttttctgggttatttcataaaatccttttgaagtccaataaggcatggtaggagatttttaccanacaaaaaaaggaccggcagccccgcccgcgcggcgccccgagcgcggcgtcccccaagcccccccccagngaggccaggnnaggcggcccccttcgccgcg

SEQ ID NO: 51218 - DNA, 558 bp, Homo Sapiens
  misc_feature (547)..(547): n is a, c, g, or t
caccctggagcctggttctccaaacaggatttgcctcctccacgctccctacacacctgagatgtaaactggcagtcagtgttcactcaggacctaggattagaaaatggcagagttggtgctggatccaccttgcacttctatcaagccctgttctttttcctccagcctgaagtcttcggcaaatagctcagagggacacggtcttgcctctcagtgcttattttagtgggaaaaacagctaataccaggggtacaaacattggctcccaaggaactggatcacccaacagccagccagccacatttccctgtgtctggctagagccaccattagactcagacagaatgcttcaggaatcgttgtcaccccttcaactggagcaggacggaaggttgtctgtacttgggagggagtggggagtggtgggaagggagttgcttgtcacacgaatcaggaaactgctctccctcagctgggctggggtctccagggacctgagctacatgcaggttgtgagctggaaaagaaagttctagactgtgngccagaatagg

SEQ ID NO: 51219 - DNA, 620 bp, Homo Sapiens
ggagcccgcgaggcggtccgcgggagcacactctgtgcggagactgggcggccggccgacccttcctgtcgctgacggcgactgcgggaggccaggttgtttttcaccattcagaacattgcctgaagcaggtccaccatgccgttagtaacgaggaacatcgagccaaggcacctgtgccgtcagacgttgcctagcgttagaagcgagctggaatgcgtgaccaacatcaccctggcaaatgtcatccgacagctgggcagcctgagtaaatatgcagaggacatttttggagagctctttactcaggcaaatacctttgcctctcgggtaagctcccttgctgagagggtcgaccgactacaggttaaagtcactcagctggatcccaaggaagaagaagtgtcactgcaaggaatcaacacccgaaaagccttcagaagttccaccattcaagaccagaagctttttgacagaaactctctcccagtgcctgtcttagaaacatacaatacctgtgatactcctccccctctcaacaatcttaccccttacagggacgatggaaaagaggcactcaaattctacacagacccttcatacttctttgatctttggaa

SEQ ID NO: 51220 - DNA, 670 bp, Homo Sapiens
agcagggtgcgggggccaccggcttcctcgaatggtgggtcatcgagctgcaggagtgccggaccgactgcaacctgctgcccatggtcattttcagtgacaaggtcagcccaccgagcctcggcttcctggctggctacggcatcatggggctgtacgtgtccatcgtgctggtcatcggcaagttcgtgcgcggattcttcagcgagatctcgcactccattatgttcgaggagctgccgtgcgtggaccgcatcctcaagctctgccaggacatcttcctggtgcgggagactcgggagctggagctggaggaggagttgtacgccaagctcatcttcctctaccgctcaccggagaccatgatcaagtggactcgtgagaaggagtaggagctgctgctggcgcccgagagggaaggagccggcctgctgggcagcgtggccacaaggggcggcactcctcaggccgggggagccactgccccgtccaaggccgccagctgtgatgcatcctcccggcctgcctgagccctgatgctgctgtcagagaagaacactgcgtccccacggcctgcgtggcgctgccgtcccccacgtgtactgtagagtttgttttttaattaaaaaatgttttatttatacaaatggacaaaaaaaaaaaaaaaaaa

SEQ ID NO: 51221 - DNA, 762 bp, Homo Sapiens
ggaggcattgaggcagccagcgcaggggcttctgctgagggggcaggcggagcttgaggaaaccgcagataagtttttttctctttgaaagatagagattaatacaactacttaaaaaatatagtcaataggttactaagatattgcttagcgttaagtttttaacgtaattttaatagcttaagattttaagagaaaatatgaagacttagaagagtagcatgaggaaggaaaagataaaaggtttctaaaacatgacggaggttgagatgaagcttcttcatggagtaaaaaatgtatttaaaagaaaattgagagaaaggactacagagccccgaattaataccaatagaagggcaatgcttttagattaaaatgaaggtgacttaaacagcttaaagtttagtttaaaagttgtaggtgattaaaataatttgaaggcgatcttttaaaaagagattaaaccgaaggtgattaaaagaccttgaaatccatgacgcagggagaattgcgtcatttaaagcctagttaacgcatttactaaacgcagacgaaaatggaaagattaattggcagtggtaggatgaaacaatttggagaagatagaagtttgaagtggaaaactggaagacagaagtaccggaaggcgaagaaaagaatagagaggataggaaaatagaggttaaaaacatacttttaggaggaaaaagttaaatttaaacctcgaaagtaggaagcagacgaacgccaagctcggccgct

SEQ ID NO: 51222 - DNA, 644 bp, Homo Sapiens
ggtgttgctggggtcgctcgttaggatcccctccagtgctatggactgtgcggcggtcgaggtcccgctcccggtcccctcggaggagagcccactcccctgagagacggagggaagagaggagtgtgcccactgcctaccgcgtgagccgcagccctggggccagcaggaagcggacccgctccagaagtccccacgagaagaagaagaagaggcggtcccggtcgcggaccaagtccaaggccaggtctcagtcggtgtcacccagcaagcaggcagcgccccggcccgcggcccccgcggcccactcggcgcactcagccagcgtctcccctgtggagagtcggggctccagccaggagcgctccagtggagtctctcaggaaaaagaagcccagatctcttcagcaatcgtttcttccgtgcagagcaaaatcactcaggatctcatggccaaagtcagagcgatgcttgcagcttccaaaaacctgcaaaccagcgcttcctgagacggggccagcggaggcagagccgggaggctgcgtgggcttctgggcaggctcacgcagacgccggccacaccatccacctggccgcctccatggacccttggtggcttttgtaaattaatttttgatgacatt

SEQ ID NO: 51223 - DNA, 792 bp, Homo Sapiens
gcaacctgtggtttctctgtactggtgtttaatgggggaagaatatgaacagctttaaagagctgtgtattgtggttactactattaaaaaataagatctgcacgagtctgactggcctttgggtggcctttgtggacggctcgtagctggaaagtgttgatctgggttttctggcattcttttaagttaaaaagttaacatcgggacatgggtttgatcttttgttgtacctgatgacagtgcagagattctccacagctggataaaaatgtcacaaagctacttactgtacatgggcagtatcagatttcaaatcctaatatttcagctgtgcttttaatactcaaaatattaggggatggggtgttgaagctttcccttttttgcttttaacaatttatagaatttaacagatgtactgtctttcatgtggcctcacatttaaagttatgagaacatacacatggtttacaacttttactatatacctttccttggccaccaagtattttaaaagtgtgccaccttttaacctttactttttttaagttgaaggtgatactttttctatatatgatgaaactcatgtcaaactgaagtgagtgtaatctcagataccaacattattatattttaaaatcacgctatggaaatatcacctggaattctgtcatttgtcagatttacagtacctttttttctttaccttttagcattaataaaataaattggggagcctggaaaaaaaaaagaaaaaaaagggggggccaaaatcccgggggcccatgacc

SEQ ID NO: 51224 - DNA, 920 bp, Homo Sapiens
ttggtctacgctgtgcgcggcggacgtcggaggcagcggggagcggagcggggccgccggggcctctccagggccgcagcggcagcagttgggccccccgccccggccggcggaccgaagaacgcaggaagggggccggggggacccgcccccggccggccgcagccatgaactccaacgtggagaacctacccccgcacatcatccgcctggtgtacaaggaggtgacgacactgaccgcagacccacccgatggcatcaaggtctttcccaacgaggaggacctcaccgacctccaggtcaccatcgagggccctgaggggaccccatatgctggaggtctgttccgcatgaaactcctgctggggaaggacttccctgcctccccacccaagggctacttcctgaccaagatcttccacccgaacgtgggcgccaatggcgagatctgcgtcaacgtgctcaagagggactggacggctgagctgggcatccgacacgtactgctgaccatcaagtgcctgctgatccaccctaaccccgagtctgcactcaacgaggaggcgggccgcctgctcttggagaactacgaggagtatgcggctcgggcccgtctgctcacagagatccacggggggcgccggcgggcccagcgggcaggccgaagccggtcggggccttggtcagttggcactggaagcttccttcaccgacccctggggcccccggggggccccgggaggggcttaagggccccatgggcccaaaaaacattgctggtcgagcgccaaaaagaaacttggctggcccaagaaaaagacgggacaaaaagcgggcccccttgcccggcgctgaagtgggccttatttttcttcgtgtcgccggggaccccccactttttccgggtccccttcttgcac

SEQ ID NO: 51225 - DNA, 802 bp, Homo Sapiens
atattttttgtgttaggaatcaaaagtattttataaaaggagaaagaacagcctcattttagatgtagtcctgttggattttttatgcctcctcagtaaccagaaatgttttaaaaaactaagtgtttaggatttcaagacaacattatacatggctctgaaatatctgacacaatgtaaacattgcaggcacctgcattttatgttttttttttcaacaaatgtgactaatttgaaacttttatgaacttctgagctgtccccttgcaattcaaccgcagtttgaattaatcatatcaaatcagtttaaattttttaaattgtacttcagagtctatatttcaagggcacattttctcactactattttaatacattaaaggactaaataatctttcagagatgctggaaacaaatcatttgctttatatgtttcattagaataccaatgaaacatacaacttgaaaatcagtaatagtatttttgaagatcccatttctaatgtggagatctctttaatttcgatcaacttataatgtgtagtactatataagtgcccttgagtggcattcaccatttgactactaaaatgagttcatcatgttggcagtgattgtgccattatcttggtggaccaaaacttaaatcatatattctgcctgtccaatttcagcaaactgtattatgaaagtgccttatcggtccgtataacgggcatttccaacacggtgtggctcgatgggcactgcaaacggggtttaaccctgttttaacccattttttttcaaaaaaaaaatgtgg

SEQ ID NO: 51226 - DNA, 594 bp, Homo Sapiens
gtttcttcataatgatcttccatttttaacactgataccactacacagtacatatgaaaacagaagctggggagaagaatgtttttttcacaattgaattgctgcatttctcaaactttgggatctatgaaagcggggagagggaacctgaatattaattatgagcacaaatttgaaggaaagaaaacaaagaaccattatctaatcaagctttgaaagtcctgcatgtttgccttttattttagtgttgacgccaacatagactgtctaaggtatttttttccccaaacacttgaatcttggtcgttggtatgtaatccactctctagagtccagtgtactttagacttcatctgagtccaatacatgtaccacactactgttttattaatgtaaaaaccttgtaaatgaatttcagatgggtgatttaagtgagtcacaagtcacaaaactttgctattcatagttaatcaaatagaactgggttttttttttcagagtgtggtgtaaataaagaaatataagaagttctgttctataactgctctgttaacatagtttttaaacattaaaaaatgtgaactaaaagtaaaa

SEQ ID NO: 51227 - DNA, 706 bp, Homo Sapiens
cccggggatgaagaggaggattcgcctgggccagtacggcttccccaatcctgagtggtcagaagtctctgaggatgccaagcagctgatccgcctcctgttgaagacagaccccacagagaggctgaccatcactcagttcatgaaccacccctggatcaaccaatcgatggtagtgccacagaccccactccacacggcccgagtgctgcaggaggacaaagaccactgggacgaagtcaaggaggagatgaccagtgccttggccactatgcgggtagactacgaccaggtgaagatcaaggacctgaagacctctaacaaccggctcctcaacaagaggagaaaaaagcaggcaggcagctcctctgcctcacagggctgcaacaaccagtagctcatggggccttggaggagcctggcctctcagcctgcataacagactgaaatgtgctcaggccctggccaggagggcccagggtcattcttttaacaaaaggattattttgttgtgttttaatttgtcactcggaacttcaggatggaggaccctgaccctaagcctccttcagatctctggcccaggctcaagccctagagatgggcagggcctaggggctgggagctgcctgctgccatagcagcacctttagctaggttggcccgagtgaggcctctgtgctgtcctgccctggtgcatggcctt

SEQ ID NO: 51228 - DNA, 617 bp, Homo Sapiens
cagaatgcagccatgctgagggcagccggagccaaggccctgagaaagccttcagcccggcttctccatgtgcctggaacgtgtgtgtcaccaggaaggcccccctgctggcctctgacagtagctcctctgggggctcccacagcgaggatggcgaccagaaggcagcgagtgccatggatgcggtgagcaggggtcccggccgggaggcccccccgctgcccacagtggccaggacagaggaggctgtcggcagggtcgggtgtgctgacagccggctgttaagccctgcctgccccgcgccaaaggaagtgactgctgccccagccgtggctgtgccccccgaggctactgtggccatcaccacagcactgagcaaggctggccccgccatacccaccccagcagtctcttctgcactggccgtggcggtccccctagggcccatcatggcagtcacagcagccccagccatggtggccaccctggggacagtgacaaaggacgggaagacagatgccccgccagaaggagctgccttaaatggcccagtgtgatgctgctgccgcccggccacggcccaccctggtcaggctgcctccttaatcgagaaaact

SEQ ID NO: 51229 - DNA, 671 bp, Homo Sapiens
  misc_feature (646)..(650): n is a, c, g, or t
  misc_feature (657)..(657): n is a, c, g, or t
  misc_feature (661)..(661): n is a, c, g, or t
  misc_feature (667)..(667): n is a, c, g, or t
ggcagcaattctgaccatgtagacagagtccaggctggggaagggaccacaagggaaacacctggtgactctggcatgggtcttagcactgccagatattacacacacacacacacacacacacacacacacacacactcttcatatctgagcgcgcccctcgcactgggtctcaccttgcaccttcttcaggattttatatgtgaagagatttttatatagatttttttcctttttttccaaaacactttatactttaaaaaaaaaaaaaaaaagcaattcctggtggctgtgtgcctccaaccctggtccccctctgtctccagccaccctctgcttgggcttctgagctggtggccctggcccagaggtctggcggaggcccaggcagcagccatggcggggtgtctctacaggggagaggcgggagcctgccaccctcttcctgccctacctcctactaacacttcctgccccatttggacccgtaccatggggctcaggacagagggagctagcagctggcctccatggccccacagcctccttcgaggctgtgctgggtgcagaaccgccagagccacccaaaaggtgtttctcttctgctccctgaacctcttaacttaataaaacgttcccagcgccnnnnnaaaaaanaaanaaaaanaaaa

SEQ ID NO: 51230 - DNA, 640 bp, Homo Sapiens
ggcacgaggggtgattactttctgtggggctcggaactacatgccctaggatataaaaatgatgttatcattatagagtgctcacagaaggaaatgaagtaatataggtgtgagatccagaccaaaagtcatttaacaagtttattcagtgatgaaaacatgggacaaatggactaatataaggcagtgtactaagctgagtagagagataaagtcctgtccagaagatacatgcttcctggcctgattgaggagatggaaaatttttgcaaaaaacaaggtgttgtggtcttccatccagtttcttaagtgctgatgataaaagtgaattagacccaccttgacctggcctacagaagtaaaggagtaaaaataaatgcctcaggcgtgctttttgattcatttgataaacaaagcatcttttatgtggaatataccattctgggtcctgaggataagagagatgagggcattagatcactgacagctgaagatagaagaacatctttggtttgattgtttaaataatatttcaatgcctattctctgcaaggtactatgtttcgtaaattaaataggtctggcccagaagacccactcaattgcctttgagattaaaaaaaaaaaaaaaaaaacgatt

SEQ ID NO: 51231 - DNA, 515 bp, Homo Sapiens
ctcccgtatcatgatccaccagccctcaggaggcgcccggggccaagccacagacattgccatccaggcagaggagatcatgaagctcaagaagcagctctataacatctacgccaagcacaccaaacagagcctgcaggtgatcgagtccgccatggagagggaccgctacatgagccccatggaggcccaggagtttggcatcttagacaaggttctggtccaccctccccaggacggtgaggatgagcccacgctggtgcagaaggagcctgtagaagcagcgccggcagcagaacctgtcccagctagcacctgagagctgggcctcctctccagaatcatgtggaggggccagaggcctgccagacccccagctgggccctgctcaccccttgttgctgggcttggaggggcctcttgaggaacttttaatttgcaggggtgcccgctatggacggggcattccagctgagacactgtgattttaaattaaatctttgtggtctttaaaa

SEQ ID NO: 51232 - DNA, 1049 bp, Homo Sapiens
gaactcctgacctcaggtgatccgcctgcctcggcctcccaaagtgctgggattacaggagtgagccactgtgcctggcctatcccacttggtttttgactgaaggggaagtgtagaaatatattgatttgtgatttctggtgtcacctgtgttaccaaaaatcaaaacaaatcttttttattttttattattattattatttttgagacagagtctcgctctgtcgcccagtgtggagtgcagtggtgtgatcttggctcactgcaaactccgcctcccaggttcaagcgattctcccacctcagcctcctgagttgggtcctacaggcgcacacgaccacgcccagctaattttttgtatttttagtagagttggggtttcaccatgttagccaggatggtctcgatctcctgacctcgtgatccactcacctcagcctcccaaaatcctggggttacagatgtgagctaccactcacggcccaaatcttcttgatcatatgtttaaatatattttttaatatttggagcatgagttgtcacttcttgtttgccttttttataaggaaatgttggagagttacatcattgctaatgtagaaatgttaagtggaaaaatatacagtttggtaaaataaactagattctacatttatttgtgggtttttttcccctcctttctttccacagcacttttgatatcaagcaagtggcttcctttttgagatattaaaaaaaaaaagacaaggaaaaaaagtaaatgaagcccaactacctaaccctttcttatttgaatttgttttaaattgtgaagttggggtaaatagtactaacctagaaaaacaaatttctgggtatcattttctcttccctgggggcactttgaaattttaattggcctaaaagtttttgaaaaacatctttctggcccccttgagtactggcccaagcgaaaaagaaggtgggttccttattcatttccacttttggctcccggggaaccccttttgtaaccctgaaatttttgctcgccacaaatgatttttag

SEQ ID NO: 51233 - DNA, 625 bp, Homo Sapiens
ttgaaagccagacaaagcagctgcccctctccctgccaaagaggagtcatcccccaaaaagacagagggggagccccaagcccaagtctttcctcccagcagcgtttccccccaactccttaattttattctccgctagattttaacgtccagccttccctcagctgagtggggagggcatccctgcaaaagggaacagaagaggccaagtccccccaagccacggcccggggttcaaggctagagctgctggggaggggctgcctgttttactcacccaccagcttccgcctcccccatcctgggcgcccctcctccagcttagctgtcagctgtccatcacctctcccccactttctcatttgtgcttttttctctcgtaatagaaaagtggggagccgctggggagccaccccattcatccccgtatttccccctctcataacttctccccatcccaggaggagttctcaggcctggggtggggccccgggtgggtgcgggggcgattcaacctgtgtgctgcgaaggacgagacttcctcttgaacagtgtgctgttgtaaacatatttgaaaactattaccaataaagttttgtttaaaaaaaaaaaaaaaaaaaaggac

SEQ ID NO: 51234 - DNA, 627 bp, Homo Sapiens
accaggaacgcttcatttccttggggctgcagttttgtggttgaggggcctggagaaaatcattttctccccttggcagtgtcccagggccctggatggtcctcttaccaacatctggtcttccaggcactcaaaagctgggaaccagcatctcagcgccagctctaccagttctcgttttgggccagaggcagcctctgcactcccacgcctgtcctcctggaagggacctggttggactaacggctaacctggacctggaactgtagggccaggggattgtctcagggccgacgttccacctggggcttccctccccacccacccccactccaggctttcccttttttcttttgttcaacattgtaagaacaatcaatgctgttattactgttcccaccatgattgatgtggggtaaatattaaggagatggcctcatgggaatttgaccttgactagaaatagagactgagagtgagcaaccagctggaaggtactatgccagtcctagcagaaaaatgtgttaggggcctggcccaaagcagtgttggttgcttacagtgttgattgattttgttcttttttcttaccacctcttttctttccctctcatggtacctgctcat

SEQ ID NO: 51235 - DNA, 698 bp, Homo Sapiens
gttatgggtgggcgacaggttgatacagtcttagaaaaagcaggtaatatcaaagtattggaaagctagcatgcatgccctcttacctgggtatcttcccccttttttccttttaaactcttgagcctcctataacgaaggattatgtgtttcaaaccttttttttttttactgtttcattaagtgtgcttgtgcccaaaatatttacttgtataatatctgtaacttgcttaaatacttcagcaaagtcagcatatttactcattcaacaaatatttgagccaggcattattttagacacagcagtgaacaaaacaaaaaggcattcttgccttcatggagcttacattcttattgttatttaaatctaaatgttataaaacaagaatttatattctagggttgatcagctagtatttaatcaaaaaggccacactcccatagcagctactctaagctgtagtagctaataaaaaatattaatgttggccgggcacagtggctcacgcctataatcccagcactttgggaggccaagggtggtagatcacttgaggtcaagagttgtgacaccagcctggccaacctggtgaaaccctatctctattaaaaaatacaaaaaaatacaaaaaaattagctgggcatgttggcatgcacctgtagtcccagctatttgggaggctgaggcacgagaatt

SEQ ID NO: 51236 - DNA, 887 bp, Homo Sapiens
aagacataggtactaatttggttgaagcagataaccaagcagagtggaccgacgttcagaagaagattatcccgtggaacagtcgtgtttccgacttagacctggagctcctgtttcaggatcgtgctgccagacttggaaagtcaattagtagactcatcgttgtggcctcgctcatcgacaaaccgaccaatttaggaggactgtgcaggacctgtgaggtatttggggcttcagtgctcgttgttggcagccttcagtgtatcagcgacaaacagtttcagcacctcagtgtctctgcagaacagtggcttcctctagtggaggtaaaaccacctcagctaattgattatctgcagcagaagaaaacagaaggttataccatcattggagtggaacaaactgccaaaagtttagacctaacccaatattgctttcctgagaaatctctgctcttgttgggaaatgaacgtgagggaattccagcaaatctgatccaacagttggacgtttgtgtggaaattcctcaacagggcattatccgctccctgaatgtccatgtgagtggagccctgctgatctgggagtacaccaggcagcagctgctctcgcacggagataccaagccatgatgtgccttccttagtgaactgctgctgctgttcagactttttttaaaaaaactatttgggactaaagaaacagattctgaaatttattgggataaatttggatttccttttttcctggcaattaatgccaaaagtttgccatggggccttaaacatttttactatatatttttcccccttttaataaacacttttttgttaaaattggaaaaaaaaaaaaaaaaagggccggccgcttctaaaagaataccctcg

SEQ ID NO: 51237 - DNA, 826 bp, Homo Sapiens
tttttttttttttattttgtaatattgagggataattggttattaaactgaatagttcaggagactttacaaacctttgtttcaactttcttatctggaaataatatcatttataaagggacacttttatgtttttcccttttttatgttggttgatataacacaaagagatatttaggaaaatgcttattgatgaggtttattctatctgtttttaaagcaccgaggttgcattctagataaccttgtttattagcatggcatattttaatcattatttgagactgtcctgtgcctgattattttagctaaattcagggagattgcgtggggcaggaaagcatgcattgaaaaatttctaaccacggttatttaagcataatctgaaaacatctagcccaaaggtaagttgctattttcatcacagttgcctatgcccagggaataagatgtattctttataattgaattggtttttcccacgtctaactggaaacaaaacagaaggggcgtcataaatttgaataagcagaacatactgttctcaacatactgtaatcaaaaggaggaatttcagtgggtctctgtgtgtgtatgagagagagagtgtgtgtttgtgtgtttcaaggtcagaacaggtttttttgtttttgttttttgttctttgtttttttttttgagatggagtcttgctcttgtcgcccaggctggagtgcagtggcgcaatctcagctcactgcaacctccgcctcccaggttcaagcagttctcctgcctcagcctcctgagtagctgggatgacaggcacccgccaccacacccagct

SEQ ID NO: 51238 - DNA, 959 bp, Homo Sapiens
atgcactgtgatattaaattagaaataatttatcaaaatcagacctctcctaaagaataagaaattcattgtttggcccatcctgaaaggtgaggtggcgagacagtggggtgcctccgtgccgcttcgtgcagcagcaagttcagcctgagatgctggctgtactcagcctttgcaatttttgtagatgtagcttaggacgtgagttatttttccgcagactggccaagagccaggttctaagcttggacctaaggtagaaagctgcccatcgggggccctagctcagccccaccaggccctctgttgggcctgcacacagctctgtggctagaacactccaaggcccttcggtacccatcagagtgggccccttgccaggtggcttttcagttacagagtccagtggaccattttgtagaaccatgcagctccctgcggaaggtggggtagggtgggaaagaggagcaggtctggaggtttgtggaacccagtcccctgcagaatctgtaaaacctaataaatcatggttgtggccattctcacggtggtgattgtgattagacgacccccgggaagcccagacactcggggcctggagttcctccccctgcctgacctagaagcagaaccgttttcagcgctctgccctgttggctttaaggctttgtcttaatttaaggaaaaaagatcctccccggggttttatttctcctctttccttgaagtggacctgtttcccctaataattaaaaaagagggtgggtggaggtccttggggggcaagcttttccgcccgcccttcccctggttccaacggtggcttaaaccaggaattcaaggggaacgcccccccccagagcaaaccccccttggcccgtggccttttttttgccctgggggtgggggcaaaaatggaacacgggggaaaatcaccaccggaaccattcccttttccc

SEQ ID NO: 51239 - DNA, 835 bp, Homo Sapiens
aaggtacaggatgcactgccatggatcaggtcttccacgtggattgttttacctgcatcatctgcaacaacaagctccgagggcagccattctatgctgtggaaaagaaagcatactgcgagccctgctacattaatactctggagcagtgcaatgtgtgttccaagcccatcatggagcggattctccgagccaccgggaaggcctatcatcctcactgtttcacctgcgtgatgtgccaccgcagcctggatgggatcccattcactgtggatgctggcgggctcattcactgcattgaggacttccacaagaaatttgccccgcgatgttctgtgtgcaaggagcctattatgccagccccgggccaggaggagactgtccgtattgtggctttggatcgagatttccatgttcactgctaccgatgcgaggattgcggtggtctcctgtctgaaggagataaccaaggctgctaccccttggatgggcacatcctctgcaagacctgcaactctgcccgcatcagggtgttgaccgccaaggcgagcactgacctttagattcagtcacctgttcagccggcactgagaagaacgaacacaagaaaaagataagaaatactagagtaaaggccatcaaactacgcgatagtctctgttcttcatctgctattaaccttgccttagaaacacataaattatgagattttttttaaaagttgttaccaaatacacatttcacattgaatcatgtaggatcttgatgggccttttgtcccaggacttccacatttttgcacagattatgctccatcccattcacttctgcattc

SEQ ID NO: 51240 - DNA, 859 bp, Homo Sapiens
tactaagttaagacttttcaaatggatcagtttggctgaatagatagatatactcatgtatgtagttgtgggagtttttagttttttgtttttttacttatgaaataagttttgacctagacacaaggggtatatgaaggaggaaaaaaatttctttgcaaaatctcccaaaacttgcttttttttcccttccacacaggcactattataattttcagtgccatgttaaattggattatttcatttactttaagttaggaattactgtgtaatttattaattcatgattctcataacattcagcataagtgtagcaaagttgctaataacggaaggggatcatagtggtgttgaatgtaactttgaagtagggaatggccttttaagtctgagagagaacatttgaatccttttcagggatttgtgtaggggtgtgtttgtgtgtgtgtgtgaatgtgtgtgtgtgtagataagtgtatatacataaatacactcttctaaagttgtatatacatatgcacattacatacattttaatttattgacaaaattaaccaaattaagatttggagatgtgggatgttcttgttttaaaatagcatgtttgaaaccatcagtttgtgtctaaaattagctgtagcacatggatgttgtccatattaagctatttgctgtttgaattatagaggtctacagtatttgtgttggcatagtttttgtaaaaaaagattaaaaaatatcaggatggtggaaaaactagatctgggtatctctgttttggcatgcatttattcagtatcttctagcaatggtttttttctctgttgatctaccgtaggatcctattttttaaggttat

SEQ ID NO: 51241 - DNA, 693 bp, Homo Sapiens
  misc_feature (458)..(458): n is a, c, g, or t
  misc_feature (597)..(597): n is a, c, g, or t
ctcgctggtaaaggtcaaatggggtcatctgctccttttccatcccctgacataccttaacctctgaactctgacctcaggaggctctgggcactccagccctgaaagccccaggtgtacccaattggcagcctctcactactctttctggctaaaaggaatctaatcttgttgagggtagagaccctgagacagtgtgagggggtggggactgccaagccaccctaagaccttgggaggaaaactcagagagggtcttcgttgctcagtcagtcaagttcctcggagatctgcctctgcctcacctaccccagggaacttccaaggaaggagcctgagccactggggactaagtgggcagaagaaacccttggcagccctgtgcctctcgaatgttagccttggatggggctttcacagttagaagagctgaaaccaggggtgcagctgtcaggtanggtggggccggtgggagaggcccgggtcagagccctgggggtgagcctgaaggccacagagaaagaaccttgcccaaactcaggcagctggggctgaggcccaaaggcagaacagccagagggggcaggaggggaccanaaaggaaaatgaggacgtgcagcagcattggaaggctggggccgggcaagccaggccaagccaagcagggggccacagggtgggctgtggagctct

SEQ ID NO: 51242 - DNA, 708 bp, Homo Sapiens
ttttttttttttttttgttgtcttgttttctttctcctccatgtgtcttggcaggcactcatttctgtggctgtcggccagagggaatgttctggagctgccaaggagggaggagactcgggttggctaatccccggatgaacggtgctccattcgcacctcccctcctcgtgcctgccctgcctctccacgcacagtgttaaggagccaagaggagccacttcgcccagactttgtttccccaccgcctgcggcatgggtgtgtccagtgccaccgctggcctccgctgcttccatcagccttgtcgccacctggtccttcatgaagagcagacacttagaggctggtcgggaatggggaggtcgcccctgggagggcaggcgttggttccaagccggttcccgtccctggcgcctggagtgcacacagcccagtcggcacctggtggctggaagccaccctgctttagatcactcgggtccccaccttagaagggtccccgccttagatcaatcacgtggacactaaggcacgttttagagtctcttgtcttaatgattatgtccatccgtctgtccgtccatttgtgttttctgcgtcgtgtcattggatataatcctcagaaataatgcacactagcctctgacaaccatgaagcaaaaatccgttacatgtgggtctgaacttgtagactcggtcacagtatc

SEQ ID NO: 51243 - DNA, 452 bp, Homo Sapiens
  misc_feature (418)..(437): n is a, c, g, or t
  misc_feature (439)..(439): n is a, c, g, or t
  misc_feature (443)..(443): n is a, c, g, or t
  misc_feature (445)..(446): n is a, c, g, or t
ggggggcttttgggcaacctctccgtgtactgcgtctgtccacactcgattgggccccaggtgtgtatgaggcgctctggtaaggtgctcaggccagttgcaatgtctgtcagtaacgaggcttttgatgtgttgagctggaggtgagtggaccgggggctgtgttttaagctgcttccttggcatttggcatcactgccttctgttcccgggggagcatggatcttttgtcctcactgctttctaatggggagggctgagggctccctgtccccacagcaggtatgttgggctctgccccagccccacacttgctctgaaaaccaagtgtcagagccccttccccttgtttttattttactgttataataattattaacttccttgtaatagaaataaagtttgtacttggagtacnnnnnnnnnnnnnnnnnnnnanaaananncttgtc

SEQ ID NO: 51244 - DNA, 636 bp, Homo Sapiens
gctatggaggagaccgaggtggaggctatggtggagaccgaggaggctatggaggagatcgaggaggttacggaggagatcgaggaggttatggaggagatcgaggaggctatggaggagacagaagccgggggggctatggaggagaccgtggtggtggcagtggctacggtggagaccgaagtggaggctatggaggagacaggagtggtggcggctatggaggagaccgaggtgggggctacggaggagaccgaggtggctatggaggcaaaatgggaggaagaaacgactacagaaatgatcagcgcaaccgaccatactgatgactgttttgaatgttcctttgtctctgacatgatccatagtgaaattgccagagttttgcctgctgctttcctcgtggcctcttcttgggtagtgaaattaagtgacatttggatttttatttgggtgggagggctgggacagtttttcttctagaaatgtctgttgagatttccccctttagtttccaaccttctccccaacccttggagctaaatgcgttgtaaaatattgccaaaatgaaaagtgttttgtaatactgcaataaaggctgcttgtttttgtggaaaaaaaaaaaaaaaaaaaaaa

SEQ ID NO: 51245 - DNA, 396 bp, Homo Sapiens
cgtcggagccgagccggactggtcaggatgatcacggacgtgcagctcgccatcttcgccaacatgctgggcgtgtcgctcttcttgcttgtcgttctctatcactacgtggccgtcaacaatcccaagaagcaggaatgaaagtggcgctttctccgccccagggttccaggacatagtctgaggcaagatggagggtatgaggggccttcacacttcacttcatcccttctacccatcacaacatacaaagcaactacacctggatttttccaaacaacttttatttcctcagagtcttccttaatcctatggaacaagaagctgccactgaatagggcccagtataggggcttgcttttctactccctccccccaatataaaaatatagactt

SEQ ID NO: 51246 - DNA, 700 bp, Homo Sapiens
  misc_feature (646)..(646): n is a, c, g, or t
ttttttttttttttttttgacattttgtttcattggtgtgctgtatattttccatgccctcactcctttaagaaaaaaaaaaaggaaaaaagcaacacaatcctgtccttgctgttgtgattatagtcttggtttacctgtggtgacaaccgggtgttggggacacatgtcaaatgcccctctgagatgggccctaaattccagtaactggggaaagaaccagctgctgtgtcctgagagcctggccctgtgctgtggtctctgctgcaagcccagatttctgggagtaactagtgttaggtctgctgacctttacctaagcagcccctgcctggtaagaaggtgcccattgttcagaggcaaagagaagcctgcggttggcatgaggatgcctgacaacaaaggctggagaagggccctgagttccagcctctccccaagggtccccgccccagtggctgcctctgtcttgacctgtgtaatgaattagtgtgctgtgtcactgtggcttgaagtcactgtggatcgagctcacagggggcacccatcctgttgtcaacagagtctgaagcagtcagggtgttggattcctctgttgttgtcatcaattcctgctgaggggtttctggggttttgtttttaatanatgactccttttgtaaaaaaaaaaaaaaaaaaaaaaccctcgtgcgaattcttg

SEQ ID NO: 51247 - DNA, 721 bp, Homo Sapiens
cttttttctttcctattttgaggtggattggtcttctctttttttgggtttccagctcactgggactctcagaccttacctttccagctcaaacaccattagttaaattccttcattctcattagaatgcagcctgctgagtatgtgggtttcactgccggagtccatcatttagccagtatacatagaggaactgcttcgaatcaaggcaactggtgaagggcttagcatgttggcagcaatatcccagagattgaatctgtttgcattttcctcatctagcataacagctgcttgaagccagggctcttagccctttgcattccccttgagcgaggaagccacactgcctttctgtgtctggttcagagctcttccttcttggcatgttttctggactacatgcacatgggcagctatagattaatctgcaaaacctagtcacttacctacccataatatctgggaaggtgtggtatttgttttaaagaaacattgtttctttgggagggcagtttctgtctggactttgaggtggacttagttatccctacagttctttaactctcagcttttaataaaagatgaaatcagatattgatgcagttgggtcacaattctttagaatgcttctaccccagggccgcttcctgttcctagtcatggttttccagtttagtagtggagtttcttgaggctaacttacagaatttctaactga

SEQ ID NO: 51248 - DNA, 548 bp, Homo Sapiens
ggtgctagacaactatgagcccagctgggattggtgtagggagggccgaacgctgactagtgtggcctcactgccccaggcttcctttcagaggaaggcctgtcctgctggaactggagccaaggggaggctgcctatgaaggcagaagatgtggatgaattcaggcactgggggtgggggggttatttataaacacaaggtggttggtttaagccaaaaggagataccatcctgataagctctgtgaaagagaagatgtgcctggtgtgtgtaatgcggctggggtatgaaaacactgagaaggagatgaaggagtgtgtgtagcatgggggtgtgtacaacttaacacctggacttttactgggggagtgggaaagtgattctgtaaccaacattagaattactttggatttgtaatcagattggttctatgatttgtctttgactattcacagataattgtaaatgctggttttataagcccaagtcattttacatttgcttttccaaaatgtattaaattggaattttttaatcctttatatac

SEQ ID NO: 51249 - DNA, 557 bp, Homo Sapiens
  misc_feature (476)..(476): n is a, c, g, or t
  misc_feature (498)..(498): n is a, c, g, or t
tgcatgccatctccaccctgagcctgacctttctgagtgacatgggtgtgccaggctagactaggaggttccggtgtctggaaaagcactttacagatgagattccctctcctcccccaccttcaagcaccctgttccctctttctttcttttgtgttggatttgtttaaaaaccaaataagcatctgtgtaacctccacagtagcatttcttatttgtttggtcactgctacaccttagcagctcttcccctttcctgggggatgtgcacggcagcttgagcctgtcacgtggtcaaggcccggccccatcagaggctgggggaggcggcacattggcagtgtgtcacactgagctgggcaccacaggctgcctcatgaccctcctgtccagcaggtagtgggtgaatgtgtgaaggtcttgcctgaatccatcaggacttgggaaacagagaaccctgtgggggcggctgtggnggaggtccctgccagtgtttanaagagcctgactgtgttcagtgccttggagcagaaagcagggtcctgagtggctgaaat

SEQ ID NO: 51250 - DNA, 606 bp, Homo Sapiens
cacgcgtccggggaaactgtagcttgctccttcccaccctctctgagcatctttgggatcttgttgctcaaaactcttctgtgacttcatcttccccaccatttgtgcccatctcaagcctcagcaagaaaccatgtggaacatgaagcttaatgacttgacagtgtactagtgttaaactctcatacctctgttacaaagcgagaaacgccacacccggactggccttttcttcccccttcacggccctcgcttctccctgcaggagctcgggggcgaaacctgtgtatggatttcagtgtatgacttcagatcatgctccaacttgccaggtgtgagctaatgttgtcggacaccttactataagcaaatgttattcagtgcgttcaatgtatattgacttccatactggtttttccaaaaaccaaaggtagctttgaaaaaccatgtctggaaatgtttggagcgttaagctgattgaccttctgaccttggggctttgagtagtatataattcataactgcgttaattgtattgttaaagtgtttgggagttttttgcgcttgttatgtggaaataaagtgtttgatttaaaaaaaaaaaaa

SEQ ID NO: 51251 - DNA, 962 bp, Homo Sapiens
  misc_feature (15)..(15): n is a, c, g, or t
gggtccggaattccncgggataaaaaaaaaaaaggaggtgaatttttttttaagttttgaacactgtcctactttatttattagaatctaaggctgttacaatcaagtcgttgcagggtttggatcagctgtaagttaggtatgcctaccaaacatccaaaggtagacgtggagacattttaatactacaaaactaggaaaatcagaactcatggccatttcctgccctcctccaacttgttaaaacatgtttattctaaagttcgaatggataaatttgagtataaaggttttgttataaaactgttctttagtgtaaggctgcattgtgggtttgggggaaatgtaaataattttctgtgtaaaacaaattcataggatctgatttgctcagagtattattcaagaatgtattaataaggcattgccccctgtttgcactcagggttaatatgtcaaatgaaatttaagaaggaaatggaagaattcaggtacattaattgcatattattttgggaaagatgagtcctatacgtggcaatttttcaatgtcatctgaagccagcattatcttccaaagaaatcgatcttttttttctaaaaaaaaaaaatgcttttgccttcccttcccttcccatccgccatatttcttcagcctttcttctcgatcacccgtgtattctttgaccagtaaatgaccacacctcaatgatggtaaaaacagcatcatcagtaagctatcttatatgcctcatcctgtgagtttgagcttcaggaaacatgagtaaaagtatatgtaatgtatatagtcgtatatgtattctagcaagaaaaacatatttattttgacaaagggggacactgactttctgaaggattcaaaaagaactttagtgaagggtctcaatctctgaaaatggacccctattaacataaggaccttcctcaccggataactacgg

SEQ ID NO: 51252 - DNA, 619 bp, Homo Sapiens
ctatcctccaggattgaacattttccaattatctggtcttttcctgttgtgcaaaaatgactcattgctccgaatgtcaaaaacaaatgcgacaaacaatggcacttcatcatttaaagtaatgttgccaagagaaaaaatttcctgggagggaggtttcccacaagccaaatctcctaagcctcaaatgctagcactttttggcagttggataggaaatgagacattctttggcagccaaaataagagaggccgatggtgaaactttttgagacaccctatggccttcttgtcaaaaccttcactggagctcaagaaaagcatttctgttgtgttatttgcagtgcagatgatgtctgtgtaacaacataatggttattcacctttttttgattttgatttttgctgtgttatcaaaaacttgaatactgtgagaagaagtgaattttcagttgacgaatcagcatcttgttcccatggtgataacactaattgaatatatctatgagggcatgtattagttaatggaaaaaaaaatacaacactaacaatacatagctgcaatgtgtacaatggctgatttaattaaataaaatgtacaagtgttaaatgtgaaaaa

SEQ ID NO: 51253 - DNA, 638 bp, Homo Sapiens
ttttttttttttttttttgacctgaatcgggagccacacttggccctcttcctctccaaagcgccagaacctccttctctttggagaatggggaggcctcttggagacacagagggtttcaccttggatgacctctagagaaattgcccaagaagcccaccttctggtcccaacctgcagaccccacagcagtcagttggtcaggccctgctgtagaaggtcacttggctccattgcctgcttccaaccaatgggcaggagagaaggcctttatttctcgcccacccattcctcctgtaccagcacctccgttttcagtcagtgttgtccagcaacggtaccgtttacacagtcacctcagacacaccatttcacctcccttgccaagctgttagccttagagtgattgcagtgaacactgtttacacaccgtgaatccattcccatcagtccattccagttggcaccagcctgaaccatttggtacctggtgttaactggagtcctgtttacaaggtggagtcggggcttgctgacttctcttcatttgaggtcacatttttcccccgtggggaaataaactgactttggactgcttcaaaaaaaaaaaaaaaaaaaaataggtgcggcctcgtgcc

SEQ ID NO: 51254 - DNA, 551 bp, Homo Sapiens
attttgactccatataaatcaagaaacacctaaattctttagttgtttgtgtttgcaagatctaaggtcatggtaaacattaagttcttaaaatttttgggagggacagtgcacctctcctctgaattgttagcaattaaattgagtaggttttaaatgtctattcattggaagggtttgttatttcattttgagccagaggggagaggcacattttaaatatcagaattagattagctttgagtttgtacaattgggaacataatagattttcataaattatgtgtgccttgttggaagtgtcaactgtctttatgtctgcttgtaaaagtttcaaaatatgttttccctcaaaaaggcaacgttacttcatttgcttgaatattatgataggaatgcttactgatattacttgatagtcatatatagcctaggaaatttaacatatatataactatagcagtattaataatgatagttgtacttctttaaaacattaaatttgaggaaactttaatgtctgtctcgtgtacattgctttactacagtga

SEQ ID NO: 51255 - DNA, 875 bp, Homo Sapiens
  misc_feature (785)..(785): n is a, c, g, or t
  misc_feature (787)..(825): n is a, c, g, or t
  misc_feature (835)..(835): n is a, c, g, or t
  misc_feature (840)..(840): n is a, c, g, or t
tcgtcgaccacgcgtccgggacttcatgcaagttggcagtggttctggtactaaaaattgtggttgttttttctgtttacgtaacctgcttagtattgacactctctaccaagagggtcttcctaagaagagtgctgtcattatttcctcttatcaacaacttgtgacatgagattttttaagggctttatgtgaactatgatattgtaatttttctaagcatattcaaaagggtgacaaaattacgtttatgtactaaatctaatcaggaaagtaaggcaggaaaagttgatggtattcattaggttttaactgaatggagcagttccttatataataacaattgtatagtagggataaaacactaacaatgtgtattcattttaaattgttctgtatttttaaattgccaagaaaaacaactttgtaaatttggagatattttccaacagcttttcgtcttcagtgtcttaatgtggaagttaacccttaccaaaaaaggaagttggcaaaaacagccttctagcacacttttttaaatgaataatggtagcctaaacttaatatttttataaagtattgtaatattgttttgtggataattgaaataaaaagttctcattgaatgcacctattaatcgttttagttgctattcatattctcattcgttttttaaaaatgatatattcctgatttattcttccattgagaaaaaatgttcagttacttgtaactactgagcagaattaatcaatccctttataaattcagaacattattgaanannnnnnnnnnnnnnnnnnnnnnnnnnnnnnnnnnnnnnngggcgggccnccccnagagaaccgcccgagggggcgcgagcgagcgcggc

SEQ ID NO: 51256 - DNA, 603 bp, Homo Sapiens
cactcaagtgctcagcatttataatgagcagttggtaatgagttgccctatgtgcttgtcgcaagcagtcacagagatgagccctattacttgatattcaggaacaaaggtacctgaacattctgataattatctcagcatacttgaggtttccttttttaagtgttcgaggttataacaagagacagccaaggacctacaagacagttgacttgattttgcacagtgtaacagcgcagttgcattctggccactttgaccttatagctcccaaatgatgagtttgtcatctttatgaactcatgacaggataataagcttgaagacctgctgtagttagatatgggctttaatccttcccaggcaccagtcagctgaacaaaagcataagccaaacatcctgtttaaactgtagaataaccagatattcccatcaggttaaagacttcatctagatgatgccccccagagatgcctttagtgtaagtagctggcttggggtatcagcaaatttcaggtatagttagataaacaggtacagggcctgcatactattaaaccatagtttgtggcacccgcttttctaactccaactgttagaag

SEQ ID NO: 51257 - DNA, 580 bp, Homo Sapiens
ggtgaaggtgacccgccggggccggcggcctgtgctcccccggactgaggcagccagcttgcgggtgctggagagggagagacggaagcgcagccgaaaagagctgctcaacttctacgcctggcagcatcgagagagcaagatggagcatctagcgcagctgcgcaagaagttcgaggaggacaagcagaggatcgagctgctgcgggcccagcgcaaattccgaccgtactgagctgtgagagccgcagtgaatggctggaggtgcagggccaggaggaggcgaggcagggcctgcagcggtctctgagaggccgagctctggccaacgggccccaggttgaaggccaccgcgtccaacagccccatcagagtccacacaggccaggagggaaggaccaggccacccctcgggtcttgtgcttcagcagtcctggggacccaggcgtgccgagaggaggacttgtccttcctgcttcttgcctccacaccctcctctccaggaccctggatgaatccgttctgtgcttccttttccctcaatgcaaaagcccttgctggcaacgaaaaagcctcaaaa

SEQ ID NO: 51258 - DNA, 833 bp, Homo Sapiens
  misc_feature (713)..(713): n is a, c, g, or t
agatcttaagaaaatggacaaaacccctcttcaatctgaagattagtatggtttggtgttctaacagtatcccctagaagttggatgtctaaaactcaagtaaatggaagtgggaggcaatttagataagtgtaaagccttgtaactgaagatgattttttttagaaagtgtatagaaactattttaatgccaagatagttacagtgctgtggggtttaaagactttgttgacatcaagaaaagactaaatctataattaattgggccaacttttaaaatgaagatgctttttaaaactaatgaactaagatgtataaatcttagtttttttgtattttaaagataggcatatggcatattgattaacgagtcaaatttcctaactttgctgtgcaaaggttgagagctattgctgattagttaccacagttctgatgatcgtcccatcacagtgttgttaatgtttgctgtatttattaattttcttaaagtgaaatctgaaaaatgaaatttgtgtgtcctgtgtacccgaggggtaatgattaaatgataaagataagaaaagcgcccatgtaacacaaactgccattcaacaggtatttcccttactacctaaggaattgtaccattgctcagaattgtaggatttactatgttgaaactacaggagagccgggcgcatggtcaccctgtatccagcctttggaggcangcggcaatcacagtcagaatgaacatctgctactgtgaaccgctcataaatcaaaatacactgtgctgcctgatcatatcgagtagcgaatgtgacgaggatcagacatgctgccacgga

SEQ ID NO: 51259 - DNA, 928 bp, Homo Sapiens
ctggaccggtccggaattctccggatcccaagcccacctcccgccctcagtcctgcggtgtgcgtctgggcacgtcctgcacacacaatgcaagtcctggcctccgcgcccgcccgcccacgcgagccgtacccgccgccaactctgttatttatggtgtgaccccctggaggtgccctcggcccaccggggctatttattgtttaatttatttgttgaggttatttcctctgagcagtctgcctctcccaagccccaggggacagtggggaggcaggggagggggtggctgtggtccagggaccccaggccctgattcctgtgcctggcgtctgtcccggccccgcctgtcagaagatgaacatgtatagtggctaacttaaggggagtgggtgaccctgacacttccaggcactgtgcccagggtttgggttttaaattattgactttgtacagtctgcttgtgggctctgaaagctggggtggggccagagcctgagcgtttaattttattcagtacctgtgtttgtgtgaatgcggtgtgtgcaggcatcgcaaatgggggttctttccgttcaaaagtgagatgtccggagatcctatttttttatacaggtatttcaatttaaatgtttttttaccttttggaaaaaacaattttaacatctacatctatctaagaattttttggggccggccgctctaaaaattattccttcaaaggggccccataatttaccccattccccagtttttctttttaaaaagaaggggcccctcataagaggcgtaccctccatttaaaacccacatttattaattgtccccccctttttttttttcatccaccactaggaatgtctgcagagtaaacagaccatattcttcatctttgtgggctatactacatctctttactcataaccac

SEQ ID NO: 51260 - DNA, 622 bp, Homo Sapiens
cttttccctttatgcatttaaagcctggaggaactagaccattagctgttgctgtcacatgcttagacaccagtttacttagcgtgttatgaccttcctcacccatactaccaaatttaaatgggtcccgacttcaccctctggaaggaagtaaactcttctctccccatggcttcagagcagtttttacctgcaagcaccatctctgtatgtgctcttactagattatacagttcttgagagggattgcatcttggtgtttttgtatttccacctcacccccagcacatagcccagtctcttgcacaaattaagtacttaatgtgtgttgagctaaattgaataaaggattattagcattagcatattttgtgccttggttgtataagctggttgtttgttttgttacctttgcaaatatttatgattatcacccccccacatactaaattgtttttaaaagttttgcctttccttcagatactaccccaggcaatttgctgtagataatgtgattgcttccaatgacataattatcccaaactctctgccccggatatactttgccaaacgaaatttgaattctctgaataaattggtcatgtctaaaaaaaaaaaaaaa

SEQ ID NO: 51261 - DNA, 548 bp, Homo Sapiens
attttttaaaaagttttgataactcttaaagcatcatttgcacctatgtgggaactttgcctgttgcaaagtattgtggccgagctgcagctgggagcctgctttctgccagtcttgaggttctgaagatcagctttgaaaggaaagtatgtcctagcttagccattcagaagagaaaaatggaatatcagagttacagttgtcagtgaaactactttggattttaacctcttagaggaagaaaaaaggttagggaagtgtcaactctggatgaaggtgatgtgtttgcctctcagtctttcattcatagcctgctagtgaaaaggaagtaaatgagattcttttgtgtgactttgctgtctctttgtattaccaaatagttggggtgttgactcctgtgtgttttgcaagaatgtgtggtaagcctgggtaaagagaaggaactgcggtgttgggagagtctttgtgttggggagtggcaggggatgatttgtttcaggggaacatgcccacattttaacttttaaacttctgaataaactgtgtaa

SEQ ID NO: 51262 - DNA, 526 bp, Homo Sapiens
ttattgccttacctgaatcagtcctttttggttggtaatagatttttttatacacccacgtttgatttaaaagtaaattctagttcttaagcacttttaacaagaaatccagaagcacatttttctgcacaaacaagttacaaagttcaaaagtgtttcttgtgcattagctttgagattcagtttttaactttgtaaaccacatctgagagacttgtcatttctacattgtgtgtgtttaatttcttttgattccattttggttaagagagcagtaaatagattttctggtattcttgttcacttgattacatttgtataaagttctgattgccagttgctcagataacaagtgacaaggcagaattctttaaatcagtaaagttccttaagcctaaggctaaatcttgaatacattgttgaattctttaatatcctgatggcaagcagactgatagctgcacatttggcatgctttgtttaatggattttatttttaattgcagatttatttggcaatgtacag

SEQ ID NO: 51263 - DNA, 780 bp, Homo Sapiens
cgcgtccgcatggatgagagccgcgttagtgcctgggaggaggtccagcagaggcttttgaatgtctgcagtgaagcactaagttacttcctcactctaacatcagaaagtcatcgagaagcctggactaacttactgcttttgtttctaactaaagttctaaagataagtgataataggtttaaagctcatgcatcattctactaccctctcttatgtgaaattatgcaatttgacttgattcctgaacttcgtgctgttcttagaagattttttctgcgaatcggagtagtttttcagatatcacaaccacctgaacaggaacttggaataaacaagcaatgatgggaacttaatatttttgttggcatttacatccctctgctctttaaaaggacgctggagctgaggtttcctacctgaaaaatgatttctctggattgcagtgtctgagttactggtaaagatgcttagaagtcttactcaaacttgcaacactccagtcccttttagtgctggtggattttgtgtgttatattggcctcatgttgagcagaaagcctgtttaaacagtgtcagctcatgctcacgggtccttccctgtcttccacggcaggaaaagccccacgtttttggcaggtgtggaagtgaaacttacccaaagaactatagatgtaaagattgaacttctacaagaagtacaactcaggagagctgtattttgaaggataaaatgtttataattggggagtggggagagaagaaaaaattattgttcat

SEQ ID NO: 51264 - DNA, 752 bp, Homo Sapiens
tgacttttaatgagtagtgtcttctttatcgtttgcgatttttactaccttttttcaaaagaaaaattgatgagttttgtatagctggtcagatacaaataatagtgacttcacagtttagtaattataatgggtacttgttaaacatttggtactaaattatgttgctgcaaagtaattaaaattagtatctagagctagtttctggtgaattattcatttattttgtactgttgttaggcagctctgtagttgctaatttaaccaataagtcaatttgctattcatgaagaaacgattctgagaatcctgtcaggaattggggaatgaaaaaatacacaaaataatggtctttgtcccagtagagttcatagtctatttagtgtgcatgtttttccttaatgatgtatttgatctgacttttttccttctcaaaagaatcatacttgggattacaggtacatttgatgttatatgatggataagtgaaaagtttttaaaggagattttataccttttcacattaaaaaaggtatttatattattactttgtagtgattgtcttaagaaaaaatatagcccaaatgtatagtaaaatcagcagctcaagaagaatttctgcttctctttgtagttgatgctttgttttttcctgcagtcagaaattccttggatttgtcaaatgtataatcagcttgtattgtttttaaataaaaaaaaattttgaataataaaaaaaaaaaaaaagggcg

SEQ ID NO: 51265 - DNA, 722 bp, Homo Sapiens
ttaaaaatcatggtgatgtatttattagaatgtttcttataaatctgtttactttttatattaagaattaaactgtacctaaaaaaactctgactattcccatttgtcagtttagcattacattgtcttgagcaccagaaaataaaatccatatattaataaaaacctatcttgaaaaactagtggagtgtatttacgtggcaaaagagattttgggaggagtcctcagccaaattctaccagaatcaccttaataaaagaagtattaaaatcaagcacagcaggttggaatatggggaatttgacagtatatttcttcaagtctgagtttactttcttcctgatcatgaccatctgaccttgttatttctgggcttggctcaagaccaaggagagtggatgttgatgaacattcctttaaataaaagtgcttaggttgtagttatggctttgtctagaatggtgatgtcaactgtgagtgtaggtctgtgatatagaaagaattcaactttccagatctagaaagatgctaccttgcatagatttgctccttaaacataaattgcaaaaataaaaatatcacagagaacacctgtactttgcttactgaaagatttgctcactaaagaaggaaagttgccatttacctgtttaacaaatctgcacatcctgcacatgttccccagaatgtaaaataaaaaaagtttaaataaaaaaaaaaa

SEQ ID NO: 51266 - DNA, 663 bp, Homo Sapiens
  misc_feature (602)..(602): n is a, c, g, or t
  misc_feature (611)..(611): n is a, c, g, or t
  misc_feature (618)..(620): n is a, c, g, or t
  misc_feature (622)..(622): n is a, c, g, or t
  misc_feature (626)..(626): n is a, c, g, or t
  misc_feature (630)..(630): n is a, c, g, or t
  misc_feature (632)..(642): n is a, c, g, or t
  misc_feature (645)..(645): n is a, c, g, or t
gaagccattctcctctagggactcttcagtctcatttagatgatagtccctttttttctacctccatattagagatggagctccttccttttcctgtttcttaatttttgtcttctcattcctgcttccctctcaccctattgccagttccaccaactagagtgaaagacttcctagccatttcattaaatctattctgtatccaccaggtggcagcatcttgtcatacgtgtcaggacttaggactgcggggtttaggttagatgtcacggaaaaagctagttctgtggtcaggcggcaccaatgagaaaggaatgcagaccctccagatgtatccttgggaaaagcagtaaaccaactaatatttattgaagacctactttgtcctctacatagggtagcttctgtcagggaatcttggttcttcccaagaaacactgattttctttcagggagacttcatgtgttcatttatttccaccacagcagattttaagaaattataatatgtaatatttgatatctataaagagtatatctaacgtgaataaattatgaagcatactaatgagtacctatgacccataacacatatacattanaacattttnaataccnnnanaaanaaanannnnnnnnnnnaanaaaaaaaaaaaaaaaagg

SEQ ID NO: 51267 - DNA, 683 bp, Homo Sapiens
  misc_feature (530)..(531): n is a, c, g, or t
  misc_feature (567)..(567): n is a, c, g, or t
  misc_feature (612)..(613): n is a, c, g, or t
tttctcagtatagacattttgtttactgtatgcttgcatatttattttcaactttgcctgtctttaaaattgcttgaggaaaaatggttgtaattaatttctgctacagaaaagccacctggtacgttttgtctcatcaggattgttttaaattctaaactataagtttgttcagaggggcttttgcaatgatagcagaaaactgtacaaatgtacagttagttatagaggttcttgttgaaatgaacttaccatctgatgatatgtatgtacagctgtgtacttgagtcttttttagtttacttagaaagactagcagtttgacctgttaaacaggactagttcaagtcaagaaactaaggttgttgtatacacctggaggcatctgttattcagcttatccttagagtgggtatttggcacaatgaggataaacttatgtgacccacttgaatggctgatctaataatgttgacattatgcattctgtacttagtgaaatgtcacatgaaaataactgatgaataatnnttttgtattaaagggatgggaaaagacacatgaatntgttataaagcacttgatctgcaaaaaaaaaaaaaaaactcagannggcccggaccaattcgcctaataggagtcgatacaaataactgcccgcgtttacaacgctggatgggaaa

SEQ ID NO: 51268 - DNA, 492 bp, Homo Sapiens
cgcgtccggcgagactgtctcaaaaaaagaaaaaagtgactgaggaggaagaggccaggtggcaaatggaacagaatcaccaaagggtgaacaggactaaggcaatgtagtgtatggctcagctacgtcagagtggaaaaggtgttattagagcagaaactatggtccctgcgtcacagggaagcaacctacagagaagcagcagctccccaagagaggagagataagaagccagaagcctcagagtgaacaattgtcctattagggattgctctagagagagaaacctctgggaacgtacccctgtgaggcagcacagcacaatgcttttagaattgtatgagagttgatatatctccatttgttttgcaaaggcaaaaactaagatacagagagattatctgttaaagttatgtatttctttggtaataaagatgctgacagtgttgctggaatgcatttctttaataaagatattgtacaatgaaaaaa

SEQ ID NO: 51269 - DNA, 649 bp, Homo Sapiens
ccggcagcctagctacttaaggtggggatttccatagttccaaagaagatttagcagattagagtgagttcacacttttcaggtgccactgtaaggttctctcagcctgggaaactatcaactctttctttaaaaagaaagagggttgaaaatcctctggacgaacagaagtcactttggctgttcagtaaggccaatgttaacaacacgtttagaggaggaaaagttcaacctcaagttaaatggtttgacttattcttcgtatcattagaagaaccccagagatagcattcctctattttattttactttcttttggattgcactgattgtttttgtgggaatgacactttatctggcaaagtaactgagagtttggtaaaagaatattttcttctctgaataataattattttcacagtgaaaatttcagtattttatcactaatgtatgagcaatgatctatatcaatttcaaggcacgtgaaaaaaattttttagtatgtgcaatttaatatagaaagatttctgcctgtttggacaataggttttgggtagtacagattaggataagtaagcttatatatgcacagagattattgtattacctgtaaattgatttacaagtacttaaaagcgtggtccccagt

SEQ ID NO: 51270 - DNA, 1071 bp, Homo Sapiens
tctcaggcatttgtatgacctctttggaggttccctgctgggtagttatccttgtatctgatggacccatctcaatttaaaatactctgccaggttcggaggttcatgcttgtcatcccagcactttgggaggctcagaggtgccattggcttgagcccaagagtttgagaccagcctgggcaacctggtgaaacctcttctccattaaaaatacaaaaaattagccaggcatggtggtatgtgcctgtagtcccagctactcagggagctgaggtggaaggattgcttgagcctgggaggtcaaggctgcagtgaaccttgattgtgccactgcactccagcctggatgacaaagaccctgtctcaagaaaagtctgtaattctttcctaacccttagtatccagcctcagtcctgaggttttctttacctctgggggctattttatgccggctctctcctgagtgtcacacatctggtcctcaggaaacattctcacatccctggcctgaaaaaaacaatttcagggagatcgcatggcagcagccctctctgggctccccagctaaatggttgtacgaaacacatttcaaagctctctgaagggcttccttgaagttcctttcactgggtttcaaagtagaaggtagtaactcctttgtccaagaaggctgaattgagcacttaacaattctccaaagaaatttcttcattggtctctatcctagaccccttctgtatccttgatatggctgaggattctaaaaaatgaccagtcttacatgggagggctgggatataaaaaataaaataataaataatgataaaaactgaaaactgaccacgttcttggatatgttttctttgggktgtgtgtgtgtgtgagacttttgatagttacccaaagtaggraaaatcccattytawtaaggttatatttatgtrgyctgsmaataaacatctcagcaawgtaaaaakattttctttgscttaaaaawgattaacatwtttgvrcyccsgrgggtgttwwwggataaawtaakwartttttgggggaagttttttttwaaa

SEQ ID NO: 51271 - DNA, 584 bp, Homo Sapiens
catcattacccagctgcagcacatgccaagcagggaactggcatccatgaaccttgatatagttgacctgcttaaaaaggccaagtttcaccactctgattgcctttcaacctggctacttcatttcattgctactaactacctcatcttcagtcaaaagcctgaatttcaggatctttcagtggaagaacgcagttttgttgaaaagcacagatggccgtcgaatatgtacttgaagcagcttgcggaatacaggaagtatattcactcccggaaatgtcgttgcttagtaatgtaacctggagcttttatacactacatttcttttttattattatgaagaatgggatacctccaggttccagtaaaattcttctgaccgaaaccaatgtgggtgttagaaaaattaccatatagcttaatatgtttattagttctctttggaaaaaaactaccactgtggtcttaaaagggaacaaaatataccataggctaaaactaaggctttcactctagaatgcaaagctgttttgcagctgttttcccttaaagatgtcctgttgctttagtgatatttagacccc

SEQ ID NO: 51272 - DNA, 697 bp, Homo Sapiens
gtgactcagaaaacgaagatgttgggaagcatcccgccagtgattctgagattgaggagctccagaagagtcctgctagtgactctgaaacagaagatgctctaaaacctcaaatcagtgactctgagagtgaggaacccccaaggcaccaagccagtgactccgaaaatgaggagcctcccaaacctcgaatgagtgattctgaaagtgaggagcttcctaaacctcaggtcagtgattcagaaagtgaggaacccccaaggcaccaggccagtgactctgaaaatgaggagcttcccaaacctcgtatcagtgactcagaaagtgaggaccctccgaggcaccaggccagtgactcagaaaatgaagagcttcccaaaccccgaatcagtgattcggaaagtgaggatcccccaaggaaccaggccagtgattcggaaaatgaggagctacccaaaccccgagtcagtgactctgagagtgaggggcctcagaaggggcctgccagtgactcagaaactgaggatgcgtccagacacaaacagaagccagagtcagatgatgacagcgacagggagaataagggagaggatacagaaatgcagaatgactccttccattcagacagccatatggacagaaaaaagtttcacagttctgatagtgaggaggaagaacacaaaaaaagaaacaaaaa

SEQ ID NO: 51273 - DNA, 867 bp, Homo Sapiens
catttgatagaaagatgagatcggagacaatgttgtgttatagggcacacattgaaggtatatgccaaatctctcaccagataagtccttttctccctgtgccgttttcttgctcaaagggaacagtgaattagccagctagaatcttcctggtccctttttgaggcagtagcaggtaaggaaagggctgattttcatcaaaaccaagacctttctgcagggatgatagtggaataataatgtgggattagcccgctagcattaggagcagttgggaagttacctggtagatcaagcattacacacaaaaaatcaagttgatcagagtatgggttctccatatagcaatacttcagtgagattaagtataaacagtttttggcaaaaaacaacacagtctactctttctgcttacaaagacaaagccttacaaactcactatgaaggtaaagggaggacgacagcttgcttctttgcccagacatttacaaagttgtttttaaaacacactcataagtaagtttggcaagttgtttaaaaaatgtctctttgttttgtacagttctgttagatgttgttatattttaaaagtttaatttaaaaaatttaatttgtccttcctaagaaggataaatatataaaaaagccactggaatgaaaacttcctatatgctatgctgttgtcttattattatatagaaaaataactttagaaaaatattgaagacattgtattaccacttgtgattcaaacaattttgtggttaaaactggatttttaattttaaaaatccataaaaatttccaatggttaaaaaaaaaaaaaaggggcggccgctcttagagaatcccctcaaggggccccac

SEQ ID NO: 51274 - DNA, 585 bp, Homo Sapiens
  misc_feature (530)..(530): n is a, c, g, or t
  misc_feature (578)..(578): n is a, c, g, or t
tgcgacagcgcatcagcgagctgggggcccgggcgtgactgtgccccctcccaccctgcgggccagggtcctgtcgccaccacttccagagccagaaagggtgccagttgggctcgcactgcccacatgggacctggccccaggctgtcaccctccaccgagccacgcagtgcctggagttgactgactgagcaggctgtggggtggagcactggactccggggccccactggctggaggaagtggggtctggcctgttgatgtttacatggcgccctgcctcctggaggaccagattgctctgccccaccttgccagggcagggtctgggctgggcacctgacttggctggggaggaccagggccctgggcagggcagggcagcctgtcacccgtgtgaagatgaaggggctcttcatctgcctgcgctctcgtcggtttttttaggattattgaaagagtctgggacccttgttggggagtgggtggcaggtgggggtgggctgctggccatgaatctctgcctctcncaggctgtccccctcctcccagggcctcctgggggacctttgtattangccaatt

SEQ ID NO: 51275 - DNA, 581 bp, Homo Sapiens
ttaggggtaggcagcttgcacccagttctcctttatctcaacttattttcctggggagaggtgcctagagggattgaggtaacttcaactgggaattccaaggaaggtgggcaagtagccttggctctctcccaccatgtccatcaggattgagagtgtgtctagctcccgaccactttgtcttgacctactgaaaagttgggaactgaggggtgccttcattcccctttgttcactttctccagctcaacttgggacttgggtggtgggactggagacctcacccctgctcccgtcccgccccctttctatcccaacctgtttccatgtagcagacccttcctagggagcagggaggggaagccacagattgcaaacccaggggctcctttttcattctttctaaaaccttgatatcctcagcccaaaggcgatgcccccctgccacctccaagcctggaattgtgcataacccggatcttgtatctttgtataacggatgttatttgtacgaagggcagttcgtaaacagcacttgttcttttaataaaagaatgttttgcaaaaaaaaaaaaaaaaaa

SEQ ID NO: 51276 - DNA, 576 bp, Homo Sapiens
gacttcctctctcggtttgtctgggtcatcttgtctgcccgccgctggcctggccccgtctgtctctctcagcagctgtctttctcgcgcccactggccggtctctcctcttccccgcagttgcctccttctctgcctgcctgggtggccgccatgggccggaagcggctcatcactgattcctacccggttgtgaagaggagggaggggcccgctgggcacagcaagggggagctggcacccgagctaggggaggagccccagccccgcgacgaggaggaagcggagctggagctgctgaggcagtttgacctggcctggcagtacgggccctgcaccgggatcacacggctgcagcgctggtgtcgggccaagcagatgggcttggagcctcccccagaggtgtggcaggtgctgaagacccaccccggagacccccgcttccagtgcagtctctggcatctctatcccctatgaggcaccacgtaagacctcctgcccttagctctcttgctcaccacccaagaacctcaggacagaagcgagagcccattgctcctgctcagctcagcccgg

SEQ ID NO: 51277 - DNA, 424 bp, Homo Sapiens
aaaaaattatatatatattctccttttaatggtggggggctactggagaggagagacagcaagtccaccctaacttgttacacagcacataccacaggttctggaattctcatcttcgaacctagagaaataggtgctataaacagggaattaagcaaaatgctggatgctatagatcttttaattgtcttaattttttttctattattaaactacaggctgtagatttcttagttctcacagaacttctatcattttaaactgacttgtatatttaaaaaaaaaatcttcagtaggatgttttgtactattgctagaccctcttctgtaatgggtaatgcgtttgattgtttgagattttctgtttttaaaaatgtagcacttgactttttgccaaggaaaaaaataaaaattattccagtgc

SEQ ID NO: 51278 - DNA, 649 bp, Homo Sapiens
aagggatggatgagaagacagacctgagaccaatctgggtagaagcaaaaagttgaaccttttaaagtgctgaacacaaatccaaattcgaatggttcaagcagccgtgaaatcgctcttcataaagtgggcttaattctctagtttaagttcttttgatggaatgaattaattaatgtgtcaggtggcttatttgtggatgccatgattgatgatgttcattttaagctcttacctatagtacaagtacatgatgctactgaatatttttccacttggaaactgtgagctggttgttgcattaaaacacacatacaaacaaaatcaaaaacactgcggactttcactcaagctggtctttcttccccagtgtaaggcaatcctgcctactaacaacaccaacaacaaaacactccatctgtgaagctgacgcagttaagggggctaggcagggcatttgtgccaactaagaatcaccagatacccaccataagtacctatcgcagttttgaagtcgtttctccccaactcccaactcctgaaggttgctgcctgcatatttactcttcattagtgctattttcctgtatgtcattgtgagcaagctgtgattaataaagaattggagttctgtgaactaaaaaaaaaa

SEQ ID NO: 51279 - DNA, 642 bp, Homo Sapiens
ttaaattacctctcaagagaccaaggtacatttacctcattgtgtatataatgtttaatatttgtcagagcattctccaggtttgcagttttatttctataaagtatgggtattatgttgctcagttactcaaatggtactgtattgtttatatttgtaccccaaataacatcgtctgtactttctgttttctgtattgtatttgtgcaggattctttaggctttatcagtgtaatctctgccttttaagatatgtacagaaaatgtccatataaatttccattgaagtcgaatgatactgagaagcctgtaaagaggagaaaaaaacataagctgtgtttccccataagtttttttaaattgtatattgtatttgtagtaatattccaaaagaatgtaaataggaaatagaagagtgatgcttatgttaagtcctaacactacagtagaagaatggaagcagtgcaaataaattacatttttcccaaaaaaaaaaaagggggggcccggtacccaattcgccctatagtgagtcgtattacaattcactggccgtcgttttacaacgtcgtgacttggaaaaccctgcggttccccaacttaatcgcctttgaacacatccccctttcgccagttggcgta

SEQ ID NO: 51280 - DNA, 553 bp, Homo Sapiens
ctcttacgtctaactgactagggaacaattgttgatatgcatagcattggaatacttgtcattatatactcttacaaataacacatgaagcaagaatgaccaatattctgataattggcactggatcacaaaatgtgataaaactttaaatgtataaaactttatcaaataaagttttattttcccctttaaaatgtatttctttagaggcattacttttttaaaaatattggtcaattcctgacataagatgtgaggttcacagttgtattccagtattcaagatagattcctgatttttcaattaggaaaagtaaaatccaaaatgttagcaaaacaaagtgcaatattaaatgtttgctttatagattatattctatggctgtttgtaatttctctttttttccttttttatttggtgctgaatatgtccttgtaggctctgttttaagaaaacaatatgtgggaaatgatttaatttttcctattgctcttccttgtggaaaataaagtgtttgtttttttctgtttgtaaaaaaaaaaacaaaaaaag

SEQ ID NO: 51281 - DNA, 497 bp, Homo Sapiens
  misc_feature (304)..(304): n is a, c, g, or t
  misc_feature (464)..(464): n is a, c, g, or t
tctcagcttaatagtgcctcatcgtactctcaaaagtgttctaatttggaggataagttatatgatcatcctgtgtataattgtagactgtaccaagaagcaactaccttagctccactgccctttgagggatggaactggggtaagggcaggagccagttattattgccacagtgttttctaatgaaccatttggcctgtagaagaggaatagtattttttttaatagttgtatttgaatgattccagcttatcgtaaatactaaactgaatggcttttatatttttaactgctgttaaatgntattttagcatttattagttgtttattatttaattcttcaaatagtcatatgaaaacatatatttgataaaggtcaattgttagatgataatgtgccattcattatcataggaatgtccttgcccatatataaaacatgctggcatgtattttacttgtnaataaagttgtatagatgtggaagtgtgaaaaa

SEQ ID NO: 51282 - DNA, 583 bp, Homo Sapiens
attttaaaaggactattgatgatagaagaataggggcaagacgacaaaagtacctttgaataaaacaatttaagaaattggtttaagatattggatgatagaagatatttaagatatctagatggtgatattttccttacaagatgggtaccagtatagtaatatctgtatactaactagggctttgtattgtcaataattttttaataattttttaatgaggtatttaccactgaagaaatatgataatataaaaccatcaaattttataattgagatgatactctggaaaaacatgtcatttcattttcagaaaactcttaagctctcttcagtctctgtaatgtttctgattgcatgtttcttcatgaaaagtatgttgttgttttgatagtaataataataaatgtaggctcagctctttcccaggattttcatcaaaaagctttaagtgcctaaccctgcttgtctctgtacatagaagcctgcacagatccaacccttgctaggtatcatagtttaggcccatttaccttcccctgtactggcagttcagccgcttacatgcactcaccctgtttgt

SEQ ID NO: 51283 - DNA, 613 bp, Homo Sapiens
tcaattagctggctggtaccggtccggaattcccgggatggctttcactccttbccctgctctkcccagccttkycctcccacccactcctccttctgcaaatgccctgaaggccagcccttkccccaacacccacttccccacctccttaggccccagatacatacatgcccacatgcacgcttacatgtttagagccatccttgtttccaaatatgacccttcgcttgagggcaactgcataggtacatctaactctggactggcatgcacattgtcatgtgcagctttgcatatacacacatgcatacatgagcctccacacaagcacttgcacacatgtggactcctaaccatgctaacctcactggctgggaaggtggggaccccatgggccagcccttgcaggaggcccttttgcaaggcttagggtgtggccagccctgaaagctacttggacacaggtttcagctggccccagcccagaagtgacccccagaaagggagggccaccgctttgccccctgcttttacccttccttctgggtgctctacacctcaggttaccaggcctgaggcatctcagccaagcttgtttcctgctctgaggctt

SEQ ID NO: 51284 - DNA, 733 bp, Homo Sapiens
ccgacgagggaaaggacggcctcctgtacacatcctgtcaagcgaccgggcagccgccggcatggtatggaaaccaaaatcctgtgaaccaattcgccgggaaggccccaagtgggacccagctcgcctgaatgaatctaccacctttgtgttgggatctcgagccaacaaagccctggggatggggggcaccagaggaagaatctacatcaagcacccacacctctttaagtatgcagctgacccccaggataagcactggctggctgagcagcatcacatgcgggcaacagggggcaagatggcctacctcctcatcgaggaggacatccgggaccttgcggccagtgatgattacagaggatgcctggatctgaagctagaggaattgaaatcctttgtcctaccctcctggatggtggagaagatgagaaagtatatggagacactacggacagagaatgagcatcgtgctgttgaagcacctccacagacctgaggccgggtcccctggccacacttggcagccctcctccaaagccctcttcctcacgtggctgaggccaccgctgggactgctcctagatggatctcagcggcattaagctgtgcctgagcgagtttgtagtgactcactgcacagcacccccagactagcatgtggttctatatttgtaaagttattgggataagaaacaattaaacagtttgtagtaaaaaaaaaaaaaaaaaa

SEQ ID NO: 51285 - DNA, 907 bp, Homo Sapiens
ccacgcgtccggaaacagcgacatcagccagtcctaccgacggatgttccaagccaagcgtccagcctcaactgctggcctccccaccaccctgggacctgctatggtcactccaggggttgcaactatccgacggaccccttccaccaagccttctgtccgccggggaaccattggagctggtcccatccccatcaagacacccgtgatccctgtcaagaccccaaccgtcccagacctcccaggggtgttgccagcccctccagatgggccagaagagcggggggagcacagccctgagtcgccatctgtgggtgagggcccccaaggtgtcaccagcatgccctcctcaatgtggagcggccaagcttccgttaaccctccacttccaggcccgaagcccagtatccctgaggagcacagacaggcaattccagaaagtgaagctgaagaccaggaacgggaacccccaagtgccactgtctccccaggccagattccagagagtgaccctgcagacctgagcccaagggatactccacaaggagaagacatgctgaacgccatccgaaggggcgtgaaactgaagaagaccacgacaaacgatcgctcagcccctcgcttttcttaggttcacaagaaatgcgccggtggggaatgaactgtttcattaataaaacctaatttgtctttgatccattccactctataataaaaccaaaagattttgtaggccactccggaatataagctctttttgaaagtactcgaacaccttttagaatagaatttaaaacccaccctatgttaacttgaataaatcttggatctttttaaatttggaaaatattggaccattttttcttttctgcccaattttaaatcctaagttttccccttttggatc

SEQ ID NO: 51286 - DNA, 588 bp, Homo Sapiens
gtggctgtggggattggaggtagcattcaaagatcagatgtgcttttcctcactttggagatgaacactctgggttttacagcattaacctgcctaaccttcatggtgagaaatacaccatctctcttctagtcatgctgtgcatgccgcttactctgttggggtctatataaatttgttgaactcttacctacattccaaagaagtttcaaggaaccataaatatatgtatacatatacatatataaaatatatatattaaaataaaattatcaggaatactgcctcagttattgaacttttttttttaagaatactttttttttaagctgagaagtatagggatgaaaaagatgttatattgtgtttgactattttccaacttgtattttcatataatttatattttttaaaagctgaaaatttagaagcaagatgaaaaaaaggaaaagcaggtgctttttaaaaatcagaactgaggtagcttagagatgtagcgatgtaagtgtcgatgtttttttaaaaaaaaatgcaaaaaaattcttatggcggagttttttgtttgtttattttagtagctgatgctgg

SEQ ID NO: 51287 - DNA, 581 bp, Homo Sapiens
  misc_feature (542)..(543): n is a, c, g, or t
  misc_feature (551)..(552): n is a, c, g, or t
  misc_feature (554)..(554): n is a, c, g, or t
  misc_feature (557)..(557): n is a, c, g, or t
  misc_feature (573)..(573): n is a, c, g, or t
taacaatctcagctactgggatgcccccctgggaagttcttatatgtgcaacaaagagcagactgtttcagtgtctggagcatttcagataaatacctttgatctaagggttcagcctttcaatgtgacacaaggaaagtattctacagctcaagactgcagtgcagatgacgacaacttccttgtgcccatagcggtgggagctgccttggcaggagtacttattctagtgttgctggcttattttattggtctcaagcaccatcatgctggatatgagcaattttagaatctgcaacctgattgattatataaaaatacatgcaaataacaagattttcttacctctcagttgttgaaacactttgcttcttaaaattgatatgttgaaactttaattcttttatcaatcccagcattttgagatcagtctttattaataaaacctgttctctttatcaaaaaaaaaaaaaaaaaggccccattttctcaatctgcagggtcgggccgtttgactagtctagaaaaaaactcccccgatnnttttcttnncnccntttgctttttgttgcnttttgtgt

SEQ ID NO: 51288 - DNA, 631 bp, Homo Sapiens
  misc_feature (607)..(607): n is a, c, g, or t
ttttccaggcagcttcatgatgtgcaggcagtagccagacagggtcatgggaagggggccctgtgcttctaaactgagtggttgctggttagtttggtattcaaaagaggataaaaatctggtagattagttcattctcagcatgtgtagctagacatgagtaaagataacagcatgagaaactgttagtacgcatacctcagttcaaacctttagggaatgattaaaatttaaaaaaaaaacatttcactcagttgcacttagtcgtatgtcttgcatgcttagtctaaagactgtagcaaaaaaaaaaaaaaaagaaaaattagattttacatatctttgcaggtatcacagccttgcagaagaaccaactgaaaaaaaaattctcaggctttacagcaagcaaacttcactatgatttttacaattctgattctgtatcccctgggggttatcccagttgcttctttaggatggggtttattacgttgtacatatatcccgatgtgtctgtgtgaatctttgtcttttttgggggagggcagagggcggttctttttttagatattgttcctaaaaaggaataaatgcatacacctgtttgtcnaaacaaaaaaaaaaaaaaagggcg

SEQ ID NO: 51289 - DNA, 491 bp, Homo Sapiens
agagggtcagaactggacagctgcagagacctgtgcccagagaagggtctcgacccactcaaggacacacagcaggtccgtggatgggctggatgagtgaccagggccagcctctgtctcaggacattccagaaggacaaggagatgtctctccctctcccaaagcaccagcgtccctgcctcccgtgggccctgtccgggttgccctggtgaccccagcctctgtccacttcctaacccagggaccctgcacagccagaactgcctttggccctacggatggccactggctctggtctaaagtgcctgggcttggtggccatcaagagggagccagtcaggcctgtgagggccgtagaccttgtatataccctgcaccagcagtgaccgggcagagcccaaccccctccacgggggtcccagcacccacttttctaatcatgaatgaacaataaagcccacgctctttgtcaggctccaaaaaaaaaaaa

SEQ ID NO: 51290 - DNA, 820 bp, Homo Sapiens
  misc_feature (11)..(11): n is a, c, g, or t
ctctcacaagnctgtcactggtctaatagacacaggaagaatatctgaagctgaaactctctgcacaaagaatttaaaaagtaaccctgatcagccagccgttatcttacttttgagacaagttcagtgtaaaccactcctggagtcacaaaagccactcccagatgctgtacttgaagaactacaaaaaacagtcatgtccaactcaacctctgttccagcttggcagtggctggcacatgtgtatcaatcccaaggaatgatgagagctgcagagatgtgttacagaaagagtctacaattggcatcccaacggggcagttggagtgggaagctctcaagtctgttgagactagcactacttgcattaaaagtctgtatggctaacatttccaatgatcactggccatctttggttcaagaggctacaactgaggccttgaagctttgcttttgtccactggctgttcttttacaagctttgttacaattcaaacgcaaaatgggggcaagagagacacggcgtcttttggaaagagtggtatatcagcctgggtatcccaaatctattgcatcaactgcacgttggtacctactgagacacttatatgccaaagatgactatgagcttattgacgtgctggtaaacaatgccaaaactcatggagatacaagagcattggaactgaatcagagattgtcctcacaataacattggattattttatagtaaggaagcaaagaaaaagctgtaagaatgaagcaatgaatcaagacttctacccaaagcaacatttttttaaactatatttattccttt

SEQ ID NO: 51291 - DNA, 624 bp, Homo Sapiens
gcccttcggaaagtgctgtccctgaagcagcttctgtttccggcggaggaagacaatggggcggggcctcctcgagatggggatggggtcccagggggcggccccctgagcccagcacggacccaggaaatccaggagaacctgctcagcttggaggagaccatgaagcagctggaggagttggaggaggaattttgccgcctgagacccctcctgtctcagcttggggggaactctgtcccccagcctggctgcacttgaggttcccgcccaggaaggccttttgcaagaaggagaggaatgggggagaggacgtgagggaccacccccacccacacagctgccgcagcatctcacaccccgagggcctgaggagagggagctgtgggccacgcctgggaggggcccagctggggttactggccccgcatgagcctcggccatctctccctcctgccctctgcttgggggactcagggctccattctggagggcaccacggtgacccgggccatctcagtattgcctgtgggggccacccctccacccccacccccaagtgccttcgctctgtttttataccctgaattggaggtttattttttaatatatattatctaagaa

SEQ ID NO: 51292 - DNA, 1048 bp, Homo Sapiens
attccttgcatgttgatgcaggacactcgccgtaggctcctagagaggggctacaagcacccggtcctcctactacaccctctgggcggctggaccaaggatgacgatgtgcctctagactggcggatgaagcagcacgcggctgtgctcgaggaaggggtcctggatcccaagtcaaccattgttgccatctttccgtctcccatgttatatgctggccccacagaggtccagtggcactgcaggtcccggatgattgcgggtgccaatttctacattgtggggagggaccctgcaggaatgccccatcctgaaaccaagaaggatctgtatgaacccactcatgggggcaaggtcttgagcatggcccctggcctcacctctgtggaaatcattccattccgagtggctgcctacaacaaagccaaaaaagccatggacttctatgatccagcaaggcacaatgagtttgacttcatctcaggaactcgaatgaggaagctcgcccgggaaggagagaatcccccagatggcttcatggcccccaaagcatggaaggtcctgacagattattacaggtccctggagaagaactaagcctttggctccagagtttctttctgaagtgctctttgattacccttttctatttttatgattagatgctttgtattaaattgcttctcaatgatgcattttaatcttttataatgaagtaaaagttgtgtctataattaaaaaaaaatatatatatatacacacacacatatacatacaaagtcaaactgaagaccaaatcttagcagggaaaagcaatattcttatacatttcataataaaattagcctctatgtattttctactgcaccctgaacaggcagggtcccaagatttctttaaaggcttttggtttgaaccctggggccctagttaaccttggctgaaaaaaggggaaatataatttttcccagccattgttctttgtgacaaacccttggtaacccctttccacaagggggtcattttttaattccagcggtgttaaaat

SEQ ID NO: 51293 - DNA, 636 bp, Homo Sapiens
cccccacagtctccacactgaccccctccagcccaggaaagctcctcacaagaagcctggccctgggaggcaagaaggactaaggcagcatctgtcccctctgtgattcagagcccttagttgagagcccctgccgcccctgccacccccctgccccgctcccaccattgcccctcctcagctgtgcaaggagaaagcatgcttaggaagttttcaggtccttgtgataaaacctccttaaatctgttcagaccaagcaatgcgagcttcctctcctgtcccatgttggaagttgctctgaaggggtggtagatgctggaagccagacacaaccctgcgtacgctgctcagttggtggagactggggctgggactggagtcagcccagctgggaggaggggctggggaggatctgcagctgaagcccgaggcagggttggtgtgatgccaaggcaaagtggtgaggagaaaacaggaaacgggctttctctgaattggtaaatgggaaagaagtgagcaacttaagattgtcacaattaatcacaagtgtacaggattagactgggtttatatttaactcttgcttcataggtgtaccatttaaagagtgttatttaatgctaagtttaactgctt

SEQ ID NO: 51294 - DNA, 521 bp, Homo Sapiens
agaggcagtcccagcctcagaacccaggataggaaatgggtgtgtttagtggggaaagggacggggtgcagacggcagggccagtatggggccccctccctctcctctcctctcctatggtgagcccagcgtgggcaccgggccgtctcagccgtgttcccagggctgggaggacagctctggcccttcttaggcctagcctcgtcccaagctaaatgtaagccagttgggctgtgttaaaggaagcagtgtttttggttcgattctgcctctgtagctcaaggggggcagcccccagagtcctgtgcattctgccaaggctccatagctttgccaaatgcacggagctctgccattccggtgcagtgcaggccttgcgaagggtttatctgcgttcgtctcggtgggcttctcctgcatgggagttgtgttcctgtgcaagggggagctttgctccaggacaggatgactgtcttccctattcttagggacaagtcccaagatgccagaaaggcagtctc

SEQ ID NO: 51295 - DNA, 927 bp, Homo Sapiens
  misc_feature (19)..(19): n is a, c, g, or t
gggcttgggtaccggtccnggaattccctgggatcaaaaacccttggggtgcagatcatgatgtttaagaacatgacgccgtcacccttcctgcgattctacttagattctggggagcaggtcctggtggatgtggagaccaagagcaataaggagatcatggagcacatcagaaaaatcttggggaagaatgaggaaaccctcagggaagaggaggaggagaaaaagcagctttctcacccagccaacttcggccctcgaaagtactgcctgcgggagtgcatctgtgaagtggaagggcaggtgccctgccccagcctggtgccattacccaaggagatgagggggaagtacaaagccgctctgaaagccgatgcccaggactaaggcccacggtcactgtgggctggggtgatggtgtctgaccagtggggagattggaatgggattactttggcccagggaagcccctggttctgtccctggagactctggaaatccttttgcattaaaaggactttacacacctgtgtaaaaggatgtgggagaggagggtctgaagctgagctgctaaatgaatatccctgctctgctggtcaataaaacgcttcctaatagcagcttggcgtgtatctggtcctagtgaagaggaaggcctgtgtagcagaaaggctttgggcctgagaggttaaggccacagcctgttgacacctgttttggtcctgcgaccctttttctggtctccgctggctttgaatccttcctctggggctctactctgggagaaccttaagggctggctgttgggttgaatcctggcctagcactggcctggtgggttgggcattggggtaaaccccctccggtttcgtttcccttgggggggatttttttcaaaaaatcccaaaaggggaaacccctttcgtg

SEQ ID NO: 51296 - DNA, 666 bp, Homo Sapiens
ggcactctgtgaagatattggggactgacatcttaagctctcacctggctgcagtaggaaaggccaaactgacgacaaaaaaaaaattctttataaagatgatatggtaacatgtatctttgccctgggtctgggtgggtccagtcagtctcagatttacaagcatttaggagcctaggtaaaagctgctagtattcttttaaaagttacatttatgacttgcaatgatagaaaactccttccaattaaatggcattttataatattatgtgtgtacttcacagtgttaaaaataccctcatacgttattgcatttgatcttcacagaaagtgcattttaaccagtactctgggtgcaataaataatatgtagaaatttaagtcctccaattccagcatatccagtgagttttgacagtgtgtttatgtggaatgtttaaggatatacaattgtactttatataaattggttcttgttcttcttaaatgtgacatgaaataattgtgctgctacattatactggaaattaacaggggaaaagggaagagctcttggctcccttgaggttctgctagtggtgttaggagtggttacaactgagcttttagtaaccatttaaccgtatgtaaacttggtttctaattaaaaaaaaattcttttttcaa

SEQ ID NO: 51297 - DNA, 536 bp, Homo Sapiens
tcgctgtggcccaggctggagcgcagtggtgcgatctcgactcactgcaacccccgcctcctgggttcaagcgattctcctgccccagcctcccaagtagctgggaggacaggtgtgagctgccgcacccagcctgtttctctttttccactcttcttttttctcatctcttttctgggttgcctgtcggctttcttatctgcctgttttgcaagcaccttctcctgtgtccttgggagccctgagacttctttctctccttgcctccacccacctccaaaggtgctgagctcacatccacaccccttgcagccgtccatgccacagccccccaaggggccccattgccaaagcatgcctgcccaccctcgctgtgccttagtcagtgtgtacgtgtgtgtgtgtgtgtgtttggggggtggggggtgggtagctggggattgggccctctttctcccagtggaggaaggtgtgcagtgtacttccccttttaaattaaaaaacatatatatatatatatttggaggtcagtaatt

SEQ ID NO: 51298 - DNA, 941 bp, Homo Sapiens
gatgcagcctgcaatcccagctacttgagaggctgaggccggaggattgcttaaacccaagaatttgagcgtagcctgggcaacacagcaagaccccatctaagaaaaaaatgttttttaaatcagcttagcccaaaggggttgtgaatggggaggtataaaaagcaaagattattttttggctactaagccaagaacttacagggattttttttttcagtcccagaacctacagataccctgctacttgcttcacgtggatgctcagtgcccagcagccatcttaatacattaaaccagtttaaaaaataccttccatgtggagaaaaacatgtctttttctcgcctcaactttatccacatgaaatgtgtgcccatggctgggcgcagtggctcatgcctgtaatcccaacactttgggaggctgaagcaggcagattgcttgaggccaggagttcgagaacagtctggccaacatggcgaaacctcatctctactaaaattacaaaaattagccgggcatggtggcacatgcctgtaatcccagctacgtcaggaggctgaggcacaggaattgcttgaacccaagaggcagaggatgcaatgagccaaaatcaccccactgcactccagccttggcgacagagggagactctgtctcaaaaaaaaaaaaaaaaactcgaggcctctatgtccgggtgcggaaaaaaaaggtaaatgaaatgggcccattggtcatagcttgtttccctgaaccccaccttttcttggtacaaagatggaaaaatatctgccgggtcctcccctaaaagcggaagtcgaaattaaatttctcaaaaaaggcccagggattaacccctgggcattaaaatgaaatatcgggctggacaagaaaaacccgggggggaaattataaaacccccgccctcaagaaggagaga

SEQ ID NO: 51299 - DNA, 627 bp, Homo Sapiens
  misc_feature (568)..(572): n is a, c, g, or t
  misc_feature (574)..(574): n is a, c, g, or t
  misc_feature (576)..(591): n is a, c, g, or t
  misc_feature (593)..(593): n is a, c, g, or t
  misc_feature (596)..(598): n is a, c, g, or t
  misc_feature (600)..(602): n is a, c, g, or t
  misc_feature (604)..(609): n is a, c, g, or t
  misc_feature (611)..(611): n is a, c, g, or t
  misc_feature (613)..(616): n is a, c, g, or t
  misc_feature (619)..(619): n is a, c, g, or t
  misc_feature (622)..(624): n is a, c, g, or t
ctgcattagaaaaagaggcgcttctcccctcccctacacctaaaggtgtatttaaactatcttgtgtgattaacttatttagagatgctgtaacttaaaataggggatatttaaggtagcttcagctagcttttaggaaaatcactttgtctaactcagaattatttttaaaaagaaatctggtcttgttagaaaacaaaattttattttgtgctcatttaagtttcaaacttactattttgacagttattttgataacaatgacactagaaaacttgactccatttcatcattgtttctgcatgaatatcatacaaatcagttagtttttaggtcaagggcttactatttctgggtcttttgctactaagttcacattagaattagtgccagaattttaggaacttcagagatcgtgtattgagatttcttaaataatgcttcagatattattgctttattgcttttttgtattggttaaaactgtacatttaaaattgctatgttactattttctacaattaatagtttgtctattttaaaataaattagttgttaagaagtcttnnnnnanannnnnnnnnnnnnnnntnaannnannnannnnnntnannnnaanaannnaaa

SEQ ID NO: 51300 - DNA, 616 bp, Homo Sapiens
gttgtgagaagatggatgttgagttgcagggtgtggcaccatttaaaggtaccaaaacaaactgatttgttttggtacctttaaatggtggtgttgtgagaagatggatgttgagttgcagggtgtggcaccaggtgatgcccttctgtaagtgcccaccgcgggatgccgggaaggggcattatttgtgcactgagaacaccgcgcagcgtgactgtgagttgctcataccgtgctgctatctgggcagcgctgcccatttatttatatgtagattttaaacactgctgttgacaagttggtttgagggagaaaactttaagtgttaaagccacctctataattgattggactttttaattttaatgtttttccccatgaaccacagtttttatatttctaccagaaaagtaaaaatcttttttaaaagtgtgtttttctaatttataactcctaggggttatttctgtgccagacacattccacctctccagtattgcaggacagaatatatgtgttaatgaaaatgaatggctgtacatatttttttctttcttcagagtactctgtacaataaatgcagtttataaacagtgtcaaaacaaaacaaaaaaaa

SEQ ID NO: 51301 - DNA, 656 bp, Homo Sapiens
cgcgtccgtatcaacatatctacttggttacattggcatgtgtatagtagcaatacgaacacacatgccaatgtatcaacatatctacttggttacattttggtttatgataattaaccttgattcatgtattgggaagctacagggactacgtaatacctgcttatcacataggaaaattatgtccatgattctgagctcccttcttcaaaagtttcctcctgggtgttctatgttctctctttatcctgaaatacatttattaggttgtgaggtatgttgaagaagtagaagccaggggtatgctttcagcatttattgcaaccaaaagttaaccccatcacggttaacgagcatctttggtctcttgtggaatttgaactaaaactatgagccttattcaatatctataattctatgatttttttaaattatgggaaattaatgaaagatgtttacatgaataatgtttgcccttactgtgttatgaatgagttttttgtagtgtgtctgggtgcatgatgcaagagagtaggaaaaatgtttctgaaacaaaacttgacaaatatttgtaatgaaagtaaatttaaagattgctataattgcgctatagaaacaatgcaagtattaaacaaaatatacaatcaaaaaaaaaa

SEQ ID NO: 51302 - DNA, 705 bp, Homo Sapiens
  misc_feature (691)..(691): n is a, c, g, or t
gtcaccaaggaaacgctacctctctgtcccttgctgtatgctgatcatcgccagaggtgcttcaccctgagtttgttttgtattgttttctgacagtttttctgtttgtttggcaaggaaaggggagaagggaatcctcctccagggtgattttatgatcagtgttgttgctctaggaagacatttttccgtttgcttttgttccaatgtcaatgtgaacgtccacatgaaacctacacactgtcatgcttcatcattccctctcatctcaggtagaaggttgacacagttgtagggttacagagacctatgtaagaattcagaagacccctgactcatcatttgtggcagtcccttataattggtgcatagcagatggtttccacatttagatcctggtttcataacttcctgtacttgaagtctaaaagcagaaaataaaggaagcaagttttcttccatgattttaaattgtgatcgagttttaaattgataggagggaacatgtcctaattcttctgtcctgagaagcatgtaatgttaatgttatatcatatgtatatatatatatgcactatgtatatacatatatattaatactggtatttttacttaatctataaaaatgtcgttaaaaaagttgtctgtacaaacttttttcttataaataaactgttgctcgttgcattanacaacaaaaaaacc

SEQ ID NO: 51303 - DNA, 715 bp, Homo Sapiens
  misc_feature (664)..(668): n is a, c, g, or t
  misc_feature (670)..(671): n is a, c, g, or t
  misc_feature (674)..(674): n is a, c, g, or t
  misc_feature (677)..(677): n is a, c, g, or t
  misc_feature (686)..(708): n is a, c, g, or t
ctcaggaagtccagaaggcaaaagaagcagacatagagaagctgaaccaggccttgtgcttgcgctacaagaatgaaaaggagctccaggaagtgatacagcagcagaatgagaagatcctagaacagatagacaagagtggcgagctcataagccttagagaggaggtgacccaccttacccgctcacttcggcgtgcggagacagagaccaaagtgctccaggaggccctggcaggccagctggactccaactgccagcctatggccaccaattggatccaggagaaagtgtggctctctcaggaggtggacaaactgagagtgatgttcctggagatgaaaaatgagaaggaaaaactcatgatcaagttccagagccatagaaatatcctagaggagaaccttcggcgctctgacaaggagttagaaaaactagatgacattgttcagcatatttataagaccctgctctctattccagaggtggtgaggggatgcaaagaactacagggattgctggaatttctgagctaagaaactgaaagccagaatctgcttcacctctttttacctgcaatacccccttaccccaataccaagaccaactggcatagagccaactgagataaatgctatttaaataaagtgtatttaatgaaaannnnncnnccnccnccccccccnnnnnnnnnnnnnnnnnnnnnnnaagggcg

SEQ ID NO: 51304 - DNA, 677 bp, Homo Sapiens
ttttttttttttttttttcaatatacagaagagggttacttcttcatcaagtatattgttgcctttgaggacacagcaaaacccttctatatgtatcttcattgatagtggcagttaaaaactaagttatccagttaagacttaaaaggtgacccatattaattgcatggccttaaaaggcagaaatgcaggagtgtagcaagcatcattttagatggctatggttcctcttccgcatctgtcagtagttcacttatgttcagtcttagaacctactggaggagtgaagtaatttctctgtctcgtgcagaggcactaaggagctgagttacctcttaatctgggggaatggataataagtggagtacagttatgttaaaggatgttccccccgctcaaaaaaaagtttcaatgtttgttttgcccagtcaaaaatataggtcttttctacatataagaacagtcaccagaaattttcccttttgctaaatgcttaggtatttgctatagctgtttctgatgtcatggattctgaggaagtgtcatttacgtgatgatcttcctttattgatgtcttcatcatgttcagtgttttaaaaatataaattacaaacactctacaaccatacccagatttacttattttatcagaaaaaaaacttgagaaatttgtagat

SEQ ID NO: 51305 - DNA, 957 bp, Homo Sapiens
  misc_feature (519)..(669): n is a, c, g, or t
aataagccactgcctgacatcccaacatttgacaccccagcaatgtgtgactcccccaacattccactatgccatcctgcagctgaaatgggaacactggctgcctctccaaacccgctcttggacagaggatctgggaggtggaagccaggccagaggacttggggaaaatgagatggaggaaggaaaaagggagaagctgagccacagcttaactcctacagagtgaaatgaaaacgggctgaaaataccaccccaggagaggacctcgccccaagcaagccagtgagcagccctgccagactactgccagactgagaaacccagaagctggtagtcatgtgggcttgccttctctgccaaacgactgggaaaccaaaatgagcccaccttgtgttcttcctagctccaccctccccgtgctgctgtgttctgctcctccccacgcttccctgctatagttcccagctgctgtaacggagccacctccaactctaacaataaaccaagttcattgcnnnnnnnnnnnnnnnnnnnnnnnnnnnnnnnnnnnnnnnnnnnnnnnnnnnnnnnnnnnnnnnnnnnnnnnnnnnnnnnnnnnnnnnnnnnnnnnnnnnnnnnnnnnnnnnnnnnnnnnnnnnnnnnnnnnnnnnnnnnnnnnnnnnnnnnaaaaggggggcgggcctctcaaaaatcccccccgggggggccacaatttttcgcccccccccttttttttgtgaaaaaggggggcccccctaggggggggccccaattaaaagggggggggggggggggccctttttttacacaccccgggggggggaaaaaaacccccctcggggggccttttgtggagggggacctcctctttgtggggggggggggccattttgggcgccacaccccccccccccccaaatatttagcgccccctgggggggaaattaaataatt

SEQ ID NO: 51306 - DNA, 935 bp, Homo Sapiens
tttgctcttaaatcaacccatgggattgcaattaaatcaaccaacatggcctctgtggacaagggggagagcgcacctgttcgtaagaacacacgccaattctatgatggcgaggagtcttgctacatcattgatgccaagcttgaaggcaacctgggccgctacctcaaccacagttgcagccccaacctgtttgtccagaatgtcttcgtggatacccatgatcttcgcttcccctgggtggccttctttgccagcaaaagaatccgggctgggacagaacttacttgggactacaactacgaggtgggcagtgtggaaggcaaggagctactctgttgctgtggggccattgaatgcagaggacgtcttctttagaggacagccttcttcccaacccttcttgaactgtcgtttcctcaggaactgggtcttcctgattgttgaaccctgacccgaagtctctgggctagctactccccccagctcctagttgatagaaatgggggttctggaccagatgatcccttccaatgtggtgctagcaggcaggatcccttctccactccaaaggccctaaagggtggggagagatcaccactctaacctcggctgacatccctcccatcccatatttgtccaagtggttctgacttctaacagaccttgttcttagaatggagctgtgtatctactatctccaggttgtattatatctggaaggtcttttaccattgataaactacaagaaaagaaaaaaaccggcacattgtcgggaatactcgggaaaccgagaagaaccccacacaataaaatgggggtgccattccacaagcaggaagggattaaaacgacgaggtcctgcaaaacagcggttcaaaaaaaaggggggaatacgggagacgcactgtaggcataaattaacgcgaccgagg

SEQ ID NO: 51307 - DNA, 608 bp, Homo Sapiens
  misc_feature (575)..(575): n is a, c, g, or t
ggctgtaaaatctttgttgtttaattaaatgtgccgttatttacccctgatgttatttatgactatgtgccgattcctgctcgggctgtttgctgttggctggtaataatatatttgatttaaatgctgttgactgtgctattaactgctgccgtcagtaaactccaaagatctttttgttttggctttagtatcatatgtgctttttctgtatcctgagcgctctatatgatcatgttaatttaaagctttatacacattgttgtttttgctggtctcatctttggtaatatgctataccccactgctgcccgacactgccctttagctgcagagctggattagctgttgaccatttgatgctgttgtctgtctggcagggactgaatgacctgatgtcagatttagattcttcctggggattacacagctatgaatgtatttgcttctaaaacctcccaaagtgaatctaatcttaaaactacaagttgtaagtattctgaaattgggaaacatttattttaaatgcaatcaggtagtgttgctttttacagcataataaatatatgtaaaanaaaaaaaaaaaaaaaaaaaaaaaaaacaatgtc

SEQ ID NO: 51308 - DNA, 1214 bp, Homo Sapiens
  misc_feature (512)..(515): n is a, c, g, or t
  misc_feature (943)..(943): n is a, c, g, or t
  misc_feature (946)..(946): n is a, c, g, or t
  misc_feature (988)..(988): n is a, c, g, or t
  misc_feature (1031)..(1031): n is a, c, g, or t
  misc_feature (1061)..(1061): n is a, c, g, or t
  misc_feature (1063)..(1064): n is a, c, g, or t
  misc_feature (1105)..(1105): n is a, c, g, or t
  misc_feature (1108)..(1108): n is a, c, g, or t
  misc_feature (1111)..(1115): n is a, c, g, or t
  misc_feature (1119)..(1119): n is a, c, g, or t
  misc_feature (1131)..(1150): n is a, c, g, or t
  misc_feature (1160)..(1160): n is a, c, g, or t
  misc_feature (1167)..(1168): n is a, c, g, or t
  misc_feature (1170)..(1173): n is a, c, g, or t
  misc_feature (1176)..(1182): n is a, c, g, or t
  misc_feature (1189)..(1190): n is a, c, g, or t
  misc_feature (1196)..(1196): n is a, c, g, or t
  misc_feature (1205)..(1213): n is a, c, g, or t
ttttcaataagagtgtacagtctacaattatacagtgatttgtactaatatgattttgattcttcctcctctttgctgtcctttcaagacacttgctggaaaaagctttaatgcacttagttttcctttaggttttctatgactcagatgtaaaggactttctctgtacagtatattatccaatgcatgtttgttctctctcctgatatattgaacaccacacagttgtgaagccgtgcagtggggatgccccacaccccacagaggcatctacccctgtgtataaggaaagacattttcctttgctgtacttgcttgagcagttttattgtctgtacatgtgagctgtgtgagatagatgtgaaaagttcaaatgaatgcattttcctgccccatgtatacagattgtcatctgtacaaggaactgtatgtatgaaagcaaatgtacttatttataaatggctaacacttggaaaaaaaaaaaaaaaaaaaaaaaaaaacaaaaaaaaagnnnngacaaaaaaaaaaaaacagcaaaacaaacccaaacagaaccccaccaaccccccctccacccagcgagccggggggcgccccggagcgaggagccaagtggcggggggccaaggccgggcacatgaacacaagccgttgcccaacccaagctctccccaacacaccgtcatttgcggaagaattgggcattccgtgtcctcggcggccctgagttgggccacgaccgcccgtccaccattaagatttgcgcgcggggttcatgagaagtgtaacgtctcccttttcctgtggatatgtacccaccgtacgacaattctcgcttgataactgtttctgggatctggaaagcgtccgtcgcggtttccctctcattcatttcttatataactacccccaggttctggtccttttttcttcctatccctcnccnccacctcattatctctcccttttttacgtagttaaaaccccncctagagggaggaggggggttgagagggaggcggagggtgctnagagcgggcggtgtgcgcatcactacttcncnnccttcagagggagatttttgaggcgaggagaggcagcgttnctntcnnnnntccnttttgttttttnnnnnnnnnnnnnnnnnnnnggctagtagnatcagtnngnnnnagnnnnnnnttagggnnttcccnattagcaannnnnnnnna

SEQ ID NO: 51309 - DNA, 587 bp, Homo Sapiens
tagcaaggtaattgtagtttagttttaattcggagagcaatgataatcagtgcacaggagtataaaatattattttaaacagcgaaattaataatataaaatgccaaatggttgaaaaaatagaaacctttctgtatatttgatcatattttttttttgccttgtcaatgtatttaaagtttacttaaggtcaggaaattctaaaacaacttttctggccttgttatttgatgtatatcttttaaatttactgaccaaagcatgttttaagctgcaatgcagtagtcacgggtggtaaccatgtagtcaggtattgttattagtacctatcactgctgagctgtatttaaaattttggtacaatatataaaatggagaagagcttgatattcaggtactaaccacaactagtctgacattgttggcagttaaaatcttattttgaattgtaaattagttaaattttatgtggaatttgctgagaaaagaatatagactactgaaatgtcattttagttatttttcttatgaccacattgtacaaatgaaatctgtgttaaaaagactattttaaatgtatttcctgc

SEQ ID NO: 51310 - DNA, 500 bp, Homo Sapiens
attgaactgttaccattgcctttttctgttgagaaattgcctctgaaaaatagtgctatttttcagcttaagtgttcttaagtgaatgaaattttcaaagtactagatcaccttaaaattatttcacgtactgaagacaattaagtccgttatgtttagagtagaaaatgtttaggttaaagagcatctgtcaacagaatctacaaaaaagattcccttgcatttgaattagttctctattctcctattgctaaatgtgtgatatatagagaggatgtataaaaggaaatggaaatagactatgtacttgtctggtttttgtttgtttttattttggaatgcttataaggcctcctttacactgaataaggaagtagtttttgttttcttttgacctgtaaaatacctcacatggttgtttttacacatgaaagaaaaaggtatatgcgaacatacctgatatcaagaggagtatgcaccaaataaattttagctttgat

SEQ ID NO: 51311 - DNA, 588 bp, Homo Sapiens
tctcgcttgctgcccacaccatggccctcacaggcccaactgacctgcgctggagctgctcttatctaggggggaggggggtggcacagcagcttgggtaccccccaacctccaggagctagtggaggggtgtgtaacagggtcataccccctccctcttgtccaccctacccccagggtaaggggagcctctctccttccccatcagactggatgtgcctttatcctctaatgccccaatctctctctgaacacccccattctccacctgttggtggggggtgctcctcgacccacccagatttgaccgttcagggggcctcccctgctatccctcctcccatcctgtaccccccatttctggggcctcatcactgtggaagacggggatagtaagagataagtgggtgggaggcacggggcaaggttttggagtaaaaccaggggtgtgtatgaaggggggtgacaaggtccccctggggaggggaccaaccttgtctggtggatgaaaaggcgtatttatttttcactgtacagtatttaaaaagagattaaaacaatccaaatggcaaaaaaaaaaaaaaaaaa

SEQ ID NO: 51312 - DNA, 1123 bp, Homo Sapiens
  misc_feature (1040)..(1040): n is a, c, g, or t
cggagctcgcctgcacagatcagctccggagaggggaaaaccacgckcctcggaccaagcctcgggagctaagccagatctgccagtgagcctcaggctttaggaackgaagagtgtttctgaaagadctatccagcactccgatggccagcaacaacaccgccagcatagcacaagccaggragctggtagagcagcttaagatggaagccaatatcgacaggataaaggtgtccaaggcagctgcagatttgatggcctactgtgaagcacatgccaaggaagaccccctcctgacccctgttccggcttcagaaaacccgtttagggagaagaagtttttctgtgccatcctttaagtctttgagaggggcctgaagagcctccgggctcctgggacattgatgtagagtttttagtgaagtgggcacctttctagtccacggcatttgaagagagcgaggagaaccattctggaaactctaggctatgcatgtttaaagatctggtcccctttatgagaatgcaagccgatccacatcctgacttaagagatctgattctgacgaactgcctggaggaggggaatatataaraataarattggtgtcacttcttttctgctatggsccagcccccccccccaaaatcctcatgtttctgcttcatattttgaaaaataacaattaaaacagacagctgtactgaggtaagatatgtgtgaccttcttggaatgaatattgtctttagaataccctttgataagctgagctgtcccgtgtagatgcrattcggtttaatggcattgatgtatagtcactgtgcctctctttttctttcttccttctcctctacccctccttscaccctccccattagagtagtgtggagataaggctggactggtctatcagaktgaactccaagaatgatcacacaaaatgtttagggagakgtcccgtggtgtatctcatggtaaaacgamaaaatatgccggtgtctgtgtctctttcactatcctamatgtgtgcagatactntgatctgcagtraagtaatcygtgtgkgctgkgsttcwatatrtgtggcaattttgggaawtgctgaaaagcccaagtactcc

SEQ ID NO: 51313 - DNA, 567 bp, Homo Sapiens
cgctagtggcgggcatgataacacacgccggagggtcgcacgcgggttccagttgtgattgctggagttgtgtattgccaggaggctctccgagattggggtcgggtcactgcctcatccaccggagcgatggcgtttctccgaagcatgtggggcgtgctgagtgccctgggaaggtctggagcagagctgtgcaccggctgtggaagtcgactgcgctcccccttcagttttgtgtatttaccgaggtggttttcatctgtcttggcaagttgtccaaagaaacctgtaagttcttaccttcgattttctaaagaacaactacccatatttaaagctcagaacccagatgcaaaaactacagaactaattagaagaattgcccagcgttggagggaacttcctgattcaaagaaaaaaatatatcaagatgcttatagggcggagtggcaggtatataaagaagagataagcagatttaaagaacagctaactccaagtcagattatgtctttggaaaaagaaatcatggacaaacatttaaaaaggaaagctatgacaaaaaaa

SEQ ID NO: 51314 - DNA, 612 bp, Homo Sapiens
ctcccttttccccccttctggttggaggagggagaagtgggaagtagcttgggaactggtttgtccacataaacttccccattgttccttggcccgccctcagggcagagccccctgcccaggctgggtaagagatgggcttggtccagcagggaccctgagggaacaaacccttttccttctggggagagagtgcccccccctaccatgtagttgaacaggggctaggagctccccactcccctccctctaacagcaggctgtgtgggtttcaattcccatccttcccaccccggctaggtgtcgtccaccctgtatcctgtgtctgagtgtgtgtgggggggttctgtactaatttccatggccggtggcttttccttccatgcatcactcccccccgcatgcccaggggccacccgcctggcattaccgcatgctggggtcattgggggaggggggtggggctcacgctgtcctgtggtcttgagatttttatttttgcatatgtaatccattctgtacaggtagctaactttgtaaacgctgtgtattccctctgcccccatggctgctggtgtaaataaactgcatctcccgttggtaaaaaaaaaa

SEQ ID NO: 51315 - DNA, 629 bp, Homo Sapiens
ccgacggatacttttatggttactaactagtactttcctaattgggaaagtagtgcttaagtttgcaaattaagttggggagggcaataataaaatgagggcccgtaacagaaccagtgtgtgtataacgaaaaccatgtataaaatgggcctatcacccttgtcagagatataaattaccacatttgccttcccttcatcagctaacacttatcacttatactaccaataacttgttaaatcaggatttggcttcatacactgaattttcagtattttatctcaagtagatatagacactaaccttgatagtgatacgttagagggttcctattcttccattgtacgataatgtctttaatatgaaatgctacattatttataattggtagagttattgtatctttttatagttgtaagtacacagaggtggtatatttaaacttctgtaatatactgtatttagaaatggaaatatatatagtgttaggtttcacttcttttaaggtttacccctgtgagtgtggtttaaaaatctataggctggggaattccgatcctagctgcagatcgcattccacaatggagaatgatacaaataaactggtatttgagaaaagaaaaaaagg

SEQ ID NO: 51316 - DNA, 760 bp, Homo Sapiens
  misc_feature (718)..(718): n is a, c, g, or t
ggctcaccagacacaccaggcaacagaagttgaagcacaaccactgtagcaaaataccttgactgcttgtgagaccattagcattgcaggccaaaccgtactgtatttccttctcataacctcaaggaaccatatgtgctacccacaacacctcattcttacccagggtgcgctgcgtcctcatggtactgtaggcagctgaagaaccgccgttcccttgaaagggaacacctggcattctgtggtgtttcgtgctgtcttaaataatggtgcatttattatgttcaagttatttcaggattgccatatgtgcaaacaaatcatgcaatgcagccaaggaatatatgttgttgttgttgttttaaacccattttttttttagaattttcattaatactgtagttatacaccatatgcctcattttatcatagcctattgtgtatgaaagatgtttgtacaatgaattgatgtttagtttgctttagtcatttaaaaagatattgtaccaggatgtgctattaagagcacgtatccattattcttctcaacccaagaacctgtttcctggaccagtgaccaaacctcatatgtgaaatggccaaagcacatgcagggctcctggttgttcctctcaaacctgtgctgaccaaagattagtaaccagttatacccagtatttttgagtttttattgttttttttaataactaaaaagaanaaagggacaagtgtaaaatttgtaaatcaagaagtttgtgaa

SEQ ID NO: 51317 - DNA, 603 bp, Homo Sapiens
tctaaatgggtcaactcctttgttttccgcctagcgacaagggatttgctcgcacggcattggctccatcccctagtcgctggacagctctttttttgattggctcaaatcctgtaaagggcttgaccagtctctacatagtcaccgtccgcttttcctgagttctccctcccaattggctccagcttcctgggggcgtggccaagccctcctcttcccagaattggcccggggccttcaatttacgttctttacactacggggactggggtcgtctttgcccacgtcccgacaacttgttccctgaccccctcagggatggccccaaactgtccctgcctctggcaccccctttcattggttccatccatccccacaacagcctgccaatcgaagcccgtccctgcatccaggatggtaccagctcccgcccctcgccccccacctccacaggtgccttaaagggccctcgtccacccaaggtggggggcaggggccctcactctccggccctggtgtgggggagagagtgaggggttgggggatcggcagttgggaggggcgctctgagattaaagagttttacctctgagataaaaaaaa

SEQ ID NO: 51318 - DNA, 648 bp, Homo Sapiens
gtcattgtgctggtaaaagcctctattacgactgtaagtaagttggatgttggcaaaattaaattgttacagtatttagagctgctgtagctgttccttcacaacataaaataggataaatgactagtacgtctttcaggtgggtggcaagcagaacatgcgtaatattctctacctggtctgtagctgtaactgtgatgtacagacaaagcaaaaattaaaagaacttatgaaaacaaatgcaatgatactaggatatacacttttgtatttttattcttatataaggttatttgctggctattgttggcctctagttcagtctgtgttatttaaattctaatatatgaattatttgaattgaattcatgttcggggccacgttgttgtatgtattgatgtacagccttgaatgtgaataattattgtaaactatattttacaactttttttctggctttattatataaattttctattgggtcagtgatttaatcatataatttaatgaatctgtttatcctttttttttttccaaatacttgtgctttaggcgtagttaccagatgatgaattttcctcgtatggtcagtagtcttgtaataaaaagcatgtagagtgtaaaaaaaagactagttctagatgcga

SEQ ID NO: 51319 - DNA, 967 bp, Homo Sapiens
  misc_feature (913)..(913): n is a, c, g, or t
ggggttcttggaagacctggcacctccagagcgcagcagcctaattcaggattgggaaacatctgggcttgtttacctggactatattagagtcattgaaatgctccgccatatacagcaggtggattgctcaggtaatgacctggagcagttacacatcaaagtgacttcactgtgcagtcggatagagcagattcagtgttacagtgctaaagatcgcctggctcagtcagacatggccaaacgtgtagccaacctgctgcgcgtggtgctgagtctgcatcatcctcctgatagaacctccgactcaacaccagaccctcagcgagtccctttgcgcctcttggctccccacattggccggcttcccatgcctgaggactatgccatggacgaactgcgcagccttacccagtcctatctgcgagaactggctgttgggagcctgtgagccccaggcactttgcatcacagtcacatgcccattcacaccacacagaggttccctgccttgtttggattggcactgtttgccattctctgggttggctgtggcatctaccctccctccctgctgccagaagcagcatcctccacttgttcagggcttttcttaatactgaacgtagcataagggcttctggaacccagaagaggagacagtttaccatcctcaagatcattcagtgtttttcctttaaaaaaatggtcaataaagctcctttggcagaatcccccaaagaaccagggtattctttttccatccctaaccattctggatcttgtgaccctccatgccaaccagccttccctactcctaccctggccccttttatactaggaactcccttaggaaggagtgaagacaaggtgaataatgggatccctttaaccggatgaaactaatcccccnaaaaggaaaaaaaggggattcccctccttcttttaaagaaaaattgggggttaa

SEQ ID NO: 51320 - DNA, 673 bp, Homo Sapiens
  misc_feature (604)..(604): n is a, c, g, or t
ccaaacgtggacaactatgagctgtacgaaaagctggagcttgtcaagggccagaagcggaaggtgaaggacaggctgaaggcctatgtgcgtgacccatacgcactggacctcatcgacaagctgctggtgctggaccctgcccagcgcatcgacagcgatgacgccctcaaccacgacttcttctggtccgaccccatgccctccgacctcaagggcatgctctccacccacctgacgtccatgttcgagtacttggcaccaccgcgccggaagggcagccagatcacccagcagtccaccaaccagagtcgcaatcccgccaccaccaaccagacggagtttgagcgcgtcttctgagggccggcgcttgccactagggctcttgtgttttttttcttctgctatgtgacttgcatcgtggagacagggcatttgagtttatatctctcatgcatattttatttaatccccaccctgggctctgggagcagcccgctgagtggactggagtggagcattggctgagagaccaggagggcactggagctgtcttgtccttgctggttttctggatggttcccagagggtttccatggggtangaaggatgggctcgcccaccagtgactttttctaagagctccggcgtggtggaagaagggacaggtccc

SEQ ID NO: 51321 - DNA, 931 bp, Homo Sapiens
ccacgcgtccggatttccaaatgtctccaactccctcacgaggtggggctcaggctggaggaggagggattaagatccccttgctccactaaggcccaagctctttctctcggcaccttttagacttgaatgggaggctgctaacccgccctctccagtccaccccggtaaaagagctgttccccacccccagggagctcctgtccctgtcagcctttgctgtcccctgtccccaacggagactctgtcacccctgggctccccctgccatcgtgtgcttcacgtggccccatgcatgcccgcctctctgcatggtctcttgggaaaagagagatgtgtcgcctccgccagtccgactgccctccccaccccacccccgccaccccccacatgtgaccactgcaacgaagacactccttctgtccccacctgctccgaagacaaaccaacctccgtttcttttataaacagtcggctttttcttaataagccctcactgtacagaacagcccgttgatggtttatttggggtccccctctccccccagcccttttttctgttggtttagcacaaatacttccctcctccggcacctccaaacctaccccacagtcagtgtacttgttttatatatatttaatcttattcaacgggaaaccatgctttcgccgttttatactttgcttaggaacactttattacccccccactatggccctcatttttttaaaaaaacgtcaactatatacgcccatatccaaacggggggcccgctcttagagtaaccccctgaagggggcccaaagctttaacccgcaacaccagcttttctttggtacaaaaggggggccccctataactggcggtccgcatcttataagagctcaggcgacctggcgcccgttcgttttttaccaaactatccctgaa

SEQ ID NO: 51322 - DNA, 875 bp, Homo Sapiens
tgcctgtgactctccccaaattgccctgttgccttgagctcttctgagctaaggcagccttcagtccctatcagcgcctcctttacttcccagagaacttcacagagactctgtccttccatgcaaaggcttcctgaaatagggagactgactgagtagctcattcttgtgacttacagtgccaacatttaaaaaagtatgaaaatgatttatttttatatgatgtatacccataaagaatgctcatattaatgtacttaaattacacatgtagagcatatctgttatatgtttatgtaactatcaaatggttatttgttactaaagctatatttctgataaaaaatattttaggataattgcctacagagggatttatttttatgatgctggaaatatgaaatgtattttaaaatttcactctggcatatgatttatctatcaccattacttttttttaagtcacaatttcagaattttgggacatttgcattcaatttacaggtaccagtacgtacatattttaatagaaagatacaacctttttattttcactccttttatttctgctgcttggcacatttttgagttttcccacattatttgtctccatgataccactcaagcagtgtgctggacctaaaatactgactttagttagtatccttggatttttagattcccagtgtctaattccctgttataatttgcacaaacaaaacaaaatgttatgataatctttctccactgttctaatatatattggatttttatttgatagcttgggatttaaaacatctctgttgaaagcttttgatccttttgagaaataaagatctgaaagaaatggcataatcttaaaaaaaaaaaaaaaa

SEQ ID NO: 51323 - DNA, 692 bp, Homo Sapiens
ccccgcgtccggactttctttatctcatttaaagaacagctctttgaaattgaaattgaccctttttgcttgaccttaaggagattagcttccagtagatgagtttgcaaaatacttttcctgttcttttgttttgctggtattgaaaacatcccactaaatcagatgaagaggcatgggaggaaaaatatccaaattaattactaaaatcgagaagagaaggcaaactcttgaaaagtaaaaaggtgtttgtgaccttcagtatttattgaacagaggaaataactgacaagggcaatacaattcaatgttcatgtagtaacattcatgtcacttgttgaatttggttctcatatgtatattgcatacacataaattcaaactataagtcgtcatttttgagccatcatcttacattcatgtaatgaaattatggaagagagtaaaaactagctcttaacttagtaaatataatatggtatttaaaatcaggtcactacagtaaggttctaagtattgccaattgaaaagctagaaatggtattactgttgcaaagtgttgtcaataattgactccaatagcattgtaaatacttgtatcccacaactattttaaacccaagcaataaaatggattttctaattcacttcaattctttatttctcttacctatctatgtcttggtacataa

SEQ ID NO: 51324 - DNA, 771 bp, Homo Sapiens
cgcgtccgatttggagcgtgccaagggggccttgcaaagcatcactgcaggccagaaagtcattagcaagcataagaacgggcgcttctaccagtgtgaagtggtcaggctcaccaccgagaccttctatgaagtcaactttgatgatggctccttcagcgacaatctttatcctgaggacatagtgagccaggactgtctccagtttggtcctcctgctgaaggggaagtggtccaagtgagatggacagacggccaagtctatggagccaagtttgtggcctcccaccctatccaaatgtaccaggtggagtttgaggatggctcacaacttgtggttaagagagatgatgtatacacactggatgaagagcttcccaagtgagtcaaatctagactgtcagtagcctcagacatgcgcttcaatgagattttcacagagaaagaggttaagcaagaaaagaaacggcaacgagttatcaactcaagataccgggaagattatattgagcctgcactataccgggccatcatggagtaggtgcttccagggtccaagggattctcagccatccaggcaagagcactctgggttccacagcacagcagacatggaacgctgaagtctctgaaagtgaagttgtaaaaagaaaaggaatgaaataaccgacccatcatcttctcacccaccctcattgcattcccgctgtagtgaaaggacgagccatttctgggcacgtggcagcagtcgctgatctcccagctgagggg

SEQ ID NO: 51325 - DNA, 915 bp, Homo Sapiens
  misc_feature (649)..(649): n is a, c, g, or t
  misc_feature (795)..(795): n is a, c, g, or t
  misc_feature (824)..(824): n is a, c, g, or t
  misc_feature (866)..(866): n is a, c, g, or t
  misc_feature (882)..(883): n is a, c, g, or t
  misc_feature (886)..(886): n is a, c, g, or t
  misc_feature (888)..(888): n is a, c, g, or t
  misc_feature (896)..(901): n is a, c, g, or t
tgagaaccaggaaagctgctttcacgtcattgccatccagtactgacagggaagaaagatgtagttttccagtagtgatgaatcaaattattgaattaaatttcttcttaagaagtaaaaactcagaatgtaccatcttgtttcctttcagtttattaaatggcatcataaagatgactttgctaagttaatagagttaaaaatttttttaatataagccaaaatattaactttaatgaaacattgacttggcaaatgaatttcctataaattatcattggtcagaatgctgttttgtttaataatattacgcaacataaaccataggtgttattagaagtggagaactgcctttttcatctggggcttttaaggacttgctataaatgattattttttaaatgctttataaatcttcatggtttttctatttctgatacactcagctatagttaataccagagtatcctaccaggagtaatatttggaatatttaaatctagtaaaagaagaaagttgtacttcctggctgggagtattaggagatgggagtagagattcacttttaagttcttgaaaatatatgcattctcctaaatattaacaaaaatgatttggggaaatgacatggcttgattgttctgtttanatttgtactgtggcttatgttacacatgttcatgttcacctctcattcacctggtttatatggtttaaaattctctttaacaaattcagaaaatcacctgaaacgtattttgacctaaaagaaacatattttttgtatcagtattngaatttttggacagtgccccccatataangaaagtttactggtttttaaaataaaggcaaactaaactgtntttattttcccttggnnaanancacaaaannnnnnaaaaggcccgggga

SEQ ID NO: 51326 - DNA, 839 bp, Homo Sapiens
ggggtttgagaaatatttttaattctgtttcaactttatttctccaagtgtataatataaaaattacttctgttattgttctctaccaataggggaaaaaattaaaacattagatccattgagaaagagatgatgtaataaataattaagattagtaataatattatcaggggtgattatgaccagttgaataatctctttcccttgaattatttagctaacaaattaactctcccaaatatttaaaataatgtaaaatcatattttactgcccattattaactaaaatatttttgtttgactttgagcaccaactggtaatactaataaatacccatgtcatgcagatggctgggcgaataagagatgtctaaaaatatgcactggtcttggaaaacatggcacaagtaaggatatcatatatgatgtctgtttattttatgtctgatttctttttgaatgagtagttggggactccatttctaaggagactaggtaaataaaatgacctttgacatttcatccctgcatttctagtcttctcttacttcaatactttgcatatttagcccttccatattggggtcatggtccaaggaattgaaaattttacccttctcagcaaacaacccatggttctttcctccacattcttttaagggcttgcacggaggggttgtggggggccaaggggtaaattggtttggaaatccacttttttcctttgcctggaactgaccccattttgaaggccaccttgggaaatgggattccctttaattccctcgaacaatggggatttttttcttgaaaaccattctcccctcctgccagaatca

SEQ ID NO: 51327 - DNA, 669 bp, Homo Sapiens
tttatagacattttcagacatttttggaaatttccattaaaggtggaaaatctattttttttcctcctttgcagtgtcttagtttgaatgaaacacttcgaagttctagaattctagaaagagccttaatgtatttgatgtattctgtgataagaggtactaatagtatccagcacagatttgcttttctttgctagcacaatgtgtgttgctgtcagaatattctttttatattctgtggaaaaataaaggaaattcagattgtttaaatgcctaaaagttttgagataagttttgtttcaattagaaaaggaaataggttttaggtggcatagtggcttaactggactgaattcaaatattctttcaacttcatctcaatagtgatttttgtatcagaatcttgtccaagttgtttcattgatttagtaagtgttctgcttccaacatctttctttttaagaaattcctagtgtcttttttggcctttgaggttttggtaattgtagacctgtttcataagctttgtaattcagaaatccttgtatttagtaagtgcttgttttacataactgataattttaaaatgttttctttgtgtgctgttagtattgattcaaatgtcagcagctttaagcctaatatttatgactttcacatttggaattt

SEQ ID NO: 51328 - DNA, 533 bp, Homo Sapiens
gggctgtcacctcttccccatctgcatgagttctggaactctgtcctgttggctgcttgcttccagctccccccaatctccatcgcagcgggttcctcctgtcttttctacagtgtcataaaacatcctgcccctaccctctcccaaaggtcaattttaattctcaccaagttttgcacatctctgtatgtcgcttgatgtcttagacgcgagccctttcctaaactgttcagcgctctcttttcctttgggtggttgttgcaagggtgatgacatgactgtccccaggcctgtctccctgaagcgtctgtgctgtcaggacagccctgggcagagatgaggcaggggtgaggcgtgcgtgtgcttttcctccttgttggatgtcttccatatcatctgtttccatagctacaatccatcccttggccttaactttggaatttggagattatatgcaaacatgtgtaaaggctcatgaatatggatgacactggaattttataaattctaaaataaaacccgaaaccaaaaaa

SEQ ID NO: 51329 - DNA, 574 bp, Homo Sapiens
gggggatagaggtagaagcagatagaaggtaattttaaagttaatttattatgaatcattttcccctactctgcataaatgaattagaactgattttaataaaaatattctgtgtaaaaagtactcagaaaaacatctaaagctgttggagaagagggactcatataaatacttggattgcgttttgctttttatttctttataaaaatatgtcaaaaacagtttttaattttagaaatcttatacttgaaagaaacctcaattatcagtggctttatgaagtaaagttaaaaacaaacataggaaatgtgaaaatatttgtgtttgttttgtctgactaacttgctgctaaatgctatctttaggtgtgtgaaagttctttgatatgttattgtccttttacatcttgttaaatagccattgcttttgagaatcagatagtgtgttgtttaggggttaattgtctctatatctttcaaaaacttttatattatgtattataagaagttacagtagtaccattttgattagtctgaatgttttcaggccttgaaataaattttgactaagtgat

SEQ ID NO: 51330 - DNA, 913 bp, Homo Sapiens
  misc_feature (830)..(830): n is a, c, g, or t
  misc_feature (840)..(840): n is a, c, g, or t
  misc_feature (848)..(848): n is a, c, g, or t
  misc_feature (851)..(851): n is a, c, g, or t
aggagtgggcgtggcggagccagctccgttcggaacactcccgggccgacccgactcgctcatcctgcaggagctgcggcgccaagatgagtggagaggagaacccagccagcaagcccacgccggtgcaggacgtacagggcgacgggcgctggatgtccctgcaccatcggttcgtggctgacagcaaagataaggaacccgaagtcgtcttcatcggggactccttggtccagctcatgcaccagtgcgagatctggcgcgagctcttctctcctctgcatgcacttaactttggcattggtggtgacggcacacagcatgtactgtggcggctggagaatggggagctggaacacatccggcccaagattgtggtggtctgggtgggcaccaacaaccacggacacacagcagagcaggtgactggtggcatcaaggccattgtgcaactggtgaatgagcgacagccccaggcccgggttgtggtgctgggcctgcttccgcgaggccaacatcccaacccacttcgggagaagaaccgacaggtgaacgagctggtacgggcggcactggctggccaccctcgggcccacttcctagatgccgaccctggctttgtgcactcagatggcaccatcagccatcatgacatgtatgattacctgcatctgagccgcctgggctacacacctgtttgccgggctctgcactccctgcttctgcgtctgctggcccaagaccagggccaaggtgctcccctgctggagcccgcaccctaagcatcctgctgccttcccacaacataaactctccttcctcagaaaagnaacaccccanacccgganctnaacctcgaaggcatctattgtccgggggggcgaaaaatgagggtattgcaaatggccccttg

SEQ ID NO: 51331 - DNA, 500 bp, Homo Sapiens
ggtctctgacatctttgtgaagtttgggaagtaattaattgcagcgacaagctacagggtgttgcagaattcttcccactcagaagaatggcatattcgttctcattagtaatcagctattttgtcactttcttgttgactccatcagtacatgggtacaatccgagggtgtgaatttcagcttgaaattccattgctgttccctgttttgtttgtattgctctaagttgtattcataatagcactttcatatgtttctgcatttgaaccttgcaataagcctgtgtggtaggccacataggtccgaataacctagttttacagttgagggagctgagctcagattcagttctttgccgaagccctcatagctggtaagtggctttgcatattagaacccaaatattttgctctctaaatctaatgctcgctctatgtggttatgtacatattgacaaatattcatttattcaacaaataaaaagtatgtacaaaacatg

SEQ ID NO: 51332 - DNA, 678 bp, Homo Sapiens
  misc_feature (611)..(611): n is a, c, g, or t
  misc_feature (626)..(626): n is a, c, g, or t
  misc_feature (646)..(646): n is a, c, g, or t
ggatccctcctgggatgaggaagaccccctcgggctctcggctgacccccacctcctgcacagctgtgcccaggcccccagggtggtccacgcggggcaaccccctgcggtgcacaggccccctgtctggagtagggatctaatttatttatttattgcctggccggtgactcgggggaggaggcgaccctgtcatctgtcccacctgctgctgccccttggagcagcctgcaccttctctcctcccatccggcaacagtctgaaagtacgtggaggacgggaccggaagacgagagagggctggacatcctgcccaccgtgtcccagccagggcagggagggaccatggcccgcagggtcaaggggccccgatgtgcacagctgccacagggagggaggtcttggggagatgggcagtcaggtggcccgtccttggtgagtgcacacactgcgcgcacacatcgcggccttcctggcttctctggcccccacgtgtctgtgctgtagatactgtatcaaagtcccagcgtttagatggttaacatagagctgcttctgtgtaaatgctgcttattttaaacactaaaaagcgtttaattttatgggaccnccaaccacccccctncccccacccccccccccacnaacaaacaaccaaaccaccaaccacaacaagg

SEQ ID NO: 51333 - DNA, 685 bp, Homo Sapiens
gaaatgttgcaagtgttactagtaccagtttcactttttgttgtcacaatttactgtattttttactttttctgttacagttttgctaatttatcagaaggtccaaaagtctgacataactatttcattttgcattatttatttatgatgcttttttcattgtcttttatacatttgggattataaattatgtaaatgttaaaatgagcatctcaaagaagtctgttaaatcatgactgaaaaaaatcaatcagatgtatcttcaaaaagtggagtcccagttttatgaatcagagatataaaccagaaattctataactgatcatagaagaagaatccagtaattgaacaaatcctatttaatgacatccttgtagcatagatggtctataatgctgaccacagatttcttagaaatgctgctctctctatttaactaacattttgttcagttttgcctccagtggaagcagaaagggttttttcagctgttaaatcctaaaaatcaatataatttatttatgtaagaaaaataactcaatcaatatatttttgaaccttttaagtactaattttctttttatcaagtagaaaaaaaaatgtatttgccctaaatccttaaaatacaaatgctataaaaattcctgtatcttgaaagccttactgcaaatgagtattatagaca

SEQ ID NO: 51334 - DNA, 906 bp, Homo Sapiens
tcagacttttaaatccaaacatagcaaaaatgaaagaagatattctctatcatttcaatctcaccactagcagacacaatttcccagccttgtttggagatgtgaagtttgtgtgtgttggtggaagcccctcccggatgaaagccttcatcaggtgcgttggtgcagagctgggccttgactgcccaggtagagactatcccaacatctgtgcgggaactgaccgctatgccatgtataaagtaggaccggtgctgtctgtcagtcatggtatgggcattccttctatctcaatcatgttgcatgagctcataaagctgctgtactatgcccggtgctccaacgtcactatcatccgcattggcacttctggtgggataggtctggagcccggcactgtggtcataacagagcaggcagtggatacctgcttcaaggcagagtttgagcagattgtcctggggaagcgggtcatccggaaaacggaccttaacaagaagctggtgcaggagctgttgctgtgttctgcagagctgagcgagttcaccacagtggtggggaacaccatgtgcaccttggacttctatgaagggcaaggccgtctggatggggctctctgctcctacacggagaaggacaagcaggcgtatctggaggcagcctatgcagccggcgtccgcaatatcgagatggagtcctcggtgtttgccgccatgtgcagcgcctgcggcctccaacggccgtggtgtgtgtccccctcctgaacgcctggaaggggaccagatcagcagccctcgcaatgtgctcagcgagtaccagcagaagccgcagcggctggtgagctactttcatcagaaggaaactgagccagggccctgagcgctggccctgcaacttccgcagacc

SEQ ID NO: 51335 - DNA, 731 bp, Homo Sapiens
gcagccagatcggggtgcggctggagcagctgtgtcaggcgggtgggcagtgtgtggatgaagacagctcccactactgcgtgtgcccagagggccgtactggtagccactgtgagcaggaggtggacccctgcttggcccagccctgccagcatggggggacctgccgtggctatatggggggctacatgtgtgagtgtcttcctggctacaatggtgataactgtgaggacgacgtggacgagtgtgcctcccagccctgccagcacgggggttcatgcattgacctcgtggcccgctatctctgctcctgtcccccaggaacgctgggggtgctctgcgagattaatgaggatgactgcggcccaggcccaccgctggactcagggccccggtgcctacacaatggcacctgcgtggacctggtgggtggtttccgctgcacctgtaccccaggatacactggtttgcgctgcgaggcagacatcaatgagtgtcgctcaggtgcctgccacgcggcacacacccgggactgcctgcaggaacccaggcggaggtttccgttgcctttgtcatgctggcttctcaggtcctcgctgtcagaactgtcctgtctccctgcgaagtcccagccatgccagcatggaggccagtgccgtcctaacccgggtctgggggtgggctgacttcactgtcactgtgcccagacgtactggggtacagggttggag

SEQ ID NO: 51336 - DNA, 673 bp, Homo Sapiens
  misc_feature (84)..(84): n is a, c, g, or t
tgtcgccccatcttctccgtggatgggccatgcgtcctgaaaacaggacatcagattcactggttctgtaacccagtagctgtnacgttccatctcttctaaccagccatggccttcccctcctctgccatacccttaatgcggcccttagattagatgaaaaacttgctcctggtggatcccaagggaccctcaaggacctcgaggttactgcagtaagatgccatctcatcccctgtgggggccaaagtttttatgtgggcagatgctgtggtcaggaactaggcatgctttctggcaatgcactcaccagacaaaaatcccttgatgtaaatcccatgtwaatttattaaatttcagtcagaaggtcagcatttacatgacagaatgtatgtagagagttggggtgtctggtaggcaaactgcaaggcagttgagatagttggattaagaggctagacgagacatagaatactattggtatgtgtgcaatttcatgaatattaaattatgtttcgaagtccagttgtcattcccgcattcagatttcatttgctgttgctttatacgttacgtacccaaggacattgcctcagggttgcaaactctttaaaggaaaatttatccatatatccatgtattatatagaagaataaaaattgagtttacttca

SEQ ID NO: 51337 - DNA, 865 bp, Homo Sapiens
  misc_feature (641)..(641): n is a, c, g, or t
tttcccacagcccagcagatagctcattggcttagcaatgggcacttaacagaatccagttgttgcagccagaattaaatgcaccagtctggcttaaaccaactggaactcatccctggggtgaaggtggctgggaattagacaagagtgtgtgttagccaaaaggcacatgcatgctgtcagcaggagaatgaggagcactggttctgggcaggcagtggcaggggctccctcaggcccctgattcccagcccacagctctttctactctgcagacagagttccttggagactggccctgcattcaggcagggagcagaggggtccctgcctgcagcacccagagctgaacctgaagctacaaagatgggctgatgaggtggcccatgaggtgtcagcaacatcccaaccccctgggtctccccagtgagtcagggcactgatttgctatagctggagctacatgcacctctcctcccctcagccaccttttaggggagaaaggagggcagatttgtaacctctggttctctgcagggatcctgggctggaagaaagttcataaatggatgaatgccttttaaaactccagcttttccaagcatcattcaccaaagcatttggttaggcttagagagaanagctggatatgagaaaatagaatgtaaaataggagggaaaaaaaaagaaggtggagagggcagttaagatctgggtgattctttagggaaacggctggttgagaggctttgatggaatcccattctctgctgtgggcagaaggtggggctagagggcagtccccacctggaatgtgaccctggggcttctgccggaattcaaaccacaaagaacatttggggaa

SEQ ID NO: 51338 - DNA, 500 bp, Homo Sapiens
gagacagggtttccctatgttgcccaggctggtctggtcttatagtcctgggctcaagcctcccagagtgctgggattacaggcatgggtcaccgcaccaagcccgcatttatattttgagttaccaaaatgatcatcatctgtgaagcatcatggtagcttccaagcatttgcggcccactggccagtgcatccaaaacacattcaggaaacccgagagttgtaagttgcacatgtgtggcctacagtgacttccatgtagtaacagggctgagcaaggcaggctctccaccagacttaaagcattcaaccactctgcccccaggccgacactgacatgtgttcactgtcgctgccacagctggccacctgtgttcagtctccatgaaggattcaccttctgctctcactgacatctccttggctacacaaatgtgcaggtgtctcttgtcaaagctaatttttcttttctaaataaacatcctttaatacaaaaaaaa

SEQ ID NO: 51339 - DNA, 624 bp, Homo Sapiens
agggtgagggagactggggcctggtctgctttcccgggcctgaaagcttccccgaggtttgcagggtcagggaggaggaacggtgggggtgggcagtcactgcctgttccccactgcctgtgttcgcaggagccacgggacagaagacggtggcctctgctgcctgggccacgttagtccgcagctcacccgaacagaggacaaccctgaggtgtggcatatgggcacctggcactgggagtcgggggagcacgtccaggcgtggtgcatcctggggcagaacgccatggctcctccccgctctcttggcttctgcctgttggggtctcattcctttctgttccccagtgccccggggcggcatattactgctcagaatttggagggagggagcagtaccttcccggagtccacgcatgtgagttgggtcaagtgcattggacctagggaaagagaaagaaacgaataaacacgctggagagagagtgaagtgaatgcaagatacaaagtgggatggaagactcaaatccagagttccaggcaatcaaaatgagtgcaggttgacacgaccacaggtgacctttacgtggcctctggctgctcccgctggtactaaactcctct

SEQ ID NO: 51340 - DNA, 552 bp, Homo Sapiens
gcggccactcacacactggagggcacacacgtaccccgcacccagcaactcctgacagaaagctcctcccacccaaatgggccaggccccagcatgatcctgaaatctgcatccgccgtggtttgtattcattgtgcatatcagggataccctcaagctggactgtgggttccaaattactcatagaggagaaaaccagagaaagatgaagaggaggagttaggtctatttgaaatgccaggggctcgctgtgaggaataggtgaaaaaaaacttttcaccagcctttgagagactagactgaccccacccttccttcagtgagcagaatcactgtggtcagtctcctgtcccagcttcagttcatgaatactcctgttcctccagtttcccatcctttgtccctgctgtcccccacttttaaagatgggtctcaacccctccccaccacgtcatgatggatggggcaaggtggtggggactaggggagcctggtatacatgcggcttcattgccaataaatttcatgcactttaaaaaaaaacctcgtgcc

SEQ ID NO: 51341 - DNA, 598 bp, Homo Sapiens
ggattgtttgagtattttttaaaagggaaacagtaccaaggagaccagccctaccttgatctggggatagtcttggggcaaagaaagctgcgtagtgctgaacattaagctttctgggccactggaacaaagaactaggatctcacaggaaaagctgggtaactcaagcagctattctttctgtagggaccagaacacgagaatttgaagagcatggcaaagccctttctctcccaagccccaggcagagtacaagctcatttttctcggtggttattctgatatcccattttggtgtgtcataatacttcaaactggaaagtcacctggtcgagtctagggaggagggagtggaagggtctctgcttctgtacaaaatctccaggatttacaaaaatgtaacctgccttccttcaatcccatatttggtaaataagttaatatttgacatgtttggtgttctctgacctgttccccacactggggattcctggtctgtaacttgaattgtttcttccacatgttcttaagtactagaaaaaaaaaaaaaaaaaaaaaattcttgattctgcggccgcaagcttattccctttaggga

SEQ ID NO: 51342 - DNA, 633 bp, Homo Sapiens
aagcttaaagattgagcatttgaaataaatgctctttataaatgattagatttttgaagggatattgaaatcattgcgctgtgatttcatctgtgatgtgaaaaatcaatttattatccttggtgctttcccccccaccaatgcacaaataattgtgaacagcttgaaatgacttaaactgtaatccaaatgggacaatctgataagaatttcatgcattggtagttaaataacttaaattgctaaagctttagcttgaaatttatgtttagaaaaactattgatttcccatggtatgaatataactattgtaattcttcaaatgagactcttctcaccttaaatagtcatatattaattaacttataggaaataagcatactatatgttagctgttttaaaaggtaccagatgtaagagtcataaatatatgcaattaaagaagttcatagatttcacacgaatgtaaatgtgttatatggagacatgtcttgtaaacagttgaatgtatgtaagttttctgtttgtgaaaatgtagttaatgtactcactgtggaggtcataaggaagctactttttttttaaagtggaacctaattaaaatatttccagaatcaaaaaaaaaaaaaaaag

SEQ ID NO: 51343 - DNA, 696 bp, Homo Sapiens
gagacctctccatcattcccgaaaagtggatggagagagtgatggctccactgaagagacagacgagtcggagacttgaggagtccaaagggtcctgcccacagcgccctgtacctgctcccacccagcccttggtgtgcccacccagcctcctctccagcaccttgctgtgctgccctctgctgctgacaaggtgaataacagccccaagaccagccagaggggctctgatgatcagcccagccagtggccccggaaggtgaatggcctgctctccctggccctatcagcctgtgaacttcacttaggccccaagctgacagactgtgctgaggccaccttgtcacgccgtagcctgttagtcctcctaacctcttaagagcagtctcttctgagccagcctctgcgggtcccccaataaggttcatctcctcacagcaactccattaagggggagaacccgaatagccacgcagggccttgcaccatcaagggtgacacctgcgacgcaagtaccaggaggacataaccgctgtggcctgttggagaacagccagtagccttggtaatatgaagggtgggccagaagatgatttcacttgcaaaaactgcttcaagtcttgacccctttgtgtctaatagctaaacaaacatgtgaaacgaataaaaagtccctcatgtctggtaaaaaaaaaa

SEQ ID NO: 51344 - DNA, 577 bp, Homo Sapiens
tattgtcctatcctcttttatatatggagttctctcctctttatatcctgagactttgacaccagatgtagatatttatctggagctggaaagaaaaattctttttctgtacctcatgcctatctggtaatgtttaatgggttatttctctttgagggtggctttctctggaacattggttagagcagctttgttgtcgtgtttctggattctcttccccattttgcgtaaatattggtcttatatattcttgcctattttgtggcatatgccacataaaaaatgaacctgatatagacaagtactaccttttcaaattctgaaaggctattaccactttaactctttgtgctcctccaaatagctttaaaatgtgggcttttgtgaagaccactttcaaacaagggagcactgaaacctgaattggatactgccagaataggtagttttgaaacaagttaaggacatggtatatgcactctgcattttcattggcagtgtgcccttaaagccctttcagtagatgagggttgtcagggaggagaaatgaagaagctatgttaatttctggtgagta

SEQ ID NO: 51345 - DNA, 641 bp, Homo Sapiens
  misc_feature (576)..(576): n is a, c, g, or t
  misc_feature (641)..(641): n is a, c, g, or t
ggatcccgtatcacagtgtttttattgctcgcccagacaccatgtgcaataagattggtgttcgtttccatcatgtctgtatactcctgtcacctagaacgtgcatccttgtaatacctgattgatcacacagtgttagtgctggtcagagagacctcatcctgctcttttgtgatgaacatattcatgaaatgtggaagtcagtacgatcaagttgttgactgtgattagatcacatcttaaattcatttctagactcaaaacctggagatgcagctactggaatggtgttttgtcagacttccaaatcctggaaggacacagtgatgaatgtactatgtctgaacatagaaactcgggcttgagtgagaagagcttgcacagccaacgagacacattgccttctggagctgggagacaaaggaggaatttactttcttcaccaagtgcaatagattactgatgtgatattctgttgctttacagttacagttgatgtttggggatcgatgtgctcagccaaatttcctgtttgaaatatcatgttaaattagaatgaatttatctttaccaaanaccatgttgcgttcaagaggtgaacattaaatatagagacaggaaaaaaaaaaaaaaaaaaaaan

SEQ ID NO: 51346 - DNA, 803 bp, Homo Sapiens
gctgtggtgccatcctgttccccgtagtctgtggcagtgaacctggccaagctgaagctgttccggcattactatgtcatggtcatctgctacgtctacttcacccgcatcatcgccatcctgctgcaggtggctgtgccctttcagtggcagtggctgtaccagctcttggtggagggctccaccctggccttcttcgtgctcacgggctacaagttccagcccacagggaacaacccgtacctgcagctgccccaggaggacgaggaggatgttcagatggagcaagtaatgacggactctgggttccgggaaggcctctccaaagtcaacaaaacagccagcgggcgggaactgttatgatcacctccacatctcagaccaaagggtcgtcctcccccagcatttctcactcctgcccttcttccacagcgtatgtggggaggtggagggggtccatgtggaccaggcgcccagctccccgggaccccggttcccggacaagcccatttggaagaagagtcccttcctccccccaaatattgggcagccctgtacttaccccgggaacagcccctcccttccagctatgtgtacaataatgaccaatctgttggttaaaacaaagatataaaagacaaagaaaaaaacacgcgagagaaacaaactgaggtgtgcgggcaaaccggttctaatggccccggcatctaagtggtaccggacacacgtcttggaaacagggaaatttcgcggcacccataggagtcgaatattgcgaacccaggtacgcggatagagaccaa

SEQ ID NO: 51347 - DNA, 467 bp, Homo Sapiens
cccactgtggagatgaaggtgtgtgctgatcccccatccccctgtggagatgaaggcgtgtgctgatccccggtccccctgtggagatgaaggtgtgtgctgatcccccatccccctgtggagatgaaggtgtgtgctgattactaatccacatgggcaagaacaggatgtccgtcattaccctgaatcaatgctaacacagtgccacttgagttcacattaagttagaaattgagaatctaaaggtacctttattttaactaaaaaataatttatatactgtatattgattgtgacacaatttacaaagtctgaggtgtggaacagttatttaagcattagtcaaccctggtccttaagacagttctagtaaaatgggattgtatatatttgttcaactattttgaccaaaaagttcaataaattttaaatgtttaactggaaaaaaaaaaaaaaaaaaaaaggac

SEQ ID NO: 51348 - DNA, 1013 bp, Homo Sapiens
  misc_feature (735)..(735): n is a, c, g, or t
acataaagaagacggagactgttcaggaggcctgtgagcgggagctcgccctgcgcctgcagcagacgcagagcttgcattctctccggagcatctcagcaagcaaggcctcaccacctggtgacctgcagaatcctaagcgagccagacaggatcccacatagcagcagcgggaagtgtgccaaggaagctctgtggcgttgtgttattggtagacaccctcagcctcatcatttgactacctatgtactactctaccccctgccttagagcaccttccagagaagctattccaggtctcaacatacgccgttccaccaattttttttttagccccaccagcttcaggacttctgccaattttgaatgatatagctgcaccaacaatatcccgcctcctctaattacatatgatgttctctgttcaaaagtaattggcagtgattggccgggcgcagtggctcacgcctgtaatcccagcactgggaggccgaggggggcggatcgtgaagtcaggagatcgagaccatcctggctagcgtggtgaagccctgtctctactaaaaatgcaaaaaaagttagccagccatggtggcgggcgcctgtagtcccagctgcttgggaggctgaggcaagagaatggcatgaacctgggaggcagagcttgcagtgagctgagattgcgccactgcactccagcctgggcaacagagcgagactccgtctcaaaaaaanaaaaaaaaaaaaaaaaactcgagggcatctatggtcgggtgcggaaaaaagaggtaattgaaatggccacatggggcataggctgttttcctggacccagcttttcttgaaccaaatgggtaagatctggccggtcctcccctataggggaggccgtaataaattttcgaaaaagccaggggtaaacctggcattaaatgaattcgggctggcagttaccccggggaattttaacccccccccttaagagagcgggggccttttttttttgggcggaa

SEQ ID NO: 51349 - DNA, 564 bp, Homo Sapiens
aatgaatgaaatttaatggacctgattaaaatgaagggatttaatcgttgttaaagttaagttagtcaaataaattacctactggaatatagcccaagccagtaaaggtttaatatttgcattttcgtgcttttattttctccttccattcataagtatatacttgaaagtacatctgtagcctatgatttgagtctcttgaagttctaggaagaggcaaactacaaactactagtattctgatttcagatgtagtcattccagaaccttctctttatgagttcacctgctagtacaatctccacaacttgaatggcattggttgttctgtaattcctgccaaaagcatcacaagttgtacatcatcaaggctccctttgcactcccaagaagaactggtaattttaaacaaaagtatgtgtctttatttgtattggaaaatactgtctttaaattgtttcttgttgacactccccacaatggaaaaattaccgaattaaacctgttttatggatggcagcttggagcatagcaagaagttggaggatttgaattccattccca

SEQ ID NO: 51350 - DNA, 707 bp, Homo Sapiens
  misc_feature (695)..(695): n is a, c, g, or t
  misc_feature (704)..(704): n is a, c, g, or t
gaaaatatccctcttaatgatttcgtagttcagtttactgaatgattaccacctgtaattcctctttggattgtgtagactcaacatgagacattcctttctgctttctggagggcaccaggggcctttctctttgataaattttttttgtctgttgacaaaaacaaaaatcttttttcaaatgtagtgctggtgaaaaggtagggctgagtgattaccttagccacagggtggctgagcaggaactttagaagaaaatcctgagctttcctgtccattcccagcatccagctcctattctagtgcctcttccctgcagggcagggaccccttgggaaatcgaggaggtgggacgggctgggccctgtgtcccaggtttcacagggctcagggttatgctcccgcttgaatctggacgtgaatctggtaaaaatatcaagtacctgtggaactccctgattctataccctcttccttctttctgcaaggcagaggaataatatttttaaaggttattttgttttagttttaaatagcaaaacacaagctgcatttttatttattttgcataagaaaggtaaatctttttacaaaaaaaagtatagagttggaaactctgggaaaacttacggaaatacacaaatgcttctctgtaatgtgcaatatgctttgcaactgtagatgatattttatgnttaatctgnaaa

SEQ ID NO: 51351 - DNA, 567 bp, Homo Sapiens
ctgtgggggtgtaagaatgactgcaacaggcacttcccaacaatggcctgctgttcacatggaccctgagcaaggaaggagggagggaggggcagagtggagtgtcattccagcattcctctcagaagggagagaggttttcaggctggtgccatgcgattggaataaagcaggaggctcatgggtggttgctgaatgaagaacagaatcttggtgctttgtggctcaccacagccatctgtggggcaggcacacacacctcccgccagctccaattttgcactttttccctgcttgattccaagagtaggtgctgcctagcagcccttcgtggccactctttactcaggagggccttgcagagtcctgcaccaggcctgggtgagtggatgcgcctcttaccatatgacacgtgtcaagatgcccttccgccccctctgaaagtggggcccggccagcactgctcgttactgtctgccttcagtggtctgaggtcccagtatgaactgccgtgaagtcaaaactcttatgtgttcattaagggctcaataaatgttagctgaatga

SEQ ID NO: 51352 - DNA, 856 bp, Homo Sapiens
aaagaatattgagattgtctgaagttttagttaagattttcacacattaatatcaaaaaagtaagtttagtatttgtttctccatgggttatttgtaaagctgtaaactgagatatcggtgactccgtattatgactccattagtgagctgtggtatgggtaggattttcctacttcttctgtacttttacctgtagactatttttactaaggtgctttataatgtgttttaaagcattgcatttacaaaacaaggaaaatgctgtaaatattgcatattttatgtatttggaccaaaaggttacaagtaattagacaaaagtggttttgcaccaattttatgtcaagtaaaaccatcagacctactgttcttgtatttctcatttaactttactgttaagacatcactgaaatgaacttcagtaagctttcaattttgatacacagttcattattcataacttgaggcagtaattacagtggaatgagtactggacaaggagtcaaaaaacttgatttcaggtcctagctctagcacttacagctgtgtgatcttgggcaagtcacttaacctctctttgcctcaatttcctcatcttgaaatgaggataataatacctgctgtacctacctcacagggctgttgtgaggattaaatgagatggcatgtgaaagcactttgaaaattgtaaagcgctatgtaaatgtaaggtattatagaaacatctttaacatatagtttcataccattcattttttaacaaagaaagggaaaagtctgcttgtaagctggttgaaaaagttaatctttgatataattttgtgtttgaaaatatccctctcagtggtttatctt

SEQ ID NO: 51353 - DNA, 928 bp, Homo Sapiens
  misc_feature (664)..(665): n is a, c, g, or t
  misc_feature (667)..(667): n is a, c, g, or t
  misc_feature (669)..(669): n is a, c, g, or t
ggcgtcttgttctgttgcccaggagggagtgcagtggtgcaacctcggctcactgcaacctttgcctcctaggttcaagtgattctcctacctcctgagtaactgggattacagtcgtgtgccaccacgctcagccctgagttagtttctagtatttttttctgactttcactctaaggatagcgttgaaaaaagaatgcacgtgtgagttactaaaaagttagaataatgtgcatgggaacagtgcagcaacatgctagaaaatcctcactgcactccagcagaggctagaggaatgccagtgttaccttacgcttctagaagcagagccactccagccagaacccattttgcagtcttctcttcgctcttcagcctgaaggtccagatgtagctggggcctctcagtttggttctatccacagggcactcgtaggtctgtttggtttcttgtctgtccacgggggtggcttttgcaaagatgaccggcatagggcatgccagctccttgagacgggcttcaacaatggttcctgcttgggtgtcccagcgggcgcctatggcaaaaacacagcggttgcaattgtgtggcagcttgctactaatgataatgatcaagttgtttgatgcaataaacatttcaacattctgggtttgtcattcnncnanacaaggaatgaaagattcacaaaggggggccggctctaaagatatccctccaaggggcccaaagcttacgcggtaccccagttttccttggaacaaaggggggtccctattaaggggatccctatttattaagcttaagggccctgggcccgtccccttttataacaaaccatacgtggagacttgggggaaaaaaactgggcttaacctttggggggaattcttttttgtgtgacaagggaaaaccccttttttttta

SEQ ID NO: 51354 - DNA, 711 bp, Homo Sapiens
gctgtttaaaggacaccttggaaaaaaagggggtattagggcatttaaaagcaaggatccgagctgaagttttcaatgccctagatgatgaccgtgaaccccgaccatcattgtctcatgaaaaccttctaattaatgaattaattcgagagtatttagaattcaacaaatataagtatacagcatctgtcctcatagcagaatctggtcaacctgtagttccgttggacagacagtttctcatccatgaactaaatgcatttgaagaatcaaaggataatacaatacctcttttatatgggattttagcccatttcttgcgtggaactaaggatggcatccagaatgcatttctgaaagggccttcacttcagccttcagacccaagtcttggcagacaacctagtagaagaaagccaatggatgaccacctaagaaaggaggaacagaaaagtactaacattgaagatcttcatgtttctcaggcagtcaacagataatgctttgtttggggtatcttttgtcttaaaattgtattattaattaaataacttatttattgtcccaatgttaccaaaatgcaccactaatgtttgtagaaattggagtttctacaaaacacccctcatgtttaactacatttgtgaataaaagctaactcttgtcatctagcttattggatttgacttgaaaaaaaaagtattgttttta

SEQ ID NO: 51355 - DNA, 1000 bp, Homo Sapiens
  misc_feature (757)..(757): n is a, c, g, or t
cactgaaagaacttctgatatgttctggagatactttgcttttaattgaaggacaacttcctcctctgggtttcctgaaggtgcccatctggtggtaccagcttcagggtccctcaggacactgggagagtcatcaggaccagaccaactgtacttcgtcttggggcagagtttggagagccacttccagccaaggtgcttctgggaacgagcctgcgcaagtttctctcctctacttgggagacatagagatctcagaagatgccacgctggcggagctgaagtctcaggccatgaccttgcctcctttcctggagttcggtgtcccgtccccagcccacctcagagcctggacggtggagaggaagcgcccaggcaggcttttacgaactgaccggcagccactcagggaatataaactaggacggagaattgagatctgcttagagccccttcagaaaggcgaaaacttgggcccccaggacgtgctgctgaggacacaggtgcgcatccctggtgagaggacctatgcccctgccctggacctggtgtggaacgcggcccagggtgggactgccggctccctgaggcagagagttgccgatttctatcgtcttcccgtggagaagattgaaattgcccaatactttcccgaaaagttcgagtggcttccgatatctagctggaaaccacaaatacccagaggaaaaagaaaaaaaaccagattatttgcaaggggcaccggtattacttgaanagacggagaatactaattggtgttaagaaatctccttgattgaccaccatggatgattttctcgtacaatccagaaaatgaccccttgggaaaaagaaaagcccaaaccccacggggcccctggggggaaaggggaaaagccccaaaaacccctcccctgggaggaaaagaagggtttaaattcccttctctcaggggccaaaaaaaaaccctttccccggggcctcccaaaacccccccgga

SEQ ID NO: 51356 - DNA, 646 bp, Homo Sapiens
  misc_feature (631)..(631): n is a, c, g, or t
  misc_feature (633)..(634): n is a, c, g, or t
  misc_feature (645)..(645): n is a, c, g, or t
aagtagcgaaggggtgagggcacctcattctgaagaggaaggctttgccatggatgaggaggactctgatggagaactgaatacctgggagctgtcagaagggacaaactgtccacccaaggaacagcctggcgatctttttaatgaggactgggactcggagttgaaagcagatcaagggaatccatatgatgctgacgacatccaggagagcatttctcaagagcttaaaccttgggtgtgctgtgccccacaaggagacatgatctatgaccccagctggcaccatccgcctccactgataccctattattccaagatggtctttgaaacaggacagtttgacgatgctgaagattgagtgtggagctttctgccttgtaggtgggcgggcctccacgtcaagatctcttttcctgtcttggaggtgaaaagtcatatctgagaaaatgtttgcagtgacccctagtctggggtacacagaccagtgttccttattgacagtgttcaataaggccccgtcattctcgccagtctgttgttgttcttaatgggctcctccttgaaatgtgtgtgtgtttgtgtcaagaggagttgtgttctttgtaaataaaggttaaaaagagaaaanannaaaaaaaaaant

SEQ ID NO: 51357 - DNA, 869 bp, Homo Sapiens
  misc_feature (843)..(868): n is a, c, g, or t
tttccagacaaggtttttgctgagaagtggaatgaaaatgttcagtatctctcagaagatagaagtgtgcaagaagtactacagaagcatttcaatatcagcaaaaacctgcggtcattacacatgctattgatgcttgctttaaatcgagtaacagcatcgcacccatttatgactgccgtagatctaatggaagcaagccaactgtgtagcatggactcgaaagcaaatattgtacatggtctatcagtcttggaaatctgtcttataatagcaatgaaacatttaaatgacatctatgaggaagagccatttaattttcaaatggtctataatgagtttcagaagtttgttcaaaggaaagcacattccgtttataattttgaaaaacctgttgtcatgaaggcttttgaacacttgcagcaattagaattaataaagcccatggaaagaacttcaggaaattcacagagagagtaccagctgatgaaactgcttttggataatactcaaattatgaatgctctgcagaaatatcccaactgtcctacagatgtgaggcagtgggcaacatcctcactaagctggttatgaatataaccagtgacttcaactttggcatttcattcatacttctgtagagaacggaaaactattgtccattaacatgatatgctaaacattctataaacattcttgtatttatgtgagacttgcccatctactgtcttggctgtgtcttgccttttatcatgaacagttacatgatttataatttcactgattgagaatactttgtaagtagctgttcagaagaataaaatatgactgttttaggggaannnnnnnnnnnnnnnnnnnnnnnnnng

SEQ ID NO: 51358 - DNA, 724 bp, Homo Sapiens
ctgaaacaggacacatctgttttttgtccctcaccctgggcaggccgcgtcacaatcacagtcctcctcctccccaccctgacgtctgarcgcagggcttgaattgttagtcccaactctggccaaaratacttttttccagagacagaggccaggaggcagtgaggggagccccgcggggaggcggcggcgactgccacagcccttccagcctgtcttgctggccgccctggttcatatttgartttaattgtactgaccctggacccagataagcagcaactttgtgtctttggggtcacagaacattttggggcagtttaatgtggtaccaaactgaaaataggagctatttatagatggagcagcacttagtgcttcatagaaagcaatgcctatttttaaagttacaaacgcagatatctacatagatatgctttgctgagaagttaggtctgtggtagaccagaaaccacaaattgactttttttcttagaaaatatttctatttgcggtaaatatagtaatatgtaaataatgtacatctgttgatttctggagtgtctgttattcaatgatgtatatactcccacagctcgcatgaaggaacagcctctattgatacttggttgtaaagtgaagtaagattggagggtggatggctgtcagagctcttgcagatactgtgttcactaaataaaaatcacatgtattgttaaaaaaa

SEQ ID NO: 51359 - DNA, 897 bp, Homo Sapiens
  misc_feature (30)..(30): n is a, c, g, or t
  misc_feature (60)..(60): n is a, c, g, or t
  misc_feature (740)..(740): n is a, c, g, or t
  misc_feature (749)..(749): n is a, c, g, or t
  misc_feature (753)..(753): n is a, c, g, or t
  misc_feature (793)..(793): n is a, c, g, or t
  misc_feature (835)..(835): n is a, c, g, or t
  misc_feature (868)..(868): n is a, c, g, or t
  misc_feature (873)..(873): n is a, c, g, or t
  misc_feature (876)..(876): n is a, c, g, or t
  misc_feature (894)..(894): n is a, c, g, or t
cacaagaagcttttgtaccgggttcccagnaatcttctgctcttgtttgtgtgacatggnaacaaataacttctttgccaccactttgccttagataactgtgtgtgtgtgtgccagtttgaactctgacaccacattttccttctatgcaatcatgcctgtctgataatcttgcattgctttcctctgagctttagtgggtcctagttgcacaatggcctttctgtgctgtttttcaatttgcctaataatagcagttaccctgattgtaatttatgtaactttaaacaggatcacactgtaccccctgcctgccttatttgcttactgagcacaggacagaggcaatatacaactctgggttcacacacaagctgagatgagaagaggaatgagccatatattggggaaaatcatagtttgtaggtataattatatagtgcttttctccctcaaagtatttttctagccttgaattcattttatcttcattatccctgtgaagtaggtgggacaagtataaggggaagaggggtgctgaatttttaggccaaagactgatattaatacaaatcactcactaactgtagagccttgggcattatcagtgaactactctgagatttactgtcttcatctgtttaatgagtagaatgtccgtgatgcctacctcacagggttgttgtgagggtcaaatgagaatgtatgtgaaagatttgtaaatggtaaagcactatatntctgtttgntagncctttttcctttctttgggtagacctacagtcagatgttntggtttatggatcacttattttccttactggtagactgtcgntttatagaccatatcctatttatatattctctncctgntgntagagaacctatctttgnttt

SEQ ID NO: 51360 - DNA, 575 bp, Homo Sapiens
gaaaaattaagtgcttaaaacattttaggagtatacaacttcaaaaaaaaagatagcagtgaggataatgatttaagtaaaaggttgtctgaagcatatgccaactaaatttcgcaacgtttgctacctacctgaaaaggagggtcaggagggagacacaacatatttttgatcatgaaaaagtatcttaattttaaaaaagtgaaaatgccattttattttgaatcccttttagaactcacgacccaagttcatcaatgttgaataatatcacgtttaaataacaaaaaaatatggactttaaaaaatctcaaattttttagagacagggtcttgctctgttttccagattggagtacagcagtgcattcgcggctaactgcagcctcaagcactggggctcaagcaaacctcctgcctcagcctcgtgagtagctaggaccacaggtgcatgccaccatgcctggctctaaagagaaaaaaaacttgataccatagagccttgaatataaatatcctgatgttaacctactgcttttgctgtgattttttttccttagtgagttttaaatctc

SEQ ID NO: 51361 - DNA, 634 bp, Homo Sapiens
  misc_feature (9)..(9): n is a, c, g, or t
ggataaaancctaagagtttgggaatgggatatccctgtggatttcaagtacatagcagaacccagtatgcactcaatgcctgcagtgactttgtctccaaatggaaaatggctagcatgccaatcaatggacaaccaaatcttaatttttggagcacagaacagatttagattaaataagaaaaaaatttttaagggccatatggtagcaggctatgcttgtcaggtggacttttcaccagacatgagttatgtgatttcaggagatggaaatggaaaattaaacatttgggactggaagaccacaaaactctacagtcgatttaaagctcatgataaagtgtgtataggtgcagtgtggcatcctcatgaaacttctaaggtcataacatgtggttgggatggtctcattaaattgtgggattaatgagattaatccttaaactagctgggatcatttttgatccattgtcatatttatatttaattattaaatgtatctgatgataacttgatttacagataatgttgatgacattgaccctttgtttaaaaaaagaaactgtaaatttgacataatttcatttgcaacttcattttgttttttataaatgttatttatacagaaagtttg

SEQ ID NO: 51362 - DNA, 678 bp, Homo Sapiens
agcagggtggctgagggcacaggtgcctgggtctgtccacggggcagggctttggggctgtgatgctctgggaagccagcttgggtcctgggtctacagagggccctggccccggagcccagccagctctgcctctctcagggcctggagtcctgggggagctcagccagctctgcctttctcagggcctggagtcctggatgaatcctgcaggtttttggttgcaccggcccagggaggaagcggggggtttgtcaggtgggctctcctggaggtcctcgagtggcaggggtgaggaggggattatctgatgcatctggagatgtatatcctgtggtttcccctgcccctctgtttccgatgaggtgtacggatgagtgacctgcactaagaagtgagttgccacagtgaaaatgggttggtttttgtcttcgacgctcagggtctgggcgcctcgcatttgcagtctgttgtgacagacacggggagctccgcgtgccagcctgtggctgccctgctgtgggggtcctggggccggcgaggccccttcagtcttgttctggggggacggcccactccggggagggggtgtgctgtgctgagcgctgtatccctgaatatagtttattttttctacatttgaattctgttgtagatttatgtaaaaatacattcttt

SEQ ID NO: 51363 - DNA, 606 bp, Homo Sapiens
  misc_feature (520)..(520): n is a, c, g, or t
  misc_feature (522)..(522): n is a, c, g, or t
  misc_feature (532)..(532): n is a, c, g, or t
gggattatctatgggatcaaccaggccttaggtgctacagctaaagtcatcaccgaccctgatatcctgaaaacctgtgtaccagacctaagtgacaagagactggaagtggttgggctggagggtgcaattgagatgggccaaatctataccaagctcaagaatgctggacgtcggctggccaagtgctctgagatcaccttccacaccacaaaaacccttcccatgcaaattgacggagaaccctggatgcagacgccctgtacaatcaagatcacccacaagaaccagatgcccatgctcatgggcccacccccccgctccaccaatttctttggcttcttgagctaagggggacacccttggcctccaagccagccttgaacccacctccctgtccctggactctactcccgaggctctgtacattgctgccacatactcctgccagcttgggggagtgttccttcaccctcacagtatttattatcctgcaccacctcactgttccccatgcgcncncacatacacncaccccaaaacacatacattgaaagtgcctcatctgaataaaatgacttgtgtttcccctttgggatctgctaa

SEQ ID NO: 51364 - DNA, 665 bp, Homo Sapiens
aattaagctggaactaaagtcaggcccagccattacgctccccacgtgcagccaggtgcagcctgggcccagtcatgcctggctcatagatgaaatcccttaagcaggattgaagaccagtgaacgcccccgccttttggattttttgctcaattgaccgtcttttccagacctctttaagtcacactcttaacttagctttctctgatgtctgttgccgccattagtttttttctagagcccacactggcccacatagctccatcccatacgggtagctggctccagctgcgccaaggtgcagacccgccctgggcatgctggcctgtgacggagcctgaggtcacagccccctgactagcctgagaccttcctaggggctgtggctgtttccggggaggccgggaggggcagctgtgagccctgtggaggacgttgggagtaacgctgctttgctttggcaggttgaaggggcccggccaggactcggggaagggtggcctgagagcagcgatgacctctggggtcactgtcccaggagggacttcacctggaacaagagctggaggcagccgcttgcccaggaggcttgtcccctgaggcgcttcgccagtgaggtgcgggctcagggcctcgagtctctcctggagcacgggctgcggtgc

SEQ ID NO: 51365 - DNA, 664 bp, Homo Sapiens
ggaaatcgaggacttccaatatgacgaggactcggagacgtatttctatccctgcccatgtggagataacttctccatcaccaaggatcagtttgtgtgtggagaaacagtcccagccccttcagccaacaaagaattagttaaatgctgaagaagccttcaggaatccaaatcctgaacatttggaatgagcccagatagaaatatcgaatgcaaagctactggcttcacagagacaaccatttatgatttgctgttctgtaagagtgtggattctttctatcaactgctgatatcatcttcaggaagcaagtccataacatgacatatctggattttgtgcttagaaccttaaattggaagcattcttaattatgcatctaaatttaaaagaagataatttcaaaacagtgctttctttcccttggtttcatcattttcatatcttaaaccaaattacttcggtatctgacaacagcatcatctacctcagtcattaggatttcttaataacaaaagagattgtatttctacacaacacacaaccaccccacccacccacaccacacacacccccacacccacccacccccaccaaccccccccacacccccacacccgccccacccacccccccccccccccccccccccccacccacccc

SEQ ID NO: 51366 - DNA, 675 bp, Homo Sapiens
attaagttttcaatgaagttggcattttctgtgtattaagattagatgttagctgctgaagtttgtggaggtcggacataaagcttccaacatcagtaatgcaaaattgtcttgaacctgcgataaaattttgttggacttttttttcattgcagtgaaaagggccatgtagcatgcctcaaagccaggttactcagcctagtccttgtttaagcagttttgatattcattcaagttcaattttctcactgattttatgattaatttcttggaaaatttgaaagttttcaagaagtaaaaaattaatatcttgttatcccagtatatagagattaacttcagttcaatgtttggtgcattttcttctagtctttttttcaatgtataaatattaaagttatttcatagttgagatcatactgcatatatgattactgtatcttgcttttttcattttaacgtcgtgagcaattttcccatgacattacaaactgtctttgaaaaatggaaaacatttggggctgtcagcataactgaaaatgttttcttggtgtgacacatgtatctttgtaattggtttgatttagtgtgctttatttcaataaaaattcagtattttcattttacacacgaacgaacaacacacacagcaaatagaacaccaagaaaaaagaa

SEQ ID NO: 51367 - DNA, 700 bp, Homo Sapiens
ggcacgaggggctgctctgagtcccgcccacatatcagacaggcactggctgaagacaggcaactctcgtcccaaccatcattcaccctgagtgacgtacttcatcctccaatgactggacaactgcgatgccttttcctcccttttcctgtacactcccagcaacaaactcctcatgataactgcacacaatctgaaaaccactgaaggacaagccaaccacagcagccaagcccactccttgcagcatgggtactggtggcacaccagacagtgacactgccccacaaaggcctgggcccgtgggggctgctgcctggcatgacatctctccagacttctggcttaaaaccaactttccatccgagaagcctcctcagtagttactctgctcatgagacagatctgggctccaagccaggaaaggtgaacagaaaccacaagtgtccagccctcggtgctggagtggacgttaattgtcagccaccagactgtcccggcacctacagagaatgtttcacagttctggcatttaaatcctttgatagtggattgtgctgctgttagccttagtttcagtgctttacaagtctcgcttattatctcattggtatttaggtatacaaaacagttgattattcaccacgccaatatctgggtctctgtatctcatgtagaacataagaaaatgggaactaat

SEQ ID NO: 51368 - DNA, 565 bp, Homo Sapiens
tagtttttgctgcagagttgtgttgctttgtgattttcctctgggatagtgtactgtacacaaccagatgtgttccacactccgtgactccgcagtttgtcctggagtgacatacacatccaccatggaaagggaagcatctctgcctgtggattctcaagtacttggaagcacctctcctgaggaacctacaggattctaaggtttcctaggtcactgaacaactaatcttggtccctgaatatttctaggtttgtaagtgcagcagttttatttcctctagaactcatcctgtttcaagggaagtacctaagaagatatagagtgtttctagggtaagggacctgcaggtgtaagcatagatgaaataactgtcctgtcacatgtgcagcaggccatggagtgtagcgggcatcgctgccgccattcctgcagcatcaccataagcagtgcagggtgtctccatcgagctgtttggttccatgtgtgtttaacatgtgcagaagtagcttctctgtttaagtttaataaagttgagtttcaccagtaaaaaaaaaaaaaaaaa

SEQ ID NO: 51369 - DNA, 813 bp, Homo Sapiens
  misc_feature (795)..(795): n is a, c, g, or t
  misc_feature (797)..(797): n is a, c, g, or t
  misc_feature (801)..(813): n is a, c, g, or t
ggccgtgccagaactgcgcatgctggacgacatccggagccggctgcaggccggggcagacctccatgcccccctggaccacgcccaggaggccatcgtgtggcaacagccgccgcccaccagcccggagccgcccgaggacaacgatgaccgccagacaggcgcagagctcaggccgccgcccccggaggaggacaaccccgaagtggtcaggccgcacaatggccgagtagggggctccccagtgcggcatctatactccaagcgactagaccggagtgtctcctaccagctgagccccctggacagcaccaccccccacaccctggtccacgacaaggcccaccacaccctggctgacctgaagcgccagcgagctgctgccaagctgcagcgacccccacctgaggggcccgagagccctgagacagctgagcctggcctgcctggtgacacggtgaccccccagcctgactgtggcttcagggcaggcggggacccacccctgctcaagctcacagccccggcggtggaggctcccgtggagaggaggccgtgctgcctgctcatgtgaggctgttgctcagcatgcaggggccctgtcgcgggcacagcccaaggctgcctccccacggtgcgtgccctggtgctgcgggtgcagcacggaaaccccggcttctactgtacaggacactggcccctctcaggtcagaagacatgcctggagggatgtctggctgcaaagactatttttatcctgcaactcttgataaaggctggtttgccatggaaaananaaannnnnnnnnnnnn

SEQ ID NO: 51370 - DNA, 686 bp, Homo Sapiens
tatgctctgggctcctgtggaaggagggctgccctcttgccctagtgagggccccatgtggatccactctagtgctgggagccagcgctcccttactgggaacaggattccaggacccctttcttgttgtggctgccatgaagccacagctccttggggaagtgacctgctctcctttgggtgtatgcaggtgtgtggggggccctgagtggcaagttgcttagctaacaggagatccataggcagcctgcaggctaggaagtggcctagtgcaagatgagctgggaacaagggaggagagagcaggagctggggcagaggctgagccgggaggcccttgaggtgaggacacagcaggcccaggaccatggctggggaggatatgtcagcacctggaagtggagtgcaggctgcagcgcccagccatgtgggccaggtgcattcactcagagtggggccacacacccatctacccagtttccacaagatgtggctcctgccacacccacagggcagcctcctccaaatccctcctggaggggcctacccagaagcctccttgaaccagtctgcaaccctgctctatgctgaccttgtcactgaaccctgatctagacttatatgaattaatgacaattacatggccaagggcccttaaataaaaaaaaaaatagcaaaacaaaaaa

SEQ ID NO: 51371 - DNA, 759 bp, Homo Sapiens
  misc_feature (673)..(673): n is a, c, g, or t
  misc_feature (713)..(713): n is a, c, g, or t
ttttttttttttttttttcattttcaagttcattttttattcatatttatgttcatggttgattgtaccttcccaagcccgcccagtgggatgggaggaggaggagaaggggggccttgggccgctgcagtcacatctgtccagagaaattccttttgggactggaggcagaaaagcggccagaaggcagcagccctggctcctttcctttggcaggttggggaagggcttgcccccagccttaggatttcagggtttgactgggggcgtggagagagagggaggaacctcaataaccttgaaggtggaatccagttatttcctgcgctgcgagggtttctttatttcactcttttctgaatgtcaaggcagtgaggtgcctctcactgtgaatttgtggtgggcgggggctggaggagagggtggggggctggctccgtccctcccagccttctgctgcccttgcttaacaatgccggccaactggcgacctcacggttgcacttccattccaccagaatgacctgatgaggaaatcttcaataggatgcaaagatcaatgcaaaaattgttatatatgaacatataactggagtcgtcaaaaagcaaattaagaaagaattggacgttagaagttgtcatttaaagcagccttctaataaagttgtttcanagctgatcatggagccagtatttttctgacgggggcctgngtggtctgggggtgctgacatgttagaaaatgcgccctgttttccc

SEQ ID NO: 51372 - DNA, 830 bp, Homo Sapiens
ggcgcccaaattacaaaatgagtgtttttagattcaagtgacagtaaaaggatttgttcccttcagtgacttgagtgttttagttatgcataagtatttctagcaaaggaagggtagaaaggaattgaaaattaatttacactagttgctacttgggaataaagggctttttgaggggggtatggatattaaatgttttcgttatatacttatccctattaaaacaggcagttgtttctttgaatatgcctaaataacagtattcttaaaatctgacagacaagtaacatgtcaattacttgatattccttgtctccagtaccacaggccactcttgacatcccatgtttgcctggataaagttcctcatttcaaacagtatacatacttctttgcagttcattatagtaaggcttaacctgtaaacagtatctgatggcccacctataaataaaattcagcattctatttttaataatttgtatgccaccaatttgtattatttgtctcaataatacttagttcgacatataacccctcactcactaaataaaacatgtcggcccccctcggccccttcgaaaagctttttaaaccattcctttttggccgcgccgggccccggtaagtaaagttgaaattggggccctagaccggtttcccaaaagaagatcccggggccctgaaacaatgcctttggaatttctcacccaaataaaaaaaacgccccgggggggcaacccgaaacgggttctctaaaacaaaatcccgaaatggaactttcctgaagggtccattatcgggggaaccctactccaccacggaagttc

SEQ ID NO: 51373 - DNA, 663 bp, Homo Sapiens
  misc_feature (640)..(640): n is a, c, g, or t
ctgcttactactttatacttctgagtcagctcctttctgctctatcccagaatatttaccaacagaggagaactgctcccttttctgtttctcacagtttggttatggctttataaacttttatttggtgaaagccccagatacccaaatgtcattggcaaaacttatttttttttctggacagatcagatttctagagagagcagatttctagagagattagcattcatagtaagtgaaaattgtctaatttttttaatccatgctattactgggcagtaggtctaattttttttgacaaaaaatagatctattttccttatatattgatttagaatcttaagttagaattttatagaagaaatgtctgagcagttctatgtatggaggagcaattcagcttttcagcagcaactttatcttttgccactagagggagatctgtggttgctttctcctttggagaatagctgctttgcttttatttttaatttctaaggttggaatagaacttattctcaaaattcctttagtgttattaaatattttcatttattagtcaaaggtaagttaattaagcttgtttaatgatgccaatcttatgcttttctgtaatcttcaatttttaataaatgtgagntagatactaaaaaaaaaaaaaaa

SEQ ID NO: 51374 - DNA, 625 bp, Homo Sapiens
gcggccgcggctgtatgctcttttatttgtagactggattaaaaacaccagtcctgttttgtcagttcccagcttcttcgtttagaataaattagaccaaaagaagaaacgtgcttgtctctgtatacccgcagaatgaagttactgttgttaaaactggattttttcattttactaggttccgaagagtccagatgcttggtagatgttcaatacgtgatttttttttaattgaatgtgttcatttaaaatcctccttaacatttctagaaagacttctttcaataaataatggaatcttagaggaaaagtggttttttaaaagctagggaactcctccactaaaagtaaccattggaaacctcgaatgagggctaaagttttaatcataagagaaaaggcagcataatgaaatgtgtacacatacatagtcagtggtccattttaggaagccagtggcgtctgataaagaaatgttaagagtagtgaggttgaggaaggaaattgtggggatttgaaatattctctttatgttgtttctcttctgagtcatggtaaaacaataaattatcatctctaaaaaaaaaaaaaaaaaaaaaaaaagcctacagccgcgcctcgtgcc

SEQ ID NO: 51375 - DNA, 816 bp, Homo Sapiens
gttagtgagttgtcaagcttaatctaattggttaagtctaaagagattattattccttgatgtttgctttgtattggctacaaatgtgcagaggtaatacatatgtgatgtcgatgtctctgtcttttttttttgtctttaaaaaataattggcagcaactgtatttgaataaaatgatttcttagtatgattgtacagtaatgaatgaaagtggaacatgtttctttttgaaagggagagaattgaccatttattgttgtgatgtttaagttataacttattgagcacttttagtagtgataactgtttttaaacttgcctaatacctttcttgggtattgtttgtaatgtgacttatttaacgccttttttggtttgtttaagttgctgctttaggttaacagcgtgttttagaagatttaaatttctttcctgtctgcacaattagctattcagagcaagagggcctgattttatagaagccccttgaaaagaggtccagatgagagcagagatacagtgagaaattatgtgatctgtgtgtgtgggaagagaatttccaatatgtactacggagctgtagtgcccattttagaaaacctggtggaattttcccaaaaattaaattccttgaaccactttggttctttaaaaaacaacaacaccccccaactcactacacaaatggccagcgcaccaacacaggaggcggcgccacaaaacacaccggaggggggcaagtgttcaccatctcttgaaggggggcccactagggacgtttacaagggcgccgttttaacattgcgcggagaact

SEQ ID NO: 51376 - DNA, 1068 bp, Homo Sapiens
  misc_feature (751)..(752): n is a, c, g, or t
  misc_feature (754)..(755): n is a, c, g, or t
  misc_feature (772)..(772): n is a, c, g, or t
  misc_feature (777)..(777): n is a, c, g, or t
  misc_feature (780)..(780): n is a, c, g, or t
  misc_feature (798)..(798): n is a, c, g, or t
  misc_feature (810)..(810): n is a, c, g, or t
  misc_feature (812)..(812): n is a, c, g, or t
  misc_feature (814)..(817): n is a, c, g, or t
  misc_feature (841)..(841): n is a, c, g, or t
  misc_feature (880)..(880): n is a, c, g, or t
acctttaagggccagttgtggggttggtaagcacagttatgaaaatttctatctagcctccgttttgaatggttttaagaaattttgtatatggaggatggaaatgcttatatatttattgaaaatccttttatttgaaattaaaattatttggtatataattgtttgatatttggggagggttttggaggggagataatgtcactgataaattaaaagcctgttgattttgcagaaaggtactgttagtgactgataaggatgcctttgttttgtacatgaaccaaatctttgttttacatttcttttatccaaaatatttaggcatctgacattttcaaccagaatttcaattatatactgtgatttttatttgttgcaatacattacaatttcagaggtactttggggctcaaaagctaggatttctaagtcagtatgtgcatttcacacgataaagctgttaatggtgagcaaagtattatatactaactagatttttccacatctgtatagtatattatatgtattttgtggtattgagagtatagaaagtttagagtgtcaaacatgcgtttaatgtgtatttttaaacaaatttatggcaattaaaatatttggagacaagggtatcacatttcaatttgtaaagatctttttaactctactgtgtcattaagatgctttgtacaatgccaaaccatagttggagaaactaagtttaataaatatcaaatagattttctgtccnncnnccccccccccccccccnccccnccncttcccccccccctcccncccccccccccntncnnnnccccccccccccccccccccttcntcccccccctttccccccctccccctcttctcctccccnttctcctcttccccctcctttctcttctttttcttcctcctccctttgttccgcccgcccttcttctttattcccgcgccgggcgaggccccgttttaccacgtgcgctccctcttttttttcgtaacagacaacccccccccccccagcgacgcctttctatttatttttttcccgcaccccccccg

SEQ ID NO: 51377 - DNA, 635 bp, Homo Sapiens
  misc_feature (635)..(635): n is a, c, g, or t
atcaaaaagaggcagatgatagacactggggtagggtcataccacagggaaatacctttcctgggcttgttttctagcatatcactgacctgggatctttgggtgatcaagggtgtggttagtggaggctctgtgctgcacgtatgcagtatcctatctctttctacatcagatcaaaacactaagttggtgtactgcctcgaccttttttcagctcatcctggaacatatacagagttgagagttttagacaatctctaggtagaggagacaagatgtagacccagacagaagaaatctgcttccctaccatggctattccagcaccccaacctgtaattgccaagtcctctaaggtactaatttgtagctgctctgaagtaaggatttcggattcagctggtagggaaagactctgcacctgctgtcttagggaagaaatggttcaaatccatgtggtgacattgcattagtctccctttcactgttttcttattctgtaattgtttgttatatttcccaaaaacgtcttgatcactaagcaaagctgctagtgggattctatatttcgtgtcatcttttttattataatttattgcaaatttttttctgaataaatatatgttgtgtgaaan

SEQ ID NO: 51378 - DNA, 957 bp, Homo Sapiens
  misc_feature (727)..(727): n is a, c, g, or t
  misc_feature (915)..(915): n is a, c, g, or t
cagttgggttcttaatgtgaaatgatgagaagcacaactccagtgtgtctctttgtgtagaatgtcagcagacaccccctgctagatgtgctggatcatgggaaagcatttccatttgttactagattgttcagaagttttaatttatgatgggtgtggtggctcatgcctgtagtcccagcactgtgggaggctgaggcaggaggatcatctgaggccaagagttcaagatcagcctgggcaacatagtgataccctatctcttaaaaaagaagaagtttttaaatttgaaataataataggtactggatttatgcaaatgtcttttctgcgtcttttgagatgagtatcaggtttttttttttccttttatcatctgatgatgaacttaatgtttccatttgtattaatggaatactaagtccctctgtgatttctgaaccaagctattcctaggcctgagttttattttgttgacacagaaataaattagaaggccaagcgtggtggcatgtgcctgtagtcctagttgctgaggtaagaggattgcttgagcccaggagttcaaggctgcagcaagctttgattgcgccactgcactccagccttggggacagactaagacgctgtctcaaaaaaaaacaaaaacgaccaaaacaaccaaaccggaaaaaataaacttagggcaatgaacgtcccctggccaaatggctgggagggaggcacncagggggtccgggaaaggtaacccctgaaggcaggaacttggaaaagccaaaataagatttgggagggccaagggggggtgggtccacccaggtcaggggagttccaagaccaggcctgggccaacataagggaaaacccccgtcttttccttaaaaatccccaaaaaattttccccagggtgttggntggttggcttcccttgtaactcccccccctcctttggggggg

SEQ ID NO: 51379 - DNA, 719 bp, Homo Sapiens
gggaagcacctaaaaacactgcttgattgtgcatagaacactattaatcttgggaatagtgctctatgcacaatgaagcacctaaaaacactgcttgatattataaatttaaaacacaagtgaaagtttagccatggttttgtgcggcatcatagttatgtcaataaagtttatttaggtcatagaatatcctaaagtatcacatagttaaatttttcagtcagtgaagaccgggagggaatgtcagtgaattggcttgaatgttctgtggcaatccacaggtctagccaaatattgaaataggagtttagggtataatttgccttgtgatgtttggcagtcactgtttatactttaaaggttatattttaagctatttgagattgcttttgggaagatcactagatttatggaggaattagtcacaaatgacttgtagaaaatactgtcatatagttcatttcatcattttctgttgcaggaagccactccaccacagaatgctaatatgccagtggtacccagtacctcttgtatataggttattgcaaatattgttctgaaatgcttaacttcagaattacattttttaaagtaaataattgttttaaatctattttgtaaagatataaagtacaatagaatttctggagtacagattaaactatttgcactaacacacgtgacgtgcatgatttaataaaataactttactctcc

SEQ ID NO: 51380 - DNA, 724 bp, Homo Sapiens
gccccaacggaggcgccctcggaggtggggtcctgagccgcacagctgagccgcctctgacccctgctggctgggcctgaccttcccgagcccgtgggggtgggggaggccagccacctccttcctctgggactgcccagcctgtgtcgggggctttcagggtttcgtggggtttgcccggaaggcggctttcctccccctggtgtgaggtcgcgcccgaggcttgtacccgctagtgaggtgtttgagctggtcagcaaggagagggggtggggttccgcggaaggttctggaggggtcttggtaggtctgcagtgaaccgtcctgaggatggagtggggtcccatggtgcaggtctctgagcaaggcggaggtgtggaggagaggccggcttggggtggggcctcgcgccctagtgccggccggcctcagcccggctctgcctggtgctccctgcagtgccttctccatggccccgccctccccgcgtgtgcgccaggcttggggtccccgggagagcagagcttgcgcctcgggcatagggacgtggggtgcaggcgccaacatcagtggcagcagccagggccgtggtccagtcccactcggggatggagtgggccggcggccaaaccagtcactcggggaggaatgcggaggagcgctcattccattctatttaattgcagtgtacaaaattgtgtcgtatatagaataaactgtctgt

SEQ ID NO: 51381 - DNA, 499 bp, Homo Sapiens
cacgacgtccaggactatgcagacaatatcaaagctcagctctttgaaacatccagcaagacaggccagagtgtggacgagctcttccagaaagtggcagaggattacgtcagtgtggctgccttccaggtgatgacagaggacaagggcgtggatctgggccagaagccaaacccctacttctacagctgttgtcatcactgagtcagcactcacctggcctgggggaattaaaggaattccccgtaagggctggacccagctcctttctgggcttgggtagtcaaatgtctgagctaccccaggtcctcatgtcagcagagtggcgcctgcctgtgctggcccatggaacggagacagcattgggctgactgtgggcatgaggagggataaggctgatttggaccccaggcttctgccctggacagcacttgtgtctgcagattatttaagtggcttttgatctgtaaataaaatcagtgcactgtgcatcaaaaaa

SEQ ID NO: 51382 - DNA, 725 bp, Homo Sapiens
  misc_feature (640)..(640): n is a, c, g, or t
aatactctaagatctttgaacagaaggatcgtttgagtcagtccaaagcctcaaaggaattggtggagagaaggcgcaccatgatggaagatttccggaagtaccggaaaatggcccaggagctctatatggagcagaaaaacgagcgcctggagttgcgaggaggggtggacactgacgagctggacagcaacgtggacgactgggaagaggagaccattgagttcttcgtcactgaagaaatcattcccctcgggaatcaggagtgacctggagcactgtgcgcagccgtgtgtgctgtggagccgaggccgtcctgcaggaagccgcgtgactcccgcctcctccctgtgctctctggctctggactgtgactgcgcctggattctgccattgcgacacatttttgtgcctttcagcccctggtgtctgcagtgggggatttaaggcacccgcttccacttctttcttgtttggagttttctgttggaaccgccggcgttggctccgaagacttagcgacgccactggcggcaccttctcctgcgcccagtgatgtttccacggtgcctgtacacagccgagcagcatttccgttgaaggacttgcatccccattgcgggcagtgctggacgtgtcncggagaccaccgggagggcgcgccatgccttgtaccccaccgtgcaggttgtggccggttttctccgcaggttgaacatggaaat

SEQ ID NO: 51383 - DNA, 500 bp, Homo Sapiens
tagttaatcctagttctgttgacattggaccaggctcagtaaataaacgaatggatttccagcctttttttcccatctgttcctgcttttagtcctctgaatctgcttcttttcttactgctgctttattttacagtgattttgtcaaacatagaatacaggactaaaaatgcaaagaaattgggtctgtgtttaattttgatgtttcaaattttgagcttccaagtctttgtggccacccaatgaagtttgagtctgcctgttcagatgtgaaaggtaagggctgcagcaggtttaagggtggcccttcaccaccctgttgtcacctgcacaggcactcccccatttgcagatgaagaaatgttcagagaagaaaaatgatggaccaaacgtctgtttgcacaattgaaactctaccagtggactattctattttcacagctacctagtttctgccgatgatttttttaaatgtgaaataaacagtgatactttcaaaa

SEQ ID NO: 51384 - DNA, 356 bp, Homo Sapiens
ccaagaattcggcacgagggtggtgggtgcagtccccccgctgtctttgagttgtggtggacgctggcctgggatgagagggcccagaagaccttcgtatcccctctcagtcgcccggggctgtcccgtgcatgggttggctgtggggaccccaggtgggcctggcaggactccagatgaggacaagagggacaaggtatggggtgggagccacaattgaggataccccgagactaccaggagagccctgggctggaggctgagctgcatccctgctccccacatggaggacccaacaggaggccgtggctctgatgctgagcgaagctataggctcttgttggataaaagctttt

SEQ ID NO: 51385 - DNA, 885 bp, Homo Sapiens
atcgaatggacaagtataattttgatacaatgatatatgtgacagataaaggacaaaaaaagcattttcagcaagtattccaaatgctgaagatcatgggatatgactgggcagaaaggtgccagcacgtgccctttggagtagtacagggaatgaagactcgaagaggagatgtcactttcctggaagatgttttaaatgagattcaattaaggatgctacagaacatggcttcaattaagacaactaaagaactcaagaacccacaagagactgcagagagggtcgggctcgcagcactcattattcaggacttcaaaggtttactcttatctgactacaagttcagctgggatcgtgttttccagagtcgcggggacacaggagtcttcctacagtacacacacgcccgcctccacagtttggaagagacttttggatgtgggtacctgaatgacttcaacactgcttgtttacaagagccacagtctgtttcaattcttcagcatcttctcaggttcgacgaggtgctttataaatcatctcaggactttcaacccaggcatatcgtcagttaccttctaactttaagtcatcttgcagctgtggcacacaaaacactacaaataaaagatagtcctcctgaagtggctggggccagacttcatcttttcaaagctgtccgttctgtcctagccaatggaatgaaacttcttggaatacacctgtatgtaggatgtaatttcccattaaaaatggcttttaaaatgaccaaaaaaaaacaaaaaaaacaaaaagaaaagaaagcacaacaaaacaacaacaaaaaaaaaaccgaacacgaaaaaacaaaagaaacaaacaggcaggaccgaaaaaaaacac

SEQ ID NO: 51386 - DNA, 935 bp, Homo Sapiens
acaacagccaggttttctacaccaactgcagctgcgtggtggagggcaaccccgtgctggcaggatcctgcgactcaacgtgcagccatctggtggtgcccttcctgctcctggtcagcctgggctcggccctggcctgtctcacccacacaccctccttcatgctcatcctaagaggagtgaagaaagaagacaagactttggctgtgggcatccagttcatgttcctgaggattttggcctggatgcccagccccgtgatccacggcagcgccatcgacaccacctgtgtgcactgggccctgagctgtgggcgtcgagctgtctgtcgctactacaataatgacctgctccgaaaccggttcatcggcctccagttcttcttcaaaacaggttctgtgatctgcttcgccttagttttggctgtcctgaggcagcaggacaaagaggcaaggaccaaagagagcagatccagccctgccgtagagcagcaattgctagtgtcggggccagggaagaagccagaggattcccgagtgtgagctgtcttggggccccacctggccaagagtagcagccacagcagtaccctcctctgagtcctttgcccaagattgggtgtcaagagccctgtgttccattctggctcctccactaaattgctgtgtgacttcaagcaagacattgatcctctctcagcctttgcttgctaatctgaaccaaaagttgtttgggcatttgctgtgttggccatttctgggagcaagaaggtcttccttcctccttccccccagccagcaaacctgtccctgggggccaaggccttcccctgggggtgggaaaccaaagaaaaacctttctcccctgggtggcccccctaggaatacccaaaaagcgcgaacccctgaatggggggtgcccaaagccctttcccc

SEQ ID NO: 51387 - DNA, 896 bp, Homo Sapiens
  misc_feature (584)..(584): n is a, c, g, or t
  misc_feature (658)..(658): n is a, c, g, or t
  misc_feature (673)..(673): n is a, c, g, or t
  misc_feature (680)..(680): n is a, c, g, or t
  misc_feature (696)..(700): n is a, c, g, or t
  misc_feature (703)..(817): n is a, c, g, or t
  misc_feature (819)..(827): n is a, c, g, or t
tgaaaatgatatggaaacttctaaaatggaatttggtgcatatgtactgctgaataaagaccgatgaagaggtttgagtagatgtacaaatcaagtaatggtttgaacacctttaataatatgcctaatctgttcaattgttttagaatctttttatcttagatgtaggcagccatgaacaatctattttgagccactttagggagaaaactttgtatttttaaaacttgcataaaagttatgcaagtggtttttataaattggaataatacctcagttttgaggttatgcacactaaattaaatgtgacataaattaatttgtacaaaaagaactctttataaggtggctcattgtaggaaatcctgtgccttcccctttgagcacaagtgttgcatgaacaacagtttgctataagaaacataccagattagccaccattagcatctatatctactttgtgtttaaaaatcaactggtaattctgaaacactgtagaatggataaaaattattttgtgatcataactctttgttgaactagagtatttttgcagcattccttgtcatcagaaacatggttanagtttaaaactagaagcagcagaaaactagcttgtaaaatttatccaagtagagtgcaggctaggctgtcttgnggaaataaacattanaacttanagcaatgttttaaaannnnnaannnnnnnnnnnnnnnnnnnnnnnnnnnnnnnnnnnnnnnnnnnnnnnnnnnnnnnnnnnnnnnnnnnnnnnnnnnnnnnnnnnnnnnnnnnnnnnnnnnnnnnnnnnnnnnnnnnannnnnnnnngggggggggcccctaaaaaagaaccccccccggggggggccccaagttttccgcggcaccccccctttt

SEQ ID NO: 51388 - DNA, 1004 bp, Homo Sapiens
tgaggccagtgttaatggtcaaatgccacagccagagattggaccgccgacattttcttcacctctggttatccctccatctcaggtgtctgaaagtcatggacaatggtcttaccaggctgatcttgaatctgagacccctgggcagcttctgcatgctgattatgaagagtcactaagtggcaagaatatgttcccccagccatcttttggacccaatccattcttaggcccagttcctattgcacctcctttctttcctcatgttggtatgggtacccttttcagggattcatagaaaatccagtaatgaggcagaatattgtcctgccctctgatgaaaaaggagaattggatctgtctctggaaaatctggatctgtctaaagattgtggttcagtttcaacagtagatgagtttccagaagccaggggtgaacatgtacattctctccctgaagcaagtgtgagcagtaagccggacgaaggccggacagagcaatcttcccagacacgaaaggcagatacggcattggcttccatccctcctgtagcagagggaaaggctcatcctcccactcagattctaaacagagagagagaaactgtgcctgttgaacttgaactaaaaggaccattcaaagctgaagaaaaaaccgaaaaagtaaagatcctaagactgtggtgatgtggtccagcctgggggcccagcttctgtggataaggccgagtgcaaggaccgaaaagaagagagttcagcaagatgcacacgaagtggtcactcatctggaagggagatccaagcagtctaatcaactttgggacggagtacaaagggggggcaccggcgggggcgctccacgttaacggggagcggagagcgcgaatcggtatgttccactcacatcggcggcctaaggcgaagagcacgaggacgcagaggacctggctcgcatgtcaactccggtgtggaaaaaacggaggccccaccagaagaggggtaca

SEQ ID NO: 51389 - DNA, 549 bp, Homo Sapiens
gcacgaggttctccaatataagggaaaagcaggttggtactacttctgattaggcagaaaacaccaggattccttaagtgatccttgaaatggttattgttttctgccttgtcacatttgccactgtgccctttaaaacgatgtggaaacctcaggtttgtggacagcacaggtggaatgacatcttgtgcttcctgaggctcccctctaccaggcacattagcttagtgcttcagatgtcagcccaagtccttgttacctccttttcctgctgcccagggaagagtgtgtgtgctggagctggagcgcttgcactcttcaggtgactattctcacctccatttcctccacatgcattaggtgaaactgaggtctaagcctcctgcaaggtctacattttaaggactcacacatcaggctctcagaaatgtacacaggtattagttctgtttgttctaaaggaaatgtgggtatctctcaggccaggacttagtgactagttttcgctagacagcaggttaatacctagatctcatttaaaaaaaaaaa

SEQ ID NO: 51390 - DNA, 614 bp, Homo Sapiens
gtgaagggaaatgagggctttagtttcctgggcagggaggggcagcttctgaggttgccaaaggcccccactggatggaacctgttagctgctcctctccgcagccagaaatgctgccggctgcacccagagggagcagtgaggcaggacagatggacaggttcctcctgcgctgtaattccctgctccctggagactgggaaaaggccgcagggcagggggactgggcggtggtggctggtggtttaaaggttgaactttctctgaagctcctttccccttgctcttggtccctgccccgcaagcaaacctgccccctctgcctcccagtgcacccaatgaccccctcccttggggcgactcctgatgaagcacaactccccgcagggcccccagcccacaggggtggccatatttgggcagttcccagtcctgtgggctcggctatctggggagcagattttgggtctggatctccctggggagtgggtcctgggcttggatctttccctagggggccctcttactccttcctctctcctcctccttccccattgctgtaaatatttcaacgaaatggaaaagaaaaaaaaaagaccaaaaaaaaaaaaaag

SEQ ID NO: 51391 - DNA, 785 bp, Homo Sapiens
  misc_feature (621)..(647): n is a, c, g, or t
  misc_feature (723)..(723): n is a, c, g, or t
ggggggcttcaggacttgctgcttcagtcagcctttattagcaccaaagactttatgaagatcccacacacagacacacatcccttcccgcctcccccctgccttcagtaggatctggctccgtggctggaggaccaacccctatagtgggaatgcagagcttaacgtgtactgcttgtgtgtgtgcgtgagtgtgtgtgtgtgtatgagtgtgtgttccgcctcccaccctctccccatctgctctgggtatttttgtttttgtttagttttaggtttacaacagagaggaattaatttatcagcagcctaaaactgttgtgtttttcttatggtttaaaaaacgccatgtcattgataactccctttctcccttcccttctcccggtctgctgatcactctttcatgcctgtgtatccagggtgctctgtttccccaccgttcccaggtgtacgaggcagagggccgggacagctttcctctcagtcattgttcaccccacttgaaaattcagacaagaaaactttgcttaaaagatttcatgtgtggggaccacagttcctggctgcctttctcctgtgtatgtgtgaattccttaataaatattgcaggggaagacnnnnnnnnnnnnnnnnnnnnnnnnnnnaaaacatgtcgggccgccttcgcccttcgaagagcttttctaagaccatttcgttttgccggcgcgggccccccgntaaggtaagggaaacctgggtccatatacctggtttcccctagggagaatcccttggtccat

SEQ ID NO: 51392 - DNA, 627 bp, Homo Sapiens
tgggaagcaggatataagcccaggctggcaggctctttctagctacctgctcttgcacatagagtttgcctcatggttgcaagaaggctgccatagctccagatggcacatagacattccaggcagcaggaaaaaggaaggagcacttaaccgaaggaggtcagggagttggttagtctccacctgaagaagagagccatgaaccagcttcagttgactaacgggctcctgtgagtgcatctttggacttttctggaggttgaaatctagatgtggtatgtgtcttaaagcagccaccaactcctcccattaccttccaagtgagcccaactacacgatggagcctcttccctgcccttggatctgggctgagcctctgacttgcgttgaccaacagaatgcagtgaaagtgatgccgatactaccctccctgccctagacttgggatacctggcagctatattcttccattcctcaggacttgcaaaaacgggtctcagcatgccttcccagagccatgaggtgtttctttgcccattcattgatctgagaagtgagtgtaaggagtctaaatcaacctctgttctgtgctagttaaggtaataaagttgctgcagtccagggggt

SEQ ID NO: 51393 - DNA, 441 bp, Homo Sapiens
aggccatgttttaaactcattttagtgcatgtatatgaagggctgggcagacaatgaaaaagcaatacattccttgatgcatttgcatgaaggttgttcaactttgtttgaggtagttgtccgtttgagtcatgggcaaatgaaggactttggtcattttggacacttaagtaatgtttggtgtctgtttcttaggagtgactgggggagggaagattattttagctatttatttgtaatattttaaccctttatctgtttgtttttatacagtgtttcgttctaaatctatgaggtttagggttcaaaatgatggaaggccgaagagcaaggcttatatggtggtagggagcttatagcttgtgctaatactgtagcatcaagcccaagcaaattagtcagagcccgcctttagagttaaatataatagaaaaaccaaaa

SEQ ID NO: 51394 - DNA, 442 bp, Homo Sapiens
  misc_feature (406)..(407): n is a, c, g, or t
gggatccaaagcagatgaatgttgctgctgctgtttgggctgttgtttcttatgttgttgcagacatggaagaaatgctgcctaggtcctagaaacagtaagaaagaaacgttttcatgcttctggccagggatcctgggtctgcaactttggaaaactcctcttcacataacaatttcatccaattcatcttcaaagcacaactctatttcatgctttctgttattatctttcttgatactttccaaattctctgattctagaaaaaggaatcattctcccctccctcccaccacatagaatcaacatatggtagggattacagtgggggcatttctttatatcacctcttaaaaacattgtttccactttaaaagtaaacacttaataaatttttggaacacannataccatacccccaattaaaaaaaacatgtcggcc

SEQ ID NO: 51395 - DNA, 668 bp, Homo Sapiens
tcctcagctgcactgcggcctggtggcagtgtggggagtcacacttctgtccacctggcctcctctcgcctggccgccagccccagccccagccccagccccaggcccagctgcctttggctttgatctcaagtcaggctgaaggcagcgaagcctcggggcccaagcccctccccagccccctctcccggacagacgccttgcccagggtgtgtttgctgagtgtcttgactaccgtgacaccacgcatggccagagctagcgtccctactgcctcccgactcctcagtggaggaggagctgcggtccctctggtgtctgccatccccctccctccctgggcccggccctggacccgtcaggtgcctgtccccagccccaaccccactcatgccccgtcgtcctcccagacaaatgaaaccacgctgcgcttccgatgcccccgcttgccgtgtaatggttcagctaatcccatggcgagatgggggctcactccggaggaggagccaggcagcagggccttcctgaccaacagccagctctgtccttccccccaggaaacacatgttcatttgtgtgatcatgtatagacctcagaacggaagataggactgtatataattgtaataaataccagttgccactatttaaaaaaaaaaaaaaaaaaa

SEQ ID NO: 51396 - DNA, 931 bp, Homo Sapiens
  misc_feature (666)..(666): n is a, c, g, or t
  misc_feature (755)..(758): n is a, c, g, or t
  misc_feature (760)..(810): n is a, c, g, or t
  misc_feature (812)..(812): n is a, c, g, or t
  misc_feature (815)..(825): n is a, c, g, or t
  misc_feature (827)..(827): n is a, c, g, or t
  misc_feature (836)..(840): n is a, c, g, or t
  misc_feature (842)..(844): n is a, c, g, or t
tgggccacccctctggtctgtgttagggacagaggaaaacttggtgtgcctcctggtgtcacagaactggatcctctgcataccccagcttctccacatgccactgctaggggtaccccagctgctgccactcctgctggagggtgaactggggaccctgcaccctccgggaagccatggagtctgctggaggcaccatatcagcctgcgggactagggtggggagcaaacaggccagcggtggaggtctggacagttcaagtgtgatgcagctgtggcaaggagaaatccttccgcctctgggcctcaggctgcctgtccataaaatggggacatggccagctgacggacaactgagtctccggcccacctaccaccgccagccaggatcccccaaagtgtgcagagggctcagcagagaacagtatgggaccccctcaccaggcctggaacacctccagccacaaagaagccaaaggtcagtccctctgctccccagcaaacggtgcctcccaggcattctcagtgccagggcttcatccctgtgaaggcacagggcctgctagtgggcacaggggtggctagttggggcctggggcagaggagggctgcaccaggcgtccctggggaatgtgctcagtgaagacgacactgggctttgcacangctgggtgtcgctgtacagaaactgtcaaggggaataaaagtggttcttttggttttttaaaaaaaaaaaaaaaaaaaaaaaaaaaaannnnannnnnnnnnnnnnnnnnnnnnnnnnnnnnnnnnnnnnnnnnnnnnnnnnnnanaannnnnnnnnnnanaaaaaaaannnnnannnggggggggcgcggcttctaaaaataatcccctcaagggggggccaaaggtttttagcgggaacccccatcttttttttggggacaaa

SEQ ID NO: 51397 - DNA, 498 bp, Homo Sapiens
  misc_feature (464)..(467): n is a, c, g, or t
  misc_feature (469)..(472): n is a, c, g, or t
  misc_feature (475)..(475): n is a, c, g, or t
  misc_feature (478)..(481): n is a, c, g, or t
ggggggggcgttctctcgagtccgggccgcaagtcccagacgctgcccatggaggcgtccagcgagccgccgctggatgctaagtccgatgtcaccaaccagcttgtagattttcagtggaaactgggtatggctgtgagctcagacacttgcagatctcttaagtatccttacgttgcagtgatgctaaaagtggcagatcattcaggccaagtaaagaccaagtgctttgaaatgacgattccacagtttcagaatttctacagacagttcaaggaaattgctgcagttattgaaacggtgtgaagacggattctttggttgataaattgctatcattctaaagtcatggacttcactttcggcaacaaaactaaataaggatggaacatttattgaatgaaaaatgcacttttgtttttccatttttttaaataataaaaatcagacaaacaggtaaaaannnnannnnaanaannnnaaaaaaacatgtcggcc

SEQ ID NO: 51398 - DNA, 621 bp, Homo Sapiens
aaaatattttaggcttagaattatctaatggaaaaaatgtaaaaaagtacaaaaatgaactaaaagtatatcagtatttgcagtatttgctgtgattacttaggtttagactttctcaacttcttagatgactaaatgggctgaagacttgtaactaacttgaataggatagacttcataccctgtgacaaaaaggatggggaagagaatatcattggtcttgccatatacctcctagctaaaaggaaaatggtttgtagttgttcttgggcctactgtgttgcttttcagaaggacataagactttctactttatctgatatggatatcgtctacttcctcattcctttatgctcacttatggagtagttacatagaaatataactcttggtggtactgtattttaaggtaattcagaagcagtatgtattatttatgtacatgtacaggacaccattcaaaatggcttgaaaatattcagcatgtttgttatttgctgttatattgtatgtttagttttgtatgtgataaacagaattgatgtaagtttttgtggacttgaatttctccttccttgagatcaattaaacagcagaaaaatattgaaaaaaaaaaaaaaa

SEQ ID NO: 51399 - DNA, 244 bp, Homo Sapiens
gatgtgccttaatttgcataaatcataaatgtatgtcctctctgtaattgttttaatgtgtgcttgaaatatccagaaaacctatggagttagtaaattctgggctgtcatatgtaggatagccactttttaggtatatgtacatttatatttctatcaattccttagaaagtaaaataaatgaatagatcaaaaaaaaaaaaaaaaaaaaaaaaaaaaaaaaagtactctgcgttgttaccac

SEQ ID NO: 51400 - DNA, 588 bp, Homo Sapiens
atcccaacctggtgctaggtcatttcacttttctgaaaacctcacatcaggctgcatcctcttctgtccctggcaccaggctttgtttacacttggagccaccttggtgtgggtcaccgggacagtgtactcctctcctgccagcctccccttccccgaggtgtggtggctgcagtctcaggaagagcttggtacttgtggggacttctgttttctccctgtggagatcagtgaagactgggaggaaagctgcttcaacctgagtccggctcttcagcaggctgcacaagtggaagcaactaattctggtgctcaggctgggctctccacccaagttaggcctgctctggcctaatggatcttactgtatgagcaggacggctgcattggattgtacaactgttttgtgatgcccccagacactgtcatcctaggccgagaagaacctgctagcttgacataccccatgggcttatccttaggttttggaattggtcaacagtgaggcagtctcccttcctgaccattcttctccacccagtcacagataagggaataaccttggccatatatttgctcaataaagat

SEQ ID NO: 51401 - DNA, 735 bp, Homo Sapiens
  misc_feature (567)..(567): n is a, c, g, or t
  misc_feature (591)..(591): n is a, c, g, or t
gtcattctaaagctagaggaagtatgtgatatacacatggactaaggctcaggtgacactatggctagattaacatctgggattaggactggaaacacatgtcattttgaactaagggaaactctttgtcatcctaatttggaatttggtccctggatggctagggatccatgaaccaggcaggtaccttttttgtttttgttttgttttgtttcttttctgtttgaattaagatgggctaagatggggcttgcaacattaaacatgagctgagcatccataagcattgaattgggattaaataaagatgttgggcaggaactgaacactgctaatatgatgataaatatgcctgactaaagccactacagaaatccagagattggctgttaaaatttgttttgtggaaagactaattctctttgatactgcagaggcagtggccatggatctgttcctctgtgctaaatgtcttgtggcagggtgtgtttgtgggggagtgttcactggtactcttgagtggcctgaagtgacccattctatgaattggttaattaaggtgccaanaaaaaattaataatacaagcttgngcttttttgacaaacaaacacaaacaccaaaaaaaaaaaaaaaggggggggggggtcaaaaaattaatccccgggggggccccaagttaaggttaccccgttttttttccaaagggggcccccaatagggggggcgtttaaaag

SEQ ID NO: 51402 - DNA, 1053 bp, Homo Sapiens
attagatcccttttatgaagggatcccattgaatgcagcattaactcagaacgtagcataaagtcgtcactgctcccagctgggacgtggtgtcttggcatcccttcctgccgtccttgactctttcccatcttcagttctataattttctcccaaacaaatgctcttttagagttaacactaaagatctggtctttgccgtcaaggttgacagaacagctgttcatggtgtttgcggtgaaacccgtgttctctttcaatgcagtctgtggctttaacgtgtgtcctgtaatttcgccaagatcatttcttgcctctggtaacttgggggtggatttccttgggctctctaggtgtactgctatgtcagatgcaaaatgtcacccagcttcctgtcacatatccttgtctgtgcattcatgcatctacctcattccggttttctttctaatctcatgtattcctgttgtgaggaaatgtgttcttttcccgatccttttgtagttcatacacatgacaattgggtttccacgcacgtgcatgagatgttcctccttcaaaccttgttactatgtcagcacattaactgcctggcatggaaaaagaaaaaaaaaaaagaaatatgttcttttcctaccatttgaaaaaaatcctccattgcttttattagagttttgaatacttgtgaaaatttttcaaaagaaagtaattgattaccatttttgctgcttattacgatgagctgtgtccattaactgtgtcacccccctcttgcatttccagaatagtccctacccaattgcagcgggcatgtttttgagtggtgttgcattccatggggcttgaatttggtcctagaaactggcacagcggcctgcccctactgggaacccttggggtgtgggccccggttgcccaacattgggaattttgccacccccctttctaaggctaatttaaattccccccacaaacgaaaaccctggacccaggggggatccaatcattcctctcgaaccttataaactttaccgaaacatgagtgggcccccg

SEQ ID NO: 51403 - DNA, 702 bp, Homo Sapiens
  misc_feature (655)..(655): n is a, c, g, or t
gcaagtactctgtaacacaaagtgggaaaccacttcctggtgctgccgctcctgcccccactttaggtgggagggacgagttttgccctctagattttaatccagctggtgtccaccggatgttgccctcctggggagcagatatcagtctgtggaactctgggaaaaccacaggcacatttttcggtgcggacagatttgccagcacataactgggcagccagctagaatactttgtggaaattaagcgaggttttccatttcagccccatggtgcatggtggtggccgatgaatgtgtcagtctgctcagagaaaggacaaaaaggaaattattttcaaaactgtgttcactgtttgggtgtgtgtatggctctgcatgtgtgtgtttttgtctctgtataggtagaggtattcacatcttactccgactgtaaggttgtcttacttcatctctgcccccaccacagttgccattttgtaatgtccttccaacatggagaagacacgagctctctccagttggcatcatttgtcttttttgttgattgcctcattctccagtgaactccatctggccaattgattcagaatcaggcaagatccctgccctttggcacatccactgaaaggccaaacagcaagtccgagtgagntttaaatattaattaatcaccctttattttttacacttgagagtgat

SEQ ID NO: 51404 - DNA, 792 bp, Homo Sapiens
  misc_feature (736)..(787): n is a, c, g, or t
ggaagacaaggaagggaatgatctttactcaagaatttcagaaagtcagcactgaagtcctgacctatcagtagacacatttgtccctttcagatattttaggatattctagcaaagcaggccatttctcccacctgaaagtacataacttctatcacttgccacataattaaaagaactcacattaagcggttactcagacagttaatcatagaaaagattatttgcttcatcagttcatagaaaagattatttgcttcatcagttaacttgtttttataaatcagggctgtgttcatacacagaaggggcctgagatttctgcactttaaacaagctcctcctaggtgaggatgctgtggctgttctaattacattttgagtagtaaggtctacagcattgttcctcaaacttggctacgtattggaatcacctaaaaagttaaaacaaaacatggatgtctgggtcccgccccatagagaatgacttaattggcatggggtgcagtccaggcatcatgatttttagatttcccagttggaacttgtgcagcaaagtttgggagctactgatggacatgtgaaaagtaagtataaatggaataaaattaattaggctaataggcttaacccaggaaatcctaagttccttgaatatccagtttgcatttggactcctcatcatatacttggtatataatactctaaataaagctgcctgagttgaattgtaaannnnnnnnnnnnnnnnnnnnnnnnnnnnnnnnnnnnnnnnnnnnnnnnnnnnaaaag

SEQ ID NO: 51405 - DNA, 687 bp, Homo Sapiens
acgcgagaggcaggccaggctgcaccaccccaagagccacgcccctcgctggcgccccagagccgtggtgcttgccaagggctgtgcggagctggtgctgcctgaaaccccagaccgagaagttgatgctcggcccacgccgttagctcgtgtgcgtgtagtctgtgcgtgagactccttcgattgtagctctgtgctgtcggattggaacagtagttcccgccaagtcctcccaccaccgcggcctcggaggcctgggccgtggccagataggagtttgcatcatccacgtggctccgttgcctctgcattgcgccctgtcctgtcatgtgtcctcaccggggtatcggccgtcactcagctctcctgtgcccctgcgtctcaccctaggcgggctgggcggggcaggcctcctttgttctccacaatctactgtctccgagtgtacacgttgcgctgtttgtgtttgatccccctgacttgtagccagcttgtgtaagatcccttgcagaacgagaaagttaaaaacaagcccacccagtactcacaccatcaagtctgttatagagtgtacgactgtattaacacggaggcctgcctggctacttttttaacatattgttaagtaatattaaaatcatgtctttctttttgaaagatggaatacattagtaaaaaaaaaaaaaa

SEQ ID NO: 51406 - DNA, 729 bp, Homo Sapiens
acatgctattattagaaggatctagataatttgtcctctgagtcatacttgacattgtacctgtggcacatcaatccgcactgtttgatactctggctgaatctcagctttcaccaacattgtcaaaggaccttttttagtgcccagccatgcctaagagtgtgtcatctgaagagggaagcatctgcatactgctgtcctgattgctcagtcctcactacctaccagacccgttggtaaggtacaaaagtacatgcttggaaaagcagtctgcaccaccagtgataagctgtgacagagtggaacagcctcaatgaaatgaaggaaggattgctacagtggcattaaggatggtctcttaatcctgtgttaaccactagattaactttacaatcaactcaaaatccttcaaaggctttccactttctttagtggcattcagaccccctctagtttgacccctacctccaacttgaacctctgttactcttccgtatgaacattttcctctagccctggactactagtaccgaagtcactagtcacataggactcatttgaaatatgactagtctcaattgagatgtaatgtaagtgtaaaatacacagcagatttctaagacagcacacaaaatgtaaaatatgtcaaaaatatttgatactgattacatgttgaaatatatgtgttggggtaaataaaatgcattaaagttaaaaaaaaaaaaaaag

SEQ ID NO: 51407 - DNA, 645 bp, Homo Sapiens
cgtggctggagactgtctaccaacattccttccttcaaactagacaaaccctcctctgccacccccagcaaattctcagaggtttccaagctgtagaaaaaggaaggaaggaaggacggcattcacatagctttactttccgcttcaaaatgtcttaagtagcatatgttgttttactgcttttaactttggtgagttctaatttcagaacgttttgttcactgagcaaaaaaacagatgaaacaaccacaggccaggacttcaagtgaggaggacgcctttgtttgccgtggttggtgggagcacacgccggagcccggtaacgtgcctgtgggagtgaccaagggccacccgcccaagggaaaatgttcattcttcatcagctttgctaattctgctttgaggcagtaaaatgcaaaagaccatagaatttgtatttctttttttaaaatacaatttataacattatattttgtactctttatattagaatttgtaactagattgatgtatttaactatttctgaaaaagtaattcaatgttttagttgtgtgataaaaatatttagataaaacatattcattctattggaatttgaaatacataaaaacatcttggagttctaaaaaaaaaaaaaaaaaaca

SEQ ID NO: 51408 - DNA, 975 bp, Homo Sapiens
ggacgcgtgggctgagatagaaggggaggggttacagactgtggtgcctacccccatcactgcttccctcagccataacaggataagggagatcttgaaggcatctcgaaagttgcaaggtgatccagatttgccgatgtcttttactttggccatagtggagtctgattctacaatagtctattataaacttactgatggatttatgctgccagaccctcagaatatttctcttagaagatgacatccatgtttcctgatgcttgttttattcatacaagattggatttgagacccatcagactgcttcatcttttatctcagaaatagggttgacgtacatagtgagggttgacttccccattccataaggttttcattctgaagagtaaaacttccccaggtagaagactttctccttcttaaaaaatatagggtgatttctttaaaactttgttatctagagacagtttaattacagttatatacaggtttatgcctaggatgtattcagatgggtgggacctgtgtgctgcttttgtcatcccacactcaaagttgtctctttgtttcttgctgccactgccagctcattgttgagactgccatttctttctcttactcagctctccccagtgccttttggccactgcagctaccgtagaatggcattttatatgtaccttgtcacccacttctgtttactttttcctctcccggaaaaagtaaaagatttctttcaattggtcttcccattgcagttactgttatttctcttttttggttaacttttaatccaaactccaaatatgttcatcccagagggtgtcttaaggtaactttacgtggctttaggtaaacgggaacccgaaaaactgtttacccttccaagaaagttctgggggcctaatcctctttccatttccttaacccccatattccataagcctttggaataattttcccaaccaggga

SEQ ID NO: 51409 - DNA, 660 bp, Homo Sapiens
ggcattatttcaacacctcctgtgaagaaagtacttttctggcatagctaccgtgagttctcagcaggaacttcccagcgatgataatgtacatgaaattagccacgtaacaagagtctatttgccttgaaaaaacaattatccttgaacttcctccagctatgcagggattctcattaaagagctgatctgcatctgtttatccattttagtagcttttaaatatgattttatgtgaagtgccatttctttattctactaaagagagacagcagaaataaagatcagaagcaaatgtgagcaaatctgttttactgttaacttcaattatgaacttgaaattgtgccacatgactttttcctctaaaaactggatcctagtgttttaattacctgtgtgcagctattttaaatagcattttacttgaataatatgtatgttgtcattgtttcatgctatactttgtgggataaaacttgggaatgagtgtggtaagaaatttataaagtttgcttttaaaacgtggacataactcatttttctagtttttgacaattgtgtgtttagtgtctagtctgcagagagctgtgtgattaataaaccgtggaattaacggaaaaaaaaaaaaaaaaaactttttggggcgtgggccttgggaa

SEQ ID NO: 51410 - DNA, 564 bp, Homo Sapiens
gagaagcgtgaactgcctgtgctgtggcaccagtgcctcctgactttggtccagcgctacaaggccgacttggccacagaccagaaagaggccctcttagaactgctccggctgcagccccatccacagctatcgcccgaaatcaggcgtgagcttcagagtgcagtcccccgcgatgtggaagatgttcccatcaccgtggagtgaggaaaacagtcagctgtcctggccaaaggggtttggaaggacaccaagacccccgttggtgactgaagatgacactgagctttaatggctgaagacccagatcagggcagtgacagatcacagggacatctgtggctcccagtccaggacaggaaggactgagggtctggctggttccctcttccattctaggcccttatccctgtttagttctgagagccaacttgagataccatatgctagcattcccagtccccagctggggcttggtgtgagtactttttctatggctattgtgtcaggtcactgtggataaaggcaaagacagatatttattgaaaaaaaaaaaaaaaaaaa

SEQ ID NO: 51411 - DNA, 707 bp, Homo Sapiens
gacatggccaaggtgcaccctgagcctgggacctgggacagcttcctggagaagttcatggtcggagaagtgtcctacggatcctggtaccagcacgtgcaggagtggtgggagctgagccgcacccaccctgttctctacctcttctatgaagacatgaaggagaaccccaaaagggagattcaaaagatcctggagtttgtggggcactccctgccagaggagaccgtggacttcatggttcagcacacgtcgttcaaggagatgaagaagaaccctatgaccaactacaccaccgtcccccaggagttcatggaccacagcatctcccccttcatgaggaacaggcatggctggggactggaagaccaccttcaccgtggcgcagaatgagcgcttcgatgcggactatgcggagaagatggcaggctgcagcctcagcttccgctctgagctgtgagaggggctcctggggtcactgcagagggagtgtgcgaatcaaacctgaccaagcggctcaagaataaaatatgaattgagggcctgggacggtaggtcatgtctgtaatcccagcaatttggaggctgaggtgggaggatcatttgagcccaggagttcgagaccaactgggcaacatagtgagattctggtcaccacacactcaactcacatcaaaccaatttttaacaaaacacaaacacaaaaa

SEQ ID NO: 51412 - DNA, 603 bp, Homo Sapiens
ttaaaaataaaaataattttcacatgattgctttaggaattttgaagtatccattcttttcactatggagtgttgaatatagaagattttttaatgaacaggcttgccctttgatgccaaaggcaaaaaataataataataacatttgcacgtgtgatcacagagcagctgtgaggcatcccgggggagcgcacgcagtggggatgtgattgctccactcaactattttatcacaaagtgttgtaaacatgggagatgaaagcttaactctctctacacccagctacagacccgcaatggccctaaaaatctggggtattcattgggtgggctgccatggaggaatttttggttttgtttttatttttatttgttgttctgtttacaaatcaggagagcccctgtttttatatgctaggaaggtccttgggataggccgaagaggtgtgcaaacgagcagtggaaggcccgggccctgtctctcaggaccacggcggcctgccccacacacagttctgcttctccctatctagaacgaggttttcctggcagattcctgccagactctgagtggagcccccccatgaccctataaaagggggc
